(19) United States
(12) Patent Application Publication
(10) Pub. No.: US 2008/0066199 A1
(43) Pub. Date: Mar. 13, 2008

(54) Nucleic acid molecules and other molecules associated with plants

(76) Inventors: Joseph R. Byrum, West Des Moines, IA (US); Gregory R. Heck, Crystal Lake Park, MO (US); Thomas J. La Rosa, Fenton, MO (US)

Correspondence Address: ARNOLD & PORTER, LLP, 555 TWELFTH STREET, N.W., ATTN: IP DOCKETING, WASHINGTON, DC, 20004, US

(21) Appl. No.: 11/976,766

(22) Filed: Oct. 26, 2007

Related U.S. Application Data
(63) Continuation of application No. 09/531,113, filed on Mar. 22, 2000.
Application No. 09/531,113 is a continuation-in-part of application No. 09/198,779, filed on Nov. 24, 1998, now abandoned.
(63) Continuation-in-part of application No. 09/206,040, filed on Dec. 4, 1998, now abandoned.
(63) Continuation-in-part of application No. 09/210,297, filed on Dec. 8, 1998, now abandoned.
Application No. 09/210,297 is a continuation-in-part of application No. 09/198,779, filed on Nov. 24, 1998, now abandoned.
(63) Continuation-in-part of application No. 09/229,413, filed on Jan. 12, 1999, now abandoned.
(63) Continuation-in-part of application No. 09/244,000, filed on Feb. 8, 1999, now abandoned.
(63) Continuation-in-part of application No. 09/252,974, filed on Feb. 19, 1999, now abandoned.
(63) Continuation-in-part of application No. 09/263,191, filed on Mar. 5, 1999, now abandoned.
(63) Continuation-in-part of application No. 09/283,466, filed on Apr. 2, 1999, now abandoned.
(63) Continuation-in-part of application No. 09/306,349, filed on May 10, 1999, now abandoned.
(63) Continuation-in-part of application No. 09/391,630, filed on Sep. 8, 1999, now abandoned.
(63) Continuation-in-part of application No. 09/440,687, filed on Nov. 16, 1999, now abandoned.
Application No. 09/263,191 is a continuation-in-part of application No. 09/199,129, filed on Nov. 24, 1998.
Application No. 09/199,129 is a continuation-in-part of application No. 09/198,779, filed on Nov. 24, 1998, now abandoned.
(63) Continuation-in-part of application No. 09/333,535, filed on Jun. 14, 1999, now abandoned.
Application No. 09/333,535 is a continuation-in-part of application No. 09/198,779, filed on Nov. 24, 1998, now abandoned.
Application No. 09/333,535 is a continuation-in-part of application No. 09/206,040, filed on Dec. 4, 1998, now abandoned.
Application No. 09/333,535 is a continuation-in-part of application No. 09/210,297, filed on Dec. 8, 1998, now abandoned.
Application No. 09/210,297 is a continuation-in-part of application No. 09/198,779, filed on Nov. 24, 1998, now abandoned.
Application No. 09/333,535 is a continuation-in-part of application No. 09/244,000, filed on Feb. 8, 1999, now abandoned.
Application No. 09/333,535 is a continuation-in-part of application No. 09/198,779, filed on Nov. 24, 1998, now abandoned.
Application No. 09/333,535 is a continuation-in-part of application No. 09/198,779, filed on Nov. 24, 1998, now abandoned.
Application No. 09/333,535 is a continuation-in-part of application No. 09/263,191, filed on Mar. 5, 1999, now abandoned.
Application No. 09/333,535 is a continuation-in-part of application No. 09/283,466, filed on Apr. 2, 1999, now abandoned.
Application No. 09/333,535 is a continuation-in-part of application No. 09/306,349, filed on May 10, 1999, now abandoned.
Application No. 09/333,535 is a continuation-in-part of application No. 09/199,129, filed on Nov. 24, 1998.
Application No. 09/333,535 is a continuation-in-part of application No. 60/089,524, filed on Jun. 16, 1998.
(60) Provisional application No. 60/067,000, filed on Nov. 24, 1997.
(60) Provisional application No. 60/066,873, filed on Nov. 25, 1997.
(60) Provisional application No. 60/069,472, filed on Dec. 9, 1997.
(60) Provisional application No. 60/074,201, filed on Feb. 10, 1998.
(60) Provisional application No. 60/074,282, filed on Feb. 10, 1998.
(60) Provisional application No. 60/074,280, filed on Feb. 10, 1998.
(60) Provisional application No. 60/074,281, filed on Feb. 10, 1998.
(60) Provisional application No. 60/074,566, filed on Feb. 12, 1998.
(60) Provisional application No. 60/074,567, filed on Feb. 12, 1998.
(60) Provisional application No. 60/074,565, filed on Feb. 12, 1998.
(60) Provisional application No. 60/075,462, filed on Feb. 19, 1998.
(60) Provisional application No. 60/074,789, filed on Feb. 19, 1998.
(60) Provisional application No. 60/075,459, filed on Feb. 19, 1998.
(60) Provisional application No. 60/075,461, filed on Feb. 19, 1998.
(60) Provisional application No. 60/075,464, filed on Feb. 19, 1998.
(60) Provisional application No. 60/075,460, filed on Feb. 19, 1998.
(60) Provisional application No. 60/075,463, filed on Feb. 19, 1998.
(60) Provisional application No. 60/077,231, filed on Mar. 9, 1998.
(60) Provisional application No. 60/077,229, filed on Mar. 9, 1998.
(60) Provisional application No. 60/077,230, filed on Mar. 9, 1998.
(60) Provisional application No. 60/078,031, filed on Mar. 16, 1998.
(60) Provisional application No. 60/078,368, filed on Mar. 18, 1998.
(60) Provisional application No. 60/080,844, filed on Apr. 7, 1998.
(60) Provisional application No. 60/083,067, filed on Apr. 27, 1998.
(60) Provisional application No. 60/083,386, filed on Apr. 29, 1998.
(60) Provisional application No. 60/083,387, filed on Apr. 29, 1998.
(60) Provisional application No. 60/083,388, filed on Apr. 29, 1998.
(60) Provisional application No. 60/083,389, filed on Apr. 29, 1998.
(60) Provisional application No. 60/084,684, filed on May 8, 1998.
(60) Provisional application No. 60/085,222, filed on May 13, 1998.
(60) Provisional application No. 60/085,223, filed on May 13, 1998.
(60) Provisional application No. 60/085,224, filed on May 13, 1998.
(60) Provisional application No. 60/085,245, filed on May 13, 1998.
(60) Provisional application No. 60/086,183, filed on May 21, 1998.
(60) Provisional application No. 60/086,184, filed on May 21, 1998.
(60) Provisional application No. 60/086,185, filed on May 21, 1998.
(60) Provisional application No. 60/086,186, filed on May 21, 1998.
(60) Provisional application No. 60/086,187, filed on May 21, 1998.
(60) Provisional application No. 60/086,188, filed on May 21, 1998.
(60) Provisional application No. 60/086,339, filed on May 21, 1998.
(60) Provisional application No. 60/089,524, filed on Jun. 16, 1998.
(60) Provisional application No. 60/089,810, filed on Jun. 18, 1998.
(60) Provisional application No. 60/089,814, filed on Jun. 18, 1998.
(60) Provisional application No. 60/091,247, filed on Jun. 30, 1998.
(60) Provisional application No. 60/092,036, filed on Jul. 8, 1998.
(60) Provisional application No. 60/099,667, filed on Sep. 9, 1998.
(60) Provisional application No. 60/099,668, filed on Sep. 9, 1998.
(60) Provisional application No. 60/099,670, filed on Sep. 9, 1998.
(60) Provisional application No. 60/099,697, filed on Sep. 9, 1998.
(60) Provisional application No. 60/100,672, filed on Sep. 16, 1998.
(60) Provisional application No. 60/100,673, filed on Sep. 16, 1998.
(60) Provisional application No. 60/100,674, filed on Sep. 16, 1998.
(60) Provisional application No. 60/101,130, filed on Sep. 21, 1998.
(60) Provisional application No. 60/101,132, filed on Sep. 21, 1998.
(60) Provisional application No. 60/108,996, filed on Nov. 18, 1998.
(60) Provisional application No. 60/109,018, filed on Nov. 19, 1998.
(60) Provisional application No. 60/100,674, filed on Sep. 16, 1998.
(60) Provisional application No. 60/075,464, filed on Feb. 19, 1998.
(60) Provisional application No. 60/083,386, filed on Apr. 29, 1998.
(60) Provisional application No. 60/086,339, filed on May 21, 1998.
(60) Provisional application No. 60/091,247, filed on Jun. 30, 1998.
(60) Provisional application No. 60/071,479, filed on Jan. 13, 1998.
(60) Provisional application No. 60/085,533, filed on May 15, 1998.
(60) Provisional application No. 60/089,806, filed on Jun. 18, 1998.
(60) Provisional application No. 60/089,807, filed on Jun. 18, 1998.
(60) Provisional application No. 60/089,808, filed on Jun. 18, 1998.
(60) Provisional application No. 60/089,811, filed on Jun. 18, 1998.
(60) Provisional application No. 60/089,812, filed on Jun. 18, 1998.
(60) Provisional application No. 60/089,813, filed on Jun. 18, 1998.
(60) Provisional application No. 60/091,247, filed on Jun. 30, 1998.
(60) Provisional application No. 60/091,405, filed on Jun. 30, 1998.
(60) Provisional application No. 60/099,697, filed on Sep. 9, 1998.
(60) Provisional application No. 60/100,963, filed on Sep. 17, 1998.
(60) Provisional application No. 60/101,343, filed on Sep. 22, 1998.
(60) Provisional application No. 60/101,344, filed on Sep. 22, 1998.
(60) Provisional application No. 60/101,347, filed on Sep. 22, 1998.
(60) Provisional application No. 60/101,508, filed on Sep. 22, 1998.
(60) Provisional application No. 60/101,707, filed on Sep. 25, 1998.
(60) Provisional application No. 60/104,124, filed on Oct. 13, 1998.
(60) Provisional application No. 60/104,126, filed on Oct. 13, 1998.
(60) Provisional application No. 60/104,127, filed on Oct. 13, 1998.
(60) Provisional application No. 60/104,128, filed on Oct. 13, 1998.
(60) Provisional application No. 60/111,981, filed on Dec. 11, 1998.
(60) Provisional application No. 60/074,201, filed on Feb. 10, 1998.
(60) Provisional application No. 60/074,280, filed on Feb. 10, 1998.
(60) Provisional application No. 60/074,281, filed on Feb. 10, 1998.
(60) Provisional application No. 60/074,282, filed on Feb. 10, 1998.
(60) Provisional application No. 60/074,565, filed on Feb. 12, 1998.
(60) Provisional application No. 60/074,566, filed on Feb. 12, 1998.
(60) Provisional application No. 60/074,567, filed on Feb. 12, 1998.
(60) Provisional application No. 60/075,462, filed on Feb. 19, 1998.
(60) Provisional application No. 60/074,789, filed on Feb. 19, 1998.
(60) Provisional application No. 60/075,459, filed on Feb. 19, 1998.
(60) Provisional application No. 60/075,460, filed on Feb. 19, 1998.
(60) Provisional application No. 60/075,461, filed on Feb. 19, 1998.
(60) Provisional application No. 60/075,463, filed on Feb. 19, 1998.
(60) Provisional application No. 60/075,464, filed on Feb. 19, 1998.
(60) Provisional application No. 60/086,183, filed on May 21, 1998.
(60) Provisional application No. 60/086,188, filed on May 21, 1998.
(60) Provisional application No. 60/076,709, filed on Jun. 9, 1998.
(60) Provisional application No. 60/084,684, filed on May 8, 1998.
(60) Provisional application No. 60/100,674, filed on Sep. 16, 1998.
(60) Provisional application No. 60/074,201, filed on Feb. 10, 1998.
(60) Provisional application No. 60/074,280, filed on Feb. 10, 1998.
(60) Provisional application No. 60/074,281, filed on Feb. 10, 1998.
(60) Provisional application No. 60/074,282, filed on Feb. 10, 1998.
(60) Provisional application No. 60/074,565, filed on Feb. 12, 1998.
(60) Provisional application No. 60/074,566, filed on Feb. 12, 1998.
(60) Provisional application No. 60/074,567, filed on Feb. 12, 1998.
(60) Provisional application No. 60/074,789, filed on Feb. 19, 1998.
(60) Provisional application No. 60/075,459, filed on Feb. 19, 1998.
(60) Provisional application No. 60/075,460, filed on Feb. 19, 1998.
(60) Provisional application No. 60/075,461, filed on Feb. 19, 1998.
(60) Provisional application No. 60/075,463, filed on Feb. 19, 1998.
(60) Provisional application No. 60/075,464, filed on Feb. 19, 1998.
(60) Provisional application No. 60/086,183, filed on May 21, 1998.
(60) Provisional application No. 60/086,188, filed on May 21, 1998.
(60) Provisional application No. 60/067,000, filed on Nov. 24, 1997.
(60) Provisional application No. 60/069,472, filed on Dec. 9, 1997.
(60) Provisional application No. 60/074,201, filed on Feb. 10, 1998.
(60) Provisional application No. 60/074,280, filed on Feb. 10, 1998.
(60) Provisional application No. 60/074,281, filed on Feb. 10, 1998.
(60) Provisional application No. 60/074,282, filed on Feb. 10, 1998.
(60) Provisional application No. 60/074,565, filed on Feb. 12, 1998.
(60) Provisional application No. 60/074,566, filed on Feb. 12, 1998.
(60) Provisional application No. 60/074,567, filed on Feb. 12, 1998.
(60) Provisional application No. 60/074,789, filed on Feb. 19, 1998.
(60) Provisional application No. 60/075,459, filed on Feb. 19, 1998.
(60) Provisional application No. 60/075,460, filed on Feb. 19, 1998.
(60) Provisional application No. 60/075,461, filed on Feb. 19, 1998.
(60) Provisional application No. 60/075,462, filed on Feb. 19, 1998.
(60) Provisional application No. 60/075,463, filed on Feb. 19, 1998.
(60) Provisional application No. 60/075,464, filed on Feb. 19, 1998.
(60) Provisional application No. 60/077,229, filed on Mar. 9, 1998.
(60) Provisional application No. 60/077,230, filed on Mar. 9, 1998.
(60) Provisional application No. 60/077,231, filed on Mar. 9, 1998.
(60) Provisional application No. 60/078,368, filed on Mar. 18, 1998.
(60) Provisional application No. 60/080,844, filed on Apr. 7, 1998.
(60) Provisional application No. 60/083,067, filed on Apr. 27, 1998.
(60) Provisional application No. 60/083,386, filed on Apr. 29, 1998.
(60) Provisional application No. 60/083,387, filed on Apr. 29, 1998.
(60) Provisional application No. 60/083,388, filed on Apr. 29, 1998.
(60) Provisional application No. 60/083,389, filed on Apr. 29, 1998.
(60) Provisional application No. 60/085,222, filed on May 13, 1998.
(60) Provisional application No. 60/085,223, filed on May 13, 1998.
(60) Provisional application No. 60/085,224, filed on May 13, 1998.
(60) Provisional application No. 60/086,183, filed on May 21, 1998.
(60) Provisional application No. 60/086,184, filed on May 21, 1998.
(60) Provisional application No. 60/086,185, filed on May 21, 1998.
(60) Provisional application No. 60/086,186, filed on May 21, 1998.
(60) Provisional application No. 60/086,187, filed on May 21, 1998.
(60) Provisional application No. 60/086,188, filed on May 21, 1998.
(60) Provisional application No. 60/089,524, filed on Jun. 16, 1998.
(60) Provisional application No. 60/089,793, filed on Jun. 18, 1998.
(60) Provisional application No. 60/089,810, filed on Jun. 18, 1998.
(60) Provisional application No. 60/089,814, filed on Jun. 18, 1998.
(60) Provisional application No. 60/099,668, filed on Sep. 9, 1998.
(60) Provisional application No. 60/099,670, filed on Sep. 9, 1998.
(60) Provisional application No. 60/099,697, filed on Sep. 9, 1998.
(60) Provisional application No. 60/100,672, filed on Sep. 16, 1998.
(60) Provisional application No. 60/100,673, filed on Sep. 16, 1998.
(60) Provisional application No. 60/100,674, filed on Sep. 16, 1998.
(60) Provisional application No. 60/101,130, filed on Sep. 21, 1998.
(60) Provisional application No. 60/101,131, filed on Sep. 21, 1998.
(60) Provisional application No. 60/101,132, filed on Sep. 21, 1998.
(60) Provisional application No. 60/108,996, filed on Nov. 18, 1998.
(60) Provisional application No. 60/109,018, filed on Nov. 19, 1998.
(60) Provisional application No. 60/089,793, filed on Jun. 18, 1998.
(60) Provisional application No. 60/089,810, filed on Jun. 18, 1998.
(60) Provisional application No. 60/089,814, filed on Jun. 18, 1998.
(60) Provisional application No. 60/099,668, filed on Sep. 9, 1998.
(60) Provisional application No. 60/099,670, filed on Sep. 9, 1998.
(60) Provisional application No. 60/099,697, filed on Sep. 9, 1998.
(60) Provisional application No. 60/100,672, filed on Sep. 16, 1998.
(60) Provisional application No. 60/100,673, filed on Sep. 16, 1998.
(60) Provisional application No. 60/100,674, filed on Sep. 16, 1998.
(60) Provisional application No. 60/101,130, filed on Sep. 21, 1998.
(60) Provisional application No. 60/101,131, filed on Sep. 21, 1998.
(60) Provisional application No. 60/101,132, filed on Sep. 21, 1998.
(60) Provisional application No. 60/108,996, filed on Nov. 18, 1998.
(60) Provisional application No. 60/109,018, filed on Nov. 19, 1998.
(60) Provisional application No. 60/111,981, filed on Dec. 11, 1998.
(60) Provisional application No. 60/112,221, filed on Dec. 14, 1998.
(60) Provisional application No. 60/112,229, filed on Dec. 14, 1998.
(60) Provisional application No. 60/112,808, filed on Dec. 18, 1998.
(60) Provisional application No. 60/113,224, filed on Dec. 22, 1998.
(60) Provisional application No. 60/125,816, filed on Mar. 23, 1999.
(60) Provisional application No. 60/125,817, filed on Mar. 23, 1999.
(60) Provisional application No. 60/125,818, filed on Mar. 23, 1999.
(60) Provisional application No. 60/130,174, filed on Apr. 20, 1999.
(60) Provisional application No. 60/130,464, filed on Apr. 22, 1999.
(60) Provisional application No. 60/133,690, filed on May 10, 1999.
(60) Provisional application No. 60/133,691, filed on May 10, 1999.
(60) Provisional application No. 60/133,692, filed on May 10, 1999.

(51) Int. Cl. C12N 15/09; A01H 1/00; A01H 5/00; A01H 5/10; C07H 21/00; C07K 2/00

(52) U.S. Cl. 800/270; 530/300; 536/23.1; 536/23.6; 800/267; 800/287; 800/298; 800/312; 800/314; 800/320.1

(57) ABSTRACT

Expressed Sequence Tags (ESTs) isolated from soybean are disclosed. The ESTs provide a unique molecular tool for the targeting and isolation of novel genes for plant protection and improvement. The disclosed ESTs have utility in the development of new strategies for understanding critical plant developmental and metabolic pathways. The disclosed ESTs have particular utility in isolating genes and promoters, identifying and mapping the genes involved in developmental and metabolic pathways, and determining gene function. Sequence homology analyses using the ESTs provided in the present invention, will result in more efficient gene screening for desirable agronomic traits. An expanding database of these select pieces of the plant genomics puzzle will quickly expand the knowledge necessary for subsequent functional validation, a key limitation in current plant biotechnology efforts.

### INCORPORATION OF SEQUENCE LISTING

[0001] A copy of the Sequence Listing in compute readable form containing the file named pa_{—}00268.rpt, which is 27,708,052 bytes in size (measured in MS-DOS) and created on Jan. 8, 2003, is herein incorporated by reference.

### FIELD OF THE INVENTION

[0002] The present invention is in the field of plant biochemistry. More specifically the invention relates to nucleic acid molecules that encode proteins and fragments of proteins produced in plant cells, in particular, soybean plants. The invention also relates to proteins and fragments of proteins so encoded and antibodies capable of binding the proteins. The invention also relates to methods of using the nucleic acid molecules, proteins and fragments of proteins.

### BACKGROUND OF THE INVENTION

1. Expressed Sequence Tag Nucleic Acid Molecules

[0003] Expressed sequence tags, or ESTs, are short sequences of randomly selected clones from a eDNA (or complementary DNA) library which are representative of the eDNA inserts of these randomly selected clones. McCombie, et al., Nature Genetics, 1: 124-130 (1992); Kurata, et al., Nature Genetics, 8: 365-372 (1994); Okubo, et al., Nature Genetics, 2: 173-179 (1992), all of which references are incorporated herein in their entirety.

[0004] Using conventional methodologies, cDNA libraries can be constructed from the mRNA (messenger RNA) of a given tissue or organism using poly dT primers and reverse transcriptase (Efstratiadis, et al., Cell 7:279-288 (1976), the entirety of which is herein incorporated by reference; Higuchi, et al., Proc. Natl. Acad. Sci. (U.S.A.) 73:3146-3150 (1976), the entirety of which is herein incorporated by reference; Maniatis, et al., Cell 8:163 (1976) the entirety of which is herein incorporated by reference; Land, et al., Nucleic Acids Res. 9:2251-2266 (1981), the entirety of which is herein incorporated by reference; Okayama, et al., Mol. Cell. Biol. 2:161-170 (1982), the entirety of which is herein incorporated by reference; Gubler, et al., Gene 25:263 (1983), the entirety of which is herein incorporated by reference).

[0005] Several methods may be employed to obtain full-length cDNA constructs. For example, terminal transferase can be used to add homopolymeric tails of dC residues to the free 3′ hydroxyl groups (Land, et al., Nucleic Acids Res. 9:2251-2266 (1981), the entirety of which is herein incorporated by reference). This tail can then be hybridized by a poly dG oligo which can act as a primer for the synthesis of full length second strand cDNA. Okayama and Berg, report a method for obtaining full length cDNA constructs. This method has been simplified by using synthetic primer-adapters that have both homopolymeric tails for priming the synthesis of the first and second strands and restriction sites for cloning into plasmids (Coleclough, et al., Gene 34:305-314 (1985), the entirety of which is herein incorporated by reference) and bacteriophage vectors (Krawinkel, et al., Nucleic Acids Res. 14:1913 (1986), the entirety of which is herein incorporated by reference; and Han, et al., Nucleic Acids Res. 15:6304 (1987), the entirety of which is herein incorporated by reference).

[0006] These strategies have been coupled with additional strategies for isolating rare mRNA populations. For example, a typical mammalian cell contains between 10,000 and 30,000 different mRNA sequences. Davidson, Gene Activity in Early Development, 2nd ed., Academic Press, New York (1976). The number of clones required to achieve a given probability that a low-abundance mRNA will be present in a eDNA library is N=(ln(1−P))/(ln(1−1/n)) where N is the number of clones required, P is the probability desired, and 1/n is the fractional proportion of the total mRNA that is represented by a single rare mRNA. (Sambrook, et al., Molecular Cloning: A Laboratory Manual, 2nd ed., Cold Spring Harbor Laboratory Press (1989), the entirety of which is herein incorporated by reference.).

[0007] A method to enrich preparations of mRNA for sequences of interest is to fractionate by size. One such method is to fractionate by electrophoresis through an agarose gel (Pennica, et al., Nature 301:214-221 (1983), the entirety of which is herein incorporated by reference). Another such method employs sucrose gradient centrifugation in the presence of an agent, such as methylmercuric hydroxide, that denatures secondary structure in RNA (Schweinfest, et al., Proc. Natl. Acad. Sci. (U.S.A.) 79:4997-5000 (1982), the entirety of which is herein incorporated by reference).

[0008] A frequently adopted method is to construct equalized or normalized cDNA libraries (Ko, Nucleic Acids Res. 18:5705-5711 (1990), the entirety of which is herein incorporated by reference; Patanjali, S. R. et al., Proc. Natl. Acad. Sci. (U.S.A.) 88:1943-1947 (1991), the entirety of which is herein incorporated by reference). Typically, the cDNA population is normalized by subtractive hybridization. Schmid, et al., J. Neurochem. 48:307-312 (1987) the entirety of which is herein incorporated by reference; Fargnoli, et al., Anal. Biochem. 187:364-373 (1990) the entirety of which is herein incorporated by reference; Travis, et al., Proc. Natl. Acad: Sci (U.S.A.) 85:1696-1700 (1988) the entirety of which is herein incorporated by reference; Kato, Eur. J. Neurosci. 2:704 (1990); and Schweinfest, et al., Genet. Anal. Tech. Appl. 7:64 (1990), the entirety of which is herein incorporated by reference). Subtraction represents another method for reducing the population of certain sequences in the cDNA library. Swaroop, et al., Nucleic Acids Res. 19:1954 (1991), the entirety of which is herein incorporated by reference).

[0009] ESTs can be sequenced by a number of methods. Two basic methods may be used for DNA sequencing, the chain termination method of Sanger et al., Proc. Natl. Acad. Sci. (U.S.A.) 74: 5463-5467 (1977), the entirety of which is herein incorporated by reference and the chemical degradation method of Maxam and Gilbert, Proc. Nat. Acad. Sci. (U.S.A.) 74: 560-564 (1977), the entirety of which is herein incorporated by reference. Automation and advances in technology such as the replacement of radioisotopes with fluorescence-based sequencing have reduced the effort required to sequence DNA (Craxton, Methods, 2: 20-26 (1991), the entirety of which is herein incorporated by reference; Ju et al., Proc. Natl. Acad. Sci. (U.S.A.) 92: 4347-4351 (1995), the entirety of which is herein incorporated by reference; Tabor and Richardson, Proc. Natl. Acad. Sci. (U.S.A.) 92: 6339-6343 (1995), the entirety of which is herein incorporated by reference). Automated sequencers are available from, for example, Pharmacia Biotech, Inc., Piscataway, N.J. (Pharmacia ALF), LI-COR, Inc., Lincoln, Nebr. (LI-COR 4,000) and Millipore, Bedford, Mass. (Millipore BaseStation).

[0010] In addition, advances in capillary gel electrophoresis have also reduced the effort required to sequence DNA and such advances provide a rapid high resolution approach for sequencing DNA samples (Swerdlow and Gesteland, Nucleic Acids Res. 18:1415-1419 (1990); Smith, Nature 349:812-813 (1991); Luckey et al., Methods Enzymol. 218:154-172 (1993); Lu et al., J. Chromatog. A. 680:497-501 (1994); Carson et al., Anal. Chem. 65:3219-3226 (1993); Huang et al., Anal. Chem. 64:2149-2154 (1992); Kheterpal et al., Electrophoresis 17:1852-1859 (1996); Quesada and Zhang, Electrophoresis 17:1841-1851 (1996); Baba, Yakugaku Zasshi 117:265-281 (1997), all of which are herein incorporated by reference in their entirety).

[0011] ESTs longer than 150 bases have been found to be useful for similarity searches and mapping. (Adams, et al., Science 252:1651-1656 (1991), herein incorporated by reference.) EST sequences normally range from 150-450 bases. This is the length of sequence information that is routinely and reliably generated using single run sequence data. Typically, only single run sequence data is obtained from the cDNA library, Adams, et al., Science 252:1651-1656 (1991). Automated single run sequencing typically results in an approximately 2-3% error or base ambiguity rate. (Boguski, et al., Nature Genetics, 4:332-333 (1993), the entirety of which is herein incorporated by reference).

[0012] EST databases have been constructed or partially constructed from, for example, C. elegans (McCombrie, et al., Nature Genetics 1: 124-131 (1992), human liver cell line HepG2 (Okubo, et al., Nature Genetics 2:173-179 (1992)), human brain RNA (Adams, et al., Science 252:1651-1656 (1991); Adams, et al., Nature 355:632-635 (1992)), Arabidopsis, (Newman, et al., Plant Physiol. 106:1241-1255 (1994)); and rice (Kurata, et al., Nature Genetics 8:365-372 (1994).

II. Sequence Comparisons

[0013] A characteristic feature of a protein or DNA sequence is that it can be compared with other known protein or DNA sequences. Sequence comparisons can be undertaken by determining the similarity of the test or query sequence with sequences in publicly available or propriety databases (“similarity analysis”) or by searching for certain motifs (“intrinsic sequence analysis”)(e.g. cis elements)(Coulson, Trends in Biotechnology, 12: 76-80 (1994), the entirety of which is herein incorporated by reference; Birren, et al., Genome Analysis, 1: 543-559 (1997), the entirety of which is herein incorporated by reference).

[0014] Similarity analysis includes database search and alignment. Examples of public databases include the DNA Database of Japan (DDBJ)(http://www.ddbj.nig.acjp/); Genebank (http)://www.ncbi.nlm.nih.gov/web/Genbank/Index.htlm); and the European Molecular Biology Laboratory Nucleic Acid Sequence Database (EMBL) (http://www.ebi.ac.uk/ebi_docs/embi_db.html). A number of different search algorithms have been developed, one example of which are the suite of programs referred to as BLAST programs. There are five implementations of BLAST, three designed for nucleotide sequences queries (BLASTN, BLASTX, and TBLASTX) and two designed for protein sequence queries (BLASTP and TBLASTN) (Coulson, Trends in Biotechnology, 12: 76-80 (1994); Birren, et al., Genome Analysis, 1: 543-559 (1997)).

[0015] BLASTN takes a nucleotide sequence (the query sequence) and its reverse complement and searches them against a nucleotide sequence database. BLASTN was designed for speed, not maximum sensitivity, and may not find distantly related coding sequences. BLASTX takes a nucleotide sequence, translates it in three forward reading frames and three reverse complement reading frames, and then compares the six translations against a protein sequence database. BLASTX is useful for sensitive analysis of preliminary (single-pass) sequence data and is tolerant of sequencing errors (Gish and States, Nature Genetics, 3: 266-272 (1993), the entirety of which is herein incorporated by reference). BLASTN and BLASTX may be used in concert for analyzing EST data (Coulson, Trends in Biotechnology, 12: 76-80 (1994); Birren, et al., Genome Analysis, 1: 543-559 (1997).

[0016] Given a coding nucleotide sequence and the protein it encodes, it is often preferable to use the protein as the query sequence to search a database because of the greatly increased sensitivity to detect more subtle relationships. This is due to the larger alphabet of proteins (20 amino acids) compared with the alphabet of nucleic acid sequences (4 bases), where it is far easier to obtain a match by chance. In addition, with nucleotide alignments, only a match (positive score) or a mismatch (negative score) is obtained, but with proteins, the presence of conservative amino acid substitutions can be taken into account. Here, a mismatch may yield a positive score if the non-identical residue has physical/chemical properties similar to the one it replaced. Various scoring matrices are used to supply the substitution scores of all possible amino acid pairs. A general purpose scoring system is the BLOSUM62 matrix (Henikoff and Henikoff, Proteins, 17: 49-61 (1993), the entirety of which is herein incorporated by reference), which is currently the default choice for BLAST programs. BLOSUM62 is tailored for alignments of moderately diverged sequences and thus may not yield the best results under all conditions. Altschul, J. Mol. Biol. 36: 290-300 (1993), the entirety of which is herein incorporated by reference, uses a combination of three matrices to cover all contingencies. This may improve sensitivity, but at the expense of slower searches. In practice, a single BLOSUM62 matrix is often used but others (PAM40 and PAM250) may be attempted when additional analysis is necessary. Low PAM matrices are directed at detecting very strong but localized sequence similarities, whereas high PAM matrices are directed at detecting long but weak alignments between very distantly related sequences.

[0017] Homologues in other organisms are available that can be used for comparative sequence analysis. Multiple alignments are performed to study similarities and differences in a group of related sequences. CLUSTAL W is a multiple sequence alignment package available that performs progressive multiple sequence alignments based on the method of Feng and Doolittle, J. Mol. Evol. 25: 351-360 (1987), the entirety of which is herein incorporated by reference. Each pair of sequences is aligned and the distance between each pair is calculated; from this distance matrix, a guide tree is calculated, and all of the sequences are progressively aligned based on this tree. A feature of the program is its sensitivity to the effect of gaps on the alignment; gap penalties are varied to encourage the insertion of gaps in probable loop regions instead of in the middle of structured regions. Users can specify gap penalties, choose between a number of scoring matrices, or supply their own scoring matrix for both the pairwise alignments and the multiple alignments. CLUSTAL W for UNIX and VMS systems is available at: ftp.ebi.ac.uk. Another program is MACAW (Schuler et al., Proteins, Struct. Func. Genet, 9:180-190 (1991), the entirety of which is herein incorporated by reference, for which both Macintosh and Microsoft Windows versions are available. MACAW uses a graphical interface, provides a choice of several alignment algorithms, and is available by anonymous ftp at: ncbi.nlm.nih.gov (directory/pub/macaw).

[0018] Sequence motifs are derived from multiple alignments and can be used to examine individual sequences or an entire database for subtle patterns. With motifs, it is sometimes possible to detect distant relationships that may not be demonstrable based on comparisons of primary sequences alone. Currently, the largest collection of sequence motifs in the world is PROSITE (Bairoch and Bucher, Nucleic Acid Research, 22: 3583-3589 (1994), the entirety of which is herein incorporated by reference.) PROSITE may be accessed via either the ExPASy server on the World Wide Web or anonymous ftp site. Many commercial sequence analysis packages also provide search programs that use PROSITE data.

[0019] A resource for searching protein motifs is the BLOCKS E-mail server developed by S. Henikoff, Trends Biochem Sci., 18:267-268 (1993), the entirety of which is herein incorporated by reference; Henikoff and Henikoff, Nucleic Acid Research, 19:6565-6572 (1991), the entirety of which is herein incorporated by reference; Henikoff and Henikoff, Proteins, 17: 49-61 (1993). BLOCKS searches a protein or nucleotide sequence against a database of protein motifs or “blocks.” Blocks are defined as short, ungapped multiple alignments that represent highly conserved protein patterns. The blocks themselves are derived from entries in PROSITE as well as other sources. Either a protein or nucleotide query can be submitted to the BLOCKS server; if a nucleotide sequence is submitted, the sequence is translated in all six reading frames and motifs are sought in these conceptual translations. Once the search is completed, the server will return a ranked list of significant matches, along with an alignment of the query sequence to the matched BLOCKS entries.

[0020] Conserved protein domains can be represented by two-dimensional matrices, which measure either the frequency or probability of the occurrences of each amino acid residue and deletions or insertions in each position of the domain. This type of model, when used to search against protein databases, is sensitive and usually yields more accurate results than simple motif searches. Two popular implementations of this approach are profile searches (such as GCG program ProfileSearch) and Hidden Markov Models (HMMs)(Krough et al., J. Mol. Biol. 235:1501-1531 (1994); Eddy, Current Opinion in Structural Biology 6:361-365 (1996), both of which are herein incorporated by reference in their entirety). In both cases, a large number of common protein domains have been converted into profiles, as present in the PROSITE library, or HHM models, as in the Pfam protein domain library (Sonnhammer et al., Proteins 28:405-420 (1997), the entirety of which is herein incorporated by reference). Pfam contains more than 500 HMM models for enzymes, transcription factors, signal transduction molecules, and structural proteins. Protein databases can be queried with these profiles or HMM models, which will identify proteins containing the domain of interest. For example, HMMSW or HMMFS, two programs in a public domain package called HMMER (Sonnhammer et al., Proteins 28:405-420 (1997)) can be used.

[0021] PROSITE and BLOCKS represent collected families of protein motifs. Thus, searching these databases entails submitting a single sequence to determine whether or not that sequence is similar to the members of an established family. Programs working in the opposite direction compare a collection of sequences with individual entries in the protein databases. An example of such a program is the Motif Search Tool, or MoST (Tatusov et al. Proc. Natl. Acad. Sci. 91: 12091-12095 (1994), the entirety of which is herein incorporated by reference.) On the basis of an aligned set of input sequences, a weight matrix is calculated by using one of four methods (selected by the user); a weight matrix is simply a representation, position by position in an alignment, of how likely a particular amino acid will appear. The calculated weight matrix is then used to search the databases. To increase sensitivity, newly found sequences are added to the original data set, the weight matrix is recalculated, and the search is performed again. This procedure continues until no new sequences are found.

### SUMMARY OF THE INVENTION

[0022] The present invention provides a substantially purified nucleic acid molecule that encodes a soybean protein or fragment thereof comprising a nucleic acid sequence selected from the group consisting of SEQ ID NO: 1 through SEQ ID NO: 48629.

[0023] The present invention also provides one or more substantially purified nucleic acid molecules comprising a nucleic acid sequence selected from the group consisting of SEQ ID NO: 1 through SEQ ID NO: 48629 or complements thereof.

[0024] The present invention also provides a substantially purified soybean protein or fragment thereof, wherein said soybean protein is encoded by a nucleic acid molecule that comprises a nucleic acid sequence selected from the group consisting of SEQ ID NO: 1 through SEQ ID NO: 48629.

[0025] The present invention further provides a substantially purified protein, peptide, or fragment thereof encoded by a nucleic acid sequence which specifically hybridizes to a nucleic acid molecule comprising a nucleic acid sequence selected from the group consisting of a complement of SEQ ID NO: 1 through SEQ ID NO:48629.

[0026] The present invention further provides a substantially purified antibody capable of specifically binding to a protein or fragment thereof encoded by a nucleic acid sequence which specifically hybridizes to a nucleic acid molecule having a nucleic acid sequence selected from the group consisting of a complement of SEQ ID NO: 1 through SEQ ID NO: 48629.

[0027] The present invention also provides a transformed plant transformed to contain a nucleic acid molecule which comprises: (A) an exogeneous promoter region which functions in plant cells to cause the production of an mRNA molecule; which is linked to (B) a structural nucleic acid molecule, wherein said structural nucleic acid molecule comprises a nucleic acid molecule that encodes a protein, peptide, or fragment thereof which hybridizes to a nucleic acid sequence selected from the group consisting of a complement of SEQ ID NO: 1 through SEQ ID NO: 48629 expressed in an effective amount to produce a desirable agronomic effect; which is linked to (C) a 3′ non-translated sequence that functions in plant cells to cause the termination of transcription and the addition of polyadenylated ribonucleotides to the 3′ end of the mRNA sequence.

[0028] The present invention also provides a transformed plant cell containing a nucleic acid molecule whose non-transcribed strand encodes a protein or fragment thereof, wherein the transcribed strand of said nucleic acid is complementary to a nucleic acid molecule that encodes a protein or fragment thereof. The present invention also provides bacterial, viral, microbial, and plant cells comprising a nucleic acid molecule of the present invention

[0029] The present invention also provides a method of producing a plant containing one or more proteins encoded by sequences comprising SEQ ID NO: 1 or complement thereof through SEQ ID NO: 48629 or complements thereof, expressed in a sufficient amount and/or fashion to produce a desirable agronomic effect.

[0030] In accomplishing the foregoing, there is provided, in accordance with one aspect of the present invention, methods of producing genetically transformed plants, comprising the steps of:
[0031] (a) inserting into the genome of a plant cell a recombinant, double-stranded DNA molecule comprising
   [0032] (i) a promoter which functions in plant cells to cause the production of an RNA sequence,
   [0033] (ii) a structural DNA sequence that causes the production of an RNA sequence which encodes a desired protein.
   [0034] (iii) a 3′ non-translated DNA sequence which functions in plant cells to cause the addition of polyadenylated nucleotides to the 3′ end of RNA sequence; where the promoter is homologous or heterologous with respect to the coding sequence and adapted to cause sufficient expression of a protein in desired plant tissues to enhance the agronomic utility of a plant transformed with said gene.
[0035] (b) obtaining a transformed plant cell with said nucleic acid molecule that encodes one or more proteins, wherein said nucleic acid molecule is transcribed and results in expression of said protein(s); and
[0036] (c) regenerating from the transformed plant cell a genetically transformed plant

[0037] The present invention also encompasses differentiated plants, seeds, and progeny comprising said transformed plant cells and which exhibit novel properties of agronomic significance.

[0038] The present invention also provides a method of producing a plant containing reduced levels of a protein comprising: (A) transforming a plant cell with a nucleic acid molecule that encodes a protein, wherein said nucleic acid molecule is transcribed and results in co-suppression of endogenous protein synthesis activity, and (B) regenerating plants and producing subsequent progeny from the transformed plant.

[0039] The present invention also provides a method of determining an association between a polymorphism and a plant trait comprising: (A) hybridizing a nucleic acid molecule specific for a polymorphism to genetic material of a plant, wherein said nucleic acid molecule comprising a nucleic acid sequence selected from the group consisting of SEQ ID NO: 1 through SEQ ID NO: 48629 or complements thereof; and (B) calculating the degree of association between the polymorphism and the plant trait.

[0040] The present invention also provides a method of isolating a genetic region, or nucleic acid that encodes a protein or fragment thereof comprising: (A) incubating under conditions permitting nucleic acid hybridization: a marker nucleic acid molecule, preferably an EST, with a complementary nucleic acid molecule obtained from a plant cell or plant tissue; (B) permitting hybridization between said marker nucleic acid molecule, preferably an EST, and said complementary nucleic acid molecule obtained from said plant cell or plant tissue; and (C) isolating said complementary nucleic acid molecule.

[0041] The present invention also provides a method for determining a level or pattern in a plant cell of a protein in a plant comprising: (A) incubating, under conditions permitting nucleic acid hybridization, a marker nucleic acid molecule, the marker nucleic acid molecule selected from the group of marker nucleic acid molecules which specifically hybridize to a nucleic acid molecule having the nucleic acid sequence selected from the group consisting of SEQ ID NO: 1 through SEQ ID NO: 48629 or complements thereof or fragments of either, with a complementary nucleic acid molecule obtained from the plant cell or plant tissue, wherein nucleic acid hybridization between the marker nucleic acid molecule and the complementary nucleic acid molecule obtained from the plant cell or plant tissue permits the detection of an mRNA for the enzyme; (B)

[0042] permitting hybridization between the marker nucleic acid molecule and the complementary nucleic acid molecule obtained from the plant cell or plant tissue; and (C) detecting the level or pattern of the complementary nucleic acid, wherein the detection of the complementary nucleic acid is predictive of the level or pattern of the protein.

[0043] The present invention also provides a method for determining the level or pattern of a protein in a plant cell or plant tissue comprising: (A) incubating under conditions permitting nucleic acid hybridization: a marker nucleic acid molecule, the marker nucleic acid molecule comprising a nucleotide sequence selected from the group consisting of SEQ ID NO: 1 through SEQ ID NO: 48629 or complements thereof, with a complementary nucleic acid molecule obtained from a plant cell or plant tissue, wherein nucleic acid hybridization between the marker nucleic acid molecule, and the complementary nucleic acid molecule obtained from the plant cell or plant tissue permits the detection of said protein; (B) permitting hybridization between the marker nucleic acid molecule and the complementary nucleic acid molecule obtained from the plant cell or plant tissue; and (C) detecting the level or pattern of the complementary nucleic acid, wherein the detection of said complementary nucleic acid is predictive of the level or pattern of the protein synthesis.

[0044] The present invention also provides a method for determining a level or pattern of a protein in a plant cell or plant tissue which comprises assaying the concentration of a molecule, whose concentration is dependent upon the expression of a gene, the gene having a nucleic acid sequence which specifically hybridizes to a protein marker nucleic acid molecule, the molecule being present in a plant cell or plant tissue, in comparison to the concentration of that molecule present in a plant cell or plant tissue with a known level or pattern of said protein, wherein an assayed concentration of the molecule is compared to the assayed concentration of the molecule in a plant cell or plant tissue with a known level or pattern of said protein.

[0045] The present invention also provides a method of determining a mutation in a plant whose presence is predictive of a mutation affecting a level or pattern of a protein comprising the steps: (A) incubating, under conditions permitting nucleic acid hybridization, a marker nucleic acid, the marker nucleic acid selected from the group of marker nucleic acid molecules which specifically hybridize to a nucleic acid molecule consisting of the nucleic acid sequence selected from the group consisting of SEQ ID NO: 1 through SEQ ID NO: 48629 or complements thereof or fragments of either and a complementary nucleic acid molecule obtained from the plant, wherein nucleic acid hybridization between the marker nucleic acid molecule and the complementary nucleic acid molecule obtained from the plant permits the detection of a polymorphism whose presence is predictive of a mutation affecting the level or pattern of the protein in the plant; (B) permitting hybridization between the marker nucleic acid molecule and the complementary nucleic acid molecule obtained from the plant; and (C) detecting the presence of the polymorphism, wherein the detection of the polymorphism is predictive of the mutation.

[0046] The present invention also provides a method for determining a mutation in a plant whose presence is predictive of a mutation affecting the level or pattern of protein synthesis comprising the steps: (A) incubating under conditions permitting nucleic acid hybridization: a marker nucleic acid molecule, the marker nucleic acid molecule comprising a nucleic acid molecule that is linked to gene, the gene having a nucleic acid sequence which specifically hybridizes to a sequence selected from the group consisting of SEQ ID NO: 1 through SEQ ID NO: 48629 and complements thereof, and a complementary nucleic acid molecule obtained from a plant tissue or plant cell of the plant, wherein nucleic acid hybridization between the marker nucleic acid molecule and the complementary nucleic acid molecule obtained from the plant permits the detection of a polymorphism whose presence is predictive of a mutation affecting said level or pattern of a protein synthesis in the plant; (B) permitting hybridization between said marker nucleic acid molecule and said complementary nucleic acid molecule obtained from said plant; and; (C) detecting the presence of the polymorphism, wherein the detection of the polymorphism is predictive of the mutation.

[0047] The present invention also provides a method for reducing expression of a protein in a plant cell, the method comprising: growing a transformed plant cell containing a nucleic acid molecule whose non-transcribed strand encodes a protein or fragment thereof, wherein the transcribed strand of said nucleic acid is complementary to a nucleic acid molecule that encodes the protein in said plant cell, and whereby the strand that is complementary to the nucleic acid molecule that encodes the protein reduces or depresses expression of the protein.

[0048] The present invention provides soybean nucleic acid molecules for use as molecular tags to isolate genetic regions (i.e. promoters and flanking sequences), isolate genes, map genes, and determine gene function. The present invention further provides soybean nucleic acid molecules for use in determining if genes are members of a particular gene family.

[0049] The present invention also provides a method of obtaining full length genes using soybean ESTs or complements thereof or fragments of either.

[0050] The present invention also provides a method of isolating promoters and flanking sequences using soybean ESTs or complements thereof or fragments of either.

[0051] The present invention also provides soybean ESTs or complements thereof or fragments of either for use in marker-assisted breeding programs.

[0052] The present invention also provides a method of identifying tissues comprising hybridizing nucleic acids from the tissue with soybean ESTs or complements thereof or fragments of either.

[0053] The present invention also provides a method for production of antibodies targeted against the proteins, peptides, or fragments produced by the disclosed or complements thereof or fragments of either.

[0054] The present invention also provides a method for the transformation and regeneration of plants comprising sequences hybridizable to the disclosed ESTs or complements thereof or fragments of either.

[0055] The present invention also provides a method of modifying plant protein expression by inserting in a chimeric gene sense or antisense constructs of the soybean ESTs.

### DETAILED DESCRIPTION OF THE INVENTION

Agents

[0056] (a) Nucleic Acid Molecules

[0057] Agents of the present invention include nucleic acid molecules and more specifically EST nucleic acid molecules or nucleic acid fragment molecules thereof. Fragment EST nucleic acid molecules may encode significant portion(s) of, or indeed most of, the EST nucleic acid molecule. Alternatively, the fragments may comprise smaller oligonucleotides (having from about 15 to about 250 nucleotide residues, and more preferably, about 15 to about 30 nucleotide residues).

[0058] A subset of the nucleic acid molecules of the present invention includes nucleic acid molecules that are marker molecules. Another subset of the nucleic acid molecules of the present invention include nucleic acid molecules that encode a protein or fragment thereof. Another subset of the nucleic acid molecules of the present invention are EST molecules.

[0059] The term “substantially purified”, as used herein, refers to a molecule separated from substantially all other molecules normally associated with it in its native state. More preferably a substantially purified molecule is the predominant species present in a preparation. A substantially purified molecule may be greater than 60% free, preferably 75% free, more preferably 90% free, and most preferably 95% free from the other molecules (exclusive of solvent) present in the natural mixture. The term “substantially purified” is not intended to encompass molecules present in their native state.

[0060] The agents of the present invention will preferably be “biologically active” with respect to either a structural attribute, such as the capacity of a nucleic acid to hybridize to another nucleic acid molecule, or the ability of a protein to be bound by antibody (or to compete with another molecule for such binding). Alternatively, such an attribute may be catalytic, and thus involve the capacity of the agent to mediate a chemical reaction or response.

[0061] The agents of the present invention may also be recombinant. As used herein, the term recombinant means any agent (e.g. DNA, peptide etc.), that is, or results, however indirect, from human manipulation of a nucleic acid molecule.

[0062] It is understood that the agents of the present invention may be labeled with reagents that facilitate detection of the agent (e.g. fluorescent labels (Prober, et al., Science 238:336-340 (1987); Albarella et al., EP 144914, chemical labels (Sheldon et al., U.S. Pat. No. 4,582,789; Albarella et al., U.S. Pat. No. 4,563,417, modified bases (Miyoshi et al., EP 119448, all of which are hereby incorporated by reference in their entirety).

[0063] It is further understood, that the present invention provides bacterial, viral, microbial, and plant cells comprising the agents of the present invention.

[0064] Nucleic acid molecules or fragment thereof of the present invention are capable of specifically hybridizing to other nucleic acid molecules under certain circumstances. As used herein, two nucleic acid molecules are said to be capable of specifically hybridizing to one another if the two molecules are capable of forming an anti-parallel, double-stranded nucleic acid structure. A nucleic acid molecule is said to be the “complement” of another nucleic acid molecule if they exhibit complete complementarity. As used herein, molecules are said to exhibit “complete complementarity” when every nucleotide of one of the molecules is complementary to a nucleotide of the other. Two molecules are said to be “minimally complementary” if they can hybridize to one another with sufficient stability to permit them to remain annealed to one another under at least conventional “low-stringency” conditions. Similarly, the molecules are said to be “complementary” if they can hybridize to one another with sufficient stability to permit them to remain annealed to one another under conventional “high-stringency” conditions. Conventional stringency conditions are described by Sambrook, et al., In: Molecular Cloning, A Laboratory Manual, 2nd Edition, Cold Spring Harbor Press, Cold Spring Harbor, N.Y. (1989), and by Haymes, et al. In: Nucleic Acid Hybridization, A Practical Approach, IRL Press, Washington, D.C. (1985), the entirety of which is herein incorporated by reference. Departures from complete complementarity are therefore permissible, as long as such departures do not completely preclude the capacity of the molecules to form a double-stranded structure. Thus, in order for an nucleic acid molecule or fragment of the present invention to serve as a primer or probe it need only be sufficiently complementary in sequence to be able to form a stable double-stranded structure under the particular solvent and salt concentrations employed.

[0065] Appropriate stringency conditions which promote DNA hybridization are, for example, 6.0× sodium chloride/sodium citrate (SSC) at about 45° C., followed by a wash of 2.0×SSC at 50° C., are known to those skilled in the art or can be found in Current Protocols in Molecular Biology, John Wiley & Sons, N.Y. (1989), 6.3.1-6.3.6. For example, the salt concentration in the wash step can be selected from a low stringency of about 2.0×SSC at 50° C. to a high stringency of about 0.2×SSC at 50° C. In addition, the temperature in the wash step can be increased from low stringency conditions at room temperature, about 22° C., to high stringency conditions at about 65° C. Both temperature and salt may be varied, or either the temperature or the salt concentration may be held constant while the other variable is changed.

[0066] In a preferred embodiment, a nucleic acid of the present invention will specifically hybridize to one or more of the nucleic acid molecules set forth in SEQ ID NO: 1 through SEQ ID NO: 48629 or complements thereof under moderately stringent conditions, for example, at about 2.0×SSC and about 65° C.

[0067] In a particularly preferred embodiment, a nucleic acid of the present invention will include those nucleic acid molecules that specifically hybridize to one or more of the nucleic acid molecules set forth in SEQ ID NO: 1 through SEQ ID NO: 48629 or complements thereof under high stringency conditions.

[0068] In one aspect of the present invention, the nucleic acid molecules of the present invention have one or more of the nucleic acid sequences set forth in SEQ ID NO: 1 through SEQ ID NO: 48629 or complements thereof. In another aspect of the present invention, one or more of the nucleic acid molecules of the present invention share between 100% and 90% sequence identity with one or more of the nucleic acid sequences set forth in SEQ ID NO: 1 through SEQ ID NO: 48629 or complements thereof. In a further aspect of the present invention, one or more of the nucleic acid molecules of the present invention share between 100% and 95% sequence identity with one or more of the nucleic acid sequences set forth in SEQ ID NO: 1 through SEQ ID NO: 48629 or complements thereof. In a more preferred aspect of the present invention, one or more of the nucleic acid molecules of the present invention share between 100% and 98% sequence identity with one or more of the nucleic acid sequences set forth in SEQ ID NO: 1 through SEQ ID NO: 48629 or complements thereof. In an even more preferred aspect of the present invention, one or more of the nucleic acid molecules of the present invention share between 100% and 99% sequence identity with one or more of the sequences set forth in SEQ ID NO: 1 through SEQ ID NO: 48629 or complements thereof. In a further, even more preferred aspect of the present invention, one or more of the nucleic acid molecules of the present invention exhibit 100% sequence identity with one or more nucleic acid molecules present within the cDNA libraries SOYMON022, SOYMON024, and SOYMON029. (Monsanto Company, St. Louis, Mo., United States of America).

[0069] In a preferred embodiment of the present invention, a soybean protein or fragment thereof of the present invention is a homologue of another plant protein. In another preferred embodiment of the present invention, a soybean protein or fragment thereof of the present invention is a homologue of a fungal protein. In another preferred embodiment of the present invention, a soybean protein or fragment thereof of the present invention is a homologue of mammalian protein. In another preferred embodiment of the present invention, a soybean protein or fragment thereof of the present invention is a homologue of a bacterial protein. In another preferred embodiment of the present invention, a soybean protein or fragment thereof of the present invention is a homologue of a maize protein.

[0070] In a preferred embodiment of the present invention, the nucleic molecule of the present invention encodes a soybean protein or fragment thereof where a soybean protein or fragment thereof exhibits a BLAST probability score of greater than 1E-12, preferably a BLAST probability score of between about 1E-30 and about 1E-12, even more preferably a BLAST probability score of greater than 1E-30 with its homologue.

[0071] In another preferred embodiment of the present invention, the nucleic acid molecule encoding a soybean protein or fragment thereof exhibits a % identity with its homologue of between about 25% and about 40%, more preferably of between about 40 and about 70%, even more preferably of between about 70% and about 90% and even more preferably between about 90% and 99%. In another preferred embodiment, of the present invention, a soybean protein or fragment thereof exhibits a % identity with its homologue of 100%.

[0072] In a preferred embodiment of the present invention, the nucleic molecule of the present invention encodes a soybean protein or fragment thereof where the soybean protein exhibits a BLAST score of greater than 120, preferably a BLAST score of between about 1450 and about 120, even more preferably a BLAST score of greater than 1450 with its homologue.

[0073] Nucleic acid molecules of the present invention also include non-soybean homologues. Preferred non-homologues are selected from the group consisting of alfalfa, Arabidopsis, barley, Brassica, broccoli, cabbage, citrus, cotton, garlic, oat, oilseed rape, onion, canola, flax, an ornamental plant, maize, pea, peanut, pepper, potato, rice, rye, sorghum, strawberry, sugarcane, sugarbeet, tomato, wheat, poplar, pine, fir, eucalyptus, apple, lettuce, lentils, grape, banana, tea, turf grasses, sunflower, oil palm and Phaseolus.

[0074] The degeneracy of the genetic code, which allows different nucleic acid sequences to code for the same protein or peptide, is known in the literature. (U.S. Pat. No. 4,757,006, the entirety of which is herein incorporated by reference).

[0075] In an aspect of the present invention, one or more of the nucleic acid molecules of the present invention differ in nucleic acid sequence from those encoding a soybean protein or fragment thereof in SEQ ID NO: 1 through SEQ ID NO: 48629 due to the degeneracy in the genetic code in that they encode the same protein but differ in nucleic acid sequence.

[0076] In another further aspect of the present invention, one or more of the nucleic acid molecules of the present invention differ in nucleic acid sequence from those encoding a soybean protein or fragment thereof in SEQ ID NO: 1 through SEQ ID NO: 48629 due to fact that the different nucleic acid sequences encode a protein having one or more conservative amino acid residues. It is understood that codons capable of coding for such conservative substitutions are known in the art.

[0077] It is well known in the art that one or more amino acids in a native sequence can be substituted with another amino acid(s), the charge and polarity of which are similar to that of the native amino acid, i.e., a conservative amino acid substitution, resulting in a silent change. Conserved substitutes for an amino acid within the native polypeptide sequence can be selected from other members of the class to which the naturally occurring amino acid belongs. Amino acids can be divided into the following four groups: (1) acidic amino acids, (2) basic amino acids, (3) neutral polar amino acids, and (4) neutral nonpolar amino acids. Representative amino acids within these various groups include, but are not limited to, (1) acidic (negatively charged) amino acids such as aspartic acid and glutamic acid; (2) basic (positively charged) amino acids such as arginine, histidine, and lysine; (3) neutral polar amino acids such as glycine, serine, threonine, cysteine, cystine, tyrosine, asparagine, and glutamine; and (4) neutral nonpolar (hydrophobic) amino acids such as alanine, leucine, isoleucine, valine, proline, phenylalanine, tryptophan, and methionine.

[0078] Conservative amino acid changes within the native polypeptides sequence can be made by substituting one amino acid within one of these groups with another amino acid within the same group. Biologically functional equivalents of the proteins or fragments thereof of the present invention can have 10 or fewer conservative amino acid changes, more preferably seven or fewer conservative amino acid changes, and most preferably five or fewer conservative amino acid changes. The encoding nucleotide sequence will thus have corresponding base substitutions, permitting it to encode biologically functional equivalent forms of the proteins or fragments of the present invention.

[0079] It is understood that certain amino acids may be substituted for other amino acids in a protein structure without appreciable loss of interactive binding capacity with structures such as, for example; antigent-binding regions of antibodies or binding sites on substrate molecules. Because it is the interactive capacity and nature of a protein that defines that protein's biological functional activity, certain amino acid sequence substitutions can be made in a protein sequence and, of course, its underlying DNA coding sequence and, nevertheless, obtain a protein with like properties. It is thus contemplated by the inventors that various changes may be made in the peptide sequences of the proteins or fragments of the present invention, or corresponding DNA sequences that encode said peptides, without appreciable loss of their biological utility or activity. It is understood that codons capable of coding for such amino acid changes are known in the art.

[0080] In making such changes, the hydropathic index of amino acids may be considered. The importance of the hydropathic amino acid index in conferring interactive biological function on a protein is generally understood in the art (Kyte and Doolittle, J. Mol. Biol. 157, 105-132 (1982), herein incorporated by reference in its entirety). It is accepted that the relative hydropathic character of the amino acid contributes to the secondary structure of the resultant protein, which in turn defines the interaction of the protein with other molecules, for example, enzymes, substrates, receptors, DNA, antibodies, antigens, and the like.

[0081] Each amino acid has been assigned a hydropathic index on the basis of its hydrophobicity and charge characteristics (Kyte and Doolittle, 1982); these are isoleucine (+4.5), valine (+4.2), leucine (+3.8), phenylalanine (+2.8), cysteine/cystine (+2.5), methionine (+1.9), alanine (+1.8), glycine (−0.4), threonine (−0.7), serine (−0.8), tryptophan (−0.9), tyrosine (−1.3), proline (−1.6), histidine (−3.2), glutamate (−3.5), glutamine (−3.5), aspartate (−3.5), asparagine (−3.5), lysine (−3.9), and arginine (−4.5).

[0082] In making such changes, the substitution of amino acids whose hydropathic indices are within ±2 is preferred, those which are within ±1 are particularly preferred, and those within ±0.5 are even more particularly preferred.

[0083] It is also understood in the art that the substitution of like amino acids can be made effectively on the basis of hydrophilicity. U.S. Pat. No. 4,554,101, incorporated herein by reference in its entirety, states that the greatest local average hydrophilicity of a protein, as govern by the hydrophilicity of its adjacent amino acids, correlates with a biological property of the protein.

[0084] As detailed in U.S. Pat. No. 4,554,101, the following hydrophilicity values have been assigned to amino acid residues: arginine (+3.0), lysine (+3.0), aspartate (+3.0±1), glutamate (+3.0±1), serine (+0.3), asparagine (+0.2), glutamine (+0.2), glycine (0), threonine (−0.4), proline (−0.5±1), alanine (−0.5), histidine (−0.5), cysteine (−1.0), methionine (−1.3), valine (−1.5), leucine (−1.8), isoleucine (−1.8), tyrosine (−2.3), phenylalanine (−2.5), and tryptophan (−3.4).

[0085] In making such changes, the substitution of amino acids whose hydrophilicity values are within ±2 is preferred, those which are within ±1 are particularly preferred, and those within ±0.5 are even more particularly preferred.

[0086] In a further aspect of the present invention, one or more of the nucleic acid molecules of the present invention differ in nucleic acid sequence from those encoding a soybean protein or fragment thereof set forth in SEQ ID NO: 1 through SEQ ID NO: 48629 or fragment thereof due to the fact that one or more codons encoding an amino acid has been substituted for a codon that encodes a nonessential substitution of the amino acid originally encoded.

[0087] One aspect of the present invention concerns markers that include nucleic acid molecules SEQ ID NO: 1 through SEQ ID NO: 48629 or complements thereof or fragments of either that can act as markers or other nucleic acid molecules of the present invention that can act as markers. Genetic markers of the present invention include “dominant” or “codominant” markers “Codominant markers” reveal the presence of two or more alleles (two per diploid individual) at a locus. “Dominant markers” reveal the presence of only a single allele per locus. The presence of the dominant marker phenotype (e.g., a band of DNA) is an indication that one allele is present in either the homozygous or heterozygous condition. The absence of the dominant marker phenotype (e.g. absence of a DNA band) is merely evidence that “some other” undefined allele is present. In the case of populations where individuals are predominantly homozygous and loci are predominately dimorphic, dominant and codominant markers can be equally valuable. As populations become more heterozygous and multi-allelic, codominant markers often become more informative of the genotype than dominant markers. Marker molecules can be, for example, capable of detecting polymorphisms such as single nucleotide polymorphisms (SNPs).

[0088] SNPs are single base changes in genomic DNA sequence. They occur at greater frequency and are spaced with a greater uniformity throughout a genome than other reported forms of polymorphism. The greater frequency and uniformity of SNPs means that there is greater probability that such a polymorphism will be found near or in a genetic locus of interest than would be the case for other polymorphisms. SNPs are located in protein-coding regions and noncoding regions of a genome. Some of these SNPs may result in defective or variant protein expression (e.g., as a results of mutations or defective splicing). Analysis (genotyping) of characterized SNPs can require only a plus/minus assay rather than a lengthy measurement, permitting easier automation.

[0089] SNPs can be characterized using any of a variety of methods. Such methods include the direct or indirect sequencing of the site, the use of restriction enzymes (Botstein et al., Am. J. Hum. Genet. 32:314-331 (1980), the entirety of which is herein incorporated reference; Konieczny and Ausubel, Plant J. 4:403-410 (1993), the entirety of which is herein incorporated by reference), enzymatic and chemical mismatch assays (Myers et al., Nature 313:495-498 (1985), the entirety of which is herein incorporated by reference), allele-specific PCR (Newton et al., Nucl. Acids Res. 17:2503-2516 (1989), the entirety of which is herein incorporated by reference; Wu et al., Proc. Natl. Acad. Sci. (U.S.A.) 86:2757-2760 (1989), the entirety of which is herein incorporated by reference), ligase chain reaction (Barany, Proc. Natl. Acad. Sci. (U.S.A.) 88:189-193 (1991), the entirety of which is herein incorporated by reference), single-strand conformation polymorphism analysis (Labrune et al., Am. J. Hum. Genet. 48: 1115-1120 (1991), the entirety of which is herein incorporated by reference), primer-directed nucleotide incorporation assays (Kuppuswami et al., Proc. Natl. Acad. Sci. USA 88:1143-1147 (1991), the entirety of which is herein incorporated by reference), dideoxy fingerprinting (Sarkar et al., Genomics 13:441-443 (1992), the entirety of which is herein incorporated by reference), solid-phase ELISA-based oligonucleotide ligation assays (Nikiforov et al., Nucl. Acids Res. 22:4167-4175 (1994), the entirety of which is herein incorporated by reference), oligonucleotide fluorescence-quenching assays (Livak et al., PCR Methods Appl. 4:357-362 (1995), the entirety of which is herein incorporated by reference), 5′-nuclease allele-specific hybridization TaqMan assay (Livak et al., Nature Genet. 9:341-342 (1995), the entirety of which is herein incorporated by reference), template-directed dye-terminator incorporation (TDI) assay (Chen and Kwok, Nucl. Acids Res. 25:347-353 (1997), the entirety of which is herein incorporated by reference), allele-specific molecular beacon assay (Tyagi et al., Nature Biotech. 16: 49-53 (1998), the entirety of which is herein incorporated by reference), PinPoint assay (Haff and Smirnov, Genome Res. 7: 378-388 (1997), the entirety of which is herein incorporated by reference) and dCAPS analysis (Neff et al., Plant J. 14:387-392 (1998), the entirety of which is herein incorporated by reference).

[0090] Additional markers, such as AFLP markers, RFLP markers and RAPD markers, can be utilized (Walton, Seed World 22-29 (July, 1993), the entirety of which is herein incorporated by reference; Burow and Blake, Molecular Dissection of Complex Traits, 13-29, Paterson (ed.), CRC Press, New York (1988), the entirety of which is herein incorporated by reference). DNA markers can be developed from nucleic acid molecules using restriction endonucleases, the PCR and/or DNA sequence information. RFLP markers result from single base changes or insertions/deletions. These codominant markers are highly abundant in plant genomes, have a medium level of polymorphism and are developed by a combination of restriction endonuclease digestion and Southern blotting hybridization. CAPS are similarly developed from restriction nuclease digestion but only of specific PCR products. These markers are also codominant, have a medium level of polymorphism and are highly abundant in the genome. The CAPS result from single base changes and insertions/deletions.

[0091] Another marker type, RAPDs, are developed from DNA amplification with random primers and result from single base changes and insertions/deletions in plant genomes. They are dominant markers with a medium level of polymorphisms and are highly abundant. AFLP markers require using the PCR on a subset of restriction fragments from extended adapter primers. These markers are both dominant and codominant are highly abundant in genomes and exhibit a medium level of polymorphism.

[0092] SSRs require DNA sequence information. These codominant markers result from repeat length changes, are highly polymorphic and do not exhibit as high a degree of abundance in the genome as CAPS, AFLPs and RAPDs, SNPs also require DNA sequence information. These codominant markers result from single base substitutions. They are highly abundant and exhibit a medium of polymorphism (Rafalski et al., In: Nonmammalian Genomic Analysis, Birren and Lai (ed.), Academic Press, San Diego, Calif., pp. 75-134 (1996), the entirety of which is herein incorporated by reference). It is understood that a nucleic acid molecule of the present invention may be used as a marker.

[0093] A PCR probe is a nucleic acid molecule capable of initiating a polymerase activity while in a double-stranded structure with another nucleic acid. Various methods for determining the structure of PCR probes and PCR techniques exist in the art. Computer generated searches using programs such as Primer3 (www-genome.wi.mit.edu/cgi-bin/primer/primer3.cgi), STSPipeline (www-genome.wi.mit.edu/cgi-bin/www-STS_{—}Pipeline), or GeneUp (Pesole et al., BioTechniques 25:112-123 (1998) the entirety of which is herein incorporated by reference), for example, can be used to identify potential PCR primers.

[0094] It is understood that a fragment of one or more of the nucleic acid molecules of the present invention may be a probe and specifically a PCR probe.

[0095] (b) Protein and Peptide Molecules

[0096] A class of agents comprises one or more of the protein or peptide molecules encoded by SEQ ID NO: 1 through SEQ ID NO: 48629 or one or more of the protein or fragment thereof or peptide molecules encoded by other nucleic acid agents of the present invention. As used herein, the term “protein molecule” or “peptide molecule” includes any molecule that comprises five or more amino acids. It is well know in the art that proteins may undergo modification, including post-translational modifications, such as, but not limited to, disulfide bond formation, glycosylation, phosphorylation, or oligomerization. Thus, as used herein, the term “protein molecule” or “peptide molecule” includes any protein molecule that is modified by any biological or non-biological process. The terms “amino acid” and “amino acids” refer to all naturally occurring L-amino acids. This definition is meant to include norleucine, ornithine, homocysteine, and homoserine.

[0097] One or more of the protein or fragment of peptide molecules may be produced via chemical synthesis, or more preferably, by expression in a suitable bacterial or eukaryotic host. Suitable methods for expression are described by Sambrook, et al., (In: Molecular Cloning, A Laboratory Manual, 2nd Edition, Cold Spring Harbor Press, Cold Spring Harbor, N.Y. (1989)), or similar texts.

[0098] A “protein fragment” is a peptide or polypeptide molecule whose amino acid sequence comprises a subset of the amino acid sequence of that protein. A protein or fragment thereof that comprises one or more additional peptide regions not derived from that protein is a “fusion” protein. Such molecules may be derivatized to contain carbohydrate or other moieties (such as keyhole limpet hemocyanin, etc.). Fusion protein or peptide molecule of the present invention are preferably produced via recombinant means.

[0099] Another class of agents comprise protein or peptide molecules encoded by SEQ ID NO: 1 through SEQ ID NO: 48629 or complements thereof or, fragments or fusions thereof in which non-essential, or not relevant, amino acid residues have been added, replaced, or deleted. An example of such a homologue is the homologue protein of all non-soybean plant species, including but not limited to alfalfa, Arabidopsis, barley, Brassica, broccoli, cabbage, citrus, cotton, garlic, oat, oilseed rape, onion, canola, flax, maize, an ornamental plant, pea, peanut, pepper, potato, rice, rye, sorghum, strawberry, sugarcane, sugarbeet, tomato, wheat, poplar, pine, fir, eukalyptus, apple, lettuce, peas, lentils, grape, banana, tea, turf grasses, etc. Particularly preferred non-soybean plants to utilize for the isolation of homologues would include alfalfa, Arabidopsis, barley, cotton, corn, oat, oilseed rape, rice, corn, canola, ornamentals, sugarcane, sugarbeet, tomato, potato, wheat, and turf grasses. Such a homologue can be obtained by any of a variety of methods. Most preferably, as indicated above, one or more of the disclosed sequences (SEQ ID NO: 1 through SEQ ID NO: 48629 or complements thereof) will be used to define a pair of primers that may be used to isolate the homologue-encoding nucleic acid molecules from any desired species. Such molecules can be expressed to yield homologues by recombinant means.

[0100] (c) Antibodies

[0101] One aspect of the present invention concerns antibodies, single-chain antigen binding molecules, or other proteins that specifically bind to one or more of the protein or peptide molecules of the present invention and their homologues, fusions or fragments. Such antibodies may be used to quantitatively or qualitatively detect the protein or peptide molecules of the present invention. As used herein, an antibody or peptide is said to “specifically bind” to a protein or peptide molecule of the present invention if such binding is not competitively inhibited by the presence of non-related molecules.

[0102] Nucleic acid molecules that encode all or part of the protein of the present invention can be expressed, via recombinant means, to yield protein or peptides that can in turn be used to elicit antibodies that are capable of binding the expressed protein or peptide. Such antibodies may be used in immunoassays for that protein. Such protein-encoding molecules, or their fragments may be a “fusion” molecule (i.e., a part of a larger nucleic acid molecule) such that, upon expression, a fusion protein is produced. It is understood that any of the nucleic acid molecules of the present invention may be expressed, via recombinant means, to yield proteins or peptides encoded by these nucleic acid molecules.

[0103] The antibodies that specifically bind proteins and protein fragments of the present invention may be polyclonal or monoclonal, and may comprise intact immunoglobulins, or antigen binding portions of immunoglobulins (such as (F(ab′), F(ab′)₂) fragments, or single-chain immunoglobulins producible, for example, via recombinant means). It is understood that practitioners are familiar with the standard resource materials which describe specific conditions and procedures for the construction, manipulation and isolation of antibodies (see, for example, Harlow and Lane, In Antibodies: A Laboratory Manual, Cold Spring Harbor Press, Cold Spring Harbor, N.Y. (1988), the entirety of which is herein incorporated by reference).

[0104] Murine monoclonal antibodies are particularly preferred. BALB/c mice are preferred for this purpose, however, equivalent strains may also be used. The animals are preferably immunized with approximately 25 μg of purified protein (or fragment thereof) that has been emulsified a suitable adjuvant (such as TiterMax adjuvant (Vaxcel, Norcross, Ga.)). Immunization is preferably conducted at two intramuscular sites, one intraperitoneal site, and one subcutaneous site at the base of the tail. An additional i.v. injection of approximately 25 μg of antigen is preferably given in normal saline three weeks later. After approximately 11 days following the second injection, the mice may be bled and the blood screened for the presence of anti-protein or peptide antibodies. Preferably, a direct binding Enzyme-Linked Immunoassay (ELISA) is employed for this purpose.

[0105] More preferably, the mouse having the highest antibody titer is given a third i.v. injection of approximately 25 μg of the same protein or fragment. The splenic leukocytes from this animal may be recovered 3 days later, and are then permitted to fuse, most preferably, using polyethylene glycol, with cells of a suitable myeloma cell line (such as, for example, the P3X63Ag8.653 myeloma cell line). Hybridoma cells are selected by culturing the cells under “HAT” (hypoxanthine-aminopterin-thymine) selection for about one week. The resulting clones may then be screened for their capacity to produce monoclonal antibodies (“mAbs), preferably by direct ELISA.

[0106] In one embodiment, anti-protein or peptide monoclonal antibodies are isolated using a fusion of a protein, protein fragment, or peptide of the present invention, or conjugate of a protein, protein fragment, or peptide of the present invention, as immunogens. Thus, for example, a group of mice can be immunized using a fusion protein emulsified in Freund's complete adjuvant (e.g. approximately 50 μg of antigen per immunization). At three week intervals, an identical amount of antigen is emulsified in Freund's incomplete adjuvant and used to immunize the animals. Ten days following the third immunization, serum samples are taken and evaluated for the presence of antibody. If antibody titers are too low, a fourth booster can be employed. Polysera capable of binding the protein or peptide can also be obtained using this method.

[0107] In a preferred procedure for obtaining monoclonal antibodies, the spleens of the above-described immunized mice are removed, disrupted, and immune splenocytes are isolated over a ficoll gradient. The isolated splenocytes are fused, using polyethylene glycol with BALB/c-derived HGPRT (hypoxanthine guanine phosphoribosyl transferase) deficient P3×63xAg8.653 plasmacytoma cells. The fused cells are plated into 96-well microtiter plates and screened for hybridoma fusion cells by their capacity to grow in culture medium supplemented with hypothanthine, aminopterin and thymidine for approximately 2-3 weeks.

[0108] Hybridoma cells that arise from such incubation are preferably screened for their capacity to produce an immunoglobulin that binds to a protein of interest. An indirect ELISA may be used for this purpose. In brief, the supernatants of hybridomas are incubated in microtiter wells that contain immobilized protein. After washing, the titer of bound immunoglobulin can be determined using, for example, a goat anti-mouse antibody conjugated to horseradish peroxidase. After additional washing, the amount of immobilized enzyme is determined (for example through the use of a chromogenic substrate). Such screening is performed as quickly as possible after the identification of the hybridoma in order to ensure that a desired clone is not overgrown by non-secreting neighbors. Desirably, the fusion plates are screened several times since the rates of hybridoma growth vary. In a preferred sub-embodiment, a different antigenic form of immunogen may be used to screen the hybridoma. Thus, for example, the splenocytes may be immunized with one immunogen, but the resulting hybridomas can be screened using a different immunogen. It is understood that any of the protein or peptide molecules of the present invention may be used to raise antibodies.

[0109] As discussed below, such antibody molecules or their fragments may be used for diagnostic purposes. Where the antibodies are intended for diagnostic purposes, it may be desirable to derivatize them, for example with a ligand group (such as biotin) or a detectable marker group (such as a fluorescent group, a radioisotope or an enzyme).

[0110] The ability to produce antibodies that bind the protein or peptide molecules of the present invention permits the identification of mimetic compounds of those molecules. A “mimetic compound” is a compound that is not that compound, or a fragment of that compound, but which nonetheless exhibits an ability to specifically bind to antibodies directed against that compound.

[0111] It is understood that any of the agents of the present invention can be substantially purified and/or be biologically active and/or recombinant.

[0112] Uses of the Agents of the Invention

[0113] The nucleic acid molecules and fragments thereof of the present invention from library SOYMON022 are from partially to fully open flower tissue. Flower libraries can enable the acquisition of, but are not limited to, genes that are involved in floral development, reproduction and seed production; therefore, the ESTs of the present invention will find great use in the isolation of a variety of agronomically significant genes, including but not limited to, genes that regulate meiosis, cell division, carotenoids, floral biogenesis, embryogenesis, protein, amino acids, sterols, oils, minerals, isoflavones, saponins, vitamins, tocopherols, antinutrient components, carbohydrates, starch metabolism and seed regulatory elements. Such genes are associated with plant growth, quality and yield, and could also serve as links in important developmental, metabolic, and catabolic pathways.

[0114] The nucleic acid molecules and fragments thereof of the present invention from Library SOYMON024 are from soybean stem tissue. Stems play a role in growth and development, therefore, the nucleic acid molecules of the present invention will find use in the isolation of a variety of agronomically significant genes, including but not limited to genes that regulate storage, transport, propagation, and nitrogen fixation. Nucleic acid molecules of the present invention will find use in the isolation of genes involved in the regulation of giberellic acid synthesis. Such genes are associated with plant growth, quality, and yield and could also serve as links in important plant metabolic and catabolic pathways.

[0115] The nucleic acid molecules and fragments thereof of the present invention from library SOYMON029, are from roots from SCN resistant plants. Roots play a role in major vegetative organs which supply water, minerals, and substances essential for plant growth and development, therefore, the ESTs of the present invention will find use in the isolation of a variety of agronomically significant genes, including but not limited to genes that are necessary for absorption, anchorage, storage, transport, propagation, and nitrogen fixation. Such genes are associated with plant growth, quality, and yield and could also serve as links in important plant metabolic, developmental and catabolic pathways.

[0116] The nucleic acid molecules and fragments thereof of the present invention from libraries SOYMON022, and SOYMON024, are from soybean genotype A3244. This genotype has disease resistance to brown stem rot (Phialophora gregata) and Phytophthora root rot (Phytophthora sojae). Libraries from this genotype are likely to find use in the isolation of genes involved in disease resistance against a number of agronomically important fungal pathogens.

[0117] The nucleic acid molecules and fragments thereof of the present invention from library SOYMON029, are from soybean cultivar P1507354. Libraries from this genotype will give rise to Soybean Cyst Nematode resistant genes.

[0118] Nucleic acid molecules and fragments thereof of the present invention may be employed to obtain other nucleic acid molecules. Such molecules include the nucleic acid molecules of other plants or other organisms (e.g., alfalfa, rice, potato, cotton, oat, rye, barley, maize, wheat, Arabidopsis, Brassica, etc.) including the nucleic acid molecules that encode, in whole or in part, protein homologues of other plant species or other organisms, and sequences of genetic elements such as promoters and transcriptional regulatory elements. Such molecules can be readily obtained by using the above-described nucleic acid molecules or fragments thereof to screen cDNA or genomic libraries obtained from such plant species. Methods for forming such libraries are well known in the art. Such homologue molecules may differ in their nucleotide sequences from those found in one or more of SEQ ID NO: 1 through SEQ ID NO: 48629 or complements thereof because complete complementarity is not needed for stable hybridization. The nucleic acid molecules of the present invention therefore also include molecules that, although capable of specifically hybridizing with the nucleic acid molecules may lack “complete complementarity.”

[0119] Any of a variety of methods may be used to obtain one or more of the above-described nucleic acid molecules (Zamechik et al., Proc. Natl. Acad. Sci. (U.S.A.) 83:4143-4146 (1986), the entirety of which is herein incorporated by reference; Goodchild et al., Proc. Natl. Acad. Sci. (U.S.A.) 85:5507-5511 (1988), the entirety of which is herein incorporated by reference; Wickstrom et al., Proc. Natl. Acad. Sci. (U.S.A.) 85:1028-1032 (1988), the entirety of which is herein incorporated by reference; Holt, et al., Molec. Cell. Biol. 8:963-973 (1988), the entirety of which is herein incorporated by reference; Gerwirtz, et al., Science 242:1303-1306 (1988), the entirety of which is herein incorporated by reference; Anfossi, et al., Proc. Natl. Acad. Sci. (U.S.A.) 86:3379-3383 (1989), the entirety of which is herein incorporated by reference; Becker, et al., EMBO J. 8:3685-3691 (1989); the entirety of which is herein incorporated by reference). Automated nucleic acid synthesizers may be employed for this purpose. In lieu of such synthesis, the disclosed nucleic acid molecules may be used to define a pair of primers that can be used with the polymerase chain reaction (Mullis, et al., Cold Spring Harbor Symp. Quant. Biol. 51:263-273 (1986); Erlich et al., EP 50,424; EP 84,796, EP 258,017, EP 237,362; Mullis, EP 201,184; Mullis et al., U.S. Pat. No. 4,683,202; Erlich, U.S. Pat. No. 4,582,788; and Saiki, R. et al., U.S. Pat. No. 4,683,194, all of which are hereby incorporated by reference in their entirety) to amplify and obtain any desired nucleic acid molecule or fragment.

[0120] Promoter sequence(s) and other genetic elements including but not limited to transcriptional regulatory elements associated with one or more of the disclosed nucleic acid sequences can also be obtained using the disclosed nucleic acid sequences provided herein.

[0121] In one embodiment, such sequences are obtained by incubating EST nucleic acid molecules or preferably fragments thereof with members of genomic libraries (e.g. maize and soybean) and recovering clones that hybridize to the EST nucleic acid molecule or fragment thereof. In a second embodiment, methods of “chromosome walking,” or inverse PCR may be used to obtain such sequences (Frohman, et al., Proc. Natl. Acad. Sci. (U.S.A.) 85:8998-9002 (1988); Ohara, et al., Proc. Natl. Acad. Sci. (U.S.A.) 86: 5673-5677 (1989); Pang et al., Biotechniques, 22(6); 1046-1048 (1977); Huang et al., Methods Mol. Biol. 69: 89-96 (1977); Hartl et al., Methods Mol. Biol. 58: 293-301 (1996), all of which are hereby incorporated by reference in their entirety). In one embodiment, the disclosed nucleic acid molecules are used to identify cDNAs whose analogous genes contain promoters with desirable expression patterns. The nucleic acid molecules isolated from the library of the present invention are used to isolate promoters of tissue-enhanced, tissue-specific, developmentally- or environmentally-regulated expression profiles. Isolation and functional analysis of the 5′ flanking promoter sequences of these genes from genomic libraries, for example, using genomic screening methods and PCR techniques would result in the isolation of useful promoters and transcriptional regulatory elements. These methods are known to those of skill in the art and have been described (See for example Birren et al., Genome Analysis: Analyzing DNA, 1, (1997), Cold Spring Harbor Laboratory Press, Cold Spring Harbor, N.Y., the entirety of which is herein incorporated by reference).

[0122] Promoters obtained utilizing the nucleic acid molecules of the present invention could also be modified to affect their control characteristics. Examples of such modifications would include but are not limited to enhancer sequences as reported by Kay et al., Science 236:1299 (1987), herein incorporated by reference in its entirety. Such genetic elements could be used to enhance gene expression of new and existing traits for crop improvements.

[0123] The nucleic acid molecules of the present invention may be used to isolate promoters of tissue enhanced. tissue specific, cell-specific, cell-type, developmentally or environmentally regulated expression profiles. Isolation and functional analysis of the 5′ flanking promoter sequences of these genes from genomic libraries, for example, using genomic screening methods and PCR techniques would result in the isolation of useful promoters and transcriptional regulatory elements. These methods are known to those of skill in the art and have been described (See, for example, Birren et. al., Genome Analysis: Analyzing DNA, 1, Cold Spring Harbor Laboratory Press, Cold Spring Harbor, N.Y. (1997), the entirety of which is herein incorporated by reference). Promoters obtained utilizing the nucleic acid molecules of the present invention could also be modified to affect their control characteristics. Examples of such modifications would include but are not limited to enhancer sequences as reported by Kay, et al Science 236:1299 (1987), herein incorporated reference in its entirety. Such genetic elements could be used to enhance gene expression of new and existing traits for crop improvements.

[0124] In an aspect of the present invention, one or more of the nucleic molecules of the present invention are used to determine whether a plant (preferably soybean) has a mutation affecting the level (i.e., the concentration of mRNA in a sample, etc.) or pattern (i.e., the kinetics of expression, rate of decomposition, stability profile, etc.) of the expression encoded in part or whole by one or more of the nucleic acid molecules of the present invention (collectively, the “Expression Response” of a cell or tissue). As used herein, the Expression Response manifested by a cell or tissue is said to be “altered” if it differs from the Expression Response of cells or tissues of plants not exhibiting the phenotype. To determine whether a Expression Response is altered, the Expression Response manifested by the cell or tissue of the plant exhibiting the phenotype is compared with that of a similar cell or tissue sample of a plant not exhibiting the phenotype. As will be appreciated, it is not necessary to re-determine the Expression Response of the cell or tissue sample of plants not exhibiting the phenotype each time such a comparison is made; rather, the Expression Response of a particular plant may be compared with previously obtained values of normal plants. As used herein, the phenotype of the organism is any of one or more characteristics of an organism (e.g. disease resistance, pest tolerance, environmental tolerance, male sterility, yield, quality improvements, etc.). A change in genotype or phenotype may be transient or permanent. Also as used herein, a tissue sample is any sample that comprises more than one cell. In a preferred aspect, a tissue sample comprises cells that share a common characteristic (e.g. derived from leaf, root, or pollen etc).

[0125] In one sub-aspect, such an analysis is conducted by determining the presence and/or identity of polymorphism(s) by one or more of the nucleic acid molecules of the present invention and more specifically, one or more of the EST nucleic acid molecules or fragments thereof which are associated with phenotype, or a predisposition to phenotype.

[0126] Any of a variety of molecules can be used to identify such polymorphism(s). In one embodiment, one or more of the EST nucleic acid molecules (or a sub-fragment thereof) may be employed as a marker nucleic acid molecule to identify such polymorphism(s). Alternatively, such polymorphisms can be detected through the use of a marker nucleic acid molecule or a marker protein that is genetically linked to (i.e., a polynucleotide that co-segregates with) such polymorphism(s).

[0127] In an alternative embodiment, such polymorphisms can be detected through the use of a marker nucleic acid molecule that is physically linked to such polymorphism(s). For this purpose, marker nucleic acid molecules comprising a nucleotide sequence of a polynucleotide located within 1 mb of the polymorphism(s), and more preferably within 100 kb of the polymorphism(s), and most preferably within 10 kb of the polymorphism(s) can be employed.

[0128] The genomes of animals and plants naturally undergo spontaneous mutation in the course of their continuing evolution (Gusella, Ann. Rev. Biochem. 55:831-854 (1986)). A “polymorphism” is a variation or difference in the sequence of the gene or its flanking regions that arises in some of the members of a species. The variant sequence and the “original” sequence co-exist in the species' population. In some instances, such co-existence is in stable or quasi-stable equilibrium.

[0129] A polymorphism is thus said to be “allelic,” in that, due to the existence of the polymorphism, some members of a species may have the original sequence (i.e., the original “allele”) whereas other members may have the variant sequence (i.e., the variant “allele”). In the simplest case, only one variant sequence may exist, and the polymorphism is thus said to be di-allelic. In other cases, the species' population may contain multiple alleles, and the polymorphism is termed tri-allelic, etc. A single gene may have multiple different unrelated polymorphisms. For example, it may have a di-allelic polymorphism at one site, and a multi-allelic polymorphism at another site.

[0130] The variation that defines the polymorphism may range from a single nucleotide variation to the insertion or deletion of extended regions within a gene. In some cases, the DNA sequence variations are in regions of the genome that are characterized by short tandem repeats (STRs) that include tandem di- or tri-nucleotide repeated motifs of nucleotides. Polymorphisms characterized by such tandem repeats are referred to as “variable number tandem repeat” (“VNTR”) polymorphisms. VNTRs have been used in identity analysis (Weber, U.S. Pat. No. 5,075,217; Armour, et al., FEBS Lett. 307:113-115 (1992); Jones, et al., Eur. J. Haematol. 39:144-147 (1987); Horn, et al., PCT Application WO91/14003; Jeffreys, European Patent Application 370,719; Jeffreys, U.S. Pat. No. 5,699,082; Jeffreys. et al., Amer. J. Hum. Genet. 39:11-24 (1986); Jeffreys. et al., Nature 316:76-79 (1985); Gray, et al., Proc. R. Acad. Soc. Lond. 243:241-253 (1991); Moore, et al., Genomics 10:654-660 (1991); Jeffreys, et al., Anim. Genet. 18:1-15 (1987); Hillel, et al., Anim. Genet. 20: 145-155 (1989); Hillel, et al., Genet. 124:783-789 (1990), all of which are herein incorporated by reference in their entirety).

[0131] The detection of polymorphic sites in a sample of DNA may be facilitated through the use of nucleic acid amplification methods. Such methods specifically increase the concentration of polynucleotides that span the polymorphic site, or include that site and sequences located either distal or proximal to it. Such amplified molecules can be readily detected by gel electrophoresis or other means.

[0132] The most preferred method of achieving such amplification employs the polymerase chain reaction (“PCR”) (Mullis, et al., Cold Spring Harbor Symp. Quant. Biol. 51:263-273 (1986); Erlich, et al., European Patent Appln. 50,424; European Patent Appln. 84,796, European Patent Application 258,017, European Patent Appln. 237,362; Mullis, European Patent Appln. 201,184; Mullis, et al., U.S. Pat. No. 4,683,202; Erlich., U.S. Pat. No. 4,582,788; and Saiki, et al., U.S. Pat. No. 4,683,194, all of which are herein incorporated by reference), using primer pairs that are capable of hybridizing to the proximal sequences that define a polymorphism in its double-stranded form.

[0133] In lieu of PCR, alternative methods, such as the “Ligase Chain Reaction” (“LCR”) may be used (Barany, Proc. Natl. Acad. Sci. (U.S.A.) 88:189-193 (1991), the entirety of which is herein incorporated by reference). LCR uses two pairs of oligonucleotide probes to exponentially amplify a specific target. The sequences of each pair of oligonucleotides is selected to permit the pair to hybridize to abutting sequences of the same strand of the target. Such hybridization forms a substrate for a template-dependent ligase. As with PCR, the resulting products thus serve as a template in subsequent cycles and an exponential amplification of the desired sequence is obtained.

[0134] LCR can be performed with oligonucleotides having the proximal and distal sequences of the same strand of a polymorphic site. In one embodiment, either oligonucleotide will be designed to include the actual polymorphic site of the polymorphism. In such an embodiment, the reaction conditions are selected such that the oligonucleotides can be ligated together only if the target molecule either contains or lacks the specific nucleotide that is complementary to the polymorphic site present on the oligonucleotide. Alternatively, the oligonucleotides may be selected such that they do not include the polymorphic site (see, Segev, PCT Application WO 90/01069, the entirety of which is herein incorporated by reference).

[0135] The “Oligonucleotide Ligation Assay” (“OLA”) may alternatively be employed (Landegren, et al., Science 241:1077-1080 (1988), the entirety of which is herein incorporated by reference). The OLA protocol uses two oligonucleotides which are designed to be capable of hybridizing to abutting sequences of a single strand of a target. OLA, like LCR, is particularly suited for the detection of point mutations. Unlike LCR, however, OLA results in “linear” rather than exponential amplification of the target sequence.

[0136] Nickerson, et al. have described a nucleic acid detection assay that combines attributes of PCR and OLA (Nickerson, et al., Proc. Natl. Acad. Sci. (U.S.A.) 87:8923-8927 (1990), the entirety of which is herein incorporated by reference). In this method, PCR is used to achieve the exponential amplification of target DNA, which is then detected using OLA. In addition to requiring multiple, and separate, processing steps, one problem associated with such combinations is that they inherit all of the problems associated with PCR and OLA.

[0137] Schemes based on ligation of two (or more) oligonucleotides in the presence of nucleic acid having the sequence of the resulting “di-oligonucleotide”, thereby amplifying the di-oligonucleotide, are also known (Wu, et al., Genomics 4:560 (1989), the entirety of which is herein incorporated by reference), and may be readily adapted to the purposes of the present invention.

[0138] Other known nucleic acid amplification procedures, such as allele-specific oligomers, branched DNA technology, transcription-based amplification systems, or isothermal amplification methods may also be used to amplify and analyze such polymorphisms (Malek, et al., U.S. Pat. No. 5,130,238; Davey, et al., European Patent Application 329,822; Schuster et al., U.S. Pat. No. 5,169,766; Miller, et al., PCT Application WO 89/06700; Kwoh, et al., Proc. Natl. Acad. Sci. (U.S.A.) 86:1173-1177 (1989); Gingeras, et al., PCT Application WO 88/10315; Walker, et al., Proc. Natl. Acad. Sci. (U.S.A.) 89:392-396 (1992), all of which are herein incorporated by reference in their entirety).

[0139] The identification of a polymorphism can be determined in a variety of ways. By correlating the presence or absence of it in a plant with the presence or absence of a phenotype, it is possible to predict the phenotype of that plant. If a polymorphism creates or destroys a restriction endonuclease cleavage site, or if it results in the loss or insertion of DNA (e.g., a VNTR polymorphism), it will alter the size or profile of the DNA fragments that are generated by digestion with that restriction endonuclease. As such, individuals that possess a variant sequence can be distinguished from those having the original sequence by restriction fragment analysis. Polymorphisms that can be identified in this manner are termed “restriction fragment length polymorphisms” (“RFLPs”). RFLPs have been widely used in human and plant genetic analyses (Glassberg, UK Patent Application 2135774; Skolnick, et al., Cytogen. Cell Genet. 32:58-67 (1982); Botstein, et al., Ann. J. Hum. Genet. 32:314-331 (1980); Fischer, et al. (PCT Application WO90/13668); Uhlen, PCT Application WO90/11369).

[0140] Polymorphisms can also be identified by Single Strand Conformation Polymorphism (SSCP) analysis. The SSCP technique is a method capable of identifying most sequence variations in a single strand of DNA, typically between 150 and 250 nucleotides in length (Elles, Methods in Molecular Medicine: Molecular Diagnosis of Genetic Diseases, Humana Press (1996), the entirety of which is herein incorporated by reference); Orita et al., Genomics 5: 874-879 (1989), the entirety of which is herein incorporated by reference). Under denaturing conditions a single strand of DNA will adopt a conformation that is uniquely dependent on its sequence conformation. This conformation usually will be different, even if only a single base is changed. Most conformations have been reported to alter the physical configuration or size sufficiently to be detectable by electrophoresis. A number of protocols have been described for SSCP including, but not limited to Lee et al., Anal. Biochem. 205: 289-293 (1992), the entirety of which is herein incorporated by reference; Suzuki et al., Anal. Biochem. 192: 82-84, (1991), the entirety of which is herein incorporated by reference; Lo et al., Nucleic Acids Research 20: 1005-1009 (1992), the entirety of which is herein incorporated by reference; Sarkar et al., Genomics 13: 441-443 (1992), the entirety of which is herein incorporated by reference). It is understood that one or more of the nucleic acids of the present invention, may be utilized as markers or probes to detect polymorphisms by SSCP analysis.

[0141] Polymorphisms may also be found using a DNA fingerprinting technique called amplified fragment length polymorphism (AFLP), which is based on the selective PCR amplification of restriction fragments from a total digest of genomic DNA to profile that DNA. Vos, et al., Nucleic Acids Res. 23:4407-4414 (1995), the entirety of which is herein incorporated by reference. This method allows for the specific co-amplification of high numbers of restriction fragments, which can be visualized by PCR without knowledge of the nucleic acid sequence.

[0142] AFLP employs basically three steps. Initially, a sample of genomic DNA is cut with restriction enzymes and oligonucleotide adapters are ligated to the restriction fragments of the DNA. The restriction fragments are then amplified using PCR by using the adapter and restriction sequence as target sites for primer annealing. The selective amplification is achieved by the use of primers that extend into the restriction fragments, amplifying only those fragments in which the primer extensions match the nucleotide flanking the restriction sites. These amplified fragments are then visualized on a denaturing polyacrylamide gel.

[0143] AFLP analysis has been performed on Salix (Beismann, et al., Mol. Ecol. 6:989-993 (1997), the entirety of which is herein incorporated by reference); Acinetobacter (Janssen, et al., Int. J. Syst. Bacteriol 47:1179-1187 (1997), the entirety of which is herein incorporated by reference), Aeromonas popoffi (Huys, et al., Int. J. Syst. Bacteriol. 47:1165-1171 (1997), the entirety of which is herein incorporated by reference), rice (McCouch, et al., Plant Mol. Biol. 35:89-99 (1997), the entirety of which is herein incorporated by reference); Nandi, et al., Mol. Gen. Genet. 255:1-8 (1997); Cho, et al., Genome 39:373-378 (1996), herein incorporated by reference), barley (Hordeum vulgare)(Simons, et al., Genomics 44:61-70 (1997), the entirety of which is herein incorporated by reference; Waugh, et al., Mol. Gen. Genet. 255:311-321 (1997), the entirety of which is herein incorporated by reference; Qi, et al., Mol. Gen. Genet. 254:330-336 (1997), the entirety of which is herein incorporated by reference; Becker, et al., Mol. Gen. Genet. 249:65-73 (1995), the entirety of which is herein incorporated by reference), potato (Van der Voort, et al., Mol. Gen. Genet. 255:438-447 (1997), the entirety of which is herein incorporated by reference; Meksem, et al., Mol. Gen. Genet. 249:74-81 (1995), the entirety of which is herein incorporated by reference), Phytophthora infestans (Van der Lee, et al., Fungal Genet. Biol. 21:278-291 (1997), the entirety of which is herein incorporated by reference), Bacillus anthracis (Keim, et al., J. Bacteriol. 179:818-824 (1997)), Astragalus cremnophylax (Travis, et al., Mol. Ecol. 5:735-745 (1996), the entirety of which is herein incorporated by reference), Arabidopsis (Cnops, et al., Mol. Gen. Genet. 253:32-41 (1996), the entirety of which is herein incorporated by reference), Escherichia coli (Lin, et al., Nucleic Acids Res. 24:3649-3650 (1996), the entirety of which is herein incorporated by reference), Aeromonas (Huys, et al., Int. J. Syst. Bacteriol. 46:572-580 (1996), the entirety of which is herein incorporated by reference), nematode (Folkertsma, et al., Mol. Plant. Microbe Interact. 9:47-54 (1996), the entirety of which is herein incorporated by reference), tomato (Thomas, et al., Plant J. 8:785-794 (1995), the entirety of which is herein incorporated by reference), and human (Latorra, et al., PCR Methods Appl. 3:351-358 (1994)). AFLP analysis has also been used for fingerprinting mRNA (Money, et al., Nucleic Acids Res. 24:2616-2617 (1996), the entirety of which is herein incorporated by reference; Bachem, et al., Plant J. 9:745-753 (1996), the entirety of which is herein incorporated by reference). It is understood that one or more of the nucleic acids of the present invention, may be utilized as markers or probes to detect polymorphisms by AFLP analysis for fingerprinting mRNA.

[0144] Polymorphisms may also be found using random amplified polymorphic DNA (RAPD) (Williams et al., Nucl. Acids Res. 18: 6531-6535 (1990), the entirety of which is herein incorporated by reference) and cleaveable amplified polymorphic sequences (CAPS) (Lyamichev et al., Science 260: 778-783 (1993), the entirety of which is herein incorporated by reference). It is understood that one or more of the nucleic acids of the present invention, may be utilized as markers or probes to detect polymorphisms by RAPD or CAPS analysis.

[0145] Polymorphisms are useful, through linkage analysis, to define the genetic distances or physical distances between polymorphic traits. A physical map or ordered array of genomic DNA fragments in the desired region containing the gene may be used to characterize and isolate genes corresponding to desirable traits. For this purpose, yeast artificial chromosomes (YACs), bacterial artificial chromosomes (BACs), and cosmids are appropriate vectors for cloning large segments of DNA molecules. Although fewer clones are needed to make a contig for a specific genomic region by using YACs (Agyare et al., Genome Res. 7: 1-9 (1997), the entirety of which is herein incorporated by reference; James et al., Genomics 32: 425-430 (1996), the entirety of which is herein incorporated by reference), chimerism in the inserted DNA fragment can arise. Cosmids are convenient for handling smaller-size DNA molecules and may be used for transformation in developing transgenic plants. BACs also carry DNA fragments and are less prone to chimerism.

[0146] Through genetic mapping, a fine scale linkage map can be developed using DNA markers and, then, a genomic DNA library of large-sized fragments can be screened with molecular markers linked to the desired trait. Molecular markers are advantageous for agronomic traits that are otherwise difficult to tag, such as resistance to pathogens, insects and nematodes, tolerance to abiotic stress, quality parameters and quantitative traits such as high yield potential.

[0147] The essential requirements for marker-assisted selection in a plant breeding program are: (1) the marker(s) should co-segregate or be closely linked with the desired trait; (2) an efficient means of screening large populations for the molecular marker(s) should be available; and (3) the screening technique should have high reproducibility across laboratories and preferably be economical to use and be user-friendly.

[0148] The genetic linkage of marker molecules can be established by a gene mapping model such as, without limitation, the flanking marker model reported by Lander and Botstein, Genetics 121:185-199 (1989) and the interval mapping, based on maximum likelihood methods described by Lander and Botstein, Genetics 121:185-199 (1989) and implemented in the software package MAPMAKER/QTL (Lincoln and Lander, Mapping Genes Controlling Quantitative Traits Using MAPMAKER/QTL, Whitehead Institute for Biomedical Research, Massachusetts, (1990). Additional software includes Qgene, Version 2.23 (1996), Department of Plant Breeding and Biometry, 266 Emerson Hall, Cornell University, Ithaca, N.Y., the manual of which is herein incorporated by reference in its entirety). Use of Qgene software is a particularly preferred approach.

[0149] A maximum likelihood estimate (MLE) for the presence of a marker is calculated, together with an MLE assuming no QTL effect, to avoid false positives. A log₁₀ of an odds ratio (LOD) is then calculated as: LOD=log₁₀(MLE for the presence of a QTL/MLE given no linked QTL).

[0150] The LOD score essentially indicates how much more likely the data are to have arisen assuming the presence of a QTL than in its absence. The LOD threshold value for avoiding a false positive with a given confidence, say 95%, depends on the number of markers and the length of the genome. Graphs indicating LOD thresholds are set forth in Lander and Botstein, Genetics 121:185-199 (1989) the entirety of which is herein incorporated by reference and further described by Arús and Moreno-González, Plant Breeding, Hayward et al., (eds.) Chapman & Hall, London, pp. 314-331 (1993), the entirety of which is herein incorporated by reference.

[0151] Additional models can be used. Many modifications and alternative approaches to interval mapping have been reported, including the use of non-parametric methods (Kruglyak and Lander, Genetics 139:1421-1428 (1995), the entirety of which is herein incorporated by reference). Multiple regression methods or models can be also be used, in which the trait is regressed on a large number of markers (Jansen, Biometrics in Plant Breeding, van Oijen and Jansen (eds.), Proceedings of the Ninth Meeting of the Eucarpia Section Biometrics in Plant Breeding, The Netherlands, pp. 116-124 (1994); Weber and Wricke, Advances in Plant Breeding, Blackwell, Berlin, 16 (1994), both of which is herein incorporated by reference in their entirety). Procedures combining interval mapping with regression analysis, whereby the phenotype is regressed onto a single putative QTL at a given marker interval and at the same time onto a number of markers that serve as ‘cofactors,’ have been reported by Jansen and Stam, Genetics 136:1447-1455 (1994), the entirety of which is herein incorporated by reference and Zeng, Genetics 136:1457-1468 (1994) the entirety of which is herein incorporated by reference. Generally, the use of cofactors reduces the bias and sampling error of the estimated QTL positions (Utz and Melchinger, Biometrics in Plant Breeding, van Oijen and Jansen (eds.) Proceedings of the Ninth Meeting of the Eucarpia Section Biometrics in Plant Breeding, The Netherlands, pp. 195-204 (1994), the entirety of which is herein incorporated by reference, thereby improving the precision and efficiency of QTL mapping (Zeng, Genetics 136:1457-1468 (1994)). These models can be extended to multi-environment experiments to analyze genotype-environment interactions (Jansen et al., Theo. Appl. Genet. 91:33-37 (1995), the entirety of which is herein incorporated by reference).

[0152] Selection of an appropriate mapping population is important to map construction. The choice of an appropriate mapping population depends on the type of marker systems employed (Tanksley et al., Molecular mapping plant chromosomes. Chromosome structure and function: Impact of new concepts, Gustafson and Appels (eds.), Plenum Press, New York, pp 157-173 (1988), the entirety of which is herein incorporated by reference). Consideration must be given to the source of parents (adapted vs. exotic) used in the mapping population. Chromosome pairing and recombination rates can be severely disturbed (suppressed) in wide crosses (adapted×exotic) and generally yield greatly reduced linkage distances. Wide crosses will usually provide segregating populations with a relatively large array of polymorphisms when compared to progeny in a narrow cross (adapted×adapted).

[0153] An F₂ population is the first generation of selfing after the hybrid seed is produced. Usually a single F₁ plant is selfed to generate a population segregating for all the genes in Mendelian (1:2:1) fashion. Maximum genetic information is obtained from a completely classified F₂ population using a codominant marker system (Mather, Measurement of Linkage in Heredity, Methuen and Co., (1938), the entirety of which is herein incorporated by reference). In the case of dominant markers, progeny tests (e.g. F₃, BCF₂) are required to identify the heterozygotes, thus making it equivalent to a completely classified F₂ population. However, this procedure is often prohibitive because of the cost and time involved in progeny testing. Progeny testing of F₂ individuals is often used in map construction where phenotypes do not consistently reflect genotype (e.g. disease resistance) or where trait expression is controlled by a QTL. Segregation data from progeny test populations (e.g. F₃ or BCF₂) can be used in map construction. Marker-assisted selection can then be applied to cross progeny based on marker-trait map associations (F₂, F₃), where linkage groups have not been completely disassociated by recombination events (i.e., maximum disequilibrium).

[0154] Recombinant inbred lines (RIL) (genetically related lines; usually >F₅, developed from continuously selfing F₂ lines towards homozygosity) can be used as a mapping population. Information obtained from dominant markers can be maximized by using RIL because all loci are homozygous or nearly so. Under conditions of tight linkage (i.e., about <10% recombination), dominant and co-dominant markers evaluated in RIL populations provide more information per individual than either marker type in backcross populations (Reiter et al., Proc. Natl. Acad. Sci. (U.S.A.) 89:1477-1481 (1992), the entirety of which is herein incorporated by reference). However, as the distance between markers becomes larger (i.e., loci become more independent), the information in RIL populations decreases dramatically when compared to codominant markers.

[0155] Backcross populations (e.g., generated from a cross between a successful variety (recurrent parent) and another variety (donor parent) carrying a trait not present in the former) can be utilized as a mapping population. A series of backcrosses to the recurrent parent can be made to recover most of its desirable traits. Thus a population is created consisting of individuals nearly like the recurrent parent but each individual carries varying amounts or mosaic of genomic regions from the donor parent. Backcross populations can be useful for mapping dominant markers if all loci in the recurrent parent are homozygous and the donor and recurrent parent have contrasting polymorphic marker alleles (Reiter et al., Proc. Natl. Acad. Sci. (U.S.A.) 89:1477-1481 (1992)). Information obtained from backcross populations using either codominant or dominant markers is less than that obtained from F₂ populations because one, rather than two, recombinant gametes are sampled per plant. Backcross populations, however, are more informative (at low marker saturation) when compared to RILs as the distance between linked loci increases in RIL populations (i.e. about 15% recombination). Increased recombination can be beneficial for resolution of tight linkages, but may be undesirable in the construction of maps with low marker saturation.

[0156] Near-isogenic lines (NIL) created by many backcrosses to produce an array of individuals that are nearly identical in genetic composition except for the trait or genomic region under interrogation can be used as a mapping population. In mapping with NILs, only a portion of the polymorphic loci are expected to map to a selected region.

[0157] Bulk segregant analysis (BSA) is a method developed for the rapid identification of linkage between markers and traits of interest (Michelmore et al., Proc. Natl. Acad. Sci. (U.S.A.) 88:9828-9832 (1991), the entirety of which is herein incorporated by reference). In BSA, two bulked DNA samples are drawn from a segregating population originating from a single cross. These bulks contain individuals that are identical for a particular trait (resistant or susceptible to particular disease) or genomic region but arbitrary at unlinked regions (i.e. heterozygous). Regions unlinked to the target region will not differ between the bulked samples of many individuals in BSA.

[0158] It is understood that one or more of the nucleic acid molecules of the present invention may be used as molecular markers. It is also understood that one or more of the protein molecules of the present invention may be used as molecular markers.

[0159] In accordance with this aspect of the present invention, a sample nucleic acid is obtained from plants cells or tissues. Any source of nucleic acid may be used. Preferably, the nucleic acid is genomic DNA. The nucleic acid is subjected to restriction endonuclease digestion. For example, one or more EST nucleic acid molecule or fragment thereof can be used as a probe in accordance with the above-described polymorphic methods. The polymorphism obtained in this approach can then be cloned to identify the mutation at the coding region which alters the protein's structure or regulatory region of the gene which affects its expression level.

[0160] In one aspect of the present invention, an evaluation can be conducted to determine whether a particular mRNA molecule is present. One or more of the nucleic acid molecules of the present invention, preferably one or more of the EST nucleic acid molecules of the present invention are utilized to detect the presence or quantity of the mRNA species. Such molecules are then incubated with cell or tissue extracts of a plant under conditions sufficient to permit nucleic acid hybridization. The detection of double-stranded probe-mRNA hybrid molecules is indicative of the presence of the mRNA; the amount of such hybrid formed is proportional to the amount of mRNA. Thus, such probes may be used to ascertain the level and extent of the mRNA production in a plant's cells or tissues. Such nucleic acid hybridization may be conducted under quantitative conditions (thereby providing a numerical value of the amount of the mRNA present). Alternatively, the assay may be conducted as a qualitative assay that indicates either that the mRNA is present, or that its level exceeds a user set, predefined value.

[0161] A principle of in situ hybridization is that a labeled, single-stranded nucleic acid probe will hybridize to a complementary strand of cellular DNA or RNA and, under the appropriate conditions, these molecules will form a stable hybrid. When nucleic acid hybridization is combined with histological techniques, specific DNA or RNA sequences can be identified within a single cell. An advantage of in situ hybridization over more conventional techniques for the detection of nucleic acids is that it allows an investigator to determine the precise spatial population (Angerer et al., Dev. Biol. 101: 477-484 (1984), the entirety of which is herein incorporated by reference; Angerer et al., Dev. Biol. 112: 157-166 (1985), the entirety of which is herein incorporated by reference; Dixon et al., EMBO J. 10: 1317-1324 (1991), the entirety of which is herein incorporated by reference). In situ hybridization may be used to measure the steady-state level of RNA accumulation. It is a sensitive technique and RNA sequences present in as few as 5-10 copies per cell can be detected (Hardin et al., J. Mol. Biol. 202: 417-431.(1989), the entirety of which is herein incorporated by reference). A number of protocols have been devised for in situ hybridization, each with tissue preparation, hybridization, and washing conditions (Meyerowitz, Plant Mol. Biol. Rep. 5: 242-250 (1987), the entirety of which is herein incorporated by reference; Cox and Goldberg, In: Plant Molecular Biology: A Practical Approach (ed. C. H. Shaw), pp. 1-35. IRL Press, Oxford (1988), the entirety of which is herein incorporated by reference; Raikhel et al., In situ RNA hybridization in plant tissues. In Plant Molecular Biology Manual, vol. B9: 1-32. Kluwer Academic Publisher, Dordrecht, Belgium (1989), the entirety of which is herein incorporated by reference).

[0162] In situ hybridization also allows for the localization of proteins within a tissue or cell (Wilkinson, In Situ Hybridization, Oxford University Press, Oxford (1992), the entirety of which is herein incorporated by reference; Langdale, In Situ Hybridization 165-179 In: The Maize Handbook, eds. Freeling and Walbot, Springer-Verlag, New York (1994), the entirety of which is herein incorporated by reference). It is understood that one or more of the molecules of the present invention, preferably one or more of the EST nucleic acid molecules of the present invention or one or more of the antibodies of the present invention may be utilized to detect the level or pattern of a protein or fragment thereof by in situ hybridization.

[0163] Fluorescent in situ hybridization also enables the localization of a particular DNA sequence along a chromosome which is useful, among other uses, for gene mapping, following chromosomes in hybrid lines or detecting chromosomes with translocations, transversions or deletions. In situ hybridization has been used to identify chromosomes in several plant species (Griffor et al., Plant Mol. Biol. 17: 101-109 (1991), the entirety of which is herein incorporated by reference; Gustafson et al., Proc. Nat'l. Acad. Sci. (U.S.A). 87: 1899-1902 (1990), herein incorporated by reference; Mukai and Gill, Genome 34: 448-452. (1991); Schwarzacher and Heslop-Harrison, Genome 34: 317-323 (1991); Wang et al., Jpn. J. Genet. 66: 313-316 (1991), the entirety of which is herein incorporated by reference; Parra and Windle, Nature Genetics, 5: 17-21 (1993), the entirety of which is herein incorporated by reference). It is understood that the nucleic acid molecules of the present invention may be used as probes or markers to localize sequences along a chromosome.

[0164] It is also understood that one or more of the molecules of the present invention, preferably one or more of the EST nucleic acid molecules of the present invention or one or more of the antibodies of the present invention may be utilized to detect the expression level or pattern of a protein or mRNA thereof by in situ hybridization.

[0165] Another method to localize the expression of a molecule is tissue printing. Tissue printing provides a way to screen, at the same time on the same membrane many tissue sections from different plants or different developmental stages. Tissue-printing procedures utilize films designed to immobilize proteins and nucleic acids. In essence, a freshly cut section of an organ is pressed gently onto nitrocellulose paper, nylon membrane or polyvinylidene difluoride membrane. Such membranes are commercially available (e.g. Millipore, Bedford, Mass.). The contents of the cut cell transfer onto the membrane, and the molecules are immobilized to the membrane. The immobilized molecules form a latent print that can be visualized with appropriate probes. When a plant tissue print is made on nitrocellulose paper, the cell walls leave a physical print that makes the anatomy visible without further treatment (Varner and Taylor, Plant Physiol. 91: 31-33 (1989), the entirety of which is herein incorporated by reference).

[0166] Tissue printing on substrate films is described by Daoust, Exp. Cell Res. 12: 203-211 (1957), the entirety of which is herein incorporated by reference, who detected amylase, protease, ribonuclease, and deoxyribonuclease in animal tissues using starch, gelatin, and agar films. These techniques can be applied to plant tissues (Yomo and Taylor, Planta 112:3543 (1973); Harris and Chrispeels, Plant Physiol. 56: 292-299 (1975). Advances in membrane technology have increased the range of applications of Daoust's tissue-printing techniques allowing (Cassab and Varner, J. Cell. Biol. 105: 2581-2588 (1987), the entirety of which is herein incorporated by reference; the histochemical localization of various plant enzymes and deoxyribonuclease on nitrocellulose paper and nylon (Spruce et al., Phytochemistry, 26: 2901-2903 (1987), the entirety of which is herein incorporated by reference; Barres et al. Neuron 5: 527-544 (1990), the entirety of which is herein incorporated by reference; the entirety of which is herein incorporated by reference; Reid and Pont-Lezica, Tissue Printing: Tools for the Study of Anatomy, Histochemistry, and Gene Expression, Academic Press, New York, N.Y. (1992), the entirety of which is herein incorporated by reference; Reid et al. Plant Physiol. 93: 160-165 (1990), herein incorporate by reference; Ye et al. Plant J. 1: 175-183 (1991), the entirety of which is herein incorporated by reference).

[0167] It is understood that one or more of the molecules of the present invention, preferably one or more of the EST nucleic acid molecules of the present invention or one or more of the antibodies of the present invention may be utilized to detect the presence or quantity of a protein by tissue printing.

[0168] Further, it is also understood that any of the nucleic acid molecules of the present invention may be used as marker nucleic acids and or probes in connection with methods that require probes or marker nucleic acids. As used herein, a probe is an agent that is utilized to determine an attribute or feature (e.g. presence or absence, location, correlation, etc.) or a molecule, cell, tissue or plant. As used herein, a marker nucleic acid is a nucleic acid molecule that is utilized to determine an attribute or feature (e.g., presence or absence, location, correlation, etc.) or a molecule, cell, tissue or plant.

[0169] A microarray-based method for high-throughput monitoring of plant gene expression may be utilized to measure gene-specific hybridization targets. This ‘chip’-based approach involves using microarrays of nucleic acid molecules as gene-specific hybridization targets to quantitatively measure expression of the corresponding plant genes (Schena et al., Science 270: 467-470 (1995), the entirety of which is herein incorporated by reference; Shalon, Ph.D. Thesis. Stanford University (1996), the entirety of which is herein incorporated by reference). Every nucleotide in a large sequence can be queried at the same time. Hybridization can be used to efficiently analyze large amounts of nucleotide sequence.

[0170] Several microarray methods have been described. One method compares the sequences to be analyzed by hybridization to a set of oligonucleotides representing all possible subsequences (Bains and Smith, J. Theor. Biol. 135: 303 (1989), the entirety of which is herein incorporated by reference). A second method hybridizes the sample to an array of oligonucleotide probes. An array consisting of oligonucleotides complementary to subsequences of a target sequence can be used to determine the identity of a target sequence, measure its amount, and detect differences between the target and a reference sequence. Nucleic acid molecules microarrays may also be screened with protein molecules or fragments thereof to determine nucleic acid molecules that specifically bind protein molecules or fragments thereof.

[0171] The microarray approach may be used with polypeptide targets (U.S. Pat. No. 5,445,934; U.S. Pat. No. 5,143,854; U.S. Pat. No. 5,079,600; U.S. Pat. No. 4,923,901, all of which are herein incorporated by reference in their entirety). Essentially, polypeptides are synthesized on a substrate (microarray) and these polypeptides can be screened with either protein molecules or fragments thereof or nucleic acid molecules in order to screen for either protein molecules or fragments thereof or nucleic acid molecules that specifically bind the target polypeptides. Implementation of these techniques rely on recently developed combinatorial technologies to generate any ordered array of a large number of oligonucleotide probes (Fodor et al., Science 251:767-773 (1991), the entirety of which is herein incorporated by reference).

[0172] It is understood that one or more of the molecules of the present invention, preferably one or more of the nucleic acid molecules or protein molecules or fragments thereof of the present invention may be utilized in a microarray based method.

[0173] In a preferred embodiment of the present invention microarrays may be prepared that comprise nucleic acid molecules where preferably at least 10%, preferably at least 25%, more preferably at least 50% and even more preferably at least 75%, 80%, 85%, 90% or 95% of the nucleic acid molecules located on that array are selected from the group of nucleic acid molecules that specifically hybridize to one or more nucleic acid molecule having a nucleic acid sequence selected from the group of SEQ ID NO: 1 through SEQ ID NO: 48629 or complement thereof or fragments of either.

[0174] A particular preferred microarray embodiment of the present invention is a microarray comprising nucleic acid molecules encoding genes or fragments thereof that are homologues of known genes or nucleic acid molecules that comprise genes or fragment thereof that elicit only limited or no matches to known genes. A further preferred microarray embodiment of the present invention is a microarray comprising nucleic acid molecules having genes or fragments thereof that are homologues of known genes and nucleic acid molecules that comprise genes or fragment thereof that elicit only limited or no matches to known genes. Site-directed mutagenesis may be utilized to modify nucleic acid sequences, particularly as it is a technique that allows one or more of the amino acids encoded by a nucleic acid molecule to be altered (e.g. a threonine to be replaced by a methionine). Three basic methods for site-directed mutagenesis are often employed. These are cassette mutagenesis (Wells et al., Gene 34:315-23 (1985), the entirety of which is herein incorporated by reference), primer extension (Gilliam et al., Gene 12:129-137 (1980), the entirety of which is herein incorporated by reference); Zoller and Smith, Methods Enzymol. 100:468-500 (1983), the entirety of which is herein incorporated by reference; and Dalbadie-McFarland et al., Proc. Natl. Acad. Sci. (U.S.A.) 79:6409-6413 (1982), the entirety of which is herein incorporated by reference) and methods based upon PCR (Scharf et al., Science 233:1076-1078 (1986), the entirety of which is herein incorporated by reference; Higuchi et al., Nucleic Acids Res. 16:7351-7367 (1988), the entirety of which is herein incorporated by reference). Site-directed mutagenesis approaches are also described in European Patent 0 385 962, the entirety of which is herein incorporated by reference, European Patent 0 359 472, the entirety of which is herein incorporated by reference, and PCT Patent Application WO 93/07278, the entirety of which is herein incorporated by reference.

[0175] Site-directed mutagenesis strategies have been applied to plants for both in vitro as well as in vivo site-directed mutagenesis (Lanz et al., J. Biol. Chem. 266:9971-6 (1991), the entirety of which is herein incorporated by reference; Kovgan and Zhdanov, Biotekhnologiya 5:148-154; No. 207160n, Chemical Abstracts 110:225 (1989), the entirety of which is herein incorporated by reference; Ge et al., Proc. Natl. Acad. Sci. (U.S.A.) 86:4037-4041 (1989), the entirety of which is herein incorporated by reference, Zhu et al., J. Biol. Chem. 271:18494-18498 (1996), Chu et al., Biochemistry 33:6150-6157 (1994), the entirety of which is herein incorporated by reference, Small et al., EMBO J. 11:1291-1296 (1992), the entirety of which is herein incorporated by reference, Cho et al., Mol. Biotechnol. 8:13-16 (1997), Kita et al., J. Biol. Chem. 271:26529-26535 (1996), the entirety of which is herein incorporated by reference, Jin et al., Mol. Microbiol. 7:555-562 (1993), the entirety of which is herein incorporated by reference, Hatfield and Vierstra, J. Biol. Chem. 267:14799-14803 (1992), the entirety of which is herein incorporated by reference, Zhao et al., Biochemistry 31:5093-5099 (1992), the entirety of which is herein incorporated by reference).

[0176] Any of the nucleic acid molecules of the present invention may either be modified by site-directed mutagenesis or used as, for example, nucleic acid molecules that are used to target other nucleic acid molecules for modification. It is understood that mutants with more than one altered nucleotide can be constructed using techniques that practitioners skilled in the art are familiar with such as isolating restriction fragments and ligating such fragments into an expression vector (see, for example, Sambrook et al., Molecular Cloning: A Laboratory Manual, Cold Spring Harbor Press (1989)).

[0177] Sequence-specific DNA-binding proteins play a role in the regulation of transcription. The isolation of recombinant cDNAs encoding these proteins facilitates the biochemical analysis of their structural and functional properties. Genes encoding such DNA-binding proteins have, been isolated using classical genetics (Vollbrecht et al., Nature 350: 241-243 (1991), the entirety of which is herein incorporated by reference) and molecular biochemical approaches, including the screening of recombinant cDNA libraries with antibodies (Landschulz et al., Genes Dev. 2: 786-800 (1988), the entirety of which is herein incorporated by reference) or DNA probes (Bodner et al., Cell 55: 505-518 (1988), the entirety of which is herein incorporated by reference). In addition, an in situ screening procedure has been used and has facilitated the isolation of sequence-specific DNA-binding proteins from various plant species (Gilmartin et al., Plant Cell 4: 839-849 (1992), the entirety of which is herein incorporated by reference; Schindler et al., EMBO J. 11: 1261-1273 (1992) the entirety of which is herein incorporated by reference). An in situ screening protocol does not require the purification of the protein of interest (Vinson et al., Genes Dev. 2: 801-806 (1988), the entirety of which is herein incorporated by reference; Singh et al., Cell 52: 415-423 (1988), the entirety of which is herein incorporated by reference).

[0178] Steps may be employed to characterize DNA-protein interactions. The first is to identify promoter fragments that interact with DNA-binding proteins, to titrate binding activity, to determine the specificity of binding, and to determine whether a given DNA-binding activity can interact with related DNA sequences (Sambrook et al., Molecular Cloning: A Laboratory Manual, 2^{nd} edition. Cold Spring Harbor Laboratory Press, Cold Spring Harbor, N.Y. (1989). Electrophoretic mobility-shift assay is a widely used assay. The assay provides a simple, rapid, and sensitive method for detecting DNA-binding proteins based on the observation that the mobility of a DNA fragment through a nondenaturing, low-ionic strength polyacrylamide gel is retarded upon association with a DNA-binding protein (Fried and Crother, Nucleic Acids Res. 9: 6505-6525 (1981), the entirety of which is herein incorporated by reference). When one or more specific binding activities have been identified, the exact sequence of the DNA bound by the protein may be determined. Several procedures for characterizing protein/DNA-binding sites are used, including methylation and ethylation interference assays (Maxam and Gilbert, Methods Enzymol. 65: 499-560 (1980), the entirety of which is herein incorporated by reference; Wissman and Hillen, Methods Enzymol. 208: 365-379 (1991), the entirety of which is herein incorporated by reference) and footprinting techniques employing DNase I (Galas and Schmitz, Nucleic Acids Res. 5: 3157-3170 (1978), the entirety of which is herein incorporated by reference), 1,10-phenanthroline-copper ion methods (Sigman et al., Methods Enzymol. 208: 365-379 (1991), the entirety of which is herein incorporated by reference) or hydroxyl radical methods (Dixon et al., Methods Enzymol. 208: 380-413 (1991), the entirety of which is herein incorporated by reference). It is understood that one or more of the nucleic acid molecules of the present invention, preferably one or more of the EST nucleic acid molecules of the present invention may be utilized to identify a protein or fragment thereof that specifically binds to a nucleic acid molecule of the present invention. It is also understood that one or more of the protein molecules or fragments thereof of the present invention may be utilized to identify a nucleic acid molecule that specifically binds to it.

[0179] The two-hybrid system is based on the fact that many cellular functions are carried out by proteins that interact (physically) with one another. Two-hybrid systems have been used to probe the function of new proteins (Chien et al., Proc. Natl. Acad. Sci. (U.S.A.) 88: 9578-9582 (1991) the entirety of which is herein incorporated by reference; Durfee et al., Genes Dev. 7: 555-569 (1993) the entirety of which is herein incorporated by reference; Choi et al., Cell 78: 499-512 (1994), the entirety of which is herein incorporated by reference; Kranz et al., Genes Dev. 8: 313-327 (1994), the entirety of which is herein incorporated by reference).

[0180] Interaction mating techniques have facilitated a number of two-hybrid studies of protein-protein interaction. Interaction mating has been used to examine interactions between small sets of tens of proteins (Finley and Brent, Proc. Natl. Acad. Sci. (U.S.A.) 91: 12098-12984 (1994), the entirety of which is herein incorporated by reference), larger sets of hundreds of proteins, (Bendixen et al., Nucl. Acids Res. 22: 1778-1779 (1994), the entirety of which is herein incorporated by reference) and to comprehensively map proteins encoded by a small genome (Bartel et al., Nature Genetics 12: 72-77 (1996), the entirety of which is herein incorporated by reference). This technique utilizes proteins fused to the DNA-binding domain and proteins fused to the activation domain. They are expressed in two different haploid yeast strains of opposite mating type, and the strains are mated to determine if the two proteins interact. Mating occurs when haploid yeast strains come into contact and result in the fusion of the two haploids into a diploid yeast strain. An interaction can be determined by the activation of a two-hybrid reporter gene in the diploid strain. The primary advantage of this technique is that it reduces the number of yeast transformations needed to test individual interactions. It is understood that the protein-protein interactions of protein or fragments thereof of the present invention may be investigated using the two-hybrid system and that any of the nucleic acid molecules of the present invention that encode such proteins or fragments thereof may be used to transform yeast in the two-hybrid system.

[0181] Synechocystis 6803 is a photosynthetic Cyanobacterium capable of oxygenic photosynthesis as well as heterotrophic growth in the absence of light. The entire genome has been sequenced, and it is reported to have a circular genome size of 3.57 Mbp containing 3168 potential open reading frames. Open reading frames (ORFs) were identified based upon their homology to other reported ORFs and by using ORF identification computer programs. Sixteen hundred potential ORFs were assigned based on their homology to previously identified ORFs. Of these 1600 ORFs, 145 were identical to reported ORFs (Kaneko et al., DNA Research 3:109-36 (1996), herein incorporated by reference in its entirety).

[0182] Several prokaryote promoters have been used in Synechocystis to express heterologous genes including the tac, lac, and lambda phage promoters (Bryant (ed.), The Molecular Biology of Cyanobacteria, Kluwer Academic Publishers, (1994); Ferino and Chauvat, Gene 84:257-266 (1989), both of which are herein incorporated by reference in their entirety). Several bacterial origins of replication such as RSF1010 and ACYC are reported to replicate in Synechocystis (Mermet-Bouvier and Chauvat, Current Microbiology 28:145-148 (1994); Kuhlemeier et al., Mol. Gen. Genet. 184:249-254 (1981), both of which are herein incorporated by reference in their entirety).

[0183] Synechocystis has been used to study gene regulation by gene replacement through homologous recombination or by gene disruption using antibiotic resistance markers (Pakrasi et al., EMBO 7:325-332 (1988), herein incorporated by reference in its entirety). In such gene regulation studies, double reciprocal homologous regions of the host genome flanking the gene of interest recombine to stably integrate the gene of interest into the genome. The gene of interest can be expressed once that gene has been stably integrated into the genome. Biochemical analysis can be performed to study the effect of the replaced or deleted gene.

[0184] It is understood that the agents of the present invention may be employed in a Synechocystis system.

[0185] Exogenous genetic material may be transferred into a plant cell and the plant cell regenerated into a whole, fertile or sterile plant. Exogenous genetic material is any genetic material, whether naturally occurring or otherwise, from any source that is capable of being inserted into any organism. Such genetic material may be transferred into either monocotyledons and dicotyledons including but not limited to the crops, maize and soybean (See specifically, Chistou, Particle Bombardment for Genetic Engineering of Plants, pp 63-69 (maize), pp 50-60 (soybean), Biotechnology Intelligence Unit. Academic Press, San Diego, Calif. (1996), the entirety of which is herein incorporated by reference and generally Chistou, Particle Bombardment for Genetic Engineering of Plants, Biotechnology Intelligence Unit. Academic Press, San Diego, Calif. (1996), the entirety of which is herein incorporated by reference).

[0186] Transfer of a nucleic acid that encodes for a protein can result in overexpression of that protein in a transformed cell or transgenic plant. One or more of the proteins or fragments thereof encoded by nucleic acid molecules of the present invention may be overexpressed in a transformed cell or transformed plant. Such overexpression may be the result of transient or stable transfer of the exogenous material.

[0187] Exogenous genetic material may be transferred into a plant cell by the use of a DNA vector or construct designed for such a purpose. Design of such a vector is generally within the skill of the art (See, Plant Molecular Biology: A Laboratory Manual eds. Clark, Springer, New York (1997), the entirety of which is herein incorporated by reference).

[0188] A construct or vector may include a plant promoter to express the protein or protein fragment of choice. A number of promoters which are active in plant cells have been described in the literature. These include the nopaline synthase (NOS) promoter (Ebert et al., Proc. Natl. Acad. Sci. (U.S.A.) 84:5745-5749 (1987), the entirety of which is herein incorporated by reference), the octopine synthase (OCS) promoter (which are carried on tumor-inducing plasmids of Agrobacterium tumefaciens), the caulimovirus promoters such as the cauliflower mosaic virus (CaMV) 19S promoter (Lawton et al., Plant Mol. Biol. 9:315-324 (1987), the entirety of which is herein incorporated by reference) and the CAMV 35S promoter (Odell et al., Nature 313:810-812 (1985), the entirety of which is herein incorporated by reference), the figwort mosaic virus 35S-promoter, the light-inducible promoter from the small subunit of ribulose-1,5-bis-phosphate carboxylase (ssRUBISCO), the Adh promoter (Walker et al., Proc. Natl. Acad. Sci. (U.S.A.) 84:6624-6628 (1987), the entirety of which is herein incorporated by reference), the sucrose synthase promoter (Yang et al., Proc. Natl. Acad. Sci. (U.S.A.) 87:4144-4148 (1990), the entirety of which is herein incorporated by reference), the R gene complex promoter (Chandler et al., The Plant Cell 1: 1175-1183 (1989), the entirety of which is herein incorporated by reference), and the chlorophyll a/b binding protein gene promoter, etc. These promoters have been used to create DNA constructs which have been expressed in plants; see, e.g., PCT publication WO 84/02913, herein incorporated by reference in its entirety.

[0189] Promoters which are known or are found to cause transcription of DNA in plant cells can be used in the present invention. Such promoters may be obtained from a variety of sources such as plants and plant viruses. It is preferred that the particular promoter selected should be capable of causing sufficient expression to result in the production of an effective amount of a protein to cause the desired phenotype. In addition to promoters which are known to cause transcription of DNA in plant cells, other promoters may be identified for use in the current invention by screening a plant cDNA library for genes which are selectively or preferably expressed in the target tissues or cells.

[0190] For the purpose of expression in source tissues of the plant, such as the leaf, seed, root or stem, it is preferred that the promoters utilized in the present invention have relatively high expression in these specific tissues. For this purpose, one may choose from a number of promoters for genes with tissue- or cell-specific or -enhanced expression. Examples of such promoters reported in the literature include the chloroplast glutamine synthetase GS2 promoter from pea (Edwards et al., Proc. Natl. Acad. Sci. (U.S.A.) 87:3459-3463 (1990), herein incorporated by reference in its entirety), the chloroplast fructose-1,6-biphosphatase (FBPase) promoter from wheat (Lloyd et al., Mol. Gen. Genet. 225:209-216 (1991), herein incorporated by reference in its entirety), the nuclear photosynthetic ST-LS1 promoter from potato (Stockhaus et al., EMBO J. 8:2445-2451 (1989), herein incorporated by reference in its entirety), the phenylalanine ammonia-lyase (PAL) promoter and the chalcone synthase (CHS) promoter from Arabidopsis thaliana. Also reported to be active in photosynthetically active tissues are the ribulose-1,5-bisphosphate carboxylase (RbcS) promoter from eastern larch (Larix laricina), the promoter for the cab gene, cab6, from pine (Yamamoto et al., Plant Cell Physiol. 35:773-778 (1994), herein incorporated by reference in its entirety), the promoter for the Cab-1 gene from wheat (Fejes et al., Plant Mol. Biol. 15:921-932 (1990), herein incorporated by reference in its entirety), the promoter for the CAB-1 gene from spinach (Lubberstedt et al., Plant Physiol. 104:997-1006 (1994), herein incorporated by reference in its entirety), the promoter for the cab1R gene from rice (Luan et al., Plant Cell. 4:971-981 (1992), the entirety of which is herein incorporated by reference), the pyruvate, orthophosphate dikinase (PPDK) promoter from maize (Matsuoka et al., Proc. Natl. Acad. Sci. (U.S.A.) 90: 9586-9590 (1993), herein incorporated by reference in its entirety), the promoter for the tobacco Lhcbl*2 gene (Cerdan et al., Plant Mol. Biol. 33: 245-255. (1997), herein incorporated by reference in its entirety), the Arabidopsis thaliana SUC2 sucrose-H+ symporter promoter (Truernit et al., Planta. 196: 564-570 (1995), herein incorporated by reference in its entirety), and the promoter for the thylacoid membrane proteins from spinach (psaD, psaF, psaE, PC, FNR, atpC, atpD, cab, rbcS). Other promoters for the chlorophyl a/b-binding proteins may also be utilized in the present invention, such as the promoters for LhcB gene and PsbP gene from white mustard (Sinapis alba; Kretsch et al., Plant Mol. Biol. 28: 219-229 (1995), the entirety of which is herein incorporated by reference).

[0191] For the purpose of expression in sink tissues of the plant, such as the tuber of the potato plant, the fruit of tomato, or the seed of maize, wheat, rice, and barley, it is preferred that the promoters utilized in the present invention have relatively high expression in these specific tissues. A number of promoters for genes with tuber-specific or -enhanced expression are known, including the class I patatin promoter (Bevan et al., EMBO J. 8: 1899-1906 (1986); Jefferson et al., Plant Mol. Biol. 14: 995-1006 (1990), both of which are herein incorporated by reference in its entirety), the promoter for the potato tuber ADPGPP genes, both the large and small subunits, the sucrose synthase promoter (Salanoubat and Belliard, Gene. 60: 47-56 (1987), Salanoubat and Belliard, Gene. 84: 181-185 (1989), both of which are incorporated by reference in their entirety), the promoter for the major tuber proteins including the 22 kd protein complexes and proteinase inhibitors (Hannapel, Plant Physiol. 101: 703-704 (1993), herein incorporated by reference in its entirety), the promoter for the granule bound starch synthase gene (GBSS) (Visser et al., Plant Mol. Biol. 17: 691-699 (1991), herein incorporated by reference in its entirety), and other class I and II patatins promoters (Koster-Topfer et al., Mol Gen Genet. 219: 390-396 (1989); Mignery et al., Gene. 62: 27-44 (1988), both of which are herein incorporated by reference in their entirety).

[0192] Other promoters can also be used to express a fructose 1,6 bisphosphate aldolase gene in specific tissues, such as seeds or fruits. The promoter for β-conglycinin (Chen et al., Dev. Genet. 10: 112-122 (1989), herein incorporated by reference in its entirety) or other seed-specific promoters such as the napin and phaseolin promoters, can be used. The zeins are a group of storage proteins found in maize endosperm. Genomic clones for zein genes have been isolated (Pedersen et al., Cell 29: 1015-1026 (1982), herein incorporated by reference in its entirety), and the promoters from these clones, including the 15 kD, 16 kD, 19 kD, 22 kD, 27 kD, and gamma genes, could also be used. Other promoters known to function, for example, in maize, include the promoters for the following genes: waxy, Brittle, Shrunken 2, Branching enzymes I and II, starch synthases, debranching enzymes, oleosins, glutelins, and sucrose synthases. A particularly preferred promoter for maize endosperm expression is the promoter for the glutelin gene from rice, more particularly the Osgt-1 promoter (Zheng et al., Mol. Cell Biol. 13: 5829-5842 (1993), herein incorporated by reference in its entirety). Examples of promoters suitable for expression in wheat include those promoters for the ADPglucose pyrophosphorylase (ADPGPP) subunits, the granule bound and other starch synthases, the branching and debranching enzymes, the embryogenesis-abundant proteins, the gliadins, and the glutenins. Examples of such promoters in rice include those promoters for the ADPGPP subunits, the granule bound and other starch synthases, the branching enzymes, the debranching enzymes, sucrose synthases, and the glutelins. A particularly preferred promoter is the promoter for rice glutelin, Osgt-1. Examples of such promoters for barley include those for the ADPGPP subunits, the granule bound and other starch synthases, the branching enzymes, the debranching enzymes, sucrose synthases, the hordeins, the embryo globulins, and the aleurone specific proteins.

[0193] Root specific promoters may also be used. An example of such a promoter is the promoter for the acid chitinase gene (Samac et al., Plant Mol. Biol. 25: 587-596 (1994), the entirety of which is herein incorporated by reference). Expression in root tissue could also be accomplished by utilizing the root specific subdomains of the CaMV35S promoter that have been identified (Lam et al., Proc. Natl. Acad. Sci. (U.S.A.) 86:7890-7894 (1989), herein incorporated by reference in its entirety). Other root cell specific promoters include those reported by Conkling et al. (Conkling et al., Plant Physiol. 93:1203-1211 (1990), the entirety of which is herein incorporated by reference).

[0194] Additional promoters that may be utilized are described, for example, in U.S. Pat. Nos. 5,378,619, 5,391,725, 5,428,147, 5,447,858, 5,608,144, 5,608,144, 5,614,399, 5,633,441, 5,633,435, and 4,633,436, all of which are herein incorporated in their entirety. In addition, a tissue specific enhancer may be used (Fromm et al., The Plant Cell 1:977-984 (1989), the entirety of which is herein incorporated by reference).

[0195] Constructs or vectors may also include, with the coding region of interest, a nucleic acid sequence that acts, in whole or in part, to terminate transcription of that region. For example, such sequences have been isolated including the Tr7 3′ sequence and the nos 3′ sequence (Ingelbrecht et al., The Plant Cell 1:671-680 (1989), the entirety of which is herein incorporated by reference; Bevan et al., Nucleic Acids Res. 11:369-385 (1983), the entirety of which is herein incorporated by reference), or the like.

[0196] A vector or construct may also include regulatory elements. Examples of such include the Adh intron 1 (Callis et al., Genes and Develop. 1:1183-1200 (1987), the entirety of which is herein incorporated by reference), the sucrose synthase intron (Vasil et al., Plant Physiol. 91:1575-1579 (1989), the entirety of which is herein incorporated by reference) and the TMV omega element (Gallie et al., The Plant Cell 1:301-311 (1989), the entirety of which is herein incorporated by reference). These and other regulatory elements may be included when appropriate.

[0197] A vector or construct may also include a selectable marker. Selectable markers may also be used to select for plants or plant cells that contain the exogenous genetic material. Examples of such include, but are not limited to, a neo gene (Potrykus et al., Mol. Gen. Genet. 199:183-188 (1985), the entirety of which is herein incorporated by reference) which codes for kanamycin resistance and can be selected for using kanamycin, G418, etc.; a bar gene which codes for bialaphos resistance; a mutant EPSP synthase gene (Hinchee et al., Bio/Technology 6:915-922 (1988), the entirety of which is herein incorporated by reference) which encodes glyphosate resistance; a nitrilase gene which confers resistance to bromoxynil (Stalker et al., J. Biol. Chem. 263:6310-6314 (1988), the entirety of which is herein incorporated by reference); a mutant acetolactate synthase gene (ALS) which confers imidazolinone or sulphonylurea resistance (European Patent Application 154,204 (Sep. 11, 1985), the entirety of which is herein incorporated by reference); and a methotrexate resistant DHFR gene (Thillet et al., J. Biol. Chem. 263:12500-12508 (1988), the entirety of which is herein incorporated by reference).

[0198] A vector or construct may also include a transit peptide. Incorporation of a suitable chloroplast transit peptide may also be employed (European Patent Application Publication Number 0218571, the entirety of which is herein incorporated by reference). Translational enhancers may also be incorporated as part of the vector DNA. DNA constructs could contain one or more 5′ non-translated leader sequences which may serve to enhance expression of the gene products from the resulting mRNA transcripts. Such sequences may be derived from the promoter selected to express the gene or can be specifically modified to increase translation of the mRNA. Such regions may also be obtained from viral RNAs, from suitable eukaryotic genes, or from a synthetic gene sequence. For a review of optimizing expression of transgenes, see Koziel et al., Plant Mol. Biol. 32:393-405 (1996), the entirety of which is herein incorporated by reference.

[0199] A vector or construct may also include a screenable marker. Screenable markers may be used to monitor expression. Exemplary screenable markers include a glucuronidase or uidA gene (GUS) which encodes an enzyme for which various chromogenic substrates are known (Jefferson, Plant Mol. Biol, Rep. 5: 387-405 (1987), the entirety of which is herein incorporated by reference; Jefferson et al., EMBO J. 6: 3901-3907 (1987), the entirety of which is herein incorporated by reference); an R-locus gene, which encodes a product that regulates the production of anthocyanin pigments (red color) in plant tissues ((Dellaporta et al., Stadler Symposium 11:263-282 (1988), the entirety of which is herein incorporated by reference); a β-lactamase gene (Sutcliffe et al., Proc. Natl. Acad. Sci. (U.S.A.) 75: 3737-3741 (1978), the entirety of which is herein incorporated by reference), a gene which encodes an enzyme for which various chromogenic substrates are known (e.g., PADAC, a chromogenic cephalosporin); a luciferase gene (Ow et al., Science 234: 856-859 (1986), the entirety of which is herein incorporated by reference) a xylE gene (Zukowsky et al., Proc. Natl. Acad. Sci. (U.S.A.) 80:1101-1105 (1983), the entirety of which is herein incorporated by reference) which encodes a catechol diozygenase that can convert chromogenic catechols; an α-amylase gene (Ikatu et al., Bio/Technol. 8:241-242 (1990), the entirety of which is herein incorporated by reference); a tyrosinase gene (Katz et al., J. Gen. Microbiol. 129:2703-2714 (1983), the entirety of which is herein incorporated by reference) which encodes an enzyme capable of oxidizing tyrosine to DOPA and dopaquinone which in turn condenses to melanin; an α-galactosidase, which will turn a chromogenic α-galactose substrate.

[0200] Included within the terms “selectable or screenable marker genes” are also genes which encode a scriptable marker whose secretion can be detected as a means of identifying or selecting for transformed cells. Examples include markers which encode a secretable antigen that can be identified by antibody interaction, or even secretable enzymes which can be detected catalytically. Secretable proteins fall into a number of classes, including small, diffusible proteins detectable, e.g., by ELISA, small active enzymes detectable in extracellular solution (e.g., α-amylase, β-lactamase, phosphinothricin transferase), or proteins which are inserted or trapped in the cell wall (such as proteins which include a leader sequence such as that found in the expression unit of extension or tobacco PR-S). Other possible selectable and/or screenable marker genes will be apparent to those of skill in the art.

[0201] Methods and compositions for transforming a bacteria and other microorganisms are known in the art (see for example Sambrook et al., Molecular Cloning: A Laboratory Manual, Second Edition, Cold Spring Harbor Laboratory Press, Cold Spring Harbor, N.Y., (1989), the entirety of which is herein incorporated by reference).

[0202] There are many methods for introducing transforming nucleic acid molecules into plant cells. Suitable methods are believed to include virtually any method by which nucleic acid molecules may be introduced into a cell, such as by Agrobacterium infection or direct delivery of nucleic acid molecules such as, for example, by PEG-mediated transformation, by electroporation or by acceleration of DNA coated particles, etc. (Pottykus, Ann. Rev. Plant Physiol. Plant Mol. Biol. 42:205-225 (1991), the entirety of which is herein incorporated by reference; Vasil, Plant Mol. Biol. 25: 925-937 (1994), the entirety of which is herein incorporated by reference. For example, electroporation has been used to transform maize protoplasts (Fromm et al., Nature 312:791-793 (1986), the entirety of which is herein incorporated by reference).

[0203] Other vector systems suitable for introducing transforming DNA into a host plant cell includes but is not limited to binary artificial chromosome (BIBAC) vectors (Hamilton et al., Gene 200:107-116, (1997), the entirety of which is herein incorporated by reference, and transfection with RNA viral vectors (Della-Cioppa et al., Ann. N.Y. Acad. Sci. (1996), 792 (Engineering Plants for Commercial Products and Applications), 57-61, the entirety of which is herein incorporated by reference.

[0204] Technology for introduction of DNA into cells is well known to those of skill in the art. Four general methods for delivering a gene into cells have been described: (1) chemical methods (Graham and van der Eb, Virology, 54:536-539 (1973), the entirety of which is herein incorporated by reference); (2) physical methods such as microinjection (Capecchi, Cell 22:479-488 (1980), electroporation (Wong and Neumann, Biochem. Biophys. Res. Commun., 107:584-587 (1982); Fromm et al., Proc. Natl. Acad. Sci. USA, 82:5824-5828 (1985); U.S. Pat. No. 5,384,253; and the gene gun (Johnston and Tang, Methods Cell Biol. 43:353-365 (1994), all of which the entirety is herein incorporated by reference; (3) viral vectors (Clapp, Clin. Perinatol., 20:155-168 (1993); Lu et al., J. Exp. Med., 178:2089-2096 (1993); Eglitis and Anderson, Biotechniques, 6:608-614 (1988), all of which the entirety is herein incorporated by reference); and (4) receptor-mediated mechanisms (Curiel et al., Hum. Gen. Ther., 3:147-154 (1992); Wagner et al., Proc. Natl. Acad. Sci. USA, 89:6099-6103 (1992), all of which the entirety is herein incorporated by reference).

[0205] Acceleration methods that may be used include, for example, microprojectile bombardment and the like. One example of a method for delivering transforming nucleic acid molecules to plant cells is microprojectile bombardment. This method has been reviewed by Yang and Christou, eds., Particle Bombardment Technology for Gene Transfer, Oxford Press, Oxford, England (1994), the entirety of which is herein incorporated by reference). Non-biological particles (microprojectiles) that may be coated with nucleic acids and delivered into cells by a propelling force. Exemplary particles include those comprised of tungsten, gold, platinum, and the like.

[0206] A particular advantage of microprojectile bombardment, in addition to it being an effective means of reproducibly, and stably transforming monocotyledons, is that neither the isolation of protoplasts (Cristou et al., Plant Physiol. 87:671-674 (1988), the entirety of which is herein incorporated by reference) nor the susceptibility of Agrobacterium infection is required. An illustrative embodiment of a method for delivering DNA into maize cells by acceleration is a biolistics g-particle delivery system, which can be used to propel particles coated with DNA through a screen, such as a stainless steel or Nytex screen, onto a filter surface covered with corn cells cultured in suspension. Gordon-Kamm et al., describes the basic procedure for coating tungsten particles with DNA (Gordon-Kamm et al., Plant Cell 2: 603-618 (1990), the entirety of which is herein incorporated by reference). The screen disperses the tungsten nucleic acid particles so that they are not delivered to the recipient cells in large aggregates. A particle delivery system suitable for use with the present invention is the helium acceleration PDS-1000/He gun which is available from Bio-Rad Laboratories (Bio-Rad, Hercules, Calif.)(Sanford et al., Technique 3:3-16 (1991), the entirety of which is herein incorporated by reference).

[0207] For the bombardment, cells in suspension may be concentrated on filters. Filters containing the cells to be bombarded are positioned at an appropriate distance below the microprojectile stopping plate. If desired, one or more screens are also positioned between the gun and the cells to be bombarded.

[0208] Alternatively, immature embryos or other target cells may be arranged on solid culture medium. The cells to be bombarded are positioned at an appropriate distance below the macroprojectile stopping plate. If desired, one or more screens are also positioned between the acceleration device and the cells to be bombarded. Through the use of techniques set forth herein one may obtain up to 1000 or more foci of cells transiently expressing a marker gene. The number of cells in a focus which express the exogenous gene product 48 hours post-bombardment often range from one to ten and average one to three.

[0209] In bombardment transformation, one may optimize the prebombardment culturing conditions and the bombardment parameters to yield the maximum numbers of stable transformants. Both the physical and biological parameters for bombardment are important in this technology. Physical factors are those that involve manipulating the DNA/microprojectile precipitate or those that affect the flight and velocity of either the macro- or microprojectiles. Biological factors include all steps involved in manipulation of cells before and immediately after bombardment, the osmotic adjustment of target cells to help alleviate the trauma associated with bombardment, and also the nature of the transforming DNA, such as linearized DNA or intact supercoiled plasmids. It is believed that pre-bombardment manipulations are especially important for successful transformation of immature embryos. In another alternative embodiment, plastids can be stably transformed. Methods disclosed for plastid transformation in higher plants include the particle gun delivery of DNA containing a selectable marker and targeting of the DNA to the plastid genome through homologous recombination (Svab et al., Proc. Natl. Acad. Sci. (U.S.A.) 87:8526-8530 (1990); Svab and Maliga, Proc. Natl. Acad. Sci. (U.S.A.) 90:913-917 (1993); Staub and Maliga, EMBO J. 12:601-606 (1993); U.S. Pat. Nos. 5,451,513 and 5,545,818, all of which are herein incorporated by reference in their entirety).

[0210] Accordingly, it is contemplated that one may wish to adjust various aspects of the bombardment parameters in small scale studies to fully optimize the conditions. One may particularly wish to adjust physical parameters such as gap distance, flight distance, tissue distance, and helium pressure. One may also minimize the trauma reduction factors by modifying conditions which influence the physiological state of the recipient cells and which may therefore influence transformation and integration efficiencies. For example, the osmotic state, tissue hydration and the subculture stage or cell cycle of the recipient cells may be adjusted for optimum transformation. The execution of other routine adjustments will be known to those of skill in the art in light of the present disclosure.

[0211] Agrobacterium-mediated transfer is a widely applicable system for introducing genes into plant cells because the DNA can be introduced into whole plant tissues, thereby bypassing the need for regeneration of an intact plant from a protoplast. The use of Agrobacterium-mediated plant integrating vectors to introduce DNA into plant cells is well known in the art. See, for example the methods described (Fraley et al., Biotechnology 3:629-635 (1985); Rogers et al., Meth. In Enzymol, 153:253-277 (1987), both of which are herein incorporated by reference in their entirety. Further, the integration of the Ti-DNA is a relatively precise process resulting in few rearrangements. The region of DNA to be transferred is defined by the border sequences, and intervening DNA is usually inserted into the plant genome as described (Spielmann et al., Mol. Gen. Genet., 205:34 (1986), the entirety of which is herein incorporated by reference).

[0212] Modern Agrobacterium transformation vectors are capable of replication in E. coli as well as Agrobacterium, allowing for convenient manipulations as described (Klee et al., In: Plant DNA Infectious Agents, T. Hohn and J. Schell, eds., Springer-Verlag, New York, pp. 179-203 (1985), the entirety of which is herein incorporated by reference. Moreover, recent technological advances in vectors for Agrobacterium-mediated gene transfer have improved the arrangement of genes and restriction sites in the vectors to facilitate construction of vectors capable of expressing various polypeptide coding genes. The vectors described have convenient multi-linker regions flanked by a promoter and a polyadenylation site for direct expression of inserted polypeptide coding genes and are suitable for present purposes (Rogers et al., Meth. In Enzymol., 153:253-277 (1987), the entirety of which is herein incorporated by reference). In addition, Agrobacterium containing both armed and disarmed Ti genes can be used for the transformations. In those plant strains where Agrobacterium-mediated transformation is efficient, it is the method of choice because of the facile and defined nature of the gene transfer.

[0213] A transgenic plant formed using Agrobacterium transformation methods typically contains a single gene on one chromosome. Such transgenic plants can be referred to as being heterozygous for the added gene. More preferred is a transgenic plant that is homozygous for the added structural gene; i.e., a transgenic plant that contains two added genes, one gene at the same locus on each chromosome of a chromosome pair. A homozygous transgenic plant can be obtained by sexually mating (selfing) an independent segregant transgenic plant that contains a single added gene, germinating some of the seed produced and analyzing the resulting plants produced for the gene of interest.

[0214] It is also to be understood that two different transgenic plants can also be mated to produce offspring that contain two independently segregating added, exogenous genes. Selfing of appropriate progeny can produce plants that are homozygous for both added, exogenous genes that encode a polypeptide of interest. Back-crossing to a parental plant and out-crossing with a non-transgenic plant are also contemplated, as is vegetative propagation.

[0215] Transformation of plant protoplasts can be achieved using methods based on calcium phosphate precipitation, polyethylene glycol treatment, electroporation, and combinations of these treatments. See for example (Potrykus et al., Mol. Gen. Genet., 205:193-200 (1986); Lorz et al., Mol. Gen. Genet., 199:178, (1985); Fromm et al., Nature, 319:791, (1986); Uchimiya et al., Mol. Gen. Genet.:204:204, (1986); Callis et al., Genes and Development, 1183, (1987); Marcotte et al., Nature, 335:454, (1988), all of which the entirety is herein incorporated by reference).

[0216] Application of these systems to different plant strains depends upon the ability to regenerate that particular plant strain from protoplasts. Illustrative methods for the regeneration of cereals from protoplasts are described (Fujimura et al., Plant Tissue Culture Letters, 2:74, (1985); Toriyama et al., Theor Appl. Genet. 205:34. (1986); Yamada et al., Plant Cell Rep., 4:85, (1986); Abdullah et al., Biotechnology, 4:1087, (1986), all of which the entirety is herein incorporated by reference).

[0217] To transform plant strains that cannot be successfully regenerated from protoplasts, other ways to introduce DNA into intact cells or tissues can be utilized. For example, regeneration of cereals from immature embryos or explants can be effected as described (Vasil, Biotechnology, 6:397, (1988), the entirety of which is herein incorporated by reference). In addition, “particle gun” or high-velocity microprojectile technology can be utilized (Vasil et al., Bio/Technology 10:667, (1992), the entirety of which is herein incorporated by reference).

[0218] Using the latter technology, DNA is carried through the cell wall and into the cytoplasm on the surface of small metal particles as described (Klein et al., Nature, 328:70, (1987); Klein et al., Proc. Natl. Acad. Sci. USA, 85:8502-8505, (1988); McCabe et al., Biotechnology, 6:923, (1988), all of which the entirety is herein incorporated by reference). The metal particles penetrate through several layers of cells and thus allow the transformation of cells within tissue explants.

[0219] Other methods of cell transformation can also be used and include but are not limited to introduction of DNA into plants by direct DNA transfer into pollen (Zhou et al., Methods in Enzymology, 101:433, (1983); Hess et al., Intern Rev. Cytol., 107:367, (1987); Luo et al., Plant Mol Biol. Reporter, 6:165, (1988), all of which the entirety is herein incorporated by reference), by direct injection of DNA into reproductive organs of a plant (Pena et al., Nature, 325:274, (1987), the entirety of which is herein incorporated by reference), or by direct injection of DNA into the cells of immature embryos followed by the rehydration of dessicated embryos (Neuhaus et al., Theor. Appl. Genet., 75:30, (1987), the entirety of which is herein incorporated by reference).

[0220] The regeneration, development, and cultivation of plants from single plant protoplast transformants or from various transformed explants is well known in the art (Weissbach and Weissbach, In: Methods for Plant Molecular Biology, (Eds.), Academic Press, Inc. San Diego, Calif., (1988), the entirety of which is herein incorporated by reference). This regeneration and growth process typically includes the steps of selection of transformed cells, culturing those individualized cells through the usual stages of embryonic development through the rooted plantlet stage. Transgenic embryos and seeds are similarly regenerated. The resulting transgenic rooted shoots are thereafter planted in an appropriate plant growth medium such as soil.

[0221] The development or regeneration of plants containing the foreign, exogenous gene that encodes a protein of interest is well known in the art. Preferably, the regenerated plants are self-pollinated to provide homozygous transgenic plants, as discussed before. Otherwise, pollen obtained from the regenerated plants is crossed to seed-grown plants of agronomically important lines. Conversely, pollen from plants of these important lines is used to pollinate regenerated plants. A transgenic plant of the present invention containing a desired polypeptide is cultivated using methods well known to one skilled in the art.

[0222] There are a variety of methods for the regeneration of plants from plant tissue. The particular method of regeneration will depend on the starting plant tissue and the particular plant species to be regenerated.

[0223] Methods for transforming dicots, primarily by use of Agrobacterium tumefaciens, and obtaining transgenic plants have been published for cotton (U.S. Pat. No. 5,004,863, U.S. Pat. No. 5,159,135, U.S. Pat. No. 5,518,908, all of which the entirety is herein incorporated by reference); soybean (U.S. Pat. No. 5,569,834, U.S. Pat. No. 5,416,011, McCabe et al., Biotechnology 6:923, (1988), Christou et al., Plant Physiol., 87:671-674 (1988), all of which the entirety is herein incorporated by reference); Brassica (U.S. Pat. No. 5,463,174, the entirety of which is herein incorporated by reference); peanut (Cheng et al., Plant Cell Rep. 15: 653-657 (1996), McKently et al., Plant Cell Rep. 14:699-703 (1995), all of which the entirety is herein incorporated by reference); papaya (Yang et al., (1996), the entirety of which is herein incorporated by reference); pea (Grant et al., Plant Cell Rep. 15:254-258, (1995), the entirety of which is herein incorporated by reference).

[0224] Transformation of monocotyledons using electroporation, particle bombardment, and Agrobacterium have also been reported. Transformation and plant regeneration have been achieved in asparagus (Bytebier et al., Proc. Natl. Acad. Sci. USA 84:5345, (1987), the entirety of which is herein incorporated by reference); barley (Wan and Lemaux, Plant Physiol 104:37, (1994), the entirety of which is herein incorporated by reference); maize (Rhodes et al., Science 240: 204, (1988), Gordon-Kamm et al., Plant Cell, 2:603, (1990), Fromm et al., Bio/Technology 8:833, (1990), Koziel et al., Bio/Technology 11:194, (1993), Armstrong et al., Crop Science 35:550-557, (1995), all of which the entirety is herein incorporated by reference); oat (Somers et al., Bio/Technology, 10:1589, (1992), the entirety of which is herein incorporated by reference); orchardgrass (Horn et al., Plant Cell Rep. 7:469, (1988), the entirety of which is herein incorporated by reference); rice (Toriyama et al., Theor Appl. Genet. 205:34, (1986); Park et al., Plant Mol. Biol., 32: 1135-1148, (1996); Abedinia et al., Aust. J. Plant Physiol. 24:133-141, (1997); Zhang and Wu, Theor. Appl. Genet. 76:835, (1988); Zhang et al. Plant Cell Rep. 7:379, (1988); Battraw and Hall, Plant Sci. 86:191-202, (1992); Christou et al., Bio/Technology 9:957, (1991), all of which the entirety is herein incorporated by reference); sugarcane (Bower and Birch, Plant J. 2:409, (1992), the entirety of which is herein incorporated by reference); tall fescue (Wang et al., Bio/Technology 10:691, (1992), the entirety of which is herein incorporated by reference), and wheat (Vasil et al., Bio/Technology 10:667, (1992), the entirety of which is herein incorporated by reference; U.S. Pat. No. 5,631,152, the entirety of which is herein incorporated by reference.

[0225] Assays for gene expression based on the transient expression of cloned nucleic acid constructs have been developed by introducing the nucleic acid molecules into plant cells by polyethylene glycol treatment, electroporation, or particle bombardment (Marcotte, et al., Nature, 335: 454-457 (1988), the entirety of which is herein incorporated by reference; Marcotte, et al., Plant Cell, 1: 523-532 (1989), the entirety of which is herein incorporated by reference; McCarty, et al., Cell 66: 895-905 (1991), the entirety of which is herein incorporated by reference; Hattori, et al., Genes Dev. 6: 609-618 (1992), the entirety of which is herein incorporated by reference; Goff, et al., EMBO J. 9: 2517-2522 (1990), the entirety of which is herein incorporated by reference). Transient expression systems may be used to functionally dissect gene constructs (See generally, Mailga et al., Methods in Plant Molecular Biology, Cold Spring Harbor Press (1995)).

[0226] Any of the nucleic acid molecules of the present invention may be introduced into a plant cell in a permanent or transient manner in combination with other genetic elements such as vectors, promoters enhancers etc. Further any of the nucleic acid molecules of the present invention may be introduced into a plant cell in a manner that allows for over expression of the protein or fragment thereof encoded by the nucleic acid molecule.

[0227] Cosuppression is the reduction in expression levels, usually at the level of RNA, of a particular endogenous gene or gene family by the expression of a homologous sense construct that is capable of transcribing mRNA of the same strandedness as the transcript of the endogenous gene (Napoli et al., Plant Cell 2: 279-289 (1990), the entirety of which is herein incorporated by reference; van der Krol et al., Plant Cell 2: 291-299 (1990), the entirety of which is herein incorporated by reference). Cosuppression may result from stable transformation with a single copy nucleic acid molecule that is homologous to a nucleic acid sequence found with the cell (Prolls and Meyer, Plant J. 2:465-475 (1992), the entirety of which is herein incorporated by reference) or with multiple copies of a nucleic acid molecule that is homologous to a nucleic acid sequence found with the cell (Mittlesten et al., Mol. Gen. Genet. 244: 325-330 (1994), the entirety of which is herein incorporated by reference). Genes, even though different, linked to homologous promoters may result in the cosuppression of the linked genes (Vaucheret, C.R. Acad. Sci. III 316: 1471-1483 (1993), the entirety of which is herein incorporated by reference).

[0228] This technique has, for example been applied to generate white flowers from red petunia and tomatoes that do not ripen on the vine. Up to 50% of petunia transformants that contained a sense copy of the chalcone synthase (CHS) gene produced white flowers or floral sectors; this was as a result of the post-transcriptional loss of mRNA encoding CHS (Flavell, Proc. Natl. Acad. Sci. (U.S.A.) 91:3490-3496 (1994)), the entirety of which is herein incorporated by reference). Cosuppression may require the coordinate transcription of the transgene and the endogenous gene, and can be reset by a developmental control mechanism (Jorgensen, Trends Biotechnol, 8:340344 (1990), the entirety of which is herein incorporated by reference; Meins and Kunz, In: Gene Inactivation and Homologous Recombination in Plants (Paszkowski, J., ed.), pp. 335-348. Kluwer Academic, Netherlands (1994), the entirety of which is herein incorporated by reference).

[0229] It is understood that one or more of the nucleic acids of the present invention including those comprising SEQ ID NO: 1 through SEQ ID NO: 48629 or complement thereof or fragments of either or other nucleic acid molecules of the present invention may be introduced into a plant cell and transcribed using an appropriate promoter with such transcription resulting in the co-suppression of an endogenous protein.

[0230] Antisense approaches are a way of preventing or reducing gene function by targeting the genetic material (Mol et al., FEBS Lett. 268: 427-430 (1990), the entirety of which is herein incorporated by reference). The objective of the antisense approach is to use a sequence complementary to the target gene to block its expression and create a mutant cell line or organism in which the level of a single chosen protein is selectively reduced or abolished. Antisense techniques have several advantages over other ‘reverse genetic’ approaches. The site of inactivation and its developmental effect can be manipulated by the choice of promoter for antisense genes or by the timing of external application or microinjection. Antisense can manipulate its specificity by selecting either unique regions of the target gene or regions where it shares homology to other related genes (Hiatt et al., In Genetic Engineering, Setlow (ed.), Vol. 11, New York: Plenum 49-63 (1989), the entirety of which is herein incorporated by reference).

[0231] The principle of regulation by antisense RNA is that RNA that is complementary to the target mRNA is introduced into cells, resulting in specific RNA:RNA duplexes being formed by base pairing between the antisense substrate and the target mRNA (Green et al., Annu. Rev. Biochem. 55: 569-597 (1986), the entirety of which is herein incorporated by reference). Under one embodiment, the process involves the introduction and expression of an antisense gene sequence. Such a sequence is one in which part or all of the normal gene sequences are placed under a promoter in inverted orientation so that the ‘wrong’ or complementary strand is transcribed into a noncoding antisense RNA that hybridizes with the target mRNA and interferes with its expression (Takayama and Inouye, Crit. Rev. Biochem. Mol. Biol. 25: 155-184 (1990), the entirety of which is herein incorporated by reference). An antisense vector is constructed by standard procedures and introduced into cells by transformation, transfection, electroporation, microinjection, or by infection, etc. The type of transformation and choice of vector will determine whether expression is transient or stable. The promoter used for the antisense gene may influence the level, timing, tissue, specificity, or inducibility of the antisense inhibition.

[0232] It is understood that protein synthesis activity in a plant cell may be reduced or depressed by growing a transformed plant cell containing a nucleic acid molecule whose non-transcribed strand encodes a protein or fragment thereof.

[0233] Antibodies have been expressed in plants (Hiatt et al., Nature 342:76-78 (1989), the entirety of which is herein incorporated by reference; Conrad and Fielder, Plant Mol. Biol. 26: 1023-1030 (1994), the entirety of which is herein incorporated by reference). Cytoplamic expression of a scFv (single-chain Fv antibodies) has been reported to delay infection by artichoke mottled crinkle virus. Transgenic plants that express antibodies directed against endogenous proteins may exhibit a physiological effect (Philips et al., EMBO J. 16: 4489-4496 (1997), the entirety of which is herein incorporated by reference; Marion-Poll, Trends in Plant Science 2: 447-448 (1997), the entirety of which is herein incorporated by reference). For example, expressed anti-abscisic antibodies reportedly result in a general perturbation of seed development (Philips et al., EMBO J. 16: 4489-4496 (1997)).

[0234] Antibodies that are catalytic may also be expressed in plants (abzymes). The principle behind abzymes is that since antibodies may be raised against many molecules, this recognition ability can be directed toward generating antibodies that bind transition states to force a chemical reaction forward (Persidas, Nature Biotechnology 15:1313-1315 (1997), the entirety of which is herein incorporated by reference; Baca et al., Ann. Rev. Biophys. Biomol. Struct. 26:461-493 (1997), the entirety of which is herein incorporated by reference). The catalytic abilities of abzymes may be enhanced by site directed mutagensis. Examples of abzymes are, for example, set forth in U.S. Pat. No. 5,658,753; U.S. Pat. No. 5,632,990; U.S. Pat. No. 5,631,137; U.S. Pat. No. 5,602,015; U.S. Pat. No. 5,559,538; U.S. Pat. No. 5,576,174; U.S. Pat. No. 5,500,358; U.S. Pat. No. 5,318,897; U.S. Pat. No. 5,298,409; U.S. Pat. No. 5,258,289 and U.S. Pat. No. 5,194,585, all of which are herein incorporated in their entirety.

[0235] It is understood that any of the antibodies of the present invention may be expressed in plants and that such expression can result in a physiological effect. It is also understood that any of the expressed antibodies may be catalytic.

[0236] In addition to the above discussed procedures, practitioners are familiar with the standard resource materials which describe specific conditions and procedures for the construction, manipulation and isolation of macromolecules (e.g., DNA molecules, plasmids, etc.), generation of recombinant organisms and the screening and isolating of clones, (see for example, Sambrook et al., Molecular Cloning: A Laboratory Manual, Cold Spring Harbor Press (1989); Mailga et al., Methods in Plant Molecular Biology, Cold Spring Harbor Press (1995), the entirety of which is herein incorporated by reference; Birren et al., Genome Analysis: Analyzing DNA, 1, Cold Spring Harbor, N.Y., the entirety of which is herein incorporated by reference).

[0237] The nucleotide sequence provided in SEQ ID NO: 1, through SEQ ID NO: 48629 or fragment thereof, or complement thereof, or a nucleotide sequence at least 90% identical, preferably 95%, identical even more preferably 99% or 100% identical to the sequence provided in SEQ ID NO: 1 through SEQ ID NO: 48629 or fragment thereof, or complement thereof, can be “provided” in a variety of mediums to facilitate use fragment thereof. Such a medium can also provide a subset thereof in a form that allows a skilled artisan to examine the sequences.

[0238] In one application of this embodiment, a nucleotide sequence of the present invention can be recorded on computer readable media. As used herein, “computer readable media” refers to any medium that can be read and accessed directly by a computer. Such media include, but are not limited to: magnetic storage media, such as floppy discs, hard disc, storage medium, and magnetic tape: optical storage media such as CD-ROM; electrical storage media such as RAM and ROM; and hybrids of these categories such as magnetic/optical storage media. A skilled artisan can readily appreciate how any of the presently known computer readable mediums can be used to create a manufacture comprising computer readable medium having recorded thereon a nucleotide sequence of the present invention.

[0239] As used herein, “recorded” refers to a process for storing information on computer readable medium. A skilled artisan can readily adopt any of the presently known methods for recording information on computer readable medium to generate media comprising the nucleotide sequence information of the present invention. A variety of data storage structures are available to a skilled artisan for creating a computer readable medium having recorded thereon a nucleotide sequence of the present invention. The choice of the data storage structure will generally be based on the means chosen to access the stored information. In addition, a variety of data processor programs and formats can be used to store the nucleotide sequence information of the present invention on computer readable medium. The sequence information can be represented in a word processing text file, formatted in commercially-available software such as WordPerfect and Microsoft Word, or represented in the form of an ASCII file, stored in a database application, such as DB2, Sybase, Oracle, or the like. A skilled artisan can readily adapt any number of data processor structuring formats (e.g. text file or database) in order to obtain computer readable medium having recorded thereon the nucleotide sequence information of the present invention.

[0240] By providing one or more of nucleotide sequences of the present invention, a skilled artisan can routinely access the sequence information for a variety of purposes. Computer software is publicly available which allows a skilled artisan to access sequence information provided in a computer readable medium. The examples which follow demonstrate how software which implements the BLAST (Altschul et al., J. Mol. Biol. 215:403-410 (1990)) and BLAZE (Brutlag et al., Comp. Chem. 17:203-207 (1993), the entirety of which is herein incorporated by reference) search algorithms on a Sybase system can be used to identify open reading frames (ORFs) within the genome that contain homology to ORFs or proteins from other organisms. Such ORFs are protein-encoding fragments within the sequences of the present invention and are useful in producing commercially important proteins such as enzymes used in amino acid biosynthesis, metabolism, transcription, translation, RNA processing, nucleic acid and a protein degradation, protein modification, and DNA replication, restriction, modification, recombination, and repair.

[0241] The present invention further provides systems, particularly computer-based systems, which contain the sequence information described herein. Such systems are designed to identify commercially important fragments of the nucleic acid molecule of the present invention. As used herein, “a computer-based system” refers to the hardware means, software means, and data storage means used to analyze the nucleotide sequence information of the present invention. The minimum hardware means of the computer-based systems of the present invention comprises a central processing unit (CPU), input means, output means, and data storage means. A skilled artisan can readily appreciate that any one of the currently available computer-based system are suitable for use in the present invention.

[0242] As indicated above, the computer-based systems of the present invention comprise a data storage means having stored therein a nucleotide sequence of the present invention and the necessary hardware means and software means for supporting and implementing a search means. As used herein, “data storage means” refers to memory that can store nucleotide sequence information of the present invention, or a memory access means which can access manufactures having recorded thereon the nucleotide sequence information of the present invention. As used herein, “search means” refers to one or more programs which are implemented on the computer-based system to compare a target sequence or target structural motif with the sequence information stored within the data storage means. Search means are used to identify fragments or regions of the sequence of the present invention that match a particular target sequence or target motif. A variety of known algorithms are disclosed publicly and a variety of commercially available software for conducting search means are available and can be used in the computer-based systems of the present invention. Examples of such software include, but are not limited to, MacPattern (EMBL), BLASTIN and BLASTIX (NCBIA). One of the available algorithms or implementing software packages for conducting homology searches can be adapted for use in the present computer-based systems.

[0243] The most preferred sequence length of a target sequence is from about 10 to 100 amino acids or from about 30 to 300 nucleotide residues. However, it is well recognized that during searches for commercially important fragments of the nucleic acid molecules of the present invention, such as sequence fragments involved in gene expression and protein processing, may be of shorter length.

[0244] As used herein, “a target structural motif,” or “target motif,” refers to any rationally selected sequence or combination of sequences in which the sequences or sequence(s) are chosen based on a three-dimensional configuration which is formed upon the folding of the target motif. There are a variety of target motifs known in the art. Protein target motifs include, but are not limited to, enzymatic active sites and signal sequences. Nucleic acid target motifs include, but are not limited to, promoter sequences, cis elements, hairpin structures and inducible expression elements (protein binding sequences).

[0245] Thus, the present invention further provides an input means for receiving a target sequence, a data storage means for storing the target sequences of the present invention sequence identified using a search means as described above, and an output means for outputting the identified homologous sequences. A variety of structural formats for the input and output means can be used to input and output information in the computer-based systems of the present invention. A preferred format for an output means ranks fragments of the sequence of the present invention by varying degrees of homology to the target sequence or target motif. Such presentation provides a skilled artisan with a ranking of sequences which contain various amounts of the target sequence or target motif and identifies the degree of homology contained in the identified fragment.

[0246] A variety of comparing means can be used to compare a target sequence or target motif with the data storage means to identify sequence fragments sequence of the present invention. For example, implementing software which implement the BLAST and BLAZE algorithms (Altschul et al., J. Mol. Biol. 215:403-410 (1990)) can be used to identify open frames within the nucleic acid molecules of the present invention. A skilled artisan can readily recognize that any one of the publicly available homology search programs can be used as the search means for the computer-based systems of the present invention. Having now generally described the invention, the same will be more readily understood through reference to the following examples which are provided by way of illustration, and are not intended to be limiting of the present invention, unless specified.

### EXAMPLE 1

[0247] The SOYMON022 cDNA library is generated from fully to partially opened flowers from cultivar Asgrow 3244. Seeds are planted in moist Metromix 350 medium at a depth of approximately 2 cm. Trays are placed in an environmental chamber set to a 12 h day/12 h night cycle, 29° C. daytime temperature, 24° C. night temperature and 70% relative humidity. Daytime light levels are measured at 450 μEinsteins/m². Soil is checked and watered daily to maintain even moisture conditions. Flowers are removed from the plant at the pedicel. Flower buds showing petal color to fully open flowers are selected. A total of 3 g of flowers are harvested and immediately frozen in liquid nitrogen in 50 ml polypropylene conical tubes. The tissue is then transferred to a −80° C. freezer for storage. The tissue is subsequently moved on dry-ice where it is again stored at −80° C. Total RNA is prepared from a mixture of opened and partially opened flowers. SEQ ID NO.1 through SEQ ID NO. 27442 are from SOYMON022.

[0248] The SOYMON024 cDNA library is generated from soybean cultivar Asgrow 3244 (Asgrow Seed Company, Des Moines, Iowa U.S.A.) internode-2 tissue harvested 18 days post-imbibition. Seeds are planted at a depth of approximately 2 cm into 2-3 inch peat pots containing Metromix 350 medium. The plants are grown in a greenhouse for 18 days after the start of imbibition at ambient temperature. Soil is checked and watered daily to maintain even moisture conditions. Stem tissue is harvested 18 days after the start of imbibition. The samples are divided into hypocotyl and internodes 1 through 5. The fifth internode contains some leaf bud material. Approximately 3 g of each sample is harvested and immediately frozen in dry ice. The harvested tissue is then stored at −80° C. until RNA preparation. SEQ ID NO. 27443 through SEQ ID. NO. 40696 are from SOYMON024.

[0249] The SOYMON029 cDNA library is generated from plants from the cultivar P1507354 (USDA Soybean Germplasm Collection, Urbana, Ill. U.S.A.) root tissue, that are grown in a greenhouse in late fall to early winter. The plants are infected with Soybean Cyst Nematode eggs. At 10 days post infection the plants are uprooted, rinsed briefly and the roots frozen in liquid nitrogen. Approximately 20 grams of root tissue is harvested from the infected plants. The tissue is moved on dry-ice where it is again stored at −80° C. Total RNA is prepared from the ground root tissue and used to isolate poly A⁺ RNA for library construction. SEQ ID NO. 40697 through SEQ ID NO. 48629 are from SOYMON029. The cDNA library is constructed as described in Example 2.

### EXAMPLE 2

[0250] The stored RNA is purified using Trizol reagent from Life Technologies (Gibco BRL, Life Technologies, Gaithersburg, Md. U.S.A.), essentially as recommended by the manufacturer. Poly A+RNA (mRNA) is purified using magnetic oligo dT beads essentially as recommended by the manufacturer (Dynabeads, Dynal Corporation, Lake Success, N.Y. U.S.A.).

[0251] Construction of plant cDNA libraries is well-known in the art and a number of cloning strategies exist. A number of cDNA library construction kits are commercially available. The Superscript™ Plasmid System for cDNA synthesis and Plasmid Cloning (Gibco BRL, Life Technologies, Gaithersburg, Md. U.S.A.) is used, following the conditions suggested by the manufacturer.

[0252] Normalized libraries are made using essentially the Soares procedure (Soares et al., Proc. Natl. Acad. Sci. (U.S.A.) 91:9228-9232 (1994)). This approach is designed to reduce the initial 10,000-fold variation in individual cDNA frequencies to achieve abundances within one order of magnitude while maintaining the overall sequence complexity of the library. In the normalization process, the prevalence of high-abundance cDNA clones decreases dramatically, clones with mid-level abundance are relatively unaffected and clones for rare transcripts are effectively increased in abundance.

[0253] Normalized libraries are prepared from single-stranded and double-stranded DNA. Single-stranded and double-stranded DNA representing approximately 1×10⁶ colony forming units are isolated using standard protocols. RNA, complementary to the single-stranded DNA, is synthesized using the double stranded DNA as a template. Biotinylated dATP is incorporated into the RNA during the synthesis reaction. The single-stranded DNA is mixed with the biotinylated RNA in a 1:10 molar ratio) and allowed to hybridize. DNA-RNA hybrids are captured on Dynabeads M280 streptavidin (Dynabeads, Dynal Corporation, Lake Success, N.Y. U.S.A.). The dynabeads with captured hybrids are collected with a magnet. The non-hybridized single-stranded molecules remaining after hybrid capture are converted to double stranded form and represent the primary normalized library.

### EXAMPLE 3

[0254] The cDNA libraries are plated on LB agar containing the appropriate antibiotics for selection and incubated at 37° for a sufficient time to allow the growth of individual colonies. Single colonies are individually placed in each well of a 96-well microtiter plates containing LB liquid including the selective antibiotics. The plates are incubated overnight at approximately 37° C. with gentle shaking to promote growth of the cultures. The plasmid DNA is isolated from each clone using Qiaprep plasmid isolation kits, using the conditions recommended by the manufacturer (Qiagen Inc., Santa Clara, Calif. U.S.A.).

[0255] The template plasmid DNA clones are used for subsequent sequencing. For sequencing the cDNA libraries of SOYMON022, SOYMON024, and SOYMON029, a commercially available sequencing kit, such as the ABI PRISM dRhodamine Terminator Cycle Sequencing Ready Reaction Kit with AmpliTaq® DNA Polymerase, FS, is used under the conditions recommended by the manufacturer (PE Applied Biosystems, Foster City, Calif.). The ESTs of the present invention are generated by sequencing initiated from the 5′ end of each cDNA clone.

[0256] A number of sequencing techniques are known in the art, including fluorescence-based sequencing methodologies. These methods have the detection, automation and instrumentation capability necessary for the analysis of large volumes of sequence data. Currently, the 377 DNA Sequencer (Perkin-Elmer Corp., Applied Biosystems Div., Foster City, Calif.) allows the most rapid electrophoresis and data collection. With these types of automated systems, fluorescent dye-labeled sequence reaction products are detected and data entered directly into the computer, producing a chromatogram that is subsequently viewed, stored, and analyzed using the corresponding software programs. These methods are known to those of skill in the art and have been described and reviewed (Birren et al., Genome Analysis: Analyzing DNA, 1, Cold Spring Harbor, N.Y., the entirety of which is herein incorporated by reference).

The application's sequence listing, which the Patent Office published only in electronic form, follows.

SEQUENCE LISTING (48629 sequences)

SEQ ID NO: 1 - DNA, 137 bp, Glycine max
  unsure (1)..(137): unsure at all n locations
  Clone ID: 700764507H1
ntgngcacgcgtacgtnagctcggaattcggctcgagntaaaaattagntaatttatntcgatngtattagacngagaccngncaaanntgaangtgagnananannnaaacngntanngcngcncntcgnnannnc

SEQ ID NO: 2 - DNA, 137 bp, Glycine max
  unsure (1)..(137): unsure at all n locations
  Clone ID: 700764512H1
acagtnggcgtangcgtncncnagnctnngattcggctcganccnagagcgggnccgtggancataccntaancngctcnaaatnntagnnacancagcantnnnaacncatanngcnnncgcnacnanaacagacc

SEQ ID NO: 3 - DNA, 136 bp, Glycine max
  unsure (1)..(136): unsure at all n locations
  Clone ID: 700764545H1
caatctcacacacncnnacgtnagctacnnaattcnnctcaaannagngacacaacantngcgancantnaccnacacntngcnnntgctnccgagaantgcgnagctanagatgtacaacatngcaanannacgc

SEQ ID NO: 4 - DNA, 143 bp, Glycine max
  unsure (1)..(143): unsure at all n locations
  Clone ID: 700764575H1
cngtctanacgacagacgnanntnagcncntgaatgtctganntacaggnagaanagaagcgatgcgtanccncnggnattaagacggntgancgntctaannagngngtggtcagnagtgcctagggnaaatangctnctnc

SEQ ID NO: 5 - DNA, 313 bp, Glycine max
  unsure (1)..(313): unsure at all n locations
  Clone ID: 700902948H1
ngtntattaatctcaagaantnnattcgnnntgtgnnnaacacaactatgannnaantnnannnacannnnnnnnnnccgtnanaannttnacgnttnatnntgtatcnnatngcanattaccnnttttnncgtanntnnnnnntcncnnatnatcttnctatnagggtcttgagagtggncantttnnngtcancntgantnngttgacttcatcaancanggnnaangacgnncnangnnctgatacatnatannnnnnnggtatgncngtgantatncnnntnggncngttnnnctgnaattggngtgtc

SEQ ID NO: 6 - DNA, 292 bp, Glycine max
  unsure (1)..(292): unsure at all n locations
  Clone ID: 700903055H1
ttnnngcgtnncangcacncttacntantctcgnnaattcggatcgagaanctcctacgcatcncaaaagnctnacccggtgncacnnttcatncgntccaangctttcgcgagnaganancgcgcngctnnctcnngccancatgatncgctcgnagantcaancggngcnannagtnagcgttntggnngtnnagngncgtgtcntagncagcacactggccnggncggncgtgnannnccggtccnncanagnganccntttcaacnnngnantngtatcnnccaagnt

SEQ ID NO: 7 - DNA, 339 bp, Glycine max
  unsure (1)..(339): unsure at all n locations
  Clone ID: 700903063H1
ncgnnnganaaanatnanaatgnnnagagagaagaacgnataanggcgagagaganagtgtccgctgcncacgaatcgtgnacagtattctnanggnnaagacncangcagaacatagttgngngacaggnncntnaagaatggagnatnagtngnngtnngannnncagaagnntagcancaaagcngaagagtnancnnantnagggcaaggangannntgntaanagagcgntnngnatngtagtaganancncgtnggagcngtcnggnatannagtntagnaagnngnngtnanannngaagngancnnaggnaggangggngaaagnnagncc

SEQ ID NO: 8 - DNA, 342 bp, Glycine max
  unsure (1)..(342): unsure at all n locations
  Clone ID: 700903075H1
aacgcgnancganagangaggnagcgnccananagngtagcgnatgnannannnnagggcgcatgcngagntacannggacacggtagcagggtngtgaaacanggngganactgccagctangctntgnangcgngagncgntncgcancannncgatcntganaagagngncnggnnntgcggnggcacncggncnnagtctnnagtncgagaganncccggnnngnagatnccggggagnatcgagancnagagnnnnatnaancaggagagaaggcatnncagcnnccagcngagctangcngnncgnnccaggngnagagnaganngtggggggcgc

SEQ ID NO: 9 - DNA, 332 bp, Glycine max
  unsure (1)..(332): unsure at all n locations
  Clone ID: 700903081H1
nnatcgcanacacgcgtacgtangctcggaantcngntcgnggtgagaagnnataagccntgnanngaagnaccgagnngatngntncatagccgntgtgnnnncncnnncgtnttnaanntcnngntctntcncacnnntnctnnaaacacaaannnctncttnggnccncannacatnantatnggcnantgttnnnnggnntncanganatnaangannnanncagnnngagacnnncgaatgaacnggtntaggnanagggtggatgcgancnangatgnnanggttngnnnccgannanananancannagcncagnggatngaaat

SEQ ID NO: 10 - DNA, 456 bp, Glycine max
  unsure (1)..(456): unsure at all n locations
  Clone ID: 700903090H1
ancncanngcagnaaccntccancantcatnnatncngaanngtgcncagcctaagtnatgagtgccccccagcagnacaaacncggactacatagaganaganacctaacagnnagagnacgcgcatnaatnacagnannnnggtacacngantacagcggcgacaaagtnagcaaancgatananngngnagngatanatccacangtacagancnatgntagcgttntcnntnanagnagananncgagaanacaacaggagtgatnnactnnnagagtnncgnnnanncatagnggtcnnnnagagnacngcanagntnnganntngtnnnaactnngcannnggnnnacggnnnnnantngnnagggcccnanctgtcantgnnagaannnnnncganacagcnacnnnggnaaggannngnnnnaagnncgacatccannnnggaggatc

SEQ ID NO: 11 - DNA, 311 bp, Glycine max
  unsure (1)..(311): unsure at all n locations
  Clone ID: 700903129H1
aatnatatnnangcntangtaagctcngaattcngctcgagtgaaatattaccagttttgtgcaaaaaaaaaaaaaaaaangnngnccncaaattattaanctcttaaaccngnaantnanttcnnaacgnnnacttnaaggntnaaaatttttccntanattaattnntatnaaantttggagnaataatggnaananntttttcntntntaaaattttnatccgttaaaanttcaaaaaaaaaaaaatnnntaaaaaaaaaaaanannnnnnannnnannnnnnnnnannnnnnnnnnnannnnnnnnt

SEQ ID NO: 12 - DNA, 288 bp, Glycine max
  unsure (1)..(288): unsure at all n locations
  Clone ID: 700903133H1
aancnaanacananaacacaaaacnaaacacagancaanncagaanncngaacgcnaaantattanaaatccncacaacanncaaatnatccacacttaaacaaaaccanaacananaanancnancanaannnnannacanaaanngannctcnnaanaannnnaacacaagcaaaancngacnaaanaacaaaaaaancnacaanancccaacacaannaaaanganannaacatannaaaaacncatgnaagcnacnacannnacaacangnnncnaaaacaann

SEQ ID NO: 13 - DNA, 407 bp, Glycine max
  unsure (1)..(407): unsure at all n locations
  Clone ID: 700903136H1
agcaaccagnaagtaagnaacnancaagtggtacngaacacangaganncagccacangnacgcaannnccancanacgntncacgganngcgnngncagancaagatanaannnggtnggntngaaggncaanancagaagaggaaanaggcacancacgacgaacaaanangncacanagaggaacanngncgagaacgcagaagcacacnnagcacaagaaacanacnaccaagnacgagnanancnagcagagaagcagnacanaccaccgancnnangangaganacnangaagagccaacnagncagncanagcgagaacgacgcanagancagagcanacgaagcacngagnnggancanaganggnacgacatcanaangacagagnanacaanananc

SEQ ID NO: 14 - DNA, 374 bp, Glycine max
  unsure (1)..(374): unsure at all n locations
  Clone ID: 700903137H1
nnnnnnnnnnaanccaanaaaaannaaaccanaaaaaanncctaccanccannnnnnnnnnnncnncannaaacnccannnnacacncnncnnnnanaanacnnncnnccannntcacnacacnnnnncnanancacacnacntcnnnnnnnancccnnnccanancnccncncnccaacaaacnaaacaancacacnacacnacnacaacnacacnaancnnnnancncannnnnncanncncnnnacnancacacncccccacnnnnanncacncccanccacnccacacnannnnccacaaccacaaccanaacccaacacncaccnacannnacaacccnancanaacnnaacaancacannaccacnnc

SEQ ID NO: 15 - DNA, 315 bp, Glycine max
  unsure (1)..(315): unsure at all n locations
  Clone ID: 700903138H1
aagttanagangngaaagaaaantanaanaatnaagatagannaagaaananagntnnnatatnnaaangagntagaangntannanatgnagatatgaatagangaaaannanacaanaaanataaanaananttaanngaannaaatanntaagtnaaaaatgananaagaanaanncaaancananntannnnaantnnnaaaaggaganaacanaagtgnnnaananaaaananaataaaaaanaaaaaaaaaganaagagnnnaaaatagaaaaaananagngaaagaatananaaaaaananaatanan

SEQ ID NO: 16 - DNA, 326 bp, Glycine max
  unsure (1)..(326): unsure at all n locations
  Clone ID: 700903139H1
ncggtactatgncatttnatgntnngaanaannannannnannngtantttngncgcgngnncnngtnntcnaagnananncnngangtntgnngnnnngtanannttnngtttacacngnnnanananngnttgnagcanctagttnnntngngtnnntnaanngnantagnnatanatntatnacnggctnantttnnnnagnacnatcngnatnnngnacanngnnnngttttgnngnngnaaatgtntnttgacncnagcaggtttntnnggtnttncgnnnngaagggnnnnntttggngnnngncnnnngtctnntnnng

SEQ ID NO: 17 - DNA, 321 bp, Glycine max
  unsure (1)..(321): unsure at all n locations
  Clone ID: 700903140H1
cgagnangaaagananncnnatncgnagcngcnncaccngcggnannanctcacgganaacantanngnnncacaacgngagacanancgcngncgnacacangacncacangacancnnngnngcangnncgcannnggagnngnncagcacaganacagatnanancannngnncannacggcnaagganaaaganangnncagcagtnganagcnaaancannagnnanacnacgngnagnngcaannacngacacacaagganagannnagancacaganannncnaagnnacgagancacantnanagancanggc

SEQ ID NO: 18 - DNA, 273 bp, Glycine max
  unsure (1)..(273): unsure at all n locations
  Clone ID: 700903143H1
annccaaannananncnaaacanccaaacaaanaanaccaccaanccngancnanaacnacaancagaacacncnnaccaagcacacaaaaaacaancnanccacagncgacnaancancngcaccnccnaaacaaccaaaacacnngaanacnacacacgannnccaaganaangaaacccaccacacnacaacacaanaccacancagnngngcaaancnanaacacnaaganangnnaacganaacangcancaanancannnnnacacn

SEQ ID NO: 19 - DNA, 387 bp, Glycine max
  unsure (1)..(387): unsure at all n locations
  Clone ID: 700903144H1
ttttctcctcnanannnagcnncccatcagacactatcnannagcnanaactacanctncnacngacaanacatctcctacatcancaaccncnctanntncngcacagcaagnnnaacanaannnncnccncagtatnngngnnanttanacancnntcngancnagacnagcnatnnanncactnacagcacanacccaanncacananagcnntgnnannnacnacancnactcnnngngcancacgnncnnncacaannngnnngnacaancccaacnctnacnnnanngcncaccncgtnncnaanatnaaacgtccgctnnagnannnananacancanactcctnnnaacnancnancattnnnacnancaaaagaacct

SEQ ID NO: 20 - DNA, 285 bp, Glycine max
  unsure (1)..(285): unsure at all n locations
  Clone ID: 700903146H1
anctanannccccanactnncnaannacagacaccagaatacacancacatatacacncatacanaaacaacacacacaaacacaccannancatccanaanantaacacanaancaaccacananaaaaaanccacacanacanntncanaccnacnannanaataannaaaacnanannacacacnnaanancnncaacnaataacnngnntnaaccacnagaancaccananaanagacaatcacncanacaaannacnnnnnananncacncgncacaaan

SEQ ID NO: 21 - DNA, 434 bp, Glycine max
  unsure (1)..(434): unsure at all n locations
  Clone ID: 700903147H1
aaaaaaaaagnccnncaaaacttaaacgnannnncnccccnnannnaaaacngaaccangganngnaccnnnnccnggaanaacnaacntcacngnngnncacanattccacgacgggcntaacccccaccgacagcgggctcacgancgncagacgcagcacanncacacnnannacnagtnncacannacacctccnacacncactcaagcacagngcnaaganaantagatnnagctacaaacacncanactcaatgctannnttcaagacgacccaagagcaagtnaaccgantnncncnannaanntnngcgcnccnacanacnggnnnnnaagagcctnagtcnagccnacacancnagaccaaacnanacgcgnnnccnataccnanacnacnnaanganncagacgacangacangncnacacngc

SEQ ID NO: 22 - DNA, 482 bp, Glycine max
  unsure (1)..(482): unsure at all n locations
  Clone ID: 700903148H1
ngnanatagannancnccttcaacntccccctgnccagctgnaangccnnnntgaganacnnnanctnaaggngtgngtgaangaaatntacangngnanncgtaacagcctccacaacnccnncganacananncacagncganctcnncnatnncaggtnnannnccngacngtacacgngctcangtccacantntanantgtgagacnagccangccaangaagcgcgatncanngcagnnnanaanaggancannnagtgnanacagagncacgncngcagntcgcgacngnantcatntcncatgtntgtcngatanangctcnananggcnaacggcangcnnaggnnnancnnnaacnatggntagnncnncgaacaacnaagtgacanttnagtagantgcnngnnngngncggcatgtgagacntgangncnanannacnntngnggangngaatcngagnnanagngnact

SEQ ID NO: 23 - DNA, 360 bp, Glycine max
  unsure (1)..(360): unsure at all n locations
  Clone ID: 700903151H1
naccggaatcannncncncccannncngggccancaanaaacngcnggaaaccaccatccncgcagaaacancannccnnaggactacacgacaccnaccgcacaccnganccncacancanaacgncacangcccncgcacncagccgncnanncncgngnngacagcattcaacccaangacaangcaggnccangncaacncaacgacagggacaacaacaannacnagnngacnccaccgagacncnnanngnngccncnnnanagannacnncanaagacncagangananccaacnancaggaancacnngagcncaaagccancngcanannnaaancanannaagnngaaac

SEQ ID NO: 24 - DNA, 335 bp, Glycine max
  unsure (1)..(335): unsure at all n locations
  Clone ID: 700903152H1
anagtatanngannacgtangnanancncgnaattcanatcgcagnnagnncantctntatgggatanggnnanagagtnanagcaccaatnggnaataggatanaannnctagngnnagnncgnnatctagncagaggcnnacaannnntannnacgatacttnaatgnaacnncaancagncagtagnaggaaanaaanntntggcncganganaanagaaagtannagnnccaangtatggggannannncnaanccngannaagcaaganaacnaaccntncaagantatngacagnagannaangnnatgtnangtnatcgntaccagnc

SEQ ID NO: 25 - DNA, 410 bp, Glycine max
  unsure (1)..(410): unsure at all n locations
  Clone ID: 700903153H1
aaaaaacnatcacgccgngagggancannncagacaganaganaccacgaacatanacacacangcagananagntcacgncnncnacancacnacngnnncngacgnatgcnganaacannnntgtgncgannacanagacnnccgngngcnantancncacncaacnnagccaacaancancccntcacgacaancgatcnnngcnacnnnnaccgaagcncagcngngaannganannagancantnnagcaacannagananngngaangcantcancacngnacaanacanaagnncnggacngagannnatanacnacnacgnagagnannagtcnaaanccgncgtgntgacaaananaanntgnnngnagnanaanggnncagacagagnangnaannncgn

SEQ ID NO: 26 - DNA, 265 bp, Glycine max
  unsure (1)..(265): unsure at all n locations
  Clone ID: 700903154H1
caaaaaaantncntttgannncnccnctnaacngccnnctnaccngctnnaactcatncagcgncaagtncncgactacgccggcgaagcacacagcaangaagngnnngccnncncacagagcaaggaaanncananacgnncanccnangcnanngtacncnaancancaacntaccaancaagagtgncntncnnnanangngnacncaananccanntnagnangncgnacagccacgnaaanncnanggnaagganncan

SEQ ID NO: 27 - DNA, 474 bp, Glycine max
  unsure (1)..(474): unsure at all n locations
  Clone ID: 700903155H1
aaacnanatnnnnatcatnaacnacagcacacgaaaaganactcaagancagtttncnagcanancancnacngtacacactgncnnacacacacaccccncgcngagagcagtgacngacacnancnnannacacgtngaacnacncagccaatcnanncgananncacatgcnncaagtngtnntcncacanancnactacnacnnaannnngctacgaaacnccntnaagatagancnnacgatcacnnanancanannacacgacngacgcnnancaagnnananccatnannnaacacannaancannacgacanacnagcnacaanatnacanaaacannacnaancangcaccatcnagncacgnnaanacgcaagacnataaancaagcnatgngcaatnnngacagccnagcagnnnagcngacagncgcannnanccganntgacagancagncagcananntc

SEQ ID NO: 28 - DNA, 472 bp, Glycine max
  unsure (1)..(472): unsure at all n locations
  Clone ID: 700903156H1
nntgggagnntgagnagngntgnatagcannnnnanggagagagatgcgccacctctagatatgtgnanannacactctcntaggttnacagangnagagngacanacatgttatgtgganagcagantgtgnntcntggtgttagtcntggangtggtaaggagtacganntgnagactgngcaagnggagnagnggagngnntanggtgnngntnggnagnagngngagntgntcagcngtnantnnngcngngcnagtaaggancnggantgngganaatagnnnnatgtanntanaaacnnaaanagataagaantngtgagaggtcaatcaannngnnggnngnnganatgaggnngattnngangggaannnagtttgnanntggaggaancngtagngtaggcagnagannngnangnnagtgttgtaaggctnannntatannggtnagnagagnagagcnann

SEQ ID NO: 29 - DNA, 124 bp, Glycine max
  unsure (1)..(124): unsure at all n locations
  Clone ID: 700903188H1
gacgnagcangcncgcgtacgtaagcncggaantcggctcgagctcgagccgattcggctcgaggnnagctccccntncanccangtngacttcngcanaanntnggannagcgaganangcnc

SEQ ID NO: 30 - DNA, 337 bp, Glycine max
  unsure (1)..(337): unsure at all n locations
  Clone ID: 700903219H1
acncanctacncctacntaanctcgcaattcnnctcnnncnctanctannntaccgncacaccacacnacnnncnnntacagcnanncgcncntannnnnannttgcactnncnacggncccntacgncncagccncatncgagncaatccnggnccnacnccntaancactngtatcncancaatccnncnncnntngntaangccaatnancagnctacngcnantgcatcnnnnccncgcngccatangtnnngcannnatngnccccannnaanncacannncacnnnggcccactccncttagagaatatnnantncccnaacgnnnannan

SEQ ID NO: 31 - DNA, 311 bp, Glycine max
  unsure (1)..(311): unsure at all n locations
  Clone ID: 700903223H1
nttttgatangcnnatgtnatctcggaattctgnnnnatnattattatgtantattgtgtnangnnnagnacgtgtgtggtngtgtgtggtanttgtgnngtagtgnntgtttgggtantngtanggtgtttngttgngnnnggtntgtgtgtgttggnggntgtgntgtagngtggtgtntnnatangaggngttgtnatgttgantgtnnagngnngntnnngtgntgngtggagnaattgggtnttgtctnatgnttgaanggnttttgtttgntgtgggtgattggttatgggtgtgntnngngtgg

SEQ ID NO: 32 - DNA, 500 bp, Glycine max
  unsure (1)..(500): unsure at all n locations
  Clone ID: 700903235H1
aannagtnccgcgacntctnacnntaatctcggtnatgcnagcttcggaggtntngtggnnatgantgtgnctttaccgacgngctcnngactcngtctgngagttatntgnagagtgttcacggtggngngatngtggtcgtttanttgtgngtgatcagnntcncgtgagtgcggctgntgctgtcgcattgtcanactntgctgtctngacgtatgggtgctnntcncgcagtntgntgtngagtgtgccantctgtgttnntttgtnctgtgnncncgttgtnncncntntgnctnnctngtgnanagatgntgagtgagngtntcagtcncacttngatgtganggngngnttgagtccgnntggcngtcngagtcgggngacgtngtngttcggncnaggttctctagagannnngcgctatcgtcgnngggtgcgnngttgcgantgtggnggnanngannctgncggtctttnccgagatcagngtntntgn

SEQ ID NO: 33 - DNA, 300 bp, Glycine max
  unsure (1)..(300): unsure at all n locations
  Clone ID: 700903238H1
anngcgcgnacgcgtacgtaanctcttaatgcngctcgaggaagggtacaggccgtggagnngaatncntgcaangacaggagcanctnctnangagtncangaacangtntgttggggctancgcncnatgtagaagncacgnggcctggttngaaggggatcacncccantngaagcnacngagtnctanncagngtnangctgggagancgcgangtcgactnagcntacntcnggatcntgnagggctgggggtgcccgacncccttgtgcccnatnatggcgctnccggtgccan

SEQ ID NO: 34 - DNA, 310 bp, Glycine max
  unsure (1)..(310): unsure at all n locations
  Clone ID: 700903251H1
antttgntaacncgtanataatctcntaattcnnctcgagntccaatanctgtccangtcnnnctgtnnancnttccnngcgngcccttntagatggagatnngncggtcaaganngntncanngtgcnagancatgatccttgaggnnnaaanngcngagangnagnnacaacgtcaatgnnaaganncagganaaggaaggantcnccccggancagnancgtcnnagtnggcnncggaaagcaacnggaggatggtccntanccttggtgngtacaagatgtcagnaggagtgtattnggcntnttn

SEQ ID NO: 35 - DNA, 146 bp, Glycine max
  unsure (1)..(146): unsure at all n locations
  Clone ID: 700903254H1
nnattnnnncatgctctacnaaagcncggaattcnncncgancgngtnaggnnntggngtcntgtncgtggngatgnnnagtngnctggcttntgagnnnggcnggtttatgangnttgncncncgtcnnggtcnagatgtctntn

SEQ ID NO: 36 - DNA, 456 bp, Glycine max
  unsure (1)..(456): unsure at all n locations
  Clone ID: 700903255H1
aaaagtnttntgcagngagtgcggtgaacgntgagaggctgcgtgtaaatgtccgagccntngnaggttaananggatgntatnttggttgaggcngtggggtnanagntatnaagtgtncngtgggagaggtncntgntcgcgttgtgtgtntgtnggttgtgtgntttgctgtgtgcgttanttncgctctnntttgngngnngtgtnttgtnangtgancangacttgttggtgtgnngtgnggtggtatgtgtgtggtgtgtgtagtgtgtgttgtgnagtggtgggtgngtgtgtnggtggntgtgtggtgtgttgngtggtggnngtgtgtggntngtgtgtngagtgtgggtttnanaattttggtttgtgtgtgtgtggtgtgggtgtgtttttggttgtgttgtgtgtgtggtgnggtggtgtangntnggtgtttggtgtgttgtt

SEQ ID NO: 37 - DNA, 305 bp, Glycine max
  unsure (1)..(305): unsure at all n locations
  Clone ID: 700903270H1
acttcgcgcncgnntncgtnagctcggaatncngctcgagctatngctcnntngnctcgctagcttatgcacngagggangttgatnccntnctcngatgnntntcgtncggtatcgnccgctggngctcgtnctcncgtattgggccgtaggcgnctgttnanngccngcnagtnncggggngtcgcancccgcnggngttggggngncngncgttnacccccgcntcgtgnngagtgtggttngnnngtcccgcggtgnttgagcgctnccngctncnncgnnntnntgtgtngcnccnnntt

SEQ ID NO: 38 - DNA, 292 bp, Glycine max
  unsure (1)..(292): unsure at all n locations
  Clone ID: 700903275H1
acgtcgcangcacgcgtacgtaagctcggaattcngctcgagncctcatttcttcttttccccacacaacatangancncngnnnngnncnngnaatgcngngggctaaaattncagcntccaanattgaaaaaaaangncaaacaagttctctncnngnncngctcntcntggccncnggattggccctcncagtctcagagtctgagtctgntncncngctgcctcacgccgcngantccttcaatgttagctatatccagatgaagaacgctgggacttgctcntactn

SEQ ID NO: 39 - DNA, 330 bp, Glycine max
  unsure (1)..(330): unsure at all n locations
  Clone ID: 700903279H1
ttntgcgttngtctgtacgntcatctttgngtttcggnntcgtaggngggttgtcgtgnncgngtgtgntgngggntnntgtgtttggtggtggnggttgngtttgtntntntgtggtttgnngtggntgttttgtnggaaggtgtagngttggttgggggtnnntggttngtgtggnnggtttncctgggtgngtnttgtgnngttgggtttnngtgncntnggagtagtgttttgtgggnggtgtgttgnttggtggngtggtgtgtcgtnnccgttgngtntgtgcgtgtnntgngnnttnngnttgntggtttngtnnctttttgt

SEQ ID NO: 40 - DNA, 217 bp, Glycine max
  unsure (1)..(217): unsure at all n locations
  Clone ID: 700903669H1
agtcgatgcagcgtacgtnagctcggaattccgagcttggatcctctagagcggccgccgactagtgagctcgtcgaanccgggaattaattccggaccggtacctgcaggcgtaccagctttccctatagtgagtcgtattagagcttggcgtaatcatggtcatagctgtttcctgtgtgaaattgttatnccgctcacaattccacacaacata

SEQ ID NO: 41 - DNA, 280 bp, Glycine max
  unsure (1)..(280): unsure at all n locations
  Clone ID: 700904079H1
gatngnatngtnnnnagtcnganttcggctcgagggtagcagaanngntataatnactnnnnncganntcganggataangctnncagtntgngngntgtccanttggaaannctgtanaancgtnaagantgcannnctnncannnggnnntagagggggtcgcacngtnggggcancgactcaanggatggnnggatngtangaggagtnannagcangncgcaaagaataangtnctatagatncggggaattnagaantaagggagtcatagggtt

SEQ ID NO: 42 - DNA, 89 bp, Glycine max
  unsure (1)..(89): unsure at all n locations
  Clone ID: 700904258H1
cgtcgcacgcacgcgtacgtaagctcgggaattcggctcgagnttttattagaaataaaaaatgacgttcggttacttgggttctcaag

SEQ ID NO: 43 - DNA, 233 bp, Glycine max
  unsure (1)..(233): unsure at all n locations
  Clone ID: 700904512H1
gtcgcangcacgcgtacgtnagctcggaattccgagcttgcgatcctctagagcggccgccgactagtgagctcgtcgaacccgggaattaattccggaccggtacctggcaggcgtaccagctttccctatagtgagtcgtattagagcttggcgtaatcatggtcatagctgtttcctgtgtgaaattgttatccgctcacaattccacacaacatanananntaaaaaaa

SEQ ID NO: 44 - DNA, 295 bp, Glycine max
  unsure (1)..(295): unsure at all n locations
  Clone ID: 700904603H1
nccaagtacgtaaactcggaattccgagcttnaatcctctagagcggncgcngactantgagctcgtcgaaccgggaattaattncggaccggtacctgcangcgtaccagctttccctatagtgantcgtattagagcttggcgtaatcatggtcatagctgtttcctgtgtnaaattgttatccgctcacaattccacacaacatacnaantaaaaaanannnnnannnaannnnnnnnnnnnnnnnnnnnnnnannnnaannnnnnannnnnnnnnnnaannannnnnnnnt

SEQ ID NO: 45 - DNA, 349 bp, Glycine max
  unsure (1)..(349): unsure at all n locations
  Clone ID: 700904608H1
cggntaangnancnggacgtangctcgganttcggctcgcatggcctaggcgcnttngtgncgtgggnncntnggtnngccnagtggcgggcntgttgcgtnntgnggttgggatgggntgncgcnanctccnggtggtcnggtggggacncgnncttncgtgtggtgtgnngtggtggttccagntngcngtggntgcgtggcncggttgcggnnncgnagnngcanntnnggcgcgcnntctngntgtagngngnttnccnttgcncancgngggncnntngngnnnnnggtcggaangggngtgcatgncttgcgnngtccgtggaggntgttggntctnccgnnn

SEQ ID NO: 46 - DNA, 144 bp, Glycine max
  unsure (1)..(144): unsure at all n locations
  Clone ID: 700904644H1
cnnnttaaacgtacncntagncaaactnggaattcaactcgagagaaataaacntntgnnagngngaagtgagnganaaaacntaggnagngnaaannaatggaggnatagtgaaacatggagntgaaaggngngcggaaatnt

SEQ ID NO: 47 - DNA, 308 bp, Glycine max
  unsure (1)..(308): unsure at all n locations
  Clone ID: 700904745H1
ntncgntcncgngcncgcggncctcncntnttangctcgcagtgtngnancgcncnngagnancnttnacnccaccccacgncccnaggnacnntctnctcnnctgtntagtnnngggtgtnnngttgcttatgtgntgcggagtgtganatgtggtcntggtggngctngnntnnggncannttgtnctcangnnggcncnncctggttggtctnnngttttngnngnnntgtncttannggncatggtgggtgtnnntgtaggtttnnttngggtnnggntntngnccgctccncnnactgnnngn

SEQ ID NO: 48 - DNA, 212 bp, Glycine max
  unsure (1)..(212): unsure at all n locations
  Clone ID: 700905010H1
gtcgcnngcntagtacgtaagctcggaattccgagcttgggatcctctagagcggccgccgactagtgagctcgtcgaacccgggaattaattccggaccggtacctgcaggcgtaccagctttccctatagtgagtcgtattagagcttggcgtaatcatggtcatagctgtttcctgtgtgaaattgttatccgctcacaattccacaca

SEQ ID NO: 49 - DNA, 254 bp, Glycine max
  unsure (1)..(254): unsure at all n locations
  Clone ID: 700905487H1
gtcgcangcacgcgtacgtaagctcggaattcggctcgagngctaattcctcaaggatgttttatctagcttttaaaaaaaaaaaaaaagggcggccgccgactantgagctcgncgacccgggaattaattccggaccggtacctgcaggngtaccagctttccctanagngagtcgtattagagcttggcgtaatcatggncanagctgtttcctgngtgaaattgttatcngntcacaattccacacaaca

SEQ ID NO: 50 - DNA, 72 bp, Glycine max
  Clone ID: 700905847H1
gcatgcacgcgtacgtaagctcggaattcggctcgagctagtttctagatcgcgagctgccgcccttttttt

SEQ ID NO: 51 - DNA, 157 bp, Glycine max
  unsure (1)..(157): unsure at all n locations
  Clone ID: 700905980H1
ngttgcacgcncgcgtncgtnagctcgganttcggctgcggagnntngntagnnngncngatcggcacggatnntactcggncggactntgnngacncggtgaccgnnggtgangacagtgnngaacgcttacttccacaacaancancancgnnan

SEQ ID NO: 52 - DNA, 91 bp, Glycine max
  unsure (1)..(91): unsure at all n locations
  Clone ID: 700906169H1
cgtcgcangcacgcgtacgtaagctcggaattcggctcgagngattcaaaactagttgtcaatcatgtcaataatcaaaaaaaaaaaaaaa

SEQ ID NO: 53 - DNA, 217 bp, Glycine max
  unsure (1)..(217): unsure at all n locations
  Clone ID: 700906256H1
tcgcangcacgcgnacgtnnagctcnnggttcgnngncngncctnntctagagcggccgccgactagtgagctcgtcgacncgggaattaattccggnccggtacctgcaggcgtaccagctttccctatagtgaggtcgtattagagcttggcgtaatcatggtcatagctgtttcctgtgtgaaattgttatccgctcacaattccacacaacat

SEQ ID NO: 54 - DNA, 64 bp, Glycine max
  unsure (1)..(64): unsure at all n locations
  Clone ID: 700906738H1
gcnngcacgcgtacgtaagctcggaattcggctcgagnncaaaaaaaaaaaaaaaaaaaaaaat

SEQ ID NO: 55 - DNA, 63 bp, Glycine max
  unsure (1)..(63): unsure at all n locations
  Clone ID: 700906848H1
atgcacgcntacgtnngntcggaattcggctcgagcncccttttttttttttttttttttttt

SEQ ID NO: 56 - DNA, 159 bp, Glycine max
  Clone ID: 700906856H1
cgcatgcacgcgtacgtaagctcggaattaattccggaccggtacctgcaggcgtaccagctttccctatagtgagtcgtattagagcttgggcgtaatcatggtcatagctgtttcctgtgtgaaattgttatccgctcacaattccacacaacatac

SEQ ID NO: 57 - DNA, 66 bp, Glycine max
  unsure (1)..(66): unsure at all n locations
  Clone ID: 700906872H1
gtcgcatgcacgcgtacgtaagctcggnnattncngctcgagctcgagccgaataanaaaaaaaaa

SEQ ID NO: 58 - DNA, 297 bp, Glycine max
  unsure (1)..(297): unsure at all n locations
  Clone ID: 700907445H1
aatcgcacgnacgagtagntcgctntacntgtngctagagaagactnngacannanaattattgaagnagnananttncgnncaagggnatatcntgantcaagcnatgantccaggtcttgnanttntnggttnaatctncaggtcangngtaaccaggaatcggnaatcgaanntgccanggagtgnnttaanntgnnanngnngatgggtcctncagcngccaaggagntgngaanttntcatnacatnatcanagtttgtgcctnataggaccgtcnnanntggtanaaagcn

SEQ ID NO: 59 - DNA, 216 bp, Glycine max
  unsure (1)..(216): unsure at all n locations
  Clone ID: 700907650H1
gtcgcangcacgcgtacgtaagctcggaattccgagcttggntcctctagagcggccgccgactagtgagctcgtcgaaccgggaattaattccggaccggtacctgcaggcgtaccagctttccctatagtgagtcgtattagagcttggcgtaatcatggtcatagctgtttcctgtgtgaaattgttatccgctcacaattccacacaacata

SEQ ID NO: 60 - DNA, 207 bp, Glycine max
  unsure (1)..(207): unsure at all n locations
  Clone ID: 700907812H1
atgcacgcgtacgtnagctcggaattccgagcttggatcctctagagcggccgccgactagtgagctcgtcgacccgggaattaattccggaccggtacctgcaggcgtaccagctttccctatagtgagtcgtattagagcttggcgtaatcatggtcatagctgtttcctgtgtgaaattgttatccgctcacaattccacacaa

SEQ ID NO: 61 - DNA, 368 bp, Glycine max
  unsure (1)..(368): unsure at all n locations
  Clone ID: 700908052H1
aagntntgtgcganangacnanngnganngttngagntncgganacattgnagaanncggganggtgagcaggtnagtgagagcannngtaagganatgngacanngcgtgnagtnatcgtaagngtaggagngtnangngngagataaacnnnnanagtnattacnagntgtgaggangnggaggaagangtgagnatatgttgntggnangganntanccagggnngctngttgcnnatgntcntgcagganganagnntaagnnntgtgncgacnnttnanttaagcgtgangngnggnnctggatctgnngtgcggtangtcngcgnaacanggacngtgngtnagagtgggcngnnacacanc

SEQ ID NO: 62 - DNA, 171 bp, Glycine max
  unsure (1)..(171): unsure at all n locations
  Clone ID: 700908362H1
agtcgcangcacgcgtacgtaagctcggaattccgagcttggatcctctagagcggccgccgactagtgagctcgtcgacncgggaattaattccggaccggtacctgcaggcgtaccagctttccctatagtgagtcgtattagagcttggcgtaatcatggtcatagct

SEQ ID NO: 63 - DNA, 274 bp, Glycine max
  unsure (1)..(274): unsure at all n locations
  Clone ID: 700908753H1
gtcgcatgcacgcgtacgtaagctcgggccgactagtgagntcgtcgacccgggaattaattccggaccggtacctgcaggcgtaccagctttccctatagtgagtcgtattagagcttggcgtaatcatggtcatagctgtttcctgtgtgaaattgttatccgctcacaattccacacaacatacgatnncanaannnnnnnnnnnnnncagnganancacangnngnnngagnncntncannnnnnncnnnnanannnnnnnaannnnnnn

SEQ ID NO: 64 - DNA, 349 bp, Glycine max
  unsure (1)..(349): unsure at all n locations
  Clone ID: 700908770H1
gcnngtctncacagcacgcgagacgcgnggctgcgggactccngncacaagcctcaangncnactagnntcannctcatttcccatccccggttctatacnacaaggtgtctggccngnnggnnantagtgcaatgagtagnatnactngttnttgcgntacaaccgagcntgngtgttcggcgttgcttggcatgagnagccctggcctcattantgcgnngaccaaganancagctttngccatgcatggttnacgngtnntagggantttggcgtnatggananttgcncanaagcnganngtgggtcgcagccattccgnttgttctcgncnngatctcgggagt

SEQ ID NO: 65 - DNA, 223 bp, Glycine max
  unsure (1)..(223): unsure at all n locations
  Clone ID: 700908958H1
cnagatttntcgtgtatggagcttaggggaancaagttgccagtaatncaccagntncagttaacaatantgagcaaaanagagganttggatggtcatcaaccantactgctggtgcnttggctggtccaagactngaaganaggcgcctgannccagncaatgctcttnnactananaatgtcaatganaggtcctatgtacacgcgtagccccaattctn

SEQ ID NO: 66 - DNA, 156 bp, Glycine max
  unsure (1)..(156): unsure at all n locations
  Clone ID: 700909339H1
tcgcatgcacgcntacgtaagctcggaattccggaccggtacctgcaggcgtaccagctttccctatagtgagtcgtattagagcttggcgtaatcatggtcatagctgtttcctgtgtgaaattgttatccgctcacaattccacacaacatacg

SEQ ID NO: 67 - DNA, 75 bp, Glycine max
  unsure (1)..(75): unsure at all n locations
  Clone ID: 700909352H1
gtcgcangcacgcgtacgtaagctcgggaattcgggctcgagcggctcgaganaaaaaaaaaaaaaaaaaaannt

SEQ ID NO: 68 - DNA, 70 bp, Glycine max
  unsure (1)..(70): unsure at all n locations
  Clone ID: 700909372H1
tcgcangcacgcgtacgtaagctcggaattcggctcgagttcaaataaaaaaaaaaaaaaaaaaaaaaan

SEQ ID NO: 69 - DNA, 429 bp, Glycine max
  unsure (1)..(429): unsure at all n locations
  Clone ID: 700909524H1
nttnncgaccnttnnntnnntctganttcnncgnnagancntgtgatnangtgngnagnggaaactnngcncaggtgngnnnagtagngtgcgcntnncangnggntgtgnagctatagatttagntcgtgttnnntgntgcggntagttncatngacnangttggttantcncagtgganngnnacntgcnnngtncccnngtgngcnnagctaagnngtgttcagtnagcatacctncannagtatncagagttanctcgangttanngatnttagagtgtganngnngtnaccatgtcgtngnnntgcncgctantctgagatcgtagancgtnntagtcagatntatgngagtagagntcggnnncgaanngncangagatntntgagnnngcttgtctgtccancnngtgtcngatgtgngttt

SEQ ID NO: 70 - DNA, 212 bp, Glycine max
  unsure (1)..(212): unsure at all n locations
  Clone ID: 700909711H1
gtcgcangcacgcgtacgtaagctcggaattccgagcttgggatcctctagagcggccgccgactagtgagctcgtcgnncccgggaattaattccggaccggtacctgcaggcgtaccagctttccctatagtgagtcgtattagagcttggcgtaatcatggtcatagctgtttcctgtgtgaaattgttatccgctcacaattccacac

SEQ ID NO: 71 - DNA, 152 bp, Glycine max
  unsure (1)..(152): unsure at all n locations
  Clone ID: 700909862H1
gtcgcangcacgcgtacgtaagctcgggccgactagtgagctcgtcgacccgggaattaattccggaccggtacctgcaggcgtaccagctttccctatagtgagtcgtattagagcttggcgtaatcatggtcatagctgtttcctgtgtg

SEQ ID NO: 72 - DNA, 258 bp, Glycine max
  unsure (1)..(258): unsure at all n locations
  Clone ID: 700910004H1
bgaatgangnccgncgactcngacgngnaaccatcancgcngcngagannagcnagntnaaaanaggcaagcnnacnncnctcangcntntgcangaantccntncaagcgtcacancngcggnaaaganaccncgctnaccangngantcancangtctagtccgcgcncacatcatgcnctnaattncggnnncacanangcncngncctggccatcnnngnnnaccnnganagcngnnagcngccnntcgctncg

SEQ ID NO: 73 - DNA, 239 bp, Glycine max
  Clone ID: 700863024H1
ttacccttaatagagagattaaacagactcactatacagctccaaaagatttgtattttgtttaataaacttagtaaaggtaactatcaaatagttgcaatatataatatataatgttgacagatatataatataataaaaactgaatgccgaatggctgcattttatgctggttttcccgaaactgtgcctgttaggaccgttaataggcaatgttcatctgggctccaggctgtcgc

SEQ ID NO: 74 - DNA, 241 bp, Glycine max
  Clone ID: 700863028H1
aaaagacaacccagagagcgcgtcttaataaacgctcttctctgaaaacccccatttcttttcttctttcttcttctctttcgcttcttcgatcttcgatcttcgtcgctgaaaatgagagagtgcatttcaatccacatcgccaggccgggattcaggttggaaacgcctgctgggagctttactgcctcgaacacggcattcagcctgatgggcagatgccaagtgacaagaccgttgg

SEQ ID NO: 75 - DNA, 138 bp, Glycine max
  unsure (1)..(138): unsure at all n locations
  Clone ID: 700863037H1
ctcggaattaattccggaccggtacctgcaggcgtaccagctttccctatagtgagtcgtattagagcttggcgtgaatcatggtacatagctgtttacctgtgtgaaattgttatcccgctncacaatttccaccan

SEQ ID NO: 76 - DNA, 40 bp, Glycine max
  Clone ID: 700863092H1
agctcggaattcggctcgagcacaattctttttttttttt

SEQ ID NO: 77 - DNA, 214 bp, Glycine max
  unsure (1)..(214): unsure at all n locations
  Clone ID: 700952936H1
gtcgcatgcacgcgtacgtnagctcggaattccgagcttgggatcctctagagcggccgccgactagtgagctcgtcgacccggganttaattccggaccggtacctgccaggcgtaccagctttccctatagtgagtcgtattagagcttggngtaatcntggtcatagctgtttcctgtgtgaaattgttatccgctcannattccacacaa

SEQ ID NO: 78 - DNA, 186 bp, Glycine max
  unsure (1)..(186): unsure at all n locations
  Clone ID: 700953062H1
ncnacanngtaacgntananccnncaggganantccgagactncgaagactcgtatccgngccnaactctggcctggtncgaaaagggnnttgncgtcacgncntctcngggcagaccactngcnttcaagacngcccgtcanaatatgncnncaatanngacaccatnatnnnccncacnctcat

SEQ ID NO: 79 - DNA, 153 bp, Glycine max
  unsure (1)..(153): unsure at all n locations
  Clone ID: 700953310H1
acgtcgcangcncgcgtacgtaagctcggaattccggaaccggttacctgcaggcgtaccagctttccctatagtgagtcgtattagagcttggcgtaatcatggtcatagctgtttcctgtgtgaaattgttatccgctcacaattccacac

SEQ ID NO: 80 - DNA, 250 bp, Glycine max
  Clone ID: 700953696H1
gatacttaatcctacgttagttgtgcttcaacctattaccgcattcaattttccagaaaaataaaaaaaaaagaaagatagaaatggcgcatattcctcagacccccaccaatgacgcggcggcttctggtgcaaatccgtcgatgacgaccatctcgttgtacgtcggggatcttgaccacgacgtcaacgatccgcagctctatgatctcttcaaccaggttgcccaagtcgtttccgttcgaatttg

SEQ ID NO: 81 - DNA, 134 bp, Glycine max
  unsure (1)..(134): unsure at all n locations
  Clone ID: 700954431H1
ncgcangcacgcgtacgtaagctcggnattcggctcgagnttcacattttgnntgagattttntnatgtaacccantantcattggntggaaaannaaaaaaaaaaaaaaaaaaaaanaaaaanaaagcaaanc

SEQ ID NO: 82 - DNA, 241 bp, Glycine max
  unsure (1)..(241): unsure at all n locations
  Clone ID: 700954518H1
aangcacgcgtacgtaagctcggaattccgagcttgggntcctctagagcggccgccgactagtgagctcgtcgacccgggaattaattccggaccggtacctgcaggcgtaccagcttccctatagtgagtcgtattagagcttggcgtaatcatggtcatagctgtttcctgtgtgaaattgttatccgctcacaattccacacaacatacgncnnccananagagangnnannngnac

SEQ ID NO: 83 - DNA, 224 bp, Glycine max
  unsure (1)..(224): unsure at all n locations
  Clone ID: 700954818H1
acgtcgcatgcacgcgtacgtaagctcggaattccgagcttggatcctctagagcggccgccgactagtgagctcgtcgacncgggaattaattccggaccggtacctgcaggcgtaccagctttccctatagtgagtcgtattagagcttggcgtaatcatggtcatagctgtttcctgtgtgaaattgttatccgctcacaattccacacaacatacgcgnn

SEQ ID NO: 84 - DNA, 210 bp, Glycine max
  unsure (1)..(210): unsure at all n locations
  Clone ID: 700954829H1
gtngcangcacgcgtacgtaagctcggaattccgagcttggatcctctagagcggccgccgactagtgagctcgtcgacccgggaattaattccggaccggtacctgcaggcgtaccagctttccctatagtgagtcgtattagagcttggcgtaatcatggtcatagctgtttcctgtgtgaaattgttatccgctcacaattccacac

SEQ ID NO: 85 - DNA, 370 bp, Glycine max
  unsure (1)..(370): unsure at all n locations
  Clone ID: 700954870H1
ngncncngcacgcgtacgtaagctcggaattcgntcangttncaaccctagtcactactcactcacaagcatgcacgtnnttnnncnatgcnnncattgatggaccttccnagcancntaccatgacnanatcnngttgttntggcctcngtcctgtgaccnccntcanagaagnnagaantccctntgtattacaaggctaatgggtngtttgtggccgcntgtaggtcnaaaggactngactngaagtngaattcgnanccccccccaaattttctgacaaacnntgacttcatantggggcatacccttgttcacgggnttnttntgagacccttncctttttagcgtnggnnaattttncnccagg

SEQ ID NO: 86 - DNA, 161 bp, Glycine max
  unsure (1)..(161): unsure at all n locations
  Clone ID: 700954935H1
ngncangncgcgtacgtgagcncggngttnnttccggnccggtacctgcnngcgtaccagcnttncctatagtgagtcgcattagagcttggcgtaatcatggncatagcngtttcctgngtganatngtnatccgctcacnattncacanaacatacgan

SEQ ID NO: 87 - DNA, 173 bp, Glycine max
  unsure (1)..(173): unsure at all n locations
  Clone ID: 700954992H1
acgtcgcangcacgcgtacgtaagctcggaattccggaccggtacctgcaggcgtaccagctttccctatagtgagtcgtattagagcttggcgtaatcatggtcatagctgtttcctgtgtgaaattgttatccgctcacaattccacacaacatacgaggtngnananana

SEQ ID NO: 88 - DNA, 311 bp, Glycine max
  unsure (1)..(311): unsure at all n locations
  Clone ID: 700955349H1
gtcgcatgcacgcgtacgtaagctcggaattccgagcttgggatcctctagagcggccgccgactagtgagctcgtcgacncgggaattaattccggaccggtacctgcaggcgtaccagctttccctatagtgagtcgtattagagcttggcgtaatcatggtcatagctgtttcctgtgtgaaattgttatccgctcacaattccacacaacatacgagtcncgaaagggggatgtgctgcnaggngattaagttgggtaacgccaggttttcccagtcacgacttgtaaaacgacggccagtgattnc

SEQ ID NO: 89 - DNA, 159 bp, Glycine max
  unsure (1)..(159): unsure at all n locations
  Clone ID: 700955559H1
gtcgcangcacgcgtacgtaagctcggaattccgagcttggatcctctagagcggccgccgactagtgagctcgtcgacncgggaattaattccggaccggtacctgcaggcgtaccagctttccctatagtgagtcgtattagagcttggcgtaatca

SEQ ID NO: 90 - DNA, 174 bp, Glycine max
  unsure (1)..(174): unsure at all n locations
  Clone ID: 700955874H1
acgtcgcangcacgcgtacgtaagctcggctaacagcgcgatttgctggtgacccaatgcgaccagatgctccacgcccagtacgcgtaccgtcttcatgggagaaaataatactgttgatgggtgtctggtcagagacatcaagaaataacgccggaacattagtgcaggcag

SEQ ID NO: 91 - DNA, 81 bp, Glycine max
  unsure (1)..(81): unsure at all n locations
  Clone ID: 700956158H1
gtcgcangcacgcgtacgtaagctcggaattcggctcgagactagttctagatcgcgagcggcggcccttttttttttttn

SEQ ID NO: 92 - DNA, 403 bp, Glycine max
  unsure (1)..(403): unsure at all n locations
  Clone ID: 700956290H1
tcctgaccgagtngtcgaatcggctcgagnnttntnttccnnanctcatggnaggntntntccntggncgtcttnnttntnggnnnatnggatncnggtggcaancnttntagnngangatgcncnattacnatgcancnatntttntcnntgcantcnatcatcttttcggctcggcacattggttcatcnnaccgnacnngacataccgtaggactatantcnggcaantctaganctcgctctttntaggctatctcgcgcacaaccntggaaanttcacactattttcggnccacgagatgtaaaccgctttntaccaaacnctaatcgnttttcngtccncnatggtcaaatccacggtantnttngctatgggaacttagcnaagcttannccctan

SEQ ID NO: 93 - DNA, 266 bp, Glycine max
  unsure (1)..(266): unsure at all n locations
  Clone ID: 700956318H1
nacgngtacgtaagctcgggccgactagtgaantcgtcgacccgggaattaattccggaccggtacctgcaggcgtaccagctttccctatagtgagtcgtattagagcttggcgtaatcatggtcatagctgtntcctgtgtgaaattgttatccgctcacaattccacacaacatacgnttgggnaaanacngnnnannnnnnnnnnnnnnnnnnnnnnnnnnnnnnnnnnnnnnnnnnnnnnnntannntnaagnnnnnnnnn

SEQ ID NO: 94 - DNA, 292 bp, Glycine max
  unsure (1)..(292): unsure at all n locations
  Clone ID: 700956456H1
gtngcatgcacgcgtacgtaagctcggaattcggctcgaggttctagatcgcgagcggccgccnnttagtganctcgtcganncgggaattaattncggaccggtatctnnanncgtaananntttccctatagtaantcntattaaaanntggcgtaatcatggncatanatgtttccnntnnccaattgntatccggtcnaaattgccacanaaaatacgantnaacanaaaaaangggaaaaaaggaaacnagaatgggnggcgnaaaaattntnggtgcntcnangng

SEQ ID NO: 95 - DNA, 120 bp, Glycine max
  unsure (1)..(120): unsure at all n locations
  Clone ID: 700956507H1
nncgcgtacgtnagcncggaattcggctcgagcnggtatnnccatgatnnnnacatatgatcannangcttgggcctgatgganntgcgggancaccttccngnaatcagnncaatnngn

SEQ ID NO: 96 - DNA, 121 bp, Glycine max
  unsure (1)..(121): unsure at all n locations
  Clone ID: 700956537H1
cgcangcacgcgtacgtaagctcggnattcgggctcgagcancggacacccgnatcaaaagtcacncnattcncatcagagcncncnnnncnagcattncccttagngtaggtnntggaag

SEQ ID NO: 97 - DNA, 306 bp, Glycine max
  unsure (1)..(306): unsure at all n locations
  Clone ID: 700956555H1
natacgcnacncgaacgnangcacncancncgagnngatcganatannatanaaccngannagatcannnaagnagaancagncgnaaannannantgtccaaagaacanacgannaananncanaggcangcngannacnnancnggncatgaactnnactncnacnngaacggacntnganggccaagncnaaggnccnanccanctntnnctncgcatcccanacangaancaacnaacacnnnaacanccaancancacagcgacatgcancatanananctncaacncngangnntncaat

SEQ ID NO: 98 - DNA, 125 bp, Glycine max
  unsure (1)..(125): unsure at all n locations
  Clone ID: 700956576H1
ntgcgcacntncgnncgtgaattcggctcgagcnncgtntgcaacntgccagggtaagaactcactngagnagantcactggcnaccaaacaagattncggtnangnngcagcatcangcnttgn

SEQ ID NO: 99 - DNA, 291 bp, Glycine max
  unsure (1)..(291): unsure at all n locations
  Clone ID: 700957036H1
ttcncgcanacnnagcnngctcngantncngctcnacgccanncnccacntnaacnncacaagctnnntncccanccaactangnnncaacncnnacnncnnnaaannatngnctnacnccannncnnnncgnctgcaagtgcagccccncnagnnncccccccncggnnnaagggnnccgnnagcnggccaatnnngnntgngntgggggngnnccgnngnnggngnctgntgtgggnggttctggtngggngngggngggnanccgnagcangtcnctgnngagntnnn

SEQ ID NO: 100 - DNA, 194 bp, Glycine max
  unsure (1)..(194): unsure at all n locations
  Clone ID: 700957254H1
acgtcgcatgcacgcgtacgtaagcttggatcctctagagcggccgccgactagtgagctcgtcgacccgggaantccggaccggtacctgcaggcgtaccagctttccctatagtgagtcgtattagagcttggcgtaatcatggtcatagctgtttcctgtgtgaattgttatccgctcacaattccacaca

SEQ ID NO: 101 - DNA, 67 bp, Glycine max
  Clone ID: 700957427H1
gcacgcgtacgtaagctcggaattcggctcgaggttctagatcgcgagcgccgcccttttttttttt

SEQ ID NO: 102 - DNA, 65 bp, Glycine max
  unsure (1)..(65): unsure at all n locations
  Clone ID: 700957457H1
gtcgcntgcacgcgtacgtaagctcggaattcggctcgagnnaaaaaaaaaaaaaaaaaaaaaan

SEQ ID NO: 103 - DNA, 178 bp, Glycine max
  unsure (1)..(178): unsure at all n locations
  Clone ID: 700957794H1
acgtcgcangcacgcgtacgtaagctcgggccgactagtgagctcgtcgacccgggaattaattccggaccggtacctgcaggcgtaccagctttccctatagtgagtcgtattagagcttggcgtaatcatggtcatagctgtttcctgtgtgaaattgttatccgctcacaattcc

SEQ ID NO: 104 - DNA, 134 bp, Glycine max
  unsure (1)..(134): unsure at all n locations
  Clone ID: 700957855H1
ncntctgcgcgcacgcgtacgtaagctcggaatncggcncgagaaaggactaacccttcctgggatcngctttgcnagncnctttngcnncgcncacngncggnaangnggaacncgagaggnngagagaggcg

SEQ ID NO: 105 - DNA, 124 bp, Glycine max
  unsure (1)..(124): unsure at all n locations
  Clone ID: 700957886H1
ngtctgcacgcacgcgtacgtaagctcgggccgnntagngagntcgtcgacccgngaattaantccggaccggtacctgcaggncgtaccagctttgccctaangngtgagtncgnattagagg

SEQ ID NO: 106 - DNA, 246 bp, Glycine max
  Clone ID: 700957916H1
agtggaaactgagattctgagaggaatcagcccttttccgtatactttacttgaacaagccgtttgagttcggcgtgtttaataaataaaatcacaagacaacgttgtcttgcgcctgaaagtgttgtggagacaaaaccacaatacagttttagaatggagaagacagcagttaaagttcgatgccagaggattgggtgcgacgccatgttctccgaggccgacaaccccgacggttcctgtcga

SEQ ID NO: 107 - DNA, 160 bp, Glycine max
  unsure (1)..(160): unsure at all n locations
  Clone ID: 700957955H1
gtcgcangcacgcgtacgtaagctcggaattaattccggaccggtacctgcaggcgtaccagctttccctatagtgagtcgtattagagcttggcgtaatcatggtcatagctgtttcctgtgtgaaattgttatccgctcacaattccacacaacatan

SEQ ID NO: 108 - DNA, 188 bp, Glycine max
  unsure (1)..(188): unsure at all n locations
  Clone ID: 700958174H1
gtcgcnngcacgcgtacgtaagctcgggccgactagtgagntcgtcgacccgggaattaattccggaccggtacctgcaggcgtaccagctttccncatagtgagtcgtattagagcttggcgtaatcatggtcatagctgtttcctgtgtgaaattgttatccgctcacaattccacacaacatacg

SEQ ID NO: 109 - DNA, 216 bp, Glycine max
  unsure (1)..(216): unsure at all n locations
  Clone ID: 700958570H1
gtcgcangcacgcgtacgtnagctcggaattccgagcttggatcctctagagcggccgccgactagtgagctcgtcgacccgggaattaattccggaccggtacctgcaggcgtaccagctttccctatagtgagtcgtattagagctggcgtaatcatggtcatagctgtttcctgtgtgaaattgttatccgctcacaattccacacaacatag

SEQ ID NO: 110 - DNA, 211 bp, Glycine max
  unsure (1)..(211): unsure at all n locations
  Clone ID: 700958760H1
angtcgcangcacgcgtacgtnagctcggaattccgagcttgggatcctctagagcggccgccgactagtgagctcgtcgacccgggaattaattccggaccggtacctgcaggcgtaccagctttccctatagtgagtcgtattagagcttggcgtaatcatggtcatagctgttcctgtgtgaaattgttatccgctcacaattccaca

SEQ ID NO: 111 - DNA, 274 bp, Glycine max
  unsure (1)..(274): unsure at all n locations
  Clone ID: 700958926H1
ctgcacgcgtacgtaagctcgggccgactagtganctcgtcgacccgggaattaattccggaccggtacctgcaggcgtaccagctttccctatagtgagtcgtattagagcttggcgtaatcatggtcatagctgtttcctgtgtgaaattgttatccgctcacaattccacacaacatannangnnaaaaaagangnnngnntnnncncngncnnnnnnnnnnggnnnnnnnnnnncnnnnnnncnnttnnnnnnnnnnnnnnnnnnnnnnn

SEQ ID NO: 112 - DNA, 145 bp, Glycine max
  unsure (1)..(145): unsure at all n locations
  Clone ID: 700959261H1
tntttcnccctntacgtncgcaaanctcnganatgnnngctngcaanngtgaaganannnncaaanatgtntngntcngagnganntatngnancgtctntntgtacannncgcnangnnncagtngncnncttcagagnacacc

SEQ ID NO: 113 - DNA, 160 bp, Glycine max
  unsure (1)..(160): unsure at all n locations
  Clone ID: 700959933H1
aaaaangaaaagtcgcangcacgcgtacgtaagctcggaattcggctcgagagttaaccaacaagcttacttttatggnntnnnatcnatantgnncngcnanggatnnattcctgtgtngcntcaanggaatcgtacagnactggtattcaaagacaan

SEQ ID NO: 114 - DNA, 60 bp, Glycine max
  unsure (1)..(60): unsure at all n locations
  Clone ID: 700960060H1
tcgcatgcacgcgtacgtaagctcggaattcggctcgangncngcccttttttttttttn

SEQ ID NO: 115 - DNA, 54 bp, Glycine max
  unsure (1)..(54): unsure at all n locations
  Clone ID: 700960138H1
agcgcangcacgcgtacgtaagctcggaattcggctcgagnttttttttttttt

SEQ ID NO: 116 - DNA, 202 bp, Glycine max
  unsure (1)..(202): unsure at all n locations
  Clone ID: 700960405H1
cangcncgcgtacgtnagctcggaattcggctcgagnctagttctagatcgcgagcggccgccgnctagtgagctcgtcgacccgggaattaattccggaccggtacctgcaggcgtaccagctttccctatagtgagtcgtattagagcttggcgtaatcatggtcatagctgtttcctgtgtgaaattgttatcngctca

SEQ ID NO: 117 - DNA, 216 bp, Glycine max
  unsure (1)..(216): unsure at all n locations
  Clone ID: 700960521H1
cgcngcatgcacgcgtacgnaagctcggaattccganttngatcctctagagcggccgnngactagtgagtcgtngacgcgggaattaattccgnaccggnacctgcaggcgtaccagctttgcctatagtnagtcgtantanagcttggagtaatcanggtcanagctgtttcctgtgtgaaantgntancgcgctcacaattncacanaacata

SEQ ID NO: 118 - DNA, 316 bp, Glycine max
  unsure (1)..(316): unsure at all n locations
  Clone ID: 700960527H1
actacgacccanccgcacgcnaccctcgcaattccnctcncgnccccaancanacncaccacnaantcccctccccacccagccccccaccnncccacccccacaccccantcnccnnccaanccacncctcccacccccccnccccaccccccnccnaccccccccgccccgacccacnnccccctccnnccnccnnccccaccccnccncccacacccncccccacgcccaccncncgcncaccccccnccnaccnccntcncccacccntnncccgccnnacacccnccccncccngccccccccccnncccc

SEQ ID NO: 119 - DNA, 87 bp, Glycine max
  unsure (1)..(87): unsure at all n locations
  Clone ID: 700960625H1
gcnncangcacgcgtacgtaagctcggaattcggctcgaggnncnanancncnancngncgngctntncttttttttttttggnnnn

SEQ ID NO: 120 - DNA, 64 bp, Glycine max
  unsure (1)..(64): unsure at all n locations
  Clone ID: 700960659H1
acgtcgcangcacgcgtacgtaagctcggaattcggctcgagccgagaaacaaaaaaaaaaaaa

SEQ ID NO: 121 - DNA, 179 bp, Glycine max
  unsure (1)..(179): unsure at all n locations
  Clone ID: 700960768H1
gtcgcangcacgcgtacgtaagctcgggccgactagtgacatcgtcgacccgggaattaattccggaccggtacctgcaggcgtaccagcttccacnanagtgagtcgtattagagcttggcgtaatcatggtcatagctgtttcctgtgtgaaattgttatccgctcacaattccaca

SEQ ID NO: 122 - DNA, 286 bp, Glycine max
  unsure (1)..(286): unsure at all n locations
  Clone ID: 700961062H1
gtcgtangcncgcgtacgtgagctcggaattcggctcgagctgaatttgagactttccacacaacanangagtntncgngngncgnangcgngngnggnnggnnncctcnagccnccgncngccncncggngngccgncnncnngnngnncctncncacgtcgnnnncgngnnngnntgnnncntggcgngncncggngngccnggnggcnncgggnncggtnggtgggnnggnnnngnncgngtgagcagntannggnngnngnccnggggnnnnnngnggncng

SEQ ID NO: 123 - DNA, 130 bp, Glycine max
  unsure (1)..(130): unsure at all n locations
  Clone ID: 700961351H1
cncntttnacncacgcgtacgtaagcncggaattcggctcganaganactncccgttnccaactncacgntgcnataccntgntgaagntcgagtgggcctnggtncgtttcactaagtgancganagan

SEQ ID NO: 124 - DNA, 60 bp, Glycine max
  unsure (1)..(60): unsure at all n locations
  Clone ID: 700961361H1
gtcgcangcacgcgtacgtaagctcggaattcggctcgagnaaaaaaaaaaaaaaaaaan

SEQ ID NO: 125 - DNA, 370 bp, Glycine max
  unsure (1)..(370): unsure at all n locations
  Clone ID: 700961968H1
tgtcggagagtgatcgtnacatcagcagtgtcctctcntgatacttggtagangttatgnnccatcttctggcagaactaatgtcaccacctgcaattgcnggtggtgacatttagttctgccagaaggatggctcattanacttaaatggtaganccaacctngncacatttngccaaancanttctctanctcggggttttncccctnctttttcgggttnggccnggtttttgnccattgggggctttaaaaggggaaaanccatttgaaattanaanttaagggggaanggaacccggatttggnccntcccccaanntttnnncnnggccccctttnccnantnnccccnaaangggnnnctttc

SEQ ID NO: 126 - DNA, 165 bp, Glycine max
  unsure (1)..(165): unsure at all n locations
  Clone ID: 700962377H1
gncgtcgcangcacgcgtacgtaagctcggaattccggnaccggttacctgncaggcgtaccagctttccctatagtgagtncgtcattagagcttggcgtaatacatggtacatagctgtttncctgtgtgaaattgttataccgnctcacaattccaccanca

SEQ ID NO: 127 - DNA, 201 bp, Glycine max
  unsure (1)..(201): unsure at all n locations
  Clone ID: 700962464H1
tcgcangcacgcgtacgtaagctcggaattcggctcgagtctagatcgcgagcggccgccgactagtgagctcgtcgacccgggaattaattccggaccggtacctgcaggcgtaccagctttccctatagtgagtcgtattagagcttggcgtaatcatggtcatagctgtttctgtgtgaaattgttatccgctcacaa

SEQ ID NO: 128 - DNA, 86 bp, Glycine max
  unsure (1)..(86): unsure at all n locations
  Clone ID: 700962735H1
acgtcgnatgcacgcgtacgtaagctcggaattcggctcgagctagttctagatcgcgagcggccgcccttttntttttttnttna

SEQ ID NO: 129 - DNA, 65 bp, Glycine max
  unsure (1)..(65): unsure at all n locations
  Clone ID: 700962758H1
gtcgcangcacgcgtacgtaagctcggaattcggctcgagnaaaaaaaaaaaaaaaaaaaaaaaa

SEQ ID NO: 130 - DNA, 57 bp, Glycine max
  unsure (1)..(57): unsure at all n locations
  Clone ID: 700962816H1
gcngcacgcgtacgtaagctcggaattcggctcgagnnaaaaaaaaaaaaaaaaaan

SEQ ID NO: 131 - DNA, 301 bp, Glycine max
  unsure (1)..(301): unsure at all n locations
  Clone ID: 700962846H1
nntacganngtacgcgtncgtnagntcggnattcggctcgaanggatagnngattgaggntnaatcggtgnnntgntgtgngnnaagntnaggaanatangngctagatngnagnangcgattttnttatatganattnnaaagagtngantggatnatctcaatcccatgaattagcnattgagtttnagctgaatcggacatcgttgacgatntcnctcantcacacactactgnntcggncagnttacaagtnaacncgngctgctcagnnnaccctanntattaggggntngntgtg

SEQ ID NO: 132 - DNA, 218 bp, Glycine max
  unsure (1)..(218): unsure at all n locations
  Clone ID: 700963052H1
gtcgcatgcacgcgtacgtnagctcggaattccgagcttgggatcctctagagcggccgccgactagtgagctcgtcgacancgggaattaattccggaccggtacctgcaggcgtaccagctttccctatagtgagtcgtattagagcttggcgtaatcatggtcatagctgtttcctgtgtgaaattgttatccgctcacaattccacacaacata

SEQ ID NO: 133 - DNA, 298 bp, Glycine max
  unsure (1)..(298): unsure at all n locations
  Clone ID: 700963237H1
gtcgcangcacgcgtacgtaagctcggaattcggctcgagnnnctnnanannttgaganatcnnncnnnnntnnnnncngtngncanncganaccntnagctctcggnnncttgntantttcggnncgcnnncgatactntnaccgtnattnnnnnnnntnnncngggaanntggtnnncgnggangnangnngnggcgctcaagntcctntgtgacncggcngntcananggnacggtaccgtnatnncgtncntgtgtntccccnaantngannaangggtctagnattgcgcatg

SEQ ID NO: 134 - DNA, 455 bp, Glycine max
  unsure (1)..(455): unsure at all n locations
  Clone ID: 700963294H1
tccangacggtactaagtcggaatcggctcgaggnggannctnncncaccancnctgtacnctctngntnnccnttcncnccactnnnacggncnntnagnnnntnagttcnanagntacannacagcgtgtgtncggntanangacnccgtcnntnacnncgagnanantgaganaatgnctgaaaaaacggttataacccacagatgacncggggttgaaangtgattcgatggccaatacngccngttgnattccccanttcccgantggaggccaagacccctatatagattntctaccggctgtgggattggaggacgtcttacccagtaaacttttgtaccccgaccaaaactttggancccatggcaattttttcgnggnttagctnaaacttnttgagaatnggggtttggngccattttaccntcttggcggatcgngacnaaaag

SEQ ID NO: 135 - DNA, 78 bp, Glycine max
  unsure (1)..(78): unsure at all n locations
  Clone ID: 700963429H1
tngcangcacgcgtacgtaagctcgggaattcggctcgagcnccatttgtgctatatttatggtatgtttttatttgn

SEQ ID NO: 136 - DNA, 162 bp, Glycine max
  unsure (1)..(162): unsure at all n locations
  Clone ID: 700963554H1
aacntcgcangcacgcgtacgtaanctcggaantcggctcgagatngnttnaaaatnaatgnnnggactgtgtncatggnacttgcanaanancanatgtgcagttatngncaccacannnanactttnactataatgatgccnatttnacgtgctgnggtt

SEQ ID NO: 137 - DNA, 310 bp, Glycine max
  unsure (1)..(310): unsure at all n locations
  Clone ID: 700963645H1
acgtcgcangcacgcgtacgtaagctcggaattccggaccggnacctgcaggcgtaccagctttccctatagtgagtcgtattagagcttggcgtaatcatggtcatagctgtttcctgtgtgaaatngtatccgctcacaattccacacaacatacgncccgcncnnnnngangnnnncncnnnnnnnnnannannngnnnnnngnnnnnnnnnnnnnnnnnngnnnnnnnnnnnnnnnnnnnnnnnnnnnnnnnnnnncnnnnnnnancnncttnnnncnnnnnnnnnnnacccccnnnnnnnnnnnn

SEQ ID NO: 138 - DNA, 162 bp, Glycine max
  unsure (1)..(162): unsure at all n locations
  Clone ID: 700963845H1
gtcgcangcacgcgtacgtaagctcggaattcggctcgaggactagttctagatcgcgagcggccgccgnctagtgagctacgtcgacccgggaattaattccggaccggtacctgcaggcgtaccagctttccctatagtgagtcgtattagagcttggcg

SEQ ID NO: 139 - DNA, 75 bp, Glycine max
  unsure (1)..(75): unsure at all n locations
  Clone ID: 700964251H1
agtcgcangcacgcgtacgtaaagctcggaattcggctcgagcttctctgcttggaggcttttnnttttttttnn

SEQ ID NO: 140 - DNA, 447 bp, Glycine max
  unsure (1)..(447): unsure at all n locations
  Clone ID: 700964519H1
ctgaggagagtcgatcgtcaaaaatcaacctggcccctcaacttctctattgttctctccgtctccctagccttctttttggtggctacttaaccaagggcacaactccganccgataacncgttttccttctacaacctttgcanancaaagtttgcaaagcncccaagnttcccaaaacnccaaaaancnatnttaattgggcttccncaaaaanacaagnaattggccttaaggttaattttgtncccattgccccttcccttggggggggggttnggtnttaaanccaaaaacnttgcccaacccccaaaaaaaaggtttttggggggcccaagggcccaaaaaaccgggggnccnggtttgggnccnccccaaaaccccctttnncgggggggggaaaattncccttgccctttcccgggggnttttncccggttttggnnc

SEQ ID NO: 141 - DNA, 216 bp, Glycine max
  unsure (1)..(216): unsure at all n locations
  Clone ID: 700964805H1
gtcgcngcnancgnacgtaagctcggaattccgagcttgncatcctctagagcggccgcngactagtgagctcgtcgaancgggaantaattccggaccggtacctgccaggcgtaccagctttccctanagtgagtcgtatnanagcttggcgtaatcatggtcatagctgtttcctgtgtgaaattgtnatcngctcacnantccacacaacat

SEQ ID NO: 142 - DNA, 235 bp, Glycine max
  Clone ID: 700962086H1
ctctttctctagtcctgttatttctcagcgcgtaaagcatggctttgttggtggagaaaaccacgagtggtcgcgagtacaaggtcaaggacctttcccaggccgacttcggccgcctcgagatcgagctggccgaggttgagatgcccggcctcatggcctgtcggaccgagttcggcccctcccagcccttcaagggggcccgcatcaccggctccctccacatgaccatcca

SEQ ID NO: 143 - DNA, 260 bp, Glycine max
  Clone ID: 700903523H1
tccaggagtactggtggtgcaccgagcgcgccctcgactggggccccggtggtggacccgacctcatcgtcgacgacggtggtgacgctacccttctcatccacgaaggcgtcaaggccgaggagctctatgagaaaccggcgaactccccgaccccaactccaccgacaacgccgagattcagatcgtgcttaccatcatcagagatgggttgaagaccgatcccaccaggtaccgcaagatgaaggagcgtctcgttg

SEQ ID NO: 144 - DNA, 240 bp, Glycine max
  Clone ID: 700863078H1
cgtaagtacactgaggtgaagccagccctcacaaacatggttgccgcagcaaaactcatccgcaacgaacttgccaagtgaatggtataagaaagtagaatcttccaagtcatttggttctgctttatattataatacacaaagaaaaattttctctatattgggttgtttcaataactgtgtgtggaatatttaggtgtcttagcatgctctgtgagcaattgattcttcctcaacccc

SEQ ID NO: 145 - DNA, 229 bp, Glycine max
  Clone ID: 700953594H1
ttattgctgaccttaaggcagctggtgcttcatggattcaatttgatgagcctacccttgtcttggaccttgaatctcacaagttgcaagctttcactgacgcatatgcagaacttgcacctgctttgtctgatctgaatgttcttgttgagacctactttgctgacatccctgctgaggcgtacaagaccctcacatctctgaatggcgtcactgcatatgggtttga

SEQ ID NO: 146 - DNA, 259 bp, Glycine max
  Clone ID: 700905233H1
cttgttgctctccaagcctgccaagggagtcgagaaatccttttctctcctctctctccttcccaaggttcttgctgtctacaaggaagttattgctgaccttaaggcagctggtgcttcatggattcaatttgatgagcctacccttgtcttggaccttgaatctcacaagttgcaagctttcactgacgcatatgcagaacttgcacctgctttgtctgatctgaatgttcttgttgagactactttgctgacatcc

SEQ ID NO: 147 - DNA, 255 bp, Glycine max
  Clone ID: 700959515H1
gattgcacccacccattaacggtgatgtgagccgcccaaagccaatgaccgtcttctggtcatctctggctcagagctttaccaagcgcccaatgaagggaatgcttaccggtcctgttaccattctcaactggtcctttgttagaaatgaccaacctagatctgagaccacctaccagattgctttgtctatcaaggacgaagtggaagaccttgaaaaggctggcatcactgttatccaaattgatgaagctg

SEQ ID NO: 148 - DNA, 273 bp, Glycine max
  Clone ID: 700952331H1
gaccttgctgcttctctcactacattgcagggtcttgagggcattgtgggcaaagataagcttgttgtgtccacctcctcctcccttcttcacactgctgttgatcttgttaacgagaccaagttggatgacgagatcaagtcatggctagcatttgctgcacaaaaaattgttgaagttaacgcattggctaaggcattgtctggcaacaaggatgtggccttcttctctgctaatgctgcagctcaggcttcaaggaagtcctctccaaga

SEQ ID NO: 149 - DNA, 247 bp, Glycine max
  Clone ID: 700964425H1
cttgctccctcagaagcgaagaagaagccacagagaaccagtctcctactctctctcacccacaagaaaaatggcatctcacatcgttggatacccccgcatgggtcccaagagagagctcaagttcgctctcgagtctttctgggatggcaagagcagcgccgaggatttgcagaaggtggctgctgatctcaggtcatccatctggaagcagatggctggtgctgggatcaagtacatccccagc

SEQ ID NO: 150 - DNA, 258 bp, Glycine max
  Clone ID: 700908840H1
aagaagttcaaccttccaatcctcccaaccaccacaattggatccttccctcagactgttgaactgaggagggtgcgtcgtgaatacaaggctaacaagatctcagaggaggagtatgttagttcaattaaagaggaaatccgcaaagttgttgaactccaagagaatcttgatatcgatgtcctggtacacggggagcctgagaggaatgacatggtggagtactttggtgagcagttgtcaggctttgcctttacc

SEQ ID NO: 151 - DNA, 251 bp, Glycine max
  Clone ID: 700958865H1
ctttgttttcaattaggtttttttgttgctctccttcaaactccatctttccaaatcctctctttgcgattgtgttttgatctgcttcctactgcgatagtttctctactgttacatggccatggcggtttccgcaattggttttgaaggtttcgagaaaaggttggaaatatcctttttccagccgggactttttgctgaccctgaaggaaggggtctaagggctcttacaaaatcccagttgggtgaga

SEQ ID NO: 152 - DNA, 233 bp, Glycine max
  Clone ID: 700962044H1
aatgacaccacctacccccttctccctataaatggcaactcaatgccccccttagaactcgcagcgcttgatttgaggccaggcaagccccactcaaccaccacacctctcctcgttcacgctacccctttctgctcttcttctacctttcaagttttaaaagtataaagatggcagagacattcctatttacctcagagtcggtgaacgagggacaccctgacaagctctgc

SEQ ID NO: 153 - DNA, 258 bp, Glycine max
  Clone ID: 700964366H1
caggcaagccccactcaaccaccacacctctcctcgttcacgctacccctttctgctcttcttctacctttcaagttttaaaagtataaagatggcagagacattcctatttacctcagagtcggtgaacgagggacaccctgacaagctctgcgaccaaatctccgatgctgtcctcgacgcttgcctcgagcaggacccagacagcaaagttgcctgcgaaacatgcagcaaaaccaacttggtcatggtcttcgg

SEQ ID NO: 154 - DNA, 239 bp, Glycine max
  Clone ID: 700906176H1
cacactcgttcatatatctctctgctcttctcttctcttctacctctcaagtttttgaagtataaagatggcagagacattcctattcacctcggagtcagtgaacgagggacaccctgataagctctgcgaccaaatctccgatgctgtcctcgacgcttgcctcgaacaggacccagacagcaaggttgcctgcgaaacatgcaccaagaccaacttggtcatggtcttcggagaga

SEQ ID NO: 155 - DNA, 248 bp, Glycine max
  Clone ID: 700907558H1
gaaaaagttggtgtgctgcttctcaatctaggaggaccagagacattgaatgacgttcaaccttttctgtttaatctttttgcagatcctgatatcattcgtcttccaaggttgtttcggtttctccagcgaccattggcaaaattgatttctgtacttcggtctcctaaatccaaggaagggtatgctgctattggtggtggctctcctttacgcaaaattacagatgaccaggcactcgcaattaa

SEQ ID NO: 156 - DNA, 249 bp, Glycine max
  Clone ID: 700964466H1
ctcccttattattaaattaaaaagctgacaaattggggggtcaactgatgaattagatccattccttggggttgatgcatgcgtccaagagtttccattcttcgcttccttcttccggtttatgatcgtattcccaccgagcagtcagtgggagagaaacaagtatactctctattctccctccagttttcagtccaaatgttgtacccctatcatataccaaattgaattcaacatatcgtccccttc

SEQ ID NO: 157 - DNA, 201 bp, Glycine max
  unsure (1)..(201): unsure at all n locations
  Clone ID: 700960522H1
gcgacacncggcctccacttctnaagtaccngaanaacaatnnaagaatgtaagaggggatggaactgntgacngcaaggaatgggntagnatctatgattatgatgtntacaatgacttgggngatccacataanggtgaaaagtatgctacgcngcnncnntggaggttgnnccttacctnanctcgcagangngacaa

SEQ ID NO: 158 - DNA, 281 bp, Glycine max
  Clone ID: 700956601H1
gtgagaagccgagcgattttgtttaccttccaagagatgaagcatttggtcacttgaagtcatcagattttctcgcttttggaatcaaatctgtatcccaagatgtcttgcctgtcttgactgatgcattcgatggaaatattttgagccttgagtttgataattttgctgaagtgcgcaaactctatgaaggtggagttacactacctacaaactttcttagcaagatcgcccctataccagtgatcaaggaaatttttcgaactgatggcgaacagttc

SEQ ID NO: 159 - DNA, 268 bp, Glycine max
  Clone ID: 700906062H1
gcgattttgtttaccttccaagagatgaagcatttggtcacttgaagtcatcagattttctcgcttatggaatcaaatctgtatcccaagatgtcttgcctgtcttgactgatgcattcgatggaaatattttgagccttgagtttgataattttgctgaagtgcacaaactctatgaaggtggagttacactacctacaaactttcttagcaagatcgcccctataccagtgatcaaggaaatttttcgaactgatggcgaacagtt

SEQ ID NO: 160 - DNA, 269 bp, Glycine max
  Clone ID: 700952395H1
atttttcttgaaaaatgatggaactttgacgccattggccattgagttaagtaagccacatcctcagggtgaagcatatggtcctgttagtgaagtctacgtgccttcgagtgaaggagttgaagcttacatttggttactggcaaaggcttacgttgttgtgaatgatgcttgctaccatcaaatcattagccattggctaaacactcatgcggttgtggagccattcgtcatagcgacaaacaggcatctgagcgtggttcacccta

SEQ ID NO: 161 - DNA, 253 bp, Glycine max
  Clone ID: 700952820H1
cttgggtgggctcactgttgagcaggctatccagagcaagaagctgttcatcttagatcaccatgactatctcattccatatttgaggaaaataaatgcaactaccacaaagacttatgctaccagaaccatatttttcttgaaaagtgatggaactttgacgccattggccattgagttaagtaagccgcatcctcaaggtgaagaatatggtcctgttagcgaagtctacgtgccttcgagcgaaggagtt

SEQ ID NO: 162 - DNA, 240 bp, Glycine max
  Clone ID: 700958786H1
gtgatgcaggtcgacaagtctgcatggatgactgatgaagaatttgcaagagaaacaattgctggtttgaatccaaatgtcatcaagattattgaggagttcccactaagtagcaagctagatactcaagcctatggtgatcatacctgtataataacaaaagagcatttggagcctaacttaggtggtctcactgttgagcaggctatccaaaacaagaagttgttcatcttagatcac

SEQ ID NO: 163 - DNA, 245 bp, Glycine max
  Clone ID: 700953684H1
gaagaatgtaagaggggatggaactggtgagcgcaaggaatgggataggatctatgattatgatgtctacaatgacttgggcgatccagataagggtgaaaagtatgcacgccccgttcttggaggttctgccttaccttaccctcgcagaggaagaaccggaagaggaaaaactagaaaagatcccaacagtgagaagcccagtgattttgtttaccttccgagagatgaagcatttggtcact

SEQ ID NO: 164 - DNA, 258 bp, Glycine max
  Clone ID: 700908450H1
cttcaagagattgaacaaaagcttatacagaagaacaaggacgagacgttgagaaaccgcagtgggccggctaaaatgccttacactttgctctatccttctagtgaggagggattgactttcagaggaattcccaacagtatctccatctaggggctctatggttgttgcagtactttccctggttttcaataaaagtgaatagaaggaatatgattccttcatctacctatgtatggttaagttatgtatttgggg

SEQ ID NO: 165 - DNA, 268 bp, Glycine max
  Clone ID: 700909337H1
ggcttccctccctcctttgaagaaacaaattagaagagtgtgttgtgttgtgttgaagtagcaagctagcaaagatgtttggcatcttaggaggcaataaggggcacaagatcaagggtactgtggtgttgatgagcaaaatgtgttggacttcaacgaaatagtgtccactactcagggtggtttggttggtgctgccaccggcatcttcggtgctgccaccggtattgttggtggagttgtcgatggtgctactgccatcttcagt

SEQ ID NO: 166 - DNA, 249 bp, Glycine max
  Clone ID: 700955588H1
gttttgtttatttgaaattaacaagtagcaaagatgtttggaatcatcggaggaaacaagggtcacaagataaaggggaacttggtgattatgcgaaagaatgtgttggatatcaacagcattaccagtgttaagggtgtcatcggaaccggcattaacatcattggaggagtcgtcgacaccgttactgctttggcgtcccacatctccatccagctcattagtgccaccaaggctgatggacatggg

SEQ ID NO: 167 - DNA, 248 bp, Glycine max
  Clone ID: 700963486H1
tttgtttatttgaaattaacaagtagcaaagatgtttggaatcatcggaggaaacaagggtcacaagataaaggggaacttggtgattatgcgaaagaatgtgttggatatcaacagcattaccagtgttaagggtgtcatcggaaccggcattaacatcattggaggagtcgtcgacaccgttactgctttggcgtcccacatctccatccagctcattagtgccaccaaggctgatggacatggga

SEQ ID NO: 168 - DNA, 247 bp, Glycine max
  Clone ID: 700962562H1
atttgctgtggagatgtcttcggcagtttacaaggggtgggttttcactgatcaagcccttcctgcggatcttatcaagagaggaatggcagtggaggatccatcctctccctatggccttcgccttgtgatagatgactacccttatgctgttgatggactagagatatggagtgctatccagacatgggttaaggactacgtctccttgtactatgccacggatgatgcagttaagaaagactca

SEQ ID NO: 169 - DNA, 265 bp, Glycine max
  Clone ID: 700962101H1
agcaaagatgacaggtgggatgtttggaaggaaggggcaaaagataaaggggacagtggtgttgatgccaaagaatgtgttggacttcaacgccataacctccgtcggaaaaggcagtgctaaggacaccgccaccgatttcttgggcaaaggcttggacgcattaggtcatgcagttgatgctctcactgccttcgctggccatagcatctccttgcagcttatcagtgctactcagactgatggtagtggaaaaggaaaagtt

SEQ ID NO: 170 - DNA, 259 bp, Glycine max
  Clone ID: 700954911H1
gcaaagatgacaggtgggatgtttggaaggaaggggcaaaagataaaggggacagtggtgttgatgccaaagaatgtgttggacttcaacgccataacctccgtcggaaaaggcagtgctaaggacaccgccaccgatttcttgggcaaaggcttggacgcattaggtcatgcagttgatgctctcactgccttcgctggccatagcatctccttgcagcttatcagtgctactcagactgatggtagtggaaaaggaa

SEQ ID NO: 171 - DNA, 253 bp, Glycine max
  Clone ID: 700954746H1
gcaaagatgacaggtgggatgtttggaaggaaggggcaaaagataaaggggacagtggtgttgatgccaaagaatgtgttggacttcaacgccataacctccgtcggaaaaggcagtgctaaggacaccgccaccgatttcttgggcaaaggcttggacgcattaggtcatgcagttgatgctctcactgccttcgctggccatagcatctccttgcagcttatcagtgctactcagactgatggtagtggaa

SEQ ID NO: 172 - DNA, 254 bp, Glycine max
  Clone ID: 700953716H1
tccaactccactagtgaagtacagaaaagaagaattggaaaatctaagaggagatggaaaaggagagcgcaaggaatatgataggatctatgattatgatgtctataatgatttgggtaacccagacaagagcaatgatctagctcgtcctgttcttggagggtctagtgcctatccatatcctcgcaggggaagaactggtagaaaaccaacaacaaaagactctaagagtgagtcaccatccagcagcacct

SEQ ID NO: 173 - DNA, 115 bp, Glycine max
  Clone ID: 700957539H1
attatgatgtctataatgatttgggtaacccagacaagagcaatgatctagctcgtcctgttcttggagggtctagtgcctatccatatcctcgcaggggaagaactggtagaaa

SEQ ID NO: 174 - DNA, 262 bp, Glycine max
  Clone ID: 700955952H1
cagaaatctcatctcagtgattcaccggtgattggtgatggctcagccgcttgtgaagaaagacgatgaccgcgacgacgaagctgagtattccccctttctgggacttgaaaaggggtctgttcttcaggaggccagggtttttaatgaccctcaactagatgctaggagatgttcacaggttattacaaaactcctatacctacttaatcagggagagacgtttacaaaggttgaagccacagaagttttctttgctgtg

SEQ ID NO: 175 - DNA, 251 bp, Glycine max
  Clone ID: 700909030H1
gttttgaatcacaatggcagaggatgatggttacacaaaagatggaacagtagattactgtggaaatccagctaataaaaaggaaactggaacctggaaagcctgcccctttatcttaggaaatgaatgttgtgaaagattggcttattatgggatgagcacaaacctggtgctttattttaagaagcggctacatcagcatagtgctattgcttccaagaatgtctctaattggagtggaacttgctata

SEQ ID NO: 176 - DNA, 248 bp, Glycine max
  Clone ID: 700954644H1
caattgttacctatatttcttcattcctcctgtctgattgctacagaactcctgatcctgtcactgggaaaagaaactactcttacatggatgctgttagagtttatcttggttataaaaggacatgtgtagctggcttccttcaatttttgactttgtatggtactagtattgcttatgtactaaccacagcaactagtctgagtgcaattctgagatcaaattgttatcacaagaaagggcatgaa

SEQ ID NO: 177 - DNA, 252 bp, Glycine max
  Clone ID: 700954213H1
gttgaagtcccagataccgctcatcagataagcactgattcatggtttcaagtggcttttatcctcacaaccggaatcaacagtgcctttgttcttggatatccagggaccgtcatggttcccctgggttggatcgggggtgtgattggtctaattcttgctaccatggtgtcactctatgcaaatgctctaattgcttatctccatgaattaggaggccaaaggcacattaggtatagagatcttgctgga

SEQ ID NO: 178 - DNA, 250 bp, Glycine max
  Clone ID: 700958295H1
tctcgttcttcatggccgtcggcaacgtgcttgggtatgctgcagggtcctacagcggtctccacaagatcttccccttcacggagaccaaggcctgtgacgtcttctgcgcaaacttaaaaagctgtttctttttctcgatcctactgcttctctttttagcaactgttgctctgctctacgttaaggacaagcaagttgaagcaattcctctggatgatgccactcaaccctcttgtttctttcagct

SEQ ID NO: 179 - DNA, 243 bp, Glycine max
  Clone ID: 700959873H1
aacattcactccctctctcttgtcttttcctctacgttcctgcattgctcgtctcaaacgctaaccatggccggcggaggtttcaccagcggcggcggcgccggagatttcgaggccaaaatcactcccatcgtcatcatttcatgtatcatggctgccaccggaggtctcatgttcggctacgacgtcggcgtttcaggtggtgtgacgtctatgcccccgttcttgaagaagttttttccg

SEQ ID NO: 180 - DNA, 251 bp, Glycine max
  Clone ID: 700956705H1
ccggaggtgtaaatgtggttgccactcttgtttccatcttgactgtggacaaggttggaagaaaagttttattccttgaaggtggtgttcaaatgttgatttgccagattgctactggagtcatgattgctatgaagttcggggtgagtggcgaaggctcgttttcctccggagaagccaaccttattttgttctttatatgtgcatttgttgctgcatttgcatggtcttggggtccactagggtggttg

SEQ ID NO: 181 - DNA, 242 bp, Glycine max
  Clone ID: 700952292H1
ggattcttcttcttcacgtggtacttcttgaacgtgattttcaacatccttaacaagaagatctacaattacttcccctatccatacttcgtatcggttatccatttattcgtgggtgtggcgtactgtttggtgagctgggccgtgggacttcctaaacgtgctcctatagactccaacctactgaagttgctcattccggtggctgtgtgccatgcattaggccacgtgaccagcaatgt

SEQ ID NO: 182 - DNA, 261 bp, Glycine max
  Clone ID: 700964094H1
gttggcagtcgcagctacagcagtactctcaaatgggttggatctatctttcttgcccagcgatttcctctttggcattgcttcttcctcttaccagtatgaaggagcttacaagagtgacggcaaaggactgagcaactgggataactacactcacggaccaggtagaagtgtaataatggatggaagcaatggggatatcgcgattgatcattatcatcgctacctggaggatatagatttaatggaaactttgggagt

SEQ ID NO: 183 - DNA, 253 bp, Glycine max
  Clone ID: 700956022H1
gcacacaaagtaatggacaaaaaaccatgcaactcatcatctcatgatcctgaagtgagaaagggaccatggaccatggaagaagacttgatcttgataaactatattgcaaatcacggtgaaggtgtttggaactccttagccaaagcttctggtctcaaacgaacgggaaagagttgtcgactccgttggctaaactaccttcgtcctgatgttagaagaggaaacattacacccgaggaacagcttttga

SEQ ID NO: 184 - DNA, 261 bp, Glycine max
  Clone ID: 700955479H1
ctttattctctcacacaaaataatggacaagaagcttggcaacacgtctcatgatcctgaagtgagaaaggggccatggacaatggaagaagacttaatcttgatcacctatattgccaatcacggggaagggtttggaactctttggccaaggctgctggacttaaacgtaccggaaagagttgccggctccggtggctaaactacctccgtcctgatgttagaagagggaatattacacccgaggaacagcttttgatc

SEQ ID NO: 185 - DNA, 254 bp, Glycine max
  Clone ID: 700952210H1
gttctttcccttggtgacaaaccaagactaacacacacagaacatagcttgtgttggtgaggtgagaagataaagaaagaatggcatttgcaggaacaacacagaagtgtatggcctgtgacaaaaccgtttatctggttgataagttgaccgcggataaccgagttttccacaaagcttgcttcagatgccatcactgcaaaggaaccctcaagctgagcaactacaactcttttgagggagttctttattgt

SEQ ID NO: 186 - DNA, 260 bp, Glycine max
  Clone ID: 700959049H1
actcactctccttctctctcctattgcggctagggtttgggtttttcactttcagcctctccattccttcaaccttcttcttctctttgatctctgatggagacgttccgtgtttagtagcaagggttagttgaggccttgtgtttggaaacgtacggtgtcgttttggagttgggaaaacaaataattctgagagatggcaaccacgaacccttttgatttgttgggtgacgacgctgaggacccttctcagctcatcg

SEQ ID NO: 187 - DNA, 247 bp, Glycine max
  Clone ID: 700905665H1
ctttgaagccaccctcttctaacttctccatttcacaaggaagaagatcagagaacatttagaacaaaaaagagagtttgagaaatggggaggggtaagattgagatcaagaggatagagaactcaagcaacaggcaagttacatactcaaagagaaagaatgggatcctaaagaaggccaaggaaatcactgttctatgtgatgctcaagtttcgcttatcatctttgctgcatctggaaagatgc

SEQ ID NO: 188 - DNA, 251 bp, Glycine max
  Clone ID: 700956070H1
gaagcattgaaggacgtagctgctatggctcgaggaaagatccagatcaagaggatagagaacaccaccaaccgccaggtcacttattctaaacgacggaatggccttttcaagaaggccaacgagctcaccgttctatgcgatgccaaggtttctattattatgttctccagcactgggaaactccacgagtacatcagcccctccacctcaacaaagcagttcttcgatcagtaccagatgactctagg

SEQ ID NO: 189 - DNA, 257 bp, Glycine max
  Clone ID: 700954715H1
gtgtgcattcttgtttaactcctctttgttcctcagacatcccagaagggaaccaaaaataaaaaataaaaaaataaacacaatcaataaaggggagaaaacaaacatgtcattcacaggaactcttgataaatgcacagcatgtgacaagactgtctatgtggttgacttgttaactcttgaaggaattccttaccataaaaactgcttcaagtgcagtcactgcaagggatgtcttacgatgtgcacatactcct

SEQ ID NO: 190 - DNA, 247 bp, Glycine max
  Clone ID: 700955837H1
cgaactcatcatttctaattgttctgatccatatatatcatactttctttgtaataacttaaagaaccccacaaaaacaccaaccatgtccacaattgcaaagagagatttgagttctaatgaagaagagagtgagctgagaagaggtccttggactcttgaagaagacagcttactcatacactatattgctcgtcatggtgaaggccgttggaatatgttagccaaaagtgcaggattgaagagg

SEQ ID NO: 191 - DNA, 260 bp, Glycine max
  Clone ID: 700958205H1
ggctgctttaagctagggtttcatgtgtttaagtgattggttgatataaatactagtgtagtgtgtctttgtgtaaagggagaaaaacaaaagaaggtaaagcttgatgatatgaagctttcaacatcagggttggggcagcagggacatgaaggaggggagaagaagtgtctgaattctgagctatggcatgcatgtgcggggcccctggtgtccctaccaactgcagggactcgtgtggtttacttccctcagggtca

SEQ ID NO: 192 - DNA, 281 bp, Glycine max
  Clone ID: 700963673H1
ggaagacttaggcccactgaatatcaaagaacttgagcatcttgaacggcaattggattcatctctaaagcaagtgaggtccacaaaggtaataatggataatttatacataaaaaatgtgttaagtttttggcaaattaatatatacttaagcttattaatgtagttcttgatcagtagttgcagcagcctagcgtaatttctctatttgatttaagcatctttccgtttttccgtacaatttgtttttgccaatactatggccgatgcaacattagaat

SEQ ID NO: 193 - DNA, 262 bp, Glycine max
  Clone ID: 700954358H1
aaacacactgctgaaaaccctagctataaatttctacacccaccgacggcagaaaccctagtagtagttttgaaagggaaggaaagatgcagatattcgtgaaaaccctaaccgggaagacaatcacccttgaggtggagtcaagcgacaccattgacaatgtcaaagccaagattcaggacaaagaagggattcctccggatcagcagaggttgatcttcgccgggaaacagctggaggatggccgtaccctcgccgatta

SEQ ID NO: 194 - DNA, 257 bp, Glycine max
  Clone ID: 700962820H1
gggaaggaaagatgcagatattcgtgaaaaccctaaccgggaagacaatcacccttgaggtggagtcaagcgacaccattgacaatgtcaaagccaagattcaggacaaagaagggattcctccggatcagcagaggttgatcttcgccgggaaacagctggaggatggccgtaccctcgccgattacaacatccaaaaagagtcaacattgcatcttgttttgaggcttcgtggtggtattattgagccatctttg

SEQ ID NO: 195 - DNA, 252 bp, Glycine max
  Clone ID: 700905635H1
agagaaaagcgcgctatatacaagaacttgagcgcaaggttcagactcttcagacggaagccacaactctttctgcccaattgacattataccagagggacacatctggccttagtactgaaaatacagagcttaagctccgtctgcaagccatggagcaacaagcacagcttcgcgatgctcttaatgaagcattgaagaaggaagttgagagacttaaggttgctaccggtgaggggatgagccacactg

SEQ ID NO: 196 - DNA, 260 bp, Glycine max
  unsure (1)..(260): unsure at all n locations
  Clone ID: 700960533H1
aaagtattgtgcagcaaagtacagagattgaagggaagggagctgatggaaaagatcgngacttgtncaaaaaattgnaaggaacttctgcaaatacaggttccaaagcangagaaagnngaaaggcaggctcaggttcaggcaatgatggcatatccgcaaagtgcnngaaagtggttcanagggttcatcaaatgctagtgatganaatactaaccaacaggaatnagctgcaaaaaagaanggaantttganctgat

SEQ ID NO: 197 - DNA, 274 bp, Glycine max
  Clone ID: 700907319H1
atgaagagacttaacagctcagattcttccactgccctcatgacaatttttccatcatcatcaacagaggaacatagtccgaggaacagccaccacatgtatggcagggagttccgatcgatgttggacggactcgacgaggaagggtgtgttgaagaaccggggcatcaatctgagaagaagcgtcgactaagtgtggaacaagtgaaggctttggagaagaactttgaggttgaaaacaagcttgaacctgagaggaaggtcaagcttgccc

SEQ ID NO: 198 - DNA, 259 bp, Glycine max
  Clone ID: 700957315H1
gttccaaaacagaagggcaaggtggaaatcaagcgcatagagcaagagtacagaaaactcaaagatgaatatgacaatttagcatcaaggtttgagtccctaaagaaagagaaggactctttgcaattagagttgcagaagctaagtgatttggtggtgacatctcaagatggtggaagggaagacaaggatggcaaagaaaacagcatagaagatggtggctcaggcagtggatacagcagttggaagcctgaagcaa

SEQ ID NO: 199 - DNA, 263 bp, Glycine max
  Clone ID: 700960290H1
cgagctcttagggagctgcttttcactgctcctggtgttcttcaatatctcagtggtgtcatcctctttgaggaaaccctctaccagagcacagctgcaggcaagccctttgtgaatgtcttgaaggaagctggtgtgcttcctggcatcaaggttgacaagggcacagtcgagcttgctggaactaatggagaaaccaccactcagggtctagatggccttggtcagcgttgtgccaagtactacgaagctggtgcacgttt

SEQ ID NO: 200 - DNA, 258 bp, Glycine max
  Clone ID: 700906271H1
aacagggacaattggcaagcgtttggccagcatcagtgtagagaatgttgaatccaacaggtgtgctcttagggagctgcttttcaccgctcccggtgctcttaaatatctcagtggtgtcatcctctttgaggaaactctctaccagagcacagctgcaggcaagccctttgtggaagtcttgaaggaggctggtgtgcttcctggcatcaaggttgacaagggcacagttgagcttgctggcactaatggagaaac

SEQ ID NO: 201 - DNA, 259 bp, Glycine max
  Clone ID: 700958213H1
ctctttttcttctctctcaacaacttcaccttcttcctcctcgatcatgtctcacttcaagggcaagtaccatgatgagcttatcgccaatgctgcgtacattggcactcctggaaagggtattcttgctgctgatgagtcaacagggacaattggcaagcgtttggccagcatcagtgtagagaacattgaatccaacaggcgagctcttagggagctgcttttcactgctcctggtgttcttcaatatctcagtggt

SEQ ID NO: 202 - DNA, 244 bp, Glycine max
  Clone ID: 700965253H1
tcaagtattaacccttttctctctgaatactctctactcaatacattggcactcctggaaagggtattcttgctgctgatgagtcaacagggacaattggcaagcgtttggccagcatcagtgtagagaacattgaatccaacaggcgagctcttagggagctgcttttcactgctcctggtgttcttcaatatctcagtggtgtcatcctctttgaggaaaccctctaccagagcacagctgc

SEQ ID NO: 203 - DNA, 261 bp, Glycine max
  Clone ID: 700953343H1
tacaaaggttgctgtaggagataagattgcagtagtgctaagtgctaacacctgcagtgaacaatggcctctgcatcagcatctctgctcaagtcttcacttgttcttgacaagtctgagtgggtgaagggacaaacccttcgccaaccttctgcatcagttgtgagatgcaaccccaccaccccatcaggcctcaccatcagagctggttcctatgctgagagctcgttaagaccgcgaaaacagtggcttcaccaggga

SEQ ID NO: 204 - DNA, 234 bp, Glycine max
  Clone ID: 700956353H1
acaaaggttgctgtaggagataagattgcagtagtgctaagtgctaacacctgcagtgaacaatggcctctgcatcagcatctctgctcaagtcttcacttgttcttgacaagtctgagtgggtgaagggacaaacccttcgccaaccttctgcatcagttgtgagatgcaaccccaccaccccatcaggcctcaccatcagagctggttcctatgctgatgagctcgttaaga

SEQ ID NO: 205 - DNA, 242 bp, Glycine max
  Clone ID: 700953987H1
ccagtcaccacctctgaactctctctctcatctataagtcaacatggctcatcatgaagattcaagtgcatggaattcgagtaaacctcaccctaagctcaatgaaagaattctgtcttctctgtcacggagaactgttgctgctcacccctggcacgacttagagattgggccaggagctccagcagttttcaactgtgtggttgaaattggcaaaggaagtaaggttaagtatgagctgg

SEQ ID NO: 206 - DNA, 248 bp, Glycine max
  Clone ID: 700904972H1
caagtaccctgagtctgacatttactggaaaaaatttgaagagaaatatcatttctcatgccaatttactgctgatctttttgcaatgaaccacacagactttatcatcaccagcaccttccaagagattgctggaagcaaggacactgttggacagtatgagagtcacactgccttcacccttccaggactttaccgtgttgttcacggtattgatccatttgatccaaagttcaacattgtctctc

SEQ ID NO: 207 - DNA, 146 bp, Glycine max
  Clone ID: 700764612H1
caactctctatggatcttgagaggcagaatagggatggctacactttcatggggaaccaaacaaacttcattagtggttttggacaataccctatggaggaaattggtaggtttgatgctgagcaattcacaccaaggttttcagg

SEQ ID NO: 208 - DNA, 149 bp, Glycine max
  Clone ID: 700764634H1
gataactagaaacagtgtgatgaaaatgaaggtccttgttttcttcgttgctacaattttggtagcatggcaatgccatgcgtacgatatgttccctctccgaatgaacactggctatggtgcccgtactccggaggtgaaatgcgcaa

SEQ ID NO: 209 - DNA, 142 bp, Glycine max
  Clone ID: 700764639H1
cgcagagtcacttttgttctcactactctcaatctcaaacctgttttaccaaaaaatctaactgatgctcaataaaaagaactagaggcatggattgaaaatgactttgatcatgtgtaagaactttatttaaaatggttta

SEQ ID NO: 210 - DNA, 247 bp, Glycine max
  Clone ID: 700902915H1
gagcttgattatctagttggggctgtgtcaaaccccaagagaccatttgctgctattgtcggtggatcgaaggtgtcttccaagattggagttattgaatccttgttggagaaagttaatgttctcttgcttggtggaggaatgatctttaccttttacaaggctcagggttattcagttgggtcatctcttgtggaggaagacaagcttagccttgcaactacacttcttgaaaaggccaaggcta

SEQ ID NO: 211 - DNA, 51 bp, Glycine max
  unsure (1)..(51): unsure at all n locations
  Clone ID: 700902970H1
aacgcatcanaatgagtcngtnccagcgtccnccacacngcancacgaggg

SEQ ID NO: 212 - DNA, 238 bp, Glycine max
  Clone ID: 700902978H1
gcggcggtggcggcggaattgtgatggagtttccggccggtgatgaggaatcgttctcgtcgccaacgaggttgccgaagaggctccggcgacggcttcgtgacgcggagtgcaagtctccgagcacggtggaggaaatcgaagcgaaactccacaacgctgatcttcgcagacagaaatactatgagaaactctcaaacaaggcacgtgctaagccaagaagcccctcaaggtgttc

SEQ ID NO: 213 - DNA, 242 bp, Glycine max
  Clone ID: 700902980H1
caccattccagaacaagatgaatgggtatacagtgatggaaagtcgacaacttgtgttgcctttatcctttctatgtataaagaggctgaagtttttggtcccattgctaattccattcaagtaaccgagttcaccattcgcgatgcatacatgctcagaattttcgaggacaaccaaacacgcctaccaagttggtgcaacaatgagaatgaccggattccattctgtcagattcttggtg

SEQ ID NO: 214 - DNA, 84 bp, Glycine max
  unsure (1)..(84): unsure at all n locations
  Clone ID: 700903020H1
ttcttcagttagctcccccaacctatacactncaccaccacacaacatatcgagnanagngtnagnaggctngnggcggggngc

SEQ ID NO: 215 - DNA, 226 bp, Glycine max
  unsure (1)..(226): unsure at all n locations
  Clone ID: 700903078H1
ggtgnaagcgccatgganctctcangattnagcatctacaatgacctgctgattgaactaangnagacgantnngcatnnantgcctnctaatagagccaataagggatggngcnnnncctanactgacagtgnnaacgacattatggtggtgtgggatgatccgtggcatgagngctgtgatgtggtanccaagcattcagatacatncncangaatattngaga

SEQ ID NO: 216 - DNA, 99 bp, Glycine max
  unsure (1)..(99): unsure at all n locations
  Clone ID: 700903101H1
ccaattgaacggttggnattaatagcaaaactattcctatgtcaccaaaaccnaatncattnttcccattncttactttgtccancanannntaggagc

SEQ ID NO: 217 - DNA, 61 bp, Glycine max
  unsure (1)..(61): unsure at all n locations
  Clone ID: 700903132H1
acttcttctttcatcattcatcgcctttcaccacacaacatacaattncaaaagnnnnnng

SEQ ID NO: 218 - DNA, 266 bp, Glycine max
  Clone ID: 700903166H1
tgaggacaaaaatgaagatgactggattacaagatacttctttactggaggaactatgccttcggcaaatctacttctttatttccaagatgatgttactgtcaccaaccattggctagtaaatgggaaacactacgcacagaccagtgaagaatggctcaaaagaatggaccagagaatgactttcatcaagccaattatgcaatcaacatacggcaaggactcagctaccaagtggactgcttattggagaacattcttcatag

SEQ ID NO: 219 - DNA, 257 bp, Glycine max
  Clone ID: 700903186H1
ggcttccagctgtattcatggacttggcggagaagcttttctttgcagcatttctcattctttccgtggccattgatggaatgcaggcagacactatggtcactggcactgtcttctgtgaccaatgcaaagacggacagagatccctttttgattatcctgttaatggtgcaaaagtaattctgtcctgtgctgacagtaatgggcaaattacaatgtcaagagaagaaacaacaaactggtttggaagctataca

SEQ ID NO: 220 - DNA, 61 bp, Glycine max
  unsure (1)..(61): unsure at all n locations
  Clone ID: 700903204H1
ctgnaggagaantcagcatcgntganaagtcntgaaccgttgcagaanaagctgancatgt

SEQ ID NO: 221 - DNA, 260 bp, Glycine max
  Clone ID: 700903220H1
atgggcatcagcagcaggagcaggaaccgcaatcacctcaggagggacaatgatctgtttatgttgtaatggttcatggcttgctctttgaggatgttttaacggatctttcagctggcaagtaatcgtgtttgtaggagaagccttggctggtttatttgctgcatttgtgcaggctctgaggaagatggcttcatttttataattttatttagttttctttttcctggcatattaggattttttagtgtgtaaacctt

SEQ ID NO: 222 - DNA, 258 bp, Glycine max
  Clone ID: 700903222H1
ctgatgttgtcatagcagacaagtttgctgctgatgctaacagcaagactgtgccggcatcaagcatcccagatgggtggatggggttggatattggtcctgattccatcaagacatttggtgaagcattggatacgactcagaccattatttggaatggaccaatgggtgtttttgagtttgataattttgccacaggaacagaggctatagccaagaaactggcagagctgagtgggaagggagtgacaaccatca

SEQ ID NO: 223 - DNA, 193 bp, Glycine max
  Clone ID: 700903224H1
cattcccatgcttttatgttgtagcaatgcttctaaagattatattaattcacgagtaaatctacatcttagtccttgatattaaagtgtcatttattttagaagctaagattttagaaatcgtgtattagttcctgaatttttaaaacaccaagtgaatgttaaacattgtatgagtgactttcgttctttt

SEQ ID NO: 224 - DNA, 85 bp, Glycine max
  Clone ID: 700903247H1
tgcttgtgtaatgcagctgctgttttgatgctgacttgctccaacacgaaaacttttttttaccaaccatcacattgcttacttt

SEQ ID NO: 225 - DNA, 252 bp, Glycine max
  Clone ID: 700903274H1
cagaactaaatgaaattcttgcccatgatactgtggatgagggtgggttatggaagaagaaactcactgatcaatcattgaagctttttgactttttacctcaagcaattcaagaacaattgatgcttgaaagagatccacatggaaatgttcaggttgccaagatagaaacagagaaaatgcttattcaaatggttgaaactgagttggagaagagaaagcaagaaggcaaatacaaaggcgaatttaaag

SEQ ID NO: 226 - DNA, 202 bp, Glycine max
  unsure (1)..(202): unsure at all n locations
  Clone ID: 700903289H1
cgtcacgccttgtcncttanccctcctcctcgtcgcctcngnnacnaccgccgctatggcgtggcngctttccgtangcctattnnatnctgatccgnnagntggtggccagangttggntanncgtangagtaggacaangctgcggaacgccgagcaccactggcgacgagcgtcaagtnnaagttcggncaagtaccna

SEQ ID NO: 227 - DNA, 186 bp, Glycine max
  Clone ID: 700903312H1
tgaacacctacagtctgattcacactgtccagtttgtaaggaacgatttgaactgggatccgaggccaggaagatgccatgtaaccacgtttaccactcagattgtatcgttccatggttagttctgcataactcgtgtcctgtgtgccgtgttgagctgccaccgaaagaacatactagttctcg

SEQ ID NO: 228 - DNA, 182 bp, Glycine max
  Clone ID: 700903337H1
gcgactataatgggtccccctgatagcccttatgctgggggtgtttttctagttactattcattttcctccggattatccattcaagccacccaaggttgcatttaggactaaagttttccacccaaatatcaacagcaatggtagtatttgtcttgatatcttaaaggagcagtggagccc

SEQ ID NO: 229 - DNA, 177 bp, Glycine max
  Clone ID: 700903371H1
taattaattgtctaacatgttttagagtttgtgtttaggtgggaattgttttggttgagggggcttggttgttgtgcaagagagaatctaagttctcctgctgacaacagggcgtcctttgaatcatcgtgttagatttttaaagaatagttagatgtagtactttgttgttgtaag

SEQ ID NO: 230 - DNA, 261 bp, Glycine max
  Clone ID: 700903406H1
gtagatcgctgtgagaaacacaacaaacgctgccgcaacgcaaccgtttcgaaagcactcactgactcagtttgtttctcgtttcgtcgaacccttggaaggcacaatgggagggaggaagaagaagttcatcgacaagaagaactctgctactttccaactcatcgctcgcgacacctccgacccttccttctcccaatccgaccgtgtcttcgtccgcgtcgacaacaaccccgtttccttccccgtcgccgacgactc

SEQ ID NO: 231 - DNA, 260 bp, Glycine max
  Clone ID: 700903407H1
tccggtgcttcaggatacgatcctttgacacccaaaataacgtcagttatatcattatctactcaactagacatgttcagggaatacataggaaagctgaaaggaattgttggagagagcagaacaaactacatcctagccaacagtctttatcttgtggtggcaggcagtgacgacattgccaacacctattttgttgctcacgccagaatattacagtatgacattccttcttacaccgaccttatggtcaactcggc

SEQ ID NO: 232 - DNA, 196 bp, Glycine max
  Clone ID: 700903409H1
gtgatgcttaatcttctgtgatcactttcaagtttgagttagcatgcacagactaactacccgacaaaactgcgtcaactgcctgggatgtgttgaatgtaagattcctttgccaaactaaacataaaattccaactcatggttacaatgaccaagaagaagctaattggattttttttagggtacaatgctaatt

SEQ ID NO: 233 - DNA, 260 bp, Glycine max
  Clone ID: 700903413H1
atcataagtggttggaggaagagttcactgaaaaggttcaaaagagaggtggtgcgcttattcaaaaatggggaagatcatcagctgcatcaacttctgtgtcaattgttgatgccataagatctttagtaactcctactcccgagggtgattggttttcttctggtgtatatagcaatggaaatccttatggaatagctgaaggtattgttttcagtatgccatgccgatcaaagggtgatggtgattatgaacttgtc

SEQ ID NO: 234 - DNA, 258 bp, Glycine max
  Clone ID: 700903423H1
gcttgagatgctcttggaggcttactttgtgcagattgatggcaccttgaacaagctctctacgctgagggagtacgttgatgacacagaggattacatcaacatcatgctggatgacaaacagaaccatctcctccaaatgggagtcatgttgaccacagcaactctggtagtgagtgcctttgttgttgtggccggtatttttggcatgaatattcacattgagctatttgatgaccagaaagctgggatgacaca

SEQ ID NO: 235 - DNA, 258 bp, Glycine max
  Clone ID: 700903424H1
caaaacttgctatagcagtaagctataactcatttgaggctctgtgagaattgagaaatggctaaagatgttgaggttcaagagcaaggaggagagtactctgccaaagactaccatgaccctcctccagcacctttgttcgacccagaggagctcacacagtggtccttctatagagccctcatcgctgagttcatagcaacccttctcttcctttatgtcactgtgctcaccattattggctacaaaaggcagact

SEQ ID NO: 236 - DNA, 255 bp, Glycine max
  Clone ID: 700903438H1
gtccgacttacagctgtggatatgattacatactcaggtgcagacagtggggagaagccatttttattgcggtcagccgaagagcttgaaccttttcttgacaagattactgacgaaatgttgaaagttactttacgggaaggagttggatacttgcatgagggattgaacagtcttgatcatgacattgtgactcagctatttgaagctggctggatacaagtctgtgttttaaacagttccatgtgttgggga

SEQ ID NO: 237 - DNA, 254 bp, Glycine max
  Clone ID: 700903442H1
cttcagagaagaaactatcgaacccaatgagggaaataaaggtgcagaaactcgtcctcaatatctccgttggtgagagtggagatcgtctcaccagagccgccaaggtgttggaacagcttagtggccaaaccccagtgttttccaaagcaaggtacactgttcggtcctttgggattagaagaaatgagaagattgcatgttatgtcactgttagaggtgataaggctatgcaacttttggagagtggttta

SEQ ID NO: 238 - DNA, 260 bp, Glycine max
  unsure (1)..(260): unsure at all n locations
  Clone ID: 700903463H1
aagaaacacaaaagatagannganaataaagagaaggagaaggggagaagagaganaggttgtattgagagatatgnnggaggggtaagattgagatcaaaaggnttgagaactcaagcaacaggcaagttacctactcaaagaggaagaatgggatccttaagaaggcaaaggaaattagtgttctatgtgatgctcaagtttcccttatcatctttggtgtctctgggaagatgcatgagtacntcagcccctccact

SEQ ID NO: 239 - DNA, 249 bp, Glycine max
  Clone ID: 700903486H1
cttcagcagttattatcagttgcagagaagtttaaaaggagtccatacagttacgtctgggtagctgcagggaagcagccagatcttgagaagaatgtgggtgttggagggtatggttatccagctttagtggcccttaaccttaagaaagctgtttatgctcctctcaagagtgcttttgaacttgaccaaattatagaatttgtgaaagaagctggacgtggaggcaaagggaatttgcccattgaa

SEQ ID NO: 240 - DNA, 261 bp, Glycine max
  Clone ID: 700903509H1
agaaactccattcaattccaaatggagaaatgctcaatcagaaagctttcacaagtgagatccaagctttgacagaaatccgacatcgtaacattgtaaagttacatgggttttgttcacattcacaatactcattttggtgtgtgagtttctggagatgggcgacgtcaagaagattttgaaggatgatgaacaagcaattgcgtttgattggaataaaagggtggatgttgttaagggtgtagcaaatgctttatgcta

SEQ ID NO: 241 - DNA, 261 bp, Glycine max
  Clone ID: 700903515H1
gatgaatgccagaggaagtatgggaatgctaatgcttggcgatattgtacagatgtttttgactatcttactctttctgcaattatagatggaactgtgctttgtgttcatggtggcctttctccagacattcgatcatagatcagataagggtcattgagaggaactgtgaaattcctcatgagggaccattttgtgatctgatgtggagtgatcctgaagatatcgaaacatgggcagtcagtcctcgtggagctggtt

SEQ ID NO: 242 - DNA, 260 bp, Glycine max
  Clone ID: 700903519H1
taaaaatgaaagggttaaaagggagacaagacaagtttggggggaaaaagaagtcgtaaatttttgtataacacatcaggatcaggtttgcatttaattcgatttaatttatttcttatttagtgcagagaccaaatgaattaatcttgtaaattatttagtgctagagtgaagttgagacttttgaatgacacatgttgagtactttgtttttgtctctagtatctttcactcgagttgagctcatacacagaagaact

SEQ ID NO: 243 - DNA, 262 bp, Glycine max
  Clone ID: 700903533H1
caacacacagacccactggacgcttctctaatggcctaaacatccctgacttaattagtttggagcttggcttagagcctacactaccctatttgagcccgctactagttggagagaagctcttaattggtgccaatttgcctccgctggaattggcattctcaatgatactggaattcaatttttgaacattatccacattcagaagcaactgaagctattccacgagtatcaggaaaggttaagtttacacattggtgcg

SEQ ID NO: 244 - DNA, 260 bp, Glycine max
  Clone ID: 700903534H1
aagaattgatgctcaaaatggaactcatcttccaactttgaaaggcaatggtagagtcctcagctttggattagatgcacatgcacctatttgtgattccatggcatctctcatgaatcttggagagaaaaaggccttaatggcacaagaaatgggtttcatcatggctttgaggatcaaagactccccgttccttgcaaaagtggggaaaatggtgatgactcttcaactacatcctccattacaatttcaagtcccaa

SEQ ID NO: 245 - DNA, 254 bp, Glycine max
  Clone ID: 700903557H1
aaaaaacccaaaaaaccaaaaataccataaaatttttcagcttctccgccgccgtacagccaccacctccgttcggatctccggcggacctactatccctactactctatttacacggaagaacaaaaaaatatcccacaaaaaaaattccaaaagcggttcggttagggtttagtttttttttatattatttcgtgtatctaatttttcatcagtaatattatttttgaggcggcgagatggcgcagattcag

SEQ ID NO: 246 - DNA, 251 bp, Glycine max
  unsure (1)..(251): unsure at all n locations
  Clone ID: 700903571H1
cttttctctctctgaactctgaagcnaaacaacattaccagagtggttctagtaattcagtgctgctagaagatggaaactagtgaatggcatatcgagcgaagatctagcttcggctctgaatccccctagcaagagaggcaggaaatgtgcctgaaactgggtcactctctattgtggtgcttggtgcttctggtgatcttgctaagaagaagacatttcctgcacttttccacctatacctgngntac

SEQ ID NO: 247 - DNA, 250 bp, Glycine max
  Clone ID: 700903584H1
catcaagcaaacgataagaaatgttatcagaaacattggccatccctgcagtactccttgtaatactcattttgattctatcctctgtcttgttccatcttcaagatgaaagaacaaatccaccaggcctaaacccctcccaattattggtaaccttcacatgctggggaaactcccacatcgttcccttcaagcccttgccaaaaattatggacccataatgttcataaagttgggacaagtcccaacc

SEQ ID NO: 248 - DNA, 215 bp, Glycine max
  Clone ID: 700903607H1
attgaaggtccaagcaccatgtttggctctgtcttgagttatattactctgagattgctaggtgaggggcctaatgatggacaaggggaaatggagaaggcacgtgactggattctagggcatggtggtgctacttatataacgtcatgggggaagatgtggctttcagtacttggagtgtatgaatggtctggaaataatcccctgccccctga

SEQ ID NO: 249 - DNA, 223 bp, Glycine max
  Clone ID: 700903609H1
cgctattctcttcattccatggctttgcccaaccagcaaaccgtggattaccctagtttcaaactcgttatcgtcggcgatggtggcacaggaaagacaacctttgtgaaaaggcatctcaccggagaattcgagaagaaatatgagccaaccatcggtgtggaggttcacccattggattttttcacaaactgtggaaagattcgattttactgctgggata

SEQ ID NO: 250 - DNA, 230 bp, Glycine max
  Clone ID: 700903617H1
caaacacaaacttccttattttcttccaaatctcaccacccagaaagcacaaaagctacacacatatccaatcttttctttttcttcatttcgtccaccagattcatacacaattcacgtatacgtacaattattaaaaggaagagatggcaggagaatcatacgaggaagccatcacgagtctgaccaagcttctcagtgagaaagctgagctcggtggcgttgccgcc

SEQ ID NO: 251 - DNA, 238 bp, Glycine max
  Clone ID: 700903679H1
gtggagatctagtgctgccaaacctcgctgaaaattagggtttcgtttcggaggtagacgaagatgttcggaagggcaccgaagaaaagcgacagcaccaggtactacgaaatcctcggcgtttcgaagaacgcttcgccggatgatttaaagaaggcttacaagaaagccgccattaagaaccaccctgacaaaggcggtgatcctgagaagttcaaagagcttgctcaagcctatg

SEQ ID NO: 252 - DNA, 249 bp, Glycine max
  Clone ID: 700903706H1
cattgatattgctgaggatggatttttgagtctgcttactgaaaatggtaacactaaggatgacctcaagcttcccactgatgagagtctgctcactcagataaaggatggatttgctgagggcaaggatcttgttgtgtctgtcatgtctgctatgggtgaggaacagatttgtgccctcaaggatattgggccaaagaactagcttttggtgcttgttgcttgttatttctattttctatttaagca

SEQ ID NO: 253 - DNA, 247 bp, Glycine max
  Clone ID: 700903723H1
aagaagttgccaatgactctactaatgatgatatggagaatatgctctcggaaacttttgatctaggcatggaagaagacttcaatgttctagaaaacgagtttgagcagttggtgatgttctctgaagctctagatcattctgttcaggatgatcctaatactggaaaagggtctcctcagagtcttaacaaggatgttaaagcttttcttattaacttgacaccaaaatcaccgagggaaagggg

SEQ ID NO: 254 - DNA, 244 bp, Glycine max
  Clone ID: 700903752H1
gcagaaggtgaattaactgaagaatcaaatctcaagccagattttaatcctgcaacaagcacttcttgttccgagacaacgatgatggacacggagtctgataacgataactcttcacctagggttactgatcacgtttctagtgggagctcggaacagctaaagcagagcaacgtttccattcttcatttcttcaaagttaaggataccggacaggccggtgtgtcttcttccgaagaggcaa

SEQ ID NO: 255 - DNA, 242 bp, Glycine max
  Clone ID: 700903768H1
ttccaatatattccattctctctgtgtatttccctacctctcccttcaagatgcagatcttcgtcaagaccctcaccggcaagaccatcacccttgaggtggaaagctctgacaccatcgacaacgtcaaggccaagatccaggacaaggaaggaatccccccggaccagcaacgtctcattttcgccggaaagcaacttgaggacggccgtacccttgctgactacaacattcagaaggag

SEQ ID NO: 256 - DNA, 86 bp, Glycine max
  unsure (1)..(86): unsure at all n locations
  Clone ID: 700903770H1
cccaattatgtttctccntngtctctctgccacacaacanacnagtananagntcgnggtggctgcgtgcangacggtggnagtgg

SEQ ID NO: 257 - DNA, 239 bp, Glycine max
  Clone ID: 700903774H1
ggaagggaagctatagcacactcagaaaatcgatgagtcccatgaccatgatcacgaccacgaccacgatgtttctttagacatgtcaaggttcgatacctgctaaggttgcctagatttctgtgaagattctcgcatatacgtgcttacccttcatattatgttaacaattggtcagtgattccctgtggctaccagtgtgagatttgtcttgtgagttgagtttcgaccactgattt

SEQ ID NO: 258 - DNA, 253 bp, Glycine max
  Clone ID: 700903855H1
gtgccgcaaccgcgcctccgttgtgttactgttaccactccacgaacgtagcttttgataagtgggaatagtaatactccctttttgtttgtttcgccttcaattgtgaatcacaaacatagggatattgtatttgtggcaaaatgcgttaatttcgtcttcaattaaactaaacgcgagggtggattttttctgtgctcttggaactttttatttattttgtgcctctagacttaatattgtatatttattt

SEQ ID NO: 259 - DNA, 250 bp, Glycine max
  Clone ID: 700903875H1
gagagataaagctgtggaatcactatgtaggattggattgcaaatgagggagagtgatttggttgagtatttcatccctttagtgaagagattggcatcaggtgaatggttcactgctcgagtcgtcttcatgtggactatttcatattgcttaccctagcgcacctgaaatgtcaaagatagaattgagatcaatgtacagtctgttatgtcaagatgacatgccaatggttagaagatctgctgcttc

SEQ ID NO: 260 - DNA, 252 bp, Glycine max
  Clone ID: 700903915H1
cttgatccttctttttctccttgaactcaaacatggcagatgaggtggttctgctagatttctggccaagtccatttgggatgagggtcaggattgcacttgctgaaaagggtatcaaatatgagtacaaagaagaggacttgaggaacaagagtcctcttctcctccaaatgaacccggttcacaagaagattccggttctcatccacaatggcaaacccatttgtgaatccctcattgctgttcagtaca

SEQ ID NO: 261 - DNA, 252 bp, Glycine max
  Clone ID: 700903931H1
tcccaaactgctctatcatcgtagaaagtgattttcatagtcatagatcattttctgcacatttctgcaggatgaagttgatcctgcaagcttattagacatacctaggctttgctaagttaatgctgttatggcttttgaaaatggttccaaaaaggagcttcagaaagttggtctaaaaatctccaagagctttcctcttactaggactactctggcatctatggagtctttgtccctgccagtggttca

SEQ ID NO: 262 - DNA, 244 bp, Glycine max
  Clone ID: 700903946H1
ctttagcaaagtatgttaaagctgtatatcatactcgagtttcagttggtatgcgcttcaggatgctgtttgaaacagaggaatctagtgtgcgtcgatacatgggcacaataactggcattagtgacttggattctattcggtggccaaattcccattggcgctcagtcaaggttggctgggatgaatccacagcaggagagaggcaacctcgagtgtctttatgggaaattgagccattaac

SEQ ID NO: 263 - DNA, 236 bp, Glycine max
  Clone ID: 700903985H1
cacacatagcagggtatgttcagctaagtgggaaccaaatgagtggtgaaatcccttcagaaattgggaacatggtgaacttcagcatgttgcattttggggataacaagttcactgggaaattccctccagagatggtaggtttgccacttgtagtcttgaacatgaccagaaacaatttttctggtgaacttccaagtgatattggcaacatgaagtgtctacaggatctggat

SEQ ID NO: 264 - DNA, 254 bp, Glycine max
  Clone ID: 700904019H1
gataaagcattccatagcctcccataaaaatgaagaatactatcttctctgctctctttctactttgtgccttcaccacctcatacctaccttcaaccaccgcggtggtcgataccgacggtgatattcttcagaatcctggcacatactttatcttgtccgtttttcgacccggcggcggagtagaattcgccgccactggaaacgaaacttgccctctcactgtcgtgcagactctcttcgggaggggcttt

SEQ ID NO: 265 - DNA, 248 bp, Glycine max
  Clone ID: 700904159H1
gctgtggaaacactcattgtatgggaaaatttggatattaataggtatgtgctgaaaaatggtactactagtgagattatcataaaacacttgaacaaggaacaagatgctgatcaaagcaacttccgtgattcagccacctctgcagagttggaagttcaggagaagatgcccttgcttgagtggtttgccaatgagtacaaaaaatttggatgctccttggaatttgtgaccaacaaatctcaaga

SEQ ID NO: 266 - DNA, 250 bp, Glycine max
  Clone ID: 700904162H1
gtcgtgagagcgcatcaaccagtacagtgtttctccctccaactttgacattaatttttggagctgatgtgactcatccacatcctggagaggattcaagtccatcaattgcagcagttgtggcttcgcaagactatcctgaaattacaaagtatgctggtttagtttgtgcccaagctcataggcaggaactcatccaggatcttttcaaacaatggcaagatccagtcagaggaacagtgactggtgg

SEQ ID NO: 267 - DNA, 146 bp, Glycine max
  unsure (1)..(146): unsure at all n locations
  Clone ID: 700904183H1
gagatagcgtctcttnatctagaccggttcgtantctaangtagtccgtagaattgngcgcgcngttgcaccttanaattgcgttgaggcggaaattgacagtntccgctaatcncntcttgtctcnacgttgtnntcactncagg

SEQ ID NO: 268 - DNA, 245 bp, Glycine max
  Clone ID: 700904190H1
tttcattccaactgcaaaacaacaactcaattaagaaattcttctccggagccatggcagatctcaagtctacattcttgaacgtctattccgttctcaaatctgaactcctccacgaccccgccttcgagttctccgatgatgctcgccattgggtcgaccggatgctagactacaatgtgcctggaggaaagttgaaccggggactgtcagtcattgacagctacagattgttgaaagaagga

SEQ ID NO: 269 - DNA, 272 bp, Glycine max
  Clone ID: 700904208H1
ttcctcttggctcccttaaactctctttctctctttgtgtgtctctttctctatttctgagtctcagtgttaggggggttattcattattcataataacttggctttatagcattttcccttttgatataaaatgggaaggcaaccttgttgtgacaaagttgggttgaagaaggggccatggactgcagaggaggataagaagctcataagcttcatcctcactaatggccaatgttgctggagagctgtccctaagctagcagggctttt

SEQ ID NO: 270 - DNA, 277 bp, Glycine max
  Clone ID: 700904217H1
gccaaatatatgcaatctccaaggatcttgctacttatatatccatcaattggcccatattacacagatacgcaaatgaagacgtatctttaggttcatggttattgggcctagaagttgaacatgtcgatgaacgctctatgtgttgcgggacccctccagattgtgattggaaggcaaggacaggaaatgtgtgcgtggcatcttttgattggtcgtgcagtggtatctgtaagtcggtggagagaatgagagatatacacaaaacttgtgggga

SEQ ID NO: 271 - DNA, 272 bp, Glycine max
  Clone ID: 700904219H1
gaagcgtgagatatatgatcagtatggtgaagatgcgcttaaggaaggaatgggtggtggcggtggccatgatccatttgatatcttttcatctttctttggcggtgggagtccctttggatcaggtggaagtagtcgaggtaggaggcagaggcgcggagaagacgtggttcaccctctcaaggtctctttggaggacctttatcttggaacttccaagaagctctccctctccagaaatgttatatgctccaagtgcagtggcaagggtt

SEQ ID NO: 272 - DNA, 270 bp, Glycine max
  Clone ID: 700904223H1
gacgctccaagggtgacacatggttactgttcgtgggtcctgatagaattggcaagaagaaaatggcagcagctctttctgagctggtatctgggtccaccaacccaataataatacctctggcgcaacgccgtgcggatggagactctgatgcccctcatctgcgtggaaaaacagcacttgatcgaatagcagaggccatcagaaggaacccactttctgtcatcgtgcttgaggacattgatgaagccaacattcttcttcgtggga

SEQ ID NO: 273 - DNA, 274 bp, Glycine max
  Clone ID: 700904230H1
ggtccaatctcaattactgttccagattctgactttcatgactttgacaaagataggtcagaggaatgcttcaggccaaagcaaatatgggccttgtatgatgaggaagatggaatgccacggttgtattgtatgatccgtgaggttgtgtctgtcaatccatttaagattcacatcagttacttgagttccaaaactgatagtgagtttggctcagtaaactggcttgattcaggttttaccaaatcttgtggaaatttcagggcttttaatt

SEQ ID NO: 274 - DNA, 268 bp, Glycine max
  Clone ID: 700904236H1
gtgagttcttcaaggatgcactgaataaagttctgccatatatggactacgtttttggtaatgagactgaagcaagaacattttctaaagctcaaggctgggagactgataatgttgaggaaatagctttgaagatttctcagttgccaaaggcatcggaaacacataaaaggattacggttatcacccaaggtgcagatcctgtttgcgttgccgaggatggaaaagtgaaaatttaccccgtgataccgttacctaaagagaaatt

SEQ ID NO: 275 - DNA, 267 bp, Glycine max
  Clone ID: 700904238H1
gacgccgatggcgccttcagcggctccgtcgtcgtcggtttcggagtacacacagaagaagatctacgtgagcaacgtcggtgcggacctggatccgcagaagcttctcgcgtttttttcacggttcggggagattgaggaagggccgttggggcttgacaaggccaccggaaaacctaaggggttctgtttgtttgtttacaggaatccggagagtgcgaggagagcgttggaagagcctcataaggatttcgaagggcacatttt

SEQ ID NO: 276 - DNA, 266 bp, Glycine max
  Clone ID: 700904252H1
gaatccgtgactcgtcaaccctctagtcctctggggtcggcaataagagataaatgtggcaaagcttcacactataaatcacaagattcaatgtccacacctgagaagtctccaattcaatctgtatctcaagaagcaaggagtgagaccagcagtgaaggtcgaagtcctcatgagagccctatgaaacaaagaagagataagttgtccaatgaaataaacacgaatcctctgaagaaacaaagaacccaaagacctagccgtga

SEQ ID NO: 277 - DNA, 265 bp, Glycine max
  Clone ID: 700904254H1
gcgacgctctctacacgctgaaacggagcctctcggaccctgacaacgtcctccagagctgggatcccactctcgttagtccctgtacttggttccacgtcacctgcaaccaggacaaccgagtcactcgagtggatcttggtaactctaacctatctggacatttggtacctgaacttgggaagctggagcatctacagtatcttgagttgtacaaaaacaacattcaaggaactattcctccggaacttggaagcctgaagag

SEQ ID NO: 278 - DNA, 270 bp, Glycine max
  Clone ID: 700904262H1
gtcggacgaagagcaccatttcgagtccaaggcagacgccggtgcctccaaaacctaccctcagcaagccggtaccattcgcaagaacggctacatcgtcatcaaaggacgcccctgcaaggttgtggaagtttcgacttccaaaactggaaagcacggtcacgccaagtgccactttgttggaattgatattttcactgccaagaaacttgaggatattgtgccctcttctcacaactgtgatgttcctcatgtgaatcgtactgatta

SEQ ID NO: 279 - DNA, 269 bp, Glycine max
  Clone ID: 700904264H1
tgaaacttgaaacttgaaaagcggcgtttgctccgaccgagtgcttcagaggagaagtaatgactgcgatcgcgggaacgcacgtttttggtgttgtgagttttcagctcaaacaagctgaaatgccttttgcatgttcttgcttaatccgcaagcgtattggagattctcctcagcgcaatgtggctctaagacgcagagtaaatggaacaattcttccccaaatcagagcccagaatcttccagattatgttccaaaatccgagttt

SEQ ID NO: 280 - DNA, 264 bp, Glycine max
  Clone ID: 700904269H1
gtcatcctcaaaatttatgattatattttctttctctacttcgtcactacctctttctcatgagagagtatgttactgcgcaaagaacaacaaactaattaggtactgaccatttccgtctatatataaggccaataacccaacacgttctataaacatatagtgactaacctcccactgaagagtaattggtggattccagcaatggccgtggttcatggcagttgggtcaagcttgatcaaagaggagaagggcaaggagcg

SEQ ID NO: 281 - DNA, 266 bp, Glycine max
  unsure (1)..(266): unsure at all n locations
  Clone ID: 700904279H1
ctcccatcagaggacaaagcttccgactttgcgggattcgttcgtatttgtttcagtgctgtgatggggaaggtcgcggtgggagctgccgttgtctgcgccgccgccgtatgcgctgcggcggcgctggtggtgcgccaccgcatgattagttcccggaagtggagtcgcgccatggcgatactgaaggagtttgaggagaagtgtggcaccccaattgtgaagctaagacaagcggctgangccatggatgtnagatncacgcg

SEQ ID NO: 282 - DNA, 258 bp, Glycine max
  Clone ID: 700904304H1
ttttgcttaccatgcctcctactgcatgcatgttccagatgcatgtttttgtcatgtaatgcagattttcacgaggcggttttcttgtgtcttgaaaaactgtgtctgtgactgagtttttctttggtaggtttcttcacttcaccgttcccacttgcattattattattcaaagaccccagtagcagcatttgcatttccctcacgctgcacccaatgggcagagccataaggtggttgaaggggttgtttgggata

SEQ ID NO: 283 - DNA, 254 bp, Glycine max
  Clone ID: 700904320H1
gttacaccctccccctggcagacaaagggaactgggttttacattctcatttccagtgaagcaaacatccatagcatctgggactctaataaagtggactaaaggtttcaatattgaggatgcggttggagaagatgtggtgggtggactaaccaagtccttagaaaaaattggtctggatatgcgtgttgcagctctagttaatgacacagttggaactgtggctagagctagattcagcaatcaggatgtca

SEQ ID NO: 284 - DNA, 255 bp, Glycine max
  Clone ID: 700904321H1
cacattttgataattatttttctagttgataagccatggctactcgaggaaagcttgaggttgacgttgatctcaagtctaacgcagacaagtactggcaaacccttaggaactccactgaaatattccccaaggccttccccaatgattacaaaagcattgaggttcttgagggtgatggcaaatcacctggttctatccgccacataagttatggtgaaggttcaccacttgtgaagtcatcctttgagaaca

SEQ ID NO: 285 - DNA, 251 bp, Glycine max
  Clone ID: 700904337H1
gttccttccattcctttcttccggatcacagggaaaataaaaaacaatggagttggacttgacaccaaagacagcagaagtgttgtttgagggagatggtggaggttactacacttggtggagttctaaagtgccactgctggccaagaccaatgttggtgctggtcggttagtgcttcagcctcagggctttgctattcctcattattcagatatatccaaagtaggttatgtgcttcaagggaacgatg

SEQ ID NO: 286 - DNA, 250 bp, Glycine max
  Clone ID: 700904355H1
ggcgccaaaaagggtggattcattgtctccagccatctccaaggggaatcggtgcaggactggagagaaatagtgacatacttttcgtacccaaaaagagagagggactattcaaggtggccagacacgccagaagggtggagatcggtgactgaggaatacagcgacaaagtaatgggtctagcttgcaagctcatggaggtgttgtccgaagcaatggggttagagaaagagggtttaagcaaagcat

SEQ ID NO: 287 - DNA, 242 bp, Glycine max
  Clone ID: 700904365H1
tggagactctctgctctgcattggtgttcccatctttcagaatcacaacttcagctttctccaaatgtggcatcagggcttccattgccgttgagcaacaaacttcgcagactaaggttgctctcctcaaaattggtaccagaggaagttccactagctctggctcaggcatatgagaccagagacaagctcatggcatcacatccagagctagcggaagaaggggctattcagattgtgat

SEQ ID NO: 288 - DNA, 247 bp, Glycine max
  Clone ID: 700904367H1
aacggagccaaacagagtattgctcaggcagtgcttgcagtttcctcccctggagatgaggttattattccagctccattctgggttagttacccagaaatggcaaggttggctgatgcaacacctgtgattcttccaaccttaatatctgataatttccttttggatcccaaactcctcgaatccaaaattactgaaagatcaagactgcttattctttgttctccatctaacccaacgggatctg

SEQ ID NO: 289 - DNA, 245 bp, Glycine max
  Clone ID: 700904369H1
cgcaactgaaaaggaaaaccctaagagatgaagagaactcctatcttgttccctctcttctttcttctttgtgccttcacctcatatctaccttcagccaccgctgatgatgatcatgtgtacgacactgacggcgataagcttcaatacggtgtcaattatttcgtgttgccagtgataagaggaaatggcggtggaatacaagtagcaaaagcaggaaacgaaacttgccctctgactgtggt

SEQ ID NO: 290 - DNA, 249 bp, Glycine max
  Clone ID: 700904376H1
gaatggtggcatcgatccaaaccaaaaatcagattcaaattcaatggattgattattgtttcatgatctgatcactttgtcatatccataaagaagggagaaaaagaaagtttggaatttgcagaagctttgcaagtattttaagttgcaatagctgtgagaaatgaaccactgtgcaagatgttcaatataatacatacgtgtgttctatcagagagctgcttttgatcctgttctactacggtagat

SEQ ID NO: 291 - DNA, 248 bp, Glycine max
  Clone ID: 700904377H1
cctaaaatggccactcttccctcctacgaccacctcatcttcactgccttagctttcttcttatctggccttattttcttcctcaaacacaaatccaaatccaaatccaaaaaattcaacctccctccaggaccccctggatggcctattgttggaaacctcttccaagttgctcgttccgggaaacctttctttgaatacgtgaacgatgtgagactcaaatatggctcaatcttcaccctcaagat

SEQ ID NO: 292 - DNA, 249 bp, Glycine max
  Clone ID: 700904378H1
gttggaaatcaacaaaacttatcaatctctctttctctctgcggcacctcttgttaaaaatttgttcttttcaccgaaacccgtaaagggtcgtgagctagcttcttctcgatccatggtcctggtttttcttcctcttgttttcagcttctatatgcaaaaggggggagaccgaatgatgcaaaatatttataatgtagttacctcactaaccacctaagccatgaaaacaaccttcttctcgtttgg

SEQ ID NO: 293 - DNA, 243 bp, Glycine max
  Clone ID: 700904383H1
ctctctcctactatcttttaaatccttttgtaccctcaactccataagccactagtacctcacaatgcccattgtagcaacctctcttctcttctttcttcttaatttatgcctcagaggcacttatgctgactatggaggtggttggcaaggtggtcatgccacattttatggtggaggtgatgcatctggcacaatgggaggggcttgtggatatggaaatttgtacagccaagggtatgg

SEQ ID NO: 294 - DNA, 244 bp, Glycine max
  Clone ID: 700904384H1
actacactggccttttgttctcgtgtcaatttctaaatccaccaccacaccctctcttctattctctattattattatctccacacccttcactctctctcactcttctctcgaatcttccaccgcaatggccaccgctgccgagaaactctccgctctcaaatccgccgtcgccggattgaacgaaatcagtgagaatgagaagaacggattcatcagcctcgtcggccgctatctcagtggg

SEQ ID NO: 295 - DNA, 243 bp, Glycine max
  Clone ID: 700904385H1
agagtttgaaaggaagggatgaaccggttgacatggcgggaggaaattcaccacatgttccgtatgcctcagagtcatatgtagatgcccctgaaagatacccaattcctcaagctgaactacatgatattgatgatccagcagctttctcttctaattaccaacacatatcagttgaagagaggaaagagcatcttgtggttgctcgaaacagtctcgaattgctctctagcatattgaatt

SEQ ID NO: 296 - DNA, 245 bp, Glycine max
  Clone ID: 700904387H1
ctcgacctcagcaccgtttgtgtccgaaccaagacgcacacaggacggtgcgttcacccaacctacctcggtgggccccactttcccccccgaaccgtagcttcggagtgatcctttcgcccccctctatataatagcgccctcgcgactcacctcaacgcgtgagactctcgctggtggataacgaaatttcttagacaaaaaacaaggatcagaaccgttgaatcaagttgaggaagatggca

SEQ ID NO: 297 - DNA, 248 bp, Glycine max
  Clone ID: 700904394H1
ctttccttttttctcatttgttctcttacttttgtctctccaaaaaccattctctttctccgatctctccgccatttcctacgaacctcagatggaggactctgaaaaatttgatgcaggtagtgaccaagggaatgcattggtgactccatattataccccatatccgaagcacttgttaccgaaatctggccttcaacctgtcaatatagagttttctcctagctcaggcggtgataactctgtgg

SEQ ID NO: 298 - DNA, 256 bp, Glycine max
  Clone ID: 700904421H1
gtgagtttgttgatcgagataactagaaacagtgtgatgaaaatgaaggtccttgttttcttcgttgctacaattttggtagcatggcaatgccatgcgtacgatatgttccctctccgaatgaacactggctatggtgcccgtactccggaggtgaaatgcgcaagttggaggcttgctgtggaagcacacaacatctttggctttgagaccattcctgaagagtgcgttgaagcaacaaaggaatacatccatg

SEQ ID NO: 299 - DNA, 255 bp, Glycine max
  Clone ID: 700904437H1
ctggattcagcatatgtgttatcttcaaccacgttgcaggagatgggagaacccttcatcatttcatgaagttttgggcctcagtttgcaaggccaaaggggatttgaatttccctggctctgtgcctctacccttatatgatagggacatagtgaaagaccccaaagggctcatgcacgtttacgtgcaagagatgagaaattcagcgttgcaaaataagcatttcggagggtttttacgtggtgtttacgctg

SEQ ID NO: 300 - DNA, 254 bp, Glycine max
  Clone ID: 700904453H1
ccttcattcttctcctaaatcctaatccttcttcactttcagttctcagcatgggaagttctggaacaaccgactatggagcatacacataccaaaaccttgagagggaaccttactggccctctgaaaagctcagaatttccatcactggggctggtggtttcattgcctcacacattgctcgccgcctcaagaccgagggacattacatcattgcttctgattggaagaagaatgagcacatgactgaggac

SEQ ID NO: 301 - DNA, 253 bp, Glycine max
  Clone ID: 700904458H1
ggtggatgaagctgctcacaaattcgatgagcatgcaccttctttggccaagcaggttgcaagccaagtcacttgtttggttcaggaagtgacacacaaagctgagaaagtagtgagtgaagctcaatctggaggggcacgagcagcagcaaattatgtagccactgagtccaagcaaattgtgctctttggttcagtgaaattgtggactggtctcaaccactatccaccattccatgcagtggctgagatg

SEQ ID NO: 302 - DNA, 259 bp, Glycine max
  Clone ID: 700904478H1
gatctatatatgcatgaacactaataatagaagtctaactataatttttattatttggccaaatgaacatgaccaaagaattagctaaaacaatgccccagctagattagattggttatatcctgtattatataattcaattaaacagatttattattcaagagaaaatcagcatttcttctacagtactgagatttcctccaagagtattttatatataaatcaacattttgaagaagcagctgcagcagaaagaaat

SEQ ID NO: 303 - DNA, 261 bp, Glycine max
  Clone ID: 700904480H1
ccgaaatggaaaaagatggaaagagagtggtgatcctaggaggtggcgttgcgggatccgtcgtggctaaatctcttcaattccatgcccatgtcacactcgttgatccgaaggaatattttgagattacatgggcaagtttgaggtgtatggttgagccatcttttgcagagagatcactgatcaatcacagagattacttaaccaatggcgacatcattacgtccaatgccgtcaatgttacagaaactgaagttttga

SEQ ID NO: 304 - DNA, 262 bp, Glycine max
  Clone ID: 700904531H1
ccggaagaggaagatttctagtgacttcaacatgatgatggatcagaaaatatacacatgtgagcatccccaatgcccttatagcgaagttcgccttggtttccatgataggtctgctagggacaatcatcaattgaattgtgcatacagaaacagttctgcagattatggtggtggtcccaatttccatgctactgaggataagccagtcatattcccccagtcctttgttcaacccaacactacaacacagtctgcaagt

SEQ ID NO: 305 - DNA, 167 bp, Glycine max
  Clone ID: 700904537H1
caagaacacagatccttcttttcttcttatgtattattgcttttttagtttgaaaaatgtattctttctcttttgctttctcacattcttcttttttgtataccagtaaacactaaacgagaacacatcttattattaatgcaattaagcttatacacaattgatct

SEQ ID NO: 306 - DNA, 259 bp, Glycine max
  Clone ID: 700904547H1
caagcaatgcttacagccctgtacaagatgttgctgattcctgccggactggagctgcaaccaatgtcatctttggccttgctctgggatacaagtctgtcattattcctatttttgccatcgcaatcagcatttttgtgagttttacttttgctgcaatgtatggcattgctgtggctgcccttgggatgctgagcaccattgcgacagggttggctattgatgcctatgggccaatcagtgacaatgcaggaggtat

SEQ ID NO: 307 - DNA, 262 bp, Glycine max
  unsure (1)..(262): unsure at all n locations
  Clone ID: 700904551H1
tccggatttcgttttgctttgttcaggtagccagccagtcatggtgctcttcaatgtttcacgcgtagagnccacnnccttacgatggncngaagcctggaacctctggtctccgcaagaaggtganagtgttcgtgcaacctcattacctccataactttgttcagtcaacattcnnngcattnactgtggataaagttngaggtgctncgctagttgtntctggtgatggtcgtnattttcaaaggaagctattcagatt

SEQ ID NO: 308 - DNA, 258 bp, Glycine max
  Clone ID: 700904554H1
gcaatggacgcccacatcaaagaaggggacgtgttcttcattccaaggtactttgccttctgccaaatagcatcaaggggtgaaccacttgagttctttggcttcaccacctcggctcaaaagaacaggccacaatttctggttggtgccacgtcactcatgaggaccatggtggggcccgagcttgcggctgcatttggtgtgagcgaggagaccatgaatcgcgtggctagggcacaacatgaagctgtgattcta

SEQ ID NO: 309 - DNA, 257 bp, Glycine max
  unsure (1)..(257): unsure at all n locations
  Clone ID: 700904560H1
aagaaagatccgtaaattaacattctctccctcccttcgctataatagcaagcttttcaagcatatttctggggtttggtcccttttccttgtttggggttttcttgggaaaaaagaagtaattaggtataataatagtataactaaagcaaaaaaaaagacagtaatatggnaaggggtagggttcagctgaagaggatagagaacaagatcaatcggcagtaactttctccaaaaggagagctgggttactccaa

SEQ ID NO: 310 - DNA, 261 bp, Glycine max
  Clone ID: 700904566H1
gtgctcgtgacattccaccagaagacttgaacatgatgtctgatcttgatggccagcagcagcaccatctgaatgacttgagctgttacatacagcctcgccccggtgccagttctgtgagtagatctggtcggtccaagaccctaactccatcaaatctggaagagctcttttctgctgagatttctttgtctccccggtattctgatccagcagccggttctgtgttttcccctatcacaaatcagctgttctcaatca

SEQ ID NO: 311 - DNA, 257 bp, Glycine max
  Clone ID: 700904572H1
cgcgctctcccgagggctttgtcggaggattcttacgcctgaacgagtcctctccttgcgtagttggtgctcaattaaaaagaatggggggagatgcacagaagaagagaattgccataattggcgtgtctaccttcttgctggtggccatggtggtggcagtgacagttagcatcaacctcaataacaagggatcaagctatgattcaaaggaagaaagcaaatccagtgtagcttcctcgatcaaggccgtgaaa

SEQ ID NO: 312 - DNA, 255 bp, Glycine max
  Clone ID: 700904580H1
cgattatggcctgggaagaacattggaagtgataagtgataaaacagagtttcgttgaatctgcactaaaaccctacgcacacatcttggtgtaagtccaatcgatatagcagcaatgtctacgcttgaaattgaagctcgagatgtcatcaaaattgtgcttcagttttgcaaagagaattcgttgcatcagacttttcagatgctgcagaacgaatgccaggtttctctgaacactgttgacagcattgaaac

SEQ ID NO: 313 - DNA, 261 bp, Glycine max
  Clone ID: 700904615H1
aaaagagattagtggagaaatacgacaacacgaatccgtcgtttgttcaaaccgaaacgacaaggcagttcgctttccctttctttctctgagaaggcgtcgtaacagaacacgacgattccccaaggaagtgggcaaaaattgaagatagggatcagtgacagagagagataacaaacgagttataattggttaagtagctcaaaggatacattttgatcttctgctgacatctgctgggtacaaaatgaaagcagacaa

SEQ ID NO: 314 - DNA, 260 bp, Glycine max
  Clone ID: 700904632H1
cagagaaggagaaactagacacaatttatgagactgaaggtgttagccttgaacatgtgaaggcagctgcaaaggagaaaagcaacattattgagcatttgaaaagaactgagagcaatagggaagcactggctgctgcagttcaggatctgaggaaaacgaatgaactcgcatcgcaaatggaagcaagagaaaagagaaagttaggagcttcttttaaggacgatgacaaagtagactcttccaagagtttttccctt

SEQ ID NO: 315 - DNA, 260 bp, Glycine max
  unsure (1)..(260): unsure at all n locations
  Clone ID: 700904667H1
ctttattctctcacacaaaataatgncnacagaagcttggcaacangtctcatgatcctnaagtgagaaagaagccatngacaatggaagaagacttaatcttgatcacctatattgccaatcacggggaaggggtttggaactctttggccaaggctgctggacttaaacgtaccggaaagagttgccggctccggtggctaaactacctccgtcctgatgttagaagagggaatattacacccgagaacagcttttga

SEQ ID NO: 316 - DNA, 251 bp, Glycine max
  unsure (1)..(251): unsure at all n locations
  Clone ID: 700904677H1
ctttattctctcacacaaaataatggnnaagaagcttggcaacangtctcatgatcctgaagtgagaaaggggccatggacaatggaagaagacttaatcttgatcacctatattgccaatcacggggaaggggtttggaactctttggccaaggctgctggacttaaacgtaccggaaagagttgccggctccggtggctaaactacctccgtcctgatgttagaagagggaatattacacccgaggaac

SEQ ID NO: 317 - DNA, 278 bp, Glycine max
  Clone ID: 700904813H1
gaaagggcacttcaacagagcacccttaaggcatggagtggaaaagaggagaatgtgaagaaggctcaggaagcccttttggtaagagccaaggccaactcagaggcaactctgggaacctacaagggtaactcaaagcttgctgatggtgcctcagagagcctccatgttgaggactacaagtactgatcaatctaagtgcgggtaggaatcggtattttatgggtacaaccgaattttcttgttaatgagtattgtgcttcgatcttcccagaata

SEQ ID NO: 318 - DNA, 274 bp, Glycine max
  Clone ID: 700904831H1
catgctcatgttcaaatctggctcttctattccatctagaggttctgttgactttgcttcagcagtcagaaaattggcttctcaggattctggtatatggaagtatgataaaaatggttctggtgatgcttccactggctctagtaggggtttaaatgctctggctagtgcctacaatggtggacaggggagagtcaacattggtgatagattacagagtcgtggttctgctcgggcagctcctgtttggcttgaaactggtgacgcattgcaa

SEQ ID NO: 319 - DNA, 272 bp, Glycine max
  Clone ID: 700904850H1
gtagctaaattaattggctgtagcattgaagatctcaagttgacactatcaactcgcaaaatgaaagttggtaatgataatattgtccaaaagttgatgctatcacaggtaaaatgaccactctgttactagaaatgttggcctgaaattatggatggaaaaaatgcaactttctagttacttgaaatattgggaaaatgaaggtgtactgcattcctcagtgcatatggcaatttgtttagtttgttatttgaagaaaaaggaaatgaaaa

SEQ ID NO: 320 - DNA, 266 bp, Glycine max
  Clone ID: 700904859H1
gagaaggctctctttagggcactaaagactaagcatgctactcccaagtatggtcttatataccatgcttccttgattggtcaggcagctccaaagttcaaggggaaaatttcccggtcacttgcagcaaagacggcattggctattaggtgtgatgctcttggagatagccaagataacaccatgggattggagaacagagccaagcttgaagcacgattgaggaaccttgaaggcaaagagttaggtcgttttgctggttctgc

SEQ ID NO: 321 - DNA, 69 bp, Glycine max
  Clone ID: 700904896H1
gtcttctcgtgttgactggaaaatgtcgtacccttgattcccataaagagctattgaaactattatatt

SEQ ID NO: 322 - DNA, 252 bp, Glycine max
  Clone ID: 700904908H1
ctgatttgcgaaagatatcatgttgcagtgcttagaaggacttaagcctttatttgcgtccatattgcgatgttgtgacctggatatatataaccagccaagaggccttgaagatcctgaacttcttgctagagagacagtgttcagtgtaagtgaaatagaagcactctacgagctcttcaaaaagattagcagtgctgtaattgacgatgggttgattaacaaggaagagtttcagttggctttgttcaa

SEQ ID NO: 323 - DNA, 253 bp, Glycine max
  unsure (1)..(253): unsure at all n locations
  Clone ID: 700904909H1
gtgttgtgtgagatataagagcgtagaagatggtgagactgagataattgancatcaatgagtggaagctgatcgatgngagtcgccacacggaggcatgccacgtgtgctgccagaagctgctcgtacagcggatgagtcgctatctccgccttcagcttccacacaacatacgantccncttctggcatcacacgtggcatgcntngcgtntgggantnccnntngtaatttannccgnanngtgcncatt

SEQ ID NO: 324 - DNA, 252 bp, Glycine max
  Clone ID: 700904912H1
tagattatcattatctggtgctcctggtgggagagagtgagtcgctatctatccactaccataaaatcctatctttaccatgaatggctagagtaggagttgacccacttttgatgtaaccgtttaacaaccattttgatgggatggatacagtcttttgttttattcccatgtacaaatagaccctcatggctctgggcattgggcaataaccaaatttcagtgattgtttagcggactcgtcgaatagat

SEQ ID NO: 325 - DNA, 257 bp, Glycine max
  Clone ID: 700904914H1
ggcaagaatatcaaattggtctcttgtcttcctcctcatctctacactactccacatagagcccagcctctcaagcccaagcccaagcccaagcccaagcccgttcataaaatcctcctgcagcagcacccagtacccagccctctgcgtctcatccctctccgtctacgcctccagcatccaacaggaccctcaccaactggttcagacagcactctccctctccctgaaccgcacccaagccaccaaaaccttcg

SEQ ID NO: 326 - DNA, 257 bp, Glycine max
  Clone ID: 700904915H1
ctcaactcaagtaagggttttctctttgagaaaatcgtatcttacaccttttggtgaccactttgagtgagagaagagaaattaagagagatactcaaattagattcaagagagatggccatcaaccatgaaacttgggctttcattttcggtcttctaggcaacgtgatctcctttatggtgttcctcgctccattaccaactttttaccaaatctacaagaaaaaatctacggatgggtttcaatcactacctta

SEQ ID NO: 327 - DNA, 252 bp, Glycine max
  Clone ID: 700904920H1
ctatgcctaactcttcctttgtttttgttgtccttcttcaaataccgtaaaaccttcaagaatccaccacttccaccaggtcctagaggccttcccataatagggaatcttcatcaactagatagtccttctcttcatgagcagctatggcatctctcaaagaaatatggtcctttattttcccttcaatttggattaaggccagccatagttgtttcctctccaaaattggccaaagaggtaatgaaagac

SEQ ID NO: 328 - DNA, 252 bp, Glycine max
  Clone ID: 700904921H1
agaagatggagatgtatcagatctggagcaggagaatagcgttgggagcgttcgcgtttgttctgcttttcctatcggcctcagcagacgacgtcgttgtgctctctgaagataacttcgagaaggaagttggtcaggacagaggagctctcgttgagttctatgctccttggtgtggacactgcaaaaagcttgctccagaatatgaaaagcttggtagcagcttcaagaaagccaaatctgttttaatcg

SEQ ID NO: 329 - DNA, 253 bp, Glycine max
  Clone ID: 700904926H1
ctttcaatctgttgatagatccagtcatcattcttcaaccacagtttcatctatggccaagtctctgctccctacgaagaggaggctccatcttgatccttccaacaagctctactttccatatgaacctggtaagcaagttaggagtgcaatcgcaattaaaaacacttgcaagtctcatgtagctttcaagtttcaaacaactgcacccaagagttgttatatgcgccctccagctggtattcttgcccct

SEQ ID NO: 330 - DNA, 255 bp, Glycine max
  Clone ID: 700904929H1
aagagcaagaattctcctaagccaattctctattggttttcttctgattggttcaccattcaacgagggtccttggaaaatgtcaccttcacatctgatccagaaacttttgaacttggatttgattaccatgtggccaattcttcatctggtggcaatagaatccttggcaggccagtgaacaatagcaccataacatatctcaggcttggaattgatggcaacattaggttctacacttacttccttgatgtg

SEQ ID NO: 331 - DNA, 255 bp, Glycine max
  Clone ID: 700904930H1
ggattggtgaggtaaacttgaattgaagtgaagaaggagatggctgcaacctcttccttgtgctcatcgaccctccaatcccagatcaatggattcttccttcacaaaacctctctttcccatactccttccctcactttctccaggaggaaaatttcaaccacagtgaaggctacatctcgagtcgacaagttttcaaaaagcgatatcattgtctctccgtccattctttctgcaaacttttcaaaattggga

SEQ ID NO: 332 - DNA, 251 bp, Glycine max
  Clone ID: 700904937H1
cgaacgatccacgaaagatgttggctgttttcgacaaatcggtggcaaaaagcccagagggtctgcagagccctcactcagattccgtctcagccctaaaagacggttttatcgcagaacacttctcttccgttcaccctggttccgtcaccgtcaaccttggctcttccggtctcttggcctattcccttcacagacagaacccccttctcccaaggctgtttgcagttgtggacgacattttctgtttg

SEQ ID NO: 333 - DNA, 250 bp, Glycine max
  Clone ID: 700904938H1
ataatggggtctatgggtaactcaaatccaaatctaaatccaaatccaaatccaaatccatggactccaaaggattgttctgaaggaatttgcagcatctattgtcctcagtggtgttacaaagtgtactctcctccccctccaattctactaggtgatggcgatgatgacccttcaggctttgaattctctcctctcatagttgctgtgattggaatcttggctagcactttcatcttggtcacttact

SEQ ID NO: 334 - DNA, 250 bp, Glycine max
  Clone ID: 700904940H1
tgtgaatcagcaccacattcacctgagctttttgtgaggattccaaagcatggcttcccttgcagcatccactgctgctgcttcccttggcatgtcagaaatgcttggaaaccccatcaacctcagtggtgccacaaggccagctccatctgcctctagccctgcctccttcaagactgtggctcttttctccaaaaagaaggctgcacctccaaaaaaagctgcagctgctgctcctgccaatgatgag

SEQ ID NO: 335 - DNA, 252 bp, Glycine max
  Clone ID: 700904941H1
gtttctcttcctccctggaagaaaaagaagagtcaccgctacgacgccgttcgtgcttttttgaggtgccacagtcatgtttgggcgtggtggaccaaggaggagtgacaactccaaatattatgatattctcggggtttccaaaaatgccagtgaagatgaaatcaagaaggcctatagaaaggctgctatgaagaaccatccagataagggaggagatcctgaaaagttcaaggagttaggtcaagcata

SEQ ID NO: 336 - DNA, 250 bp, Glycine max
  Clone ID: 700904944H1
gcttggaataattcctggatttggaggaacacagcgacttcctcgtcttgttggtttgacaaagggacttgagatgatactggcttcaaaaccagttaaagggaaggaagcttttagtttggggcttgttgatggtttggtgtcacctaatgatttggtgaacactgcacgccaatgggcactggatatgttgggccaccgacgaccatggattgctagtctttataagaccgaaaaattagaacccctt

SEQ ID NO: 337 - DNA, 253 bp, Glycine max
  Clone ID: 700904946H1
gtacttttgatagagaaacttacaaaacattacttcaagctggagaatcaccaccatgccatcacacaccttcaaccagaggagttatcatcctcactgcttgcatttaaatcccatatgtccaaatcaattgaccaactagcatcggatttgaaacccggatcagagacccccctgtccttaacatggtttggaaagtgtttcggcctcttgcccttcatcaacaaggcttttggaaagcttgttgtggata

SEQ ID NO: 338 - DNA, 256 bp, Glycine max
  Clone ID: 700904948H1
tcaacttccctaagcactagcaccacacaatggtcattgcagcaacccctcttctcttctttcttcttaatttatgcctaagaggcacttatgctgactatggaggtggatggcaaggtggtcatgctacattttatggtgggggtgatgcatctggcacaatgggaggggcttgtggttatggaaatttgtacagccaaggctatggaaccaacactgcagcactcagcactgctctattcaacaatggcatgag

SEQ ID NO: 339 - DNA, 251 bp, Glycine max
  Clone ID: 700904954H1
cgaaactcttgattaccataaccatgtcaatggcaacaacatcccctcacaccgccctcttccaaaaccgcaccaaccctttcactctctcctccttcaaacccacatccatcaaatgcgccacccaactccatacccaagccccgcccctcacccactcccaagatcgcgtcttcaacttcgccgccggtcccgccaccctcccggaaaacgtcctcctccgtgcccaatccgagctctacaactggcgc

SEQ ID NO: 340 - DNA, 250 bp, Glycine max
  Clone ID: 700904959H1
ctattgtgttggtatgtagctggggctcttggagcatacccagatgaatggctgccaaaaaatggaaatcactttgtttttgctcttatgttttcaatatctgttgtggtgattgcatgtccatgtgcacttggtttggcaacaccaactgctgtcatggtggcaacaggggttggggccaacaatggtgtgttaattaaaggaggagactccttggaaagggctcagatggtgaagtacgtcatatttg

SEQ ID NO: 341 - DNA, 252 bp, Glycine max
  Clone ID: 700904960H1
gtcaaagcaaccatcgagaggtacaaaaaagcaagttcagattcgtctggcgctggatctgcttctgaggctaatgctcagttttaccagcaagaagcagataaacttcgtcaacaaattagtaacctgcagaataacaacaggcaaatgatgggtgattctttgggctctctgactgccaaggatctcaaaaatctggagactaaattagaaaaaggaattagtaggattcgttcaaaaaagaacgagctg

SEQ ID NO: 342 - DNA, 254 bp, Glycine max
  Clone ID: 700904980H1
ctccatactatatgtcttcccagctccagtttggaggtggaaaattatcatattaaaagtaatcaaaaatgatcttgtaaaacttagaatacagcaatataaataactacttctccgaagcagggacctggaatacttgaatgtgaagaacagaacaaggggcttcttccaagagttgtagaaggactttttgattccataaattctttggatgaagagaagacatattcaattaaattgtcaatggtacacag

SEQ ID NO: 343 - DNA, 250 bp, Glycine max
  Clone ID: 700904982H1
ctcttacgttatattaaaagctatttaaagtgttcccctcactcaatattatttatgtgttaggagaggtcaattgcctttgcatattctatctcatatcgatcaatttgtaataatggccagtgagagaattctcaagccatctaaatggttctcaaacaaatcactaaagcttagtcttcatcgtggaagatcaagatcctcctccaataactcattatcgagtaactctcccagtccaagatcaccc

SEQ ID NO: 344 - DNA, 247 bp, Glycine max
  Clone ID: 700904986H1
cgtttcgttcaactttcaacgccagttcacactctctgcttcgcgtgtaccaacaagtgcaagttcgaatcaatggccagcgctcagctcacagcaatagcgtcatcgatctctacggcgtcgtttgaagggcttcgaccttccgctgttcagtttgcttccacgggcagaattagaattggcaatctctcccaaaggtccttccggggcttggttgtcaaagccgccaccgttgttgcccccaaat

SEQ ID NO: 345 - DNA, 249 bp, Glycine max
  Clone ID: 700904987H1
cagcagcctcaggaggagaataaggatgtctcacaggaagttcgagcacccaaggcacgggtcactgggatttctccccaggaagcgtgctgctcgtcacaggggaaaagtgaaggcattccccaaggatgacccatccaaggcacccaagctcactgcattcttgggttacaaggctggtatgactcacattgttagagaggtcgagaagccaggatcaaagcttcacaagaaggaaacatgtgagcc

SEQ ID NO: 346 - DNA, 248 bp, Glycine max
  Clone ID: 700904988H1
caaatgtttgcagaatgctggtctgagggatattgcacacatagcggataccttttcaacaaaagggctagatccacaacaaattgaatcaatatcaaggataagatatattgcgcatgaatgtctgagagaccaatttggtggtttggtcatggcgtcagggagcccccaagttgaactaggaaaaagggtcagaggaaaggagagggttagaagaaaaggaggagcgggtaaacgactgcgaaagg

SEQ ID NO: 347 - DNA, 253 bp, Glycine max
  Clone ID: 700904995H1
caaagccttctccttaaccactgagagccttggttgtgttcaaagctctatatttaggagcatccatggaaatatgatttgttttccacgtgggattttggacccacgagttcatgttcatgaagaacatctatctttcagtgaatgacaacttcagatgccattgctccatgatcatatggtatggagcatggcagaggcggtcgagtaaggaaaaagaggagctgacctcaacccttgtaagttggacaat

SEQ ID NO: 348 - DNA, 273 bp, Glycine max
  Clone ID: 700905001H1
ctcgaaccctctctttccggcaactaggttaaagttcatcaatggcaggtcgtggcaaaaccctaggatccagcgccgccaagaaggccacctcaaggagcagcaaagccggcctccaattccccgtcggccgtatcgcccgtttcctcaaggccggaaaatacgccgagcgcgtcggcgccggtgctcccgtttacctcgccgctgtcctcgaatatctcgcagccgaggttttggagttggctggaaacgctgcgagagacaataagaaga

SEQ ID NO: 349 - DNA, 182 bp, Glycine max
  Clone ID: 700905080H1
aactcttgttcttctttaccgattcaacaacagctcagcagtggtagtacccatgagcctgcagaatctgcactttttttgccttggcttctattctctcctcactttgaatcggaagatatcctttccattcaaggcagcaagcagaagtttcaacgaaagtctcctctcccacacagcta

SEQ ID NO: 350 - DNA, 160 bp, Glycine max
  Clone ID: 700905088H1
ccgccatgacggttgcaagcgccgcctcttcacgcaccaagaggctcgtcaagctaacgctctcgctcctccgcctcggcttcaactcctccaaatggtacttcactgcaccttgaactctctctctttcgcactaaacgacgcacgaataaacaaaacg

SEQ ID NO: 351 - DNA, 275 bp, Glycine max
  Clone ID: 700905102H1
caactccactcaattgtatgcattgatccatggctagatacattaatattgtacttttgggaatagtgttggtagtggtgagattgaaaggtgcagaggcacagcgggcgttctttgtgtttggggattctcttgtggataatgggaacaacaactttttggcaactacagctcgagcagatgctcctccttatggcattgattacccaaccggaagacccactggccggttctctaatggctacaacattcctgacttcattagtcaatcactt

SEQ ID NO: 352 - DNA, 276 bp, Glycine max
  Clone ID: 700905103H1
gtctacacgcactcttatgagaaagagcagaaataccagacattcaaagaaaacgtgcaacgtatagaagcctttaaccatgcgggaaacaaaccttacaagctaggcatcaaccattttgctgatctcacaaacgaggaattcaaagccataaatagattcaagggtcatgtgtgctccaaaataacacggacacccacatttaggtatgaaaatatgacagcagtgccagctacattggattggagacaggaaggagctgtcacacccatcaag

SEQ ID NO: 353 - DNA, 272 bp, Glycine max
  Clone ID: 700905104H1
gagagttttgctgcaaggacttgacacaaattgtgtaaatgtctgtggcttttaccaacctctcttggtggttgtggagtggaaagcatcaagagccaagaatcccaaatgggccttctataaattcttcggccgattcaaatttgtgggaatcggatgttttgaggtttcctttggttcaggcgaatgtggggtcctcatctagaaaggtgaagcgcaaatggcatagtaggggggagaggaaggtggatagggaatatgatgttgttctg

SEQ ID NO: 354 - DNA, 269 bp, Glycine max
  Clone ID: 700905106H1
caaagttcggtggttcaatatgtatatagacgtgttgtttcaacctgatttttgcgatacagactcaagtaccaatcacttctgctaaggagttatctttgcttactgaagaatattgcattcctgccatgtaccaattctcggtctcttccagtgttagagcgtcggtaggatcgaagatggttggcatgtagccatttgttttggctgggtgataatatcttaatagaatatggaaatgttgtgacgaactctgcagtagcagttct

SEQ ID NO: 355 - DNA, 267 bp, Glycine max
  Clone ID: 700905112H1
gccattctcttcagtttaaagttacatagtttttcattgttttacttaatctacaatggctgcttcaacaatggctctctcttcatcatcattggctggccaagctatcaagcttgccccctccacccctgagcttggtgttggaagggttagcatgaggaaaacagcctccaaaactgtttcctcaggaagcccatggtacggcccagaccgtgtcaagtacttgggcccattctcaggtgagcccccatcctatctcactggtga

SEQ ID NO: 356 - DNA, 268 bp, Glycine max
  Clone ID: 700905113H1
gcttaccaaccagggaataagagtgatacaattacagtgggcctaaaaaaacttgaacctagtttattctgtgaaggaagggaaacttattcaatatatcaacagcagaagcaaggtcaatgaatctctagagcaggcatataaattttacgctgggtatggaaatgatggaacagaaactgctcaggcttctggagcatatattttccgccctgatggttcaccctctcccatcaaatccaacgggaagtctcctctcacagttttt

SEQ ID NO: 357 - DNA, 273 bp, Glycine max
  Clone ID: 700905115H1
cacaatcataatctcaatcacctcaatttcacttctctgctccaaagtttcaatcttttctctgaaatcccaaatgggcatcgccacaatcaaaatgggaggcaactccgactccaactgttccatcactccacgccattacaacacccacaaggtgttccttttctgcaactacattctcttgggtgcagcctccagctgcatcttcctcaccctctccctgcgcctcattccctctctatgcggcttcttcttcatccttcttcaggtctt

SEQ ID NO: 358 - DNA, 272 bp, Glycine max
  Clone ID: 700905118H1
gttattctcctttgaaacacttgccccgtagctgcaaaagctaaaacacttagtgaatgagagcaataatgggctctggaaatatacgaccttcttcttccggctgctctcacttgtctatctccgagctccgcgagaagcaccattgggagctagaaaatctgacactaacctcacaacctttcaaaacattgaaattcttcacattagctgttattcaatacatcaagaaaacatcattatatctattggcaaaaggtggatgggttatg

SEQ ID NO: 359 - DNA, 265 bp, Glycine max
  Clone ID: 700905125H1
gcagccactatagtaaacaatcttctctatctaaaatggagtttgttctaaactacctaaatgccactgccattggagttctttctctaaccctcttctttttgtttttgtataatcccttcaaatttgcattaggtaaaaaagaggctcccgaagttgcaggtgcatggccaatacttggtcacctaccactattgagtggttcagagacacctgatagggttttgggtgctttggctgataagtatggacccatattcaccat

SEQ ID NO: 360 - DNA, 268 bp, Glycine max
  Clone ID: 700905129H1
cagaaaccccacacccaaccctaacgcccctcccccaactcccaacctcaccatccccgacctctccctcgccttttccgctatctccgccgcccacccaatctccccctccgtcgcccaccgcgtcatcgagaaatgcggcggcgtccgccacggcatccccttcctccaatcccttgccttcttcaactggtcctcctctctcgacggcttccccgcctcgccggagccctacaacgagatgctcgacctcgccggaaagttgaga

SEQ ID NO: 361 - DNA, 263 bp, Glycine max
  Clone ID: 700905139H1
gacaattcaacttaagagatcaatatggccaccaccactacccagcctccctctaatatctgttttttccttctgttgttgcttctagcacactttcatttgggcataagccaacttgagctgaattactactctaaaagctgcccaaaagctgaagagatcatcaaggaacaagtcacacaactatataacaagcatggaaacactgccgtttcgtgggtcagaaatctcttccacgattgcgtggttaagtcatgcgatgc

SEQ ID NO: 362 - DNA, 263 bp, Glycine max
  Clone ID: 700905143H1
gcaaagcaaaagatgttgttgaatactctgttactattatgggtcaaggccaagttagaccagtccattctggaggttctccaaccagactagtcctctccaacttggtttctttttatacaaccttcccactctcattcttcaatcaatccaacccaaaagaccctttctttcaatattcatagcatcatcatgggtgactcttccgcggctaatgaccatttgggtgaatccccggccgttgagttaaccggaaagataat

SEQ ID NO: 363 - DNA, 259 bp, Glycine max
  Clone ID: 700905157H1
cgccggtgcactacaaatacaaccccgtcaagaccatcaagacgaatgtgatgggcacgcttaacatgcttggccttgcgaacgaattggggctaggtttctgcttactagtactagtgaggtttacggtgatccgctggagcatcctcagaaggagacttactggggaaatgtcaatccaattggtgagaggagctgttacgatgaagggaagcggactgcggagacattggccatggattatcatcgaggagctggt

SEQ ID NO: 364 - DNA, 260 bp, Glycine max
  Clone ID: 700905158H1
ttaagatggaggggaaggagcaggatgtgtcgctgggagcgaacaagttcccggagagacagccgattgggacggcggcgcagagccaagacgacggcaaggactaccaggagccggcgccggcgccactggttgacccgacggagtttacgtcatggtccttttacagagcagggatagcagagtttgtggccacttttctgtttctatacatcactgtcttaaccgtcatgggagtcgccggggctaagtctaagtgc

SEQ ID NO: 365 - DNA, 259 bp, Glycine max
  Clone ID: 700905160H1
tccacacgctttctccagagaccttcttcctagatacttcaagcacaacaatttctcaagcttcgtcaggcaactaaacacttacgttgcagctgttgcttggacaagaatctatggtagtgatagcaatcgttatttactcaagattattcagaagccgtagaatggatacgaattcgaagtagctggtctccaagaatcataactgattgttgcttttgaaccaagatccggttggtggttaaccttgtcggtttga

SEQ ID NO: 366 - DNA, 262 bp, Glycine max
  Clone ID: 700905161H1
gaagaagcgaaacaacttctcacgcgctgtctcaatcttggaatctctgctctaaattctaatcttcccgccatagatgtcgtcgaacttgtggtgagggaattggaaacggatccgctgttcaattcgggccgtggatctgccctgacagaaaaaggaacggtggagatggaggctagcatcatggatggtccaaaacgacgatgcggcgccgtttcgggtcttaccaccgttaagaacccgatctcgcttgctcgtttgg

SEQ ID NO: 367 - DNA, 258 bp, Glycine max
  Clone ID: 700905183H1
caagaacagattcacattgccgccatttttgacattgaagaactttgaaggattggaccttggaaagatggacaaagctgatgactctggacttgcttcatatgtttctggtcaaattgatcgtactttaagctggaaggatgtgaagtggcttcaaacaatcaccaaactgccaattctggtgaagggtgtgctgactgctgaggacacaaggatagctatacaaagtggtgcagctggaattatagtgtccaatca

SEQ ID NO: 368 - DNA, 254 bp, Glycine max
  Clone ID: 700905186H1
ctatgctgtgtcaatcaccattcgtatagtgtttggtttcatgtttattgcattgatttggaaatttgattttgcacccttcatggtgttgattattgccatactaaacgatggtaccatcatgacaatatccaaggatcgagtgaaaccatctccaatgccagacagctggaagctgagggagatatttgccactggtgttgtgctaggagcttacatggcactaatgacagtagtatttttctggctcatga

SEQ ID NO: 369 - DNA, 260 bp, Glycine max
  Clone ID: 700905203H1
tgaagagcgaagagaatggctcccaagggtttaatctttttggctgtgttatgcttctcagcactgtcactgagtcgttgtcttgcggaggataatggacttgttatgaacttctacaaggaatcatgccctcaggctgaagacatcatcaaagaacaagtcaagcttctctacaagcgccacaagaacactgctttctcctggctcagaaacatcttccatgactgtgctgttcagagttgtgatgcttcactgttgct

SEQ ID NO: 370 - DNA, 252 bp, Glycine max
  Clone ID: 700905213H1
tgcttggaaaggtaattttagctattcttcttgattgaattacttggaaaggtagtgtttgatattgaatttattctgctttcttcgtcgtttctcctcgattttattggtgttttgaatatatttaatgattgatattttgtcatcaaactcatttttgtacaaatcagatgaaggatttgctcaagaggaaaccatccattgttgagctgagtggcattagcaagtcacgacttgactgctttgcaactc

SEQ ID NO: 371 - DNA, 253 bp, Glycine max
  Clone ID: 700905214H1
tgcatccctcttgatttgtagtttgttttgtgctttagataaaagttctgccaaatcaagaggggttttaagatcatagtgtgtgttttgcaacaatggctaagttctttgctgctatgatcttggcactctttgccatttccatacttcaaacagtggtaatggctgctaatgaacaaggaggccacttgtatgacaacaaggtatatatatccttacctattcttcactctcttgtctctctttctttgtg

SEQ ID NO: 372 - DNA, 246 bp, Glycine max
  Clone ID: 700905285H1
cacccaggaaatctcccaaggacttatacgctaacccatagtgatataaccgctaagctcaccttggcaatctctcaaaccataaataattctcagctgcaggggtggtacaacagatttcaaagggacgaagtggtggcacagtggaaaaaggtgaagggaaggatgtctctgcacgttcactgccacattagtggaggtcattttctcttggatatattagcaaggttaagatacttcatcttc

SEQ ID NO: 373 - DNA, 240 bp, Glycine max
  unsure (1)..(240): unsure at all n locations
  Clone ID: 700905319H1
atttcaagggctgaaacatctatctttaactgtattctccctttgtttcctcaccagttgattcangttgcaaacatggcttttccagacccatccatgtcagtttctccacagaggaagatgggaagggggaagattgagatcaagaggattgagaacactaccaatcgccaagtcacattctgcaagcgcaggaacggcttgctcaagaaagcatatgaattatctgtgctttgtgat

SEQ ID NO: 374 - DNA, 270 bp, Glycine max
  unsure (1)..(270): unsure at all n locations
  Clone ID: 700905349H1
ttcagccctgcctgttttgcntncattctgttttcanagtgacgaacttctgnagaaatngcaaatcatcctttgacacactctcactctttccgcgagaggtttgntgngactctcactggtcacaggaacganattntggcccttctgtcaaggcttgaagccaagggcaagggnatcctgcaacatnaccaagtggttgcagagtttgaagaaatccctgaggagagcngaaagagactccaagaggtgncnttggagnagtttgat

SEQ ID NO: 375 - DNA, 240 bp, Glycine max
  Clone ID: 700905403H1
cgacattcattcatctatggctacccttattgctcccagcaaccactctccccaagaagacgctgaggctctcagaaaggcttttgaaggatgggggactgatgagaaaactgtcatagtaatattgggtcatagaactgtttatcagaggcagcaaatcagaagagtctatgaggaaattttccaggaggatcttgtgaaacgcctagagtctgagatcaaaggagactttgagaaagc

SEQ ID NO: 376 - DNA, 116 bp, Glycine max
  Clone ID: 700905409H1
gaactcatcacttactggaagccttgttgtgagtaagagaaaaggcttcctgcaccgagcacaccaacttgatacctctgattctttctttgcttagaattccacacaacatacga

SEQ ID NO: 377 - DNA, 153 bp, Glycine max
  unsure (1)..(153): unsure at all n locations
  Clone ID: 700905434H1
aggttttgcatttcatttgacgaagagtgagagagtcttanctgtcgtctctgatctctgatcgcatcttcattccgaaaatggctgtttcggctatcactggagcgaggctaactctagggatgtctctttcctcttccacacnacanangg

SEQ ID NO: 378 - DNA, 232 bp, Glycine max
  Clone ID: 700905445H1
caacgaatgcagtgtcttgccgctttcacaagtttggtgatgaccaaaagaatctggtcttccaaggtgatgccacgtcttcttccaggggcatagaactcacaaagttagacggtggaggaaaaccagtgggtggcagtgtggggagagtgttatactcttctccagtgcacctttgggaaagctctacagtggtcgcaagctttgaaaccgacttcaccttttccatctc

SEQ ID NO: 379 - DNA, 230 bp, Glycine max
  Clone ID: 700905457H1
cgccatttgggagttaggttctgcacgctctgcttccagcgagtgttctttcttcgtttcaacaccttaatttgcacacgctgcttcttcagcttgagaaatggcacaagaaacctttctattcacatctgaatctgtaaacgagggtcaccccgacaagctgtgcgaccagatctctgatgcagtgctcgatgcgtgccttgaacaggaccctgacagcaaggttgcct

SEQ ID NO: 380 - DNA, 228 bp, Glycine max
  Clone ID: 700905478H1
ctcaggtggttgaacgttctttaggtggtcgtaatgaaatggatcatggagctagcagttcagtttctgtagatgcaccccagaggaattttgctgagactgttagcatcagtaatcacaatattgatgaagttaattcttggcatgatcgcggttcacgcatgactgccagcattggtagtgcaaagtttttgagtgatggtgatgaattggtcaaagaactccagt

SEQ ID NO: 381 - DNA, 223 bp, Glycine max
  Clone ID: 700905485H1
cgacacagcagaaatgatatgatgggttgtggcggtgcattctcagtgtggctgccagtgtttgtgtcttgttttacagcaatagcattggctgggactgggtgcgataaggcaccggtggtgttcgtgttcggcgattcgaactcggacacgggtggactcgcttccggtctgggtttccctatcaatcttcccaatggccgcaatttctttcacagatcca

SEQ ID NO: 382 - DNA, 227 bp, Glycine max
  unsure (1)..(227): unsure at all n locations
  Clone ID: 700905493H1
ggggcactngtttcgaaccctcgttgtggttaggtcttcttcacctttcgaattttggaatccatgggtcagggaactccgggcggcatgaaccggcagggcgaccgnaagccggacggcggcgacaagaaggagaagaagttcgagccgtcggctccgccggcgcgcgtggggcggaaacagcggaagcagaaaggtccggaggcggcggcgcggttgccgacagt

SEQ ID NO: 383 - DNA, 267 bp, Glycine max
  unsure (1)..(267): unsure at all n locations
  Clone ID: 700905514H1
cngtgtttacccctctagtcctagcaatgctggaacaggcaccacagcaactccaacaaccactacaccaacaacaggcacaccacccaccaccttaactccaaccacccccactactaccactccaggcacaaccaccggtaccagcccaaccactggcactggtaccggcaccggcaccggcaccaccataggtaaccctaatgtgtttggaatgagtccaacatcttcaatggaacaggaggaggcttcaatgacccaaacaaa

SEQ ID NO: 384 - DNA, 266 bp, Glycine max
  Clone ID: 700905548H1
agatactcgaatactgtgtcaaatgattctgacacgcatgatgacttcaagccaggtaataagcttgagggttctggcatttgtttgtctaatgttattgagcaggatgtcaaggataatcctgttatggtttacatgaaaggtgtgcctgattttccacaatgtggatttagttcgcttgctgtaagagttttaaaacactatgatgttcctattagtgctagaaacattttggaggatcctgaacttaaaaatgctgtaaaagc

SEQ ID NO: 385 - DNA, 260 bp, Glycine max
  Clone ID: 700905591H1
gcttacaaaaagtatatattggtttctctcattcgtcatggacagttctcaaccagtcttcctaagtattcttcttcgactgctcaaaggaacctgaagaacttttgtcagccttacgtcgaattggctaatagttatggcactggacaaattgaagaactagaggcatatgccagggcaaatgcagagaagtttgaatctgacaacaaccttggactggttaatcaggttgtatcatccatgtataagcggaatattca

SEQ ID NO: 386 - DNA, 256 bp, Glycine max
  Clone ID: 700905601H1
cacagttagtacaaaaaagggttacttcagcttccacatatcttgaagaattgatcaatgggcaagtctgtagttgagaagctactttggatggcaattgtgtgcttggtgctgggtgtaatttccattactcccaaggcccaagcagcagtgacatgcaaccaggtggtgagcaacctcaccccatgcatttcttatgtgctcaatggtggcaaaaccgtgcctggcccttgctgcaatgggatcaagaccctct

SEQ ID NO: 387 - DNA, 256 bp, Glycine max
  Clone ID: 700905603H1
gaaaatgtggaagagaacgggttttgaagaagaagcagttcaattgatcaactcagatttcagggacctaagtctagctgctaatagactcgcccatcatgccatcaaacttggtggcattggctttggagcctcttttttcggattgtttgctgccattgctgctatttatctgttgattttggatcgtacaaactggaaaacaaatattctcacagcactactcattccatacattttcttcagcttgccttca

SEQ ID NO: 388 - DNA, 255 bp, Glycine max
  Clone ID: 700905608H1
gccgcgcacggcggtgaaaagacggtgtccaacgctgaaccttccggtagcgatcctcagaagtctctggagttggcgaacgagctgatggaaaaaggaaacaaggcaattaaggagaacgattttggagaagcagctgataacttcagccgtgctctcgaaatcagagtggcacattatggtgaacttgctcctgagtgtgtgcacacatattacaaatatgggtgtgcacttttatacaaggctcaggaggaa

SEQ ID NO: 389 - DNA, 250 bp, Glycine max
  Clone ID: 700905611H1
ggaacaaacaacaatagaggggttgtggtgctctgtgtgctgcaatttccttttgagcttgtgtttgattcatcaaatcatcaaagatgactgtaggggcaggaatatctgttgcagatgggaacttgatggtgttggggaacaaagtgctgagccatgtccatgacaaggttcttgttacccctgcatgtggtggtgctttgctcaatggggcattcattggggttcaatcccatcacaagggtagccg

SEQ ID NO: 390 - DNA, 254 bp, Glycine max
  Clone ID: 700905619H1
ggaaccaacaacaaagagcagagagaaagagaggaccattccaaccctaatttctctgctaaaccctagttgtttggcatttcctctcttctccctcgtaaatcttctcccattccctccggtagctttccagatccaaataaatcatggttttctgggtttttggctacggttcactggtgtggaaccctggattcgattacgacgagaagattattggtttcatcaaggactacagacgcgtgtttgattta

SEQ ID NO: 391 - DNA, 251 bp, Glycine max
  Clone ID: 700905632H1
caaaaaaaccatggacgtgggtcagatgcagagacagtggatcgactacaccaaatccctcttccttgagggcttcctggatggtcagtttctgcaacttcagcagcttcaagatgagaacaaccctgactttgtggtcgaagttgtctctctcttctttgaagattctgaaaggcttctcaaagatctcacctttgccctagatcagaatggtgttgacttcaaaaaagttgatgctcatgtgcaccagt

SEQ ID NO: 392 - DNA, 251 bp, Glycine max
  Clone ID: 700905634H1
ggaattaggaatattcgacaggtagagtttcttcaatggctcctaaagttgataagaagaatgatccaaaggcccaggccttgaagactgctaaggcagttaagtcaggtgctacctttaagaagaaggtaaagaagatccgaacttctgtcactttccacaggccgaagaccttgaagaaggacaggaaccccaagtaccctcgcattagcgccccgccgaggaacaagcttgatcattatcagatcctg

SEQ ID NO: 393 - DNA, 253 bp, Glycine max
  Clone ID: 700905636H1
gtagcagtataaaccaattggagttggagagaaaagaagaagaatctagaaagctgaaatgaataggattcacagcagatatagcaaagctcacactaacatcaatttatgataacaacctcaaaatcaagttatcagtgtgtcaccctgacttttcaaaaacaattatttgttgcttcatatttcactgtgatttcataatagattttcactcatcttacttgactccaagcattctatatatctagtgcct

SEQ ID NO: 394 - DNA, 250 bp, Glycine max
  unsure (1)..(250): unsure at all n locations
  Clone ID: 700905639H1
agggtttgggtttttcactttcagcctctccattccttcaaccttcttcttntctttgatctctgatggagacgttccgtgtttagtagcaagggttagttgaggccttgtgtttggaaacgtacggtgtcgttttggagttgggaaaacaaataattctgagagatggcaaccacgaacccttttgatttgttgggtgacgacgctgaggacccttctcagctcatcgccgccgagcaactcaaggcgg

SEQ ID NO: 395 - DNA, 247 bp, Glycine max
  Clone ID: 700905643H1
cagaaatagaatcatctctctgtctagggtttcattctttttcagctttatttgttctgtagatccatctagcttcggtgctgcaaatggacgtcgcagtcactgccgttcggtcaccgctgatcgtcctgggaagtccggtcaacgggtccgcctcagctcggttgggttccacttttgggttttccagaaagctatgcttgaattcagtatttatcccgaagcaagttcgtagaagagggtttgt

SEQ ID NO: 396 - DNA, 151 bp, Glycine max
  Clone ID: 700905660H1
catctttatgttagtaaagctaggaggctcctcttgcttgcaggttcagttttatgaggattgctgcattagcttttttgactatatattatgtataaaatgttgacatgaacgtgtatgattatatgataatataattctactttttttt

SEQ ID NO: 397 - DNA, 243 bp, Glycine max
  Clone ID: 700905683H1
ctttcagctgtggagtgattctggtgaagcatgcccagaaggaactgttccaatcagaagaactacagaggaggatattctcagagcaagctctatccaaagatttggaagaaaaccaagacctgtacggagagactctactggcagtggtcatgagcatgcagttgtttttgtaaatggggatcaatactatggagcaaaagctagcataaacgtgtgggcaccccgtgtaactgatgaatt

SEQ ID NO: 398 - DNA, 258 bp, Glycine max
  unsure (1)..(258): unsure at all n locations
  Clone ID: 700905716H1
gccatgcagatcagcacacctgaaggcaatggaagttgccagggaagcaggatgcttgctctcttatgacccaaacctgcggctacccttgtggccctccgccgaggaagcacgtcagcaaatactcagcatatgggacaaggctgatgnaatcaaggtcagtgatgtggaactggaattccnaaccggaagtgacaaaattgatgatgcatctgctctntccctgtggcaccccaatttgaagttgctccttgtcac

SEQ ID NO: 399 - DNA, 130 bp, Glycine max
  unsure (1)..(130): unsure at all n locations
  Clone ID: 700905744H1
acctgccaggccgtacccagntttgccntatagtgagtncgtcattagagcttggccgtcaatncatggtccatcagctgtttgcntgtgtgaaatngtnatgccgcctccaccaattgccaccaccaac

SEQ ID NO: 400 - DNA, 252 bp, Glycine max
  unsure (1)..(252): unsure at all n locations
  Clone ID: 700905747H1
acaggcanggacgggtggtaccctcntggccacggagacgtnttcccatncattagtgaatagtggaaagcttgatgtgctatnatcacagggnaaggagtatgtgtttgttgccaattcagacaacctgggtgctgnagttgacttgaaaatctnaaatcatttgattgagcacaagaatgaatactgtatggaggtcatcccaagacattggctgacgtgaaaggtggcatctgatttcttatgaaggaa

SEQ ID NO: 401 - DNA, 63 bp, Glycine max
  unsure (1)..(63): unsure at all n locations
  Clone ID: 700905780H1
aaganaatgatgaagcagggcagaatgnacccttgactgnggangaaactccagnagntantt

SEQ ID NO: 402 - DNA, 261 bp, Glycine max
  Clone ID: 700905805H1
catcctgatgtattcaacatgatgcttcagatcctggaagatggaagattaacagacagcaaaggaagaactgtggacttcaagaacacgcttcttataatgacatcaaatgttggaagcagtgtgattgagaaggaggccgtaaaataggatttgaccttgattatgatgagaaggatagcagttacaaccgaatcaagagcttggtgactgaggaactgaagcaatacttcaggccagagttcttgaataggttggatg

SEQ ID NO: 403 - DNA, 258 bp, Glycine max
  Clone ID: 700905820H1
gatttcgattggcgagacaaaggagccgtcactaacgtcaaggaccaaggggcgtgtggttcgtgttggtctttcagtacgacgggagcgttggaaggagctcattatctggccactggtgagctcgtgagcttagcgagcaacagcttgtggattgcgatcacgtgtgtgatccagaagaatatggagcgtgtgactcaggctgtaatggtgggttgatgaacaacgcatttgagtacatacttcagtctgggggag

SEQ ID NO: 404 - DNA, 258 bp, Glycine max
  Clone ID: 700905826H1
aacactcataacacaaagcacaaagcaaagctcatccttgagttaaaaaatggcagcagcttcttccatggctctctcatccccatccttggctggcaaggccgtgaagctgggcccatcagccccagaagtggaagggtgagcatgaggaagaccgtcaccaagcaggtctcctcaggaagcccatggtacggcccagaccgagtcaagtacttgggcccattctctggcgagcccccgtcctacctaaccggtgag

SEQ ID NO: 405 - DNA, 258 bp, Glycine max
  Clone ID: 700905827H1
cttcttcttctcttcttcttcaagattgcgacgacgatccaagtgatagacactcgttgcgatggaacttgtagctgaatccgagcgaactctgtacccatacgtgactggatcctctgtagtcgctatcaatacaaagatgggattctaatggccgctgacatgggaggttcgtatggatctaccctgcggtataagagtgttgagcgtatcaagcctattggaaagcattctcttcttggtgctagcggggagata

SEQ ID NO: 406 - DNA, 258 bp, Glycine max
  Clone ID: 700905846H1
ctcagattggtgaatctcaacccagtattttcttcacagataggtcaggacagcattataaagaatgcctgtccatggcagttgataatcttcctgttcttgatgggaagactccagtccaagtgtaccaggtttctgtgagagcttcaagtcttcattctctccattcatgggctctacaatcacgagcatttccatgggtttaggaccagatggtgagctacgttatccatctcaccactggctgccgagtaatgg

SEQ ID NO: 407 - DNA, 252 bp, Glycine max
  Clone ID: 700905866H1
gtggaaagaaggattccatgttacctcaatgactactgctggcagtcgctggggtgttgttatgtccaggaatgctgggtattctgatcaggttgtggagcttgactttttgtatcccagtgaaggatccatcgtcgatgggagaatggttaccggattacttctatggctgctactagtgatcaggcagccttcatactgagcataccaaaacgcaaattacttgatgaaactcaggagacactgcgtaca

SEQ ID NO: 408 - DNA, 253 bp, Glycine max
  Clone ID: 700905880H1
gcgaagagaagagaaaaattaagatggaggggaaggagcaggatgtgtcgctgggagcgaacaagttcccggagagacagccgattgggacggcggcgcagagccaagacgacggcaaggactaccagagccggcgccggcgccactggttgacccgacggagtttacgtcatggtccttttacagagcagggatagcagagtttgtggccacttttctgtttctatacatcactgtcttaaccgtcatggga

SEQ ID NO: 409 - DNA, 81 bp, Glycine max
  unsure (1)..(81): unsure at all n locations
  Clone ID: 700905894H1
ggcttcccaaaccctattattaccataatttccaacacaacatcaacgagtnntgcganngggggntgtggctgnaaggng

SEQ ID NO: 410 - DNA, 252 bp, Glycine max
  Clone ID: 700905903H1
atcttattgctgggtaacttttaacggttactgtattactggtttctaaatttacttcaatagtgagtgctagtattacatgttctcagaaaagatttgatgtaatctttttgacaagtgttcattttatggtatggtgtgtagatcaaactttttatatctgacaatgagttcaacctgactatcattgctaggcgctcacggcattatgctgggaccagatatttgaaacgaggagtgaataaaagggta

SEQ ID NO: 411 - DNA, 224 bp, Glycine max
  unsure (1)..(224): unsure at all n locations
  Clone ID: 700905921H1
tctttcttccgccactgccgcagagcgtagaaggaaatcaaacagcagagagagggtaaagcatacgtgggttaaatccatgcgcatgagtcggaagaatttgtgttagcggtgaggagatatattgagaattaatatttgatagtgtatatatggggaggggaagagtggagttgaagaggatcgagaacnagatcaataggcaagtgacgttccaaagagaa

SEQ ID NO: 412 - DNA, 249 bp, Glycine max
  Clone ID: 700905939H1
caagctctcaacgccatctccagctgcttccttatcagaagcgcttcgccccagagattctcgcttcctctccttcaatccttcttccaacgctattaattacaaaattaacctctccgcttccctccgatccattcactccctccctcttaaaacctccttgcggatcaaatgctcccaaacagatgggaatggaagtcctgcaaagaggacagtgcttcatgatctttatgagaaagagggcagagt

SEQ ID NO: 413 - DNA, 248 bp, Glycine max
  Clone ID: 700905942H1
ctaggtttgaatttgggtgtttccgtttcaatggatgacggcgagcttgatttctccaaccatgaagtgttttcgagtcccaacatgggtgagcttcccagcagcggttcaatggacagtttcttcgacgagcttctcaaggacacgcacgcctgcacccacacccacacctgtaaccctcccggccccgatttctcccacactcacacgtgctaccatgtccacaccaaaatcgtcccgcccctgag

SEQ ID NO: 414 - DNA, 242 bp, Glycine max
  Clone ID: 700905985H1
ggcgaggatggcaaacacaaacagcgacaccaaagaagaaagcaaaaaaatggatgaaagagagacaatacctctcctcacctcatacaagatgggaaattttaatctatcccacaggattgtgttggcaccgttaacacgatcaaggtcttacaacttcgttcctcagccgcatgctgctctgtattattctcaaagaactactaagggtggcttcttgatcggggaagctatggtgtatc

SEQ ID NO: 415 - DNA, 272 bp, Glycine max
  Clone ID: 700906010H1
caccagatccatcctcagagtgtaatagcagtactgcaactggtggggcattcaagaaagctagggttcaaccgcccacaactcagtcgaccttcaaggttaggaaggagaaattaggtgacagaattaccgcccttcatcaactcgtttccccattcggaaagactgacacggcttctgtcttattagaagctattgggtatatcagattccttcagagtcaaattgaggcccttagcttaccatacttgggcagtggatcaggaaacatg

SEQ ID NO: 416 - DNA, 269 bp, Glycine max
  Clone ID: 700906022H1
tccatcttcttctcttttcacgtcattatcctaaacttgcagattttcacatcccaagcaacatgaaggggaggttcatgtttctgtcggtgctcctttgtgccacctttcatgtctccttctccattactgacggcttagtagcaaacggcaacttcgagctgggtccgaagccctccgccctgaaaggaactgtggtgattggtggcagccactcgatcccagaatgggagatctctggcttcgtggagtacataaagtccggccag

SEQ ID NO: 417 - DNA, 269 bp, Glycine max
  Clone ID: 700906036H1
gatttctctgctgaagagcttggtgccaagattaaggactatgggattgtttctcctgagactaagaactctctctctgatccctaccctttcaatttgatgtttcagacttccattggtccctccggcttcagccctggctttatgagacccgagactgcccagggcattttcgtcaattttaaggatttgtattattacaatggcaacaagcttcctttcgctgctgcgcagattggccaagcgtttaggaatgagatatctccacg

SEQ ID NO: 418 - DNA, 271 bp, Glycine max
  Clone ID: 700906049H1
gtgagagagagatggcaggtatcgctggtacatgtcctttaggagcattgctcagaaacagtgtctcagaaaacaatgggaagatatctgtggttcattatgaggggcttagattgcagcagagaatgcaaatgccttcaccaagccagtacatttcagcttcttcatcagctccaagatgcagaacaatcaaggccatggcttccccaactgttggagcaccaaagagagaaaaggatccaaaaaagcgggtagtaataacaggaatggg

SEQ ID NO: 419 - DNA, 262 bp, Glycine max
  Clone ID: 700906058H1
gggacacattgacctattaagtactgatcattcaccaactgtgcctgaactcaagcttatggaggagggtgacttcttaaaagcttgggggggcatatcatctttgcagtttaatcttccagtgacgtggtcatatgggaagaaatatggacttactctggaacaattgtctttattgtggagcaagaaacctgcaacactggcggggttagaatcaaaggggaccattgcagttggaaaccatgcagatattgtagtttgg

SEQ ID NO: 420 - DNA, 267 bp, Glycine max
  Clone ID: 700906096H1
gaagatgggaaggggtaaggtacagctgaagaggatagagaacaagatcaatcgccaggtaactttctccaaaaggagaagtgggttgctcaagaaagctcatgagatctctgtactctgtgatgctgaggtagctttgattgtcttctctcacaaaggaaagctctttgagtatgctactgattcatgcatggagaagatactggaacgccacgaaaggtatgcctatgcagagaggcagctagtagcaaatgattctgaaacaca

SEQ ID NO: 421 - DNA, 246 bp, Glycine max
  Clone ID: 700906119H1
gtgagataggaaagattctcagaatctagaatatcagcatggtttttttgcagggacaacaaggtttgaattaggaacaattaaacaagatattaaggcacttgtggggctgtgtgtaaggtttctagagcattggattacagggtaacatttgcatggtgacagaaggatttggaaagccaatgcacaaagttttgaaactttgtaaatgtgggggttgattagatcaaattgtgggaaagaaaa

SEQ ID NO: 422 - DNA, 245 bp, Glycine max
  Clone ID: 700906120H1
ggaaaccctcttaggatatttgtgattgtgagagattttctggggatgttagataatgtgtgtaaagaacttagaaggtctaaagctccacgtagcccgaaccctcttgctatgctccctttagatagatcatagactagaattaaacactgccttgtgtgttcataggaattgaaattttttaaaccaaccgagtgtaactttattttgatttttgtggagttttggagcatttggattttgta

SEQ ID NO: 423 - DNA, 247 bp, Glycine max
  Clone ID: 700906129H1
catttccgttaccgttatcctcacttctctctctctcaacctcttatttatttattaaccctttattccacccctttcctctcccttcatcaagcacccaactttctgccacccccacaaaagggtgcttgcgtttctttctgtgatctcaaccatgaagcgtccactcacaccttcagccagcggcatgaagactaacaagaaagccaaggcgatggaaaatgacgaagacgtggaggggctgggg

SEQ ID NO: 424 - DNA, 250 bp, Glycine max
  Clone ID: 700906131H1
gatgggtgcagaagcaaatggcggcgagaagcaattgaaatttctgatctacggtcgcagcggttggattggtggtctactgggtaagctctgcgaagagcgcgggatccaatatgagtacggcaccggcagattggagaaccgctcgtcgttggaggcggacatagcggctgtgaagcccagccacgtgttcaacgccgcgggtgtcacgggtagacccaatgtggactggtgcgaatctcacaaagtt

SEQ ID NO: 425 - DNA, 251 bp, Glycine max
  Clone ID: 700906132H1
ctatctctcaccaacttccgctacttcctactccaaccactttcttttttcccgcagtcatgggcaaggtcaagatcggaatcaacggatttggaagaattggccgtttggtggccagggtggctctgcagagagacgatgttgaactcgttgccgttaacgatcctttcattaccaccgattacatgacatacatgtttaaatacgacagtgttcacgggcactggaagcatcacgatgtcaccgttaag

SEQ ID NO: 426 - DNA, 241 bp, Glycine max
  Clone ID: 700906160H1
gagaaattgagtttctgagataaccacttttctctttgattcatcaatggcaaccgcgaggaccgtgaaggatgtttcgcctcacgatttcgtgaaggcttacgcctcccatctcaagcgttccggcaagatggagcttcctgagtggactgatattgtaaaaacagcaaaatttaaggaattggctccatatgatcctgactggtattatgttagggctgcctcaatggcaagaaagatt

SEQ ID NO: 427 - DNA, 239 bp, Glycine max
  Clone ID: 700906171H1
cgggaatcaaggtcatcagacttcaagggtgtttcagctgttgtcactgacagaattcgagaagctcatcagaatgagtctgctccattaatgatgttatttccagaaggtacaaccacaaatggagagttcctccttccattcaagactggtggttttttggcaaaggcaccggtacttcctgtgatattacgatatcattaccagagatttagccctgcctgggattccatatctgg

SEQ ID NO: 428 - DNA, 239 bp, Glycine max
  Clone ID: 700906174H1
caacaacatcaccagacaatacaaacgcagatagatcactttgacgccaccctgaatcttgatacctttgaccgcaacaaaattcttaattgatcactgggtatgtttttgatcgtgcaccttgtgggccagtaatcgttcaaaacgtgaacaagtcttacttttgattccgaattcctcttatcacttgatgcttaagtttgctgctttcaccaattgttctaggattaccaagttga

SEQ ID NO: 429 - DNA, 240 bp, Glycine max
  Clone ID: 700906177H1
ggagagttttgatcaggcgatacagagagatgatgtcaaggcaattgttgttacaggtgcaaagggaaaattttctggaggttttgatatttctgcatttggtggtattcaagaggcaaaagagcgtccaaaacctggttggatatcagtagaaatcatcactgatactattgaagcggctaggaaaccatcagtcgctgccattgatggccttgccttgggtggaggattagaagttgc

SEQ ID NO: 430 - DNA, 234 bp, Glycine max
  Clone ID: 700906185H1
ctcaaacacaactcaccaacacagttgttgcattatttcttttttccagatccaacttcaaaattgcaatgggagtggaagatacagatatttgtatcatcaaggagccagatcatgttgtagtctattcagatggcatttctcatgattcgggtcatgaagctggaagtggtcatcacaatattacagagtcgtatgaacaaatcaatgagactactgaacatcatagttcag

SEQ ID NO: 431 - DNA, 235 bp, Glycine max
  Clone ID: 700906186H1
cacgggcgttggggtgattcctgtaatccatcatatggtgcattatctgattatcagttcatgcggccacgtgcacgggacaagaagcttgttgaagaatgggcagttcccttgaaaagcattgaagatatatatgagaggtttagactgtattgtcttggaaagttgagaagcaatccttggtcagaactagatggtcttcagccagagacaaagataataaatgagctgctgg

SEQ ID NO: 432 - DNA, 268 bp, Glycine max
  unsure (1)..(268): unsure at all n locations
  Clone ID: 700906204H1
gcctcatagctcctttctcatttcacacacacnaagantnntgagacatcatgaagattccaagttccaagcaactggttgtgggatttgcacttggaaatgaaggataggcaacgttggagagctgaagaggatgctttactacgcgcatatgtcaaacagtatggtcctagggaatggaatctggtgtctcagcgcatgaacacacctcttaacagggatgccaagtcatgcttagaaaggtggaagaactacctcaagcccggca

SEQ ID NO: 433 - DNA, 180 bp, Glycine max
  unsure (1)..(180): unsure at all n locations
  Clone ID: 700906205H1
ctttctgttgtttctccctcaacncnacncancgtgttcctcttngnctggntcngnggcttctnncttccctnggtctctggcaganagangccanngttctctnccttggtctcgatggtgcnggcaaaacctccctccttcacatgctcaaagacgagngnttagttcagcaccagc

SEQ ID NO: 434 - DNA, 169 bp, Glycine max
  Clone ID: 700906235H1
ggtaaacaacccatatcataaccgtactcactttcctccggttcgggctttttcagcccgtaaccttgcactgaatatcagtgttggcttggcatcctgccatgggaacaaacacaacgctcctttcccttgctgccccaccctcattcctttctctttccacccttta

SEQ ID NO: 435 - DNA, 134 bp, Glycine max
  Clone ID: 700906250H1
gattttcaaagtttatatttatttgcagccaataataagttttggcgtgactgaatgaatatcacccatatattgattgatattgaatttctgaattcttgtaactgatttgcaattcttcgaatcttttaatc

SEQ ID NO: 436 - DNA, 263 bp, Glycine max
  Clone ID: 700906253H1
ggcttgctgtggaagcacacaacatctttggctttgagaccattcctgaagagtgcgttgaagcaacaaaggaatacatccatggcgaacaatatagatcagactccaaaacagttaaccaacaagcttacttttatgccagagacctcgaagtccatcccaaggacacatttgtgttcagtatagatggcaccgtactctctaatattccatactacaaaaaacatggatatggggtggagaaatttaactcgaccttgtat

SEQ ID NO: 437 - DNA, 126 bp, Glycine max
  unsure (1)..(126): unsure at all n locations
  Clone ID: 700906273H1
ccgaatttcattttcagaagcctctttgggaatcaaatccgaagcatgatgcattangcgagcattgtctcggctccgtcctacgcgttcccttttctctctggctccgcttccacacaacatacg

SEQ ID NO: 438 - DNA, 262 bp, Glycine max
  unsure (1)..(262): unsure at all n locations
  Clone ID: 700906279H1
ctcacagatggaaccggaaganaccnccgcngccgccgacggaagcttcgacgaggggctgctcgggctannnnnnnnnnnnnnnnnnnnnnnnnnnnnagtaaagggtccgtggtcgccggaggaggacgccattctaagccgtctggtgggcaagttcggcgcganaaattggagcctcattgcgcgcggaatcagcggaagatccggcaagtcatgccggctccggtggtgcaaccagcttgaccccgccgtcaagcgc

SEQ ID NO: 439 - DNA, 157 bp, Glycine max
  Clone ID: 700906290H1
cagagaggaagagagacaaatgggtttgggaatgagaagagagtagaaacaaccgagagaaacacatagaaaaaggaggcatagccaacctattcaaaccatgatgcaaggctgtgaggttgatgccattggcataaactacacgatccacacaaca

SEQ ID NO: 440 - DNA, 274 bp, Glycine max
  Clone ID: 700906306H1
gttaaatgtggagtaaggggtaacactggtccagcctgcaatgtggttggaatgattgatcgaatgatattgggtatacaacacctgtacaagagaccaatatatgcgcggatgcctgaatgcagtattaattctcccaactatggaccattacctcctgatgctcctgcttggtgtcaggccccttttgatcctgaaggactcctaagttcagtgatggctattgtcacctgcttgattgggttgcactatggacatattattgtccatttta

SEQ ID NO: 441 - DNA, 271 bp, Glycine max
  Clone ID: 700906312H1
gttaataatcgatgttgtattaatcaaataaccgatgtacaataacgtttatgcagtagtggttgtgtttgaagattgagggctatatatcttttgggtcgaattataattcgatcctcataacttagcattgatgcatgttgtgcttgaggttcaaggactatttatccttccgatcggatcacaatttgatctcacaatttagcctcaccttatgcttgagacttgaaggttatgtatccttcggattgaattatgcgaccatgcattt

SEQ ID NO: 442 - DNA, 271 bp, Glycine max
  Clone ID: 700906338H1
cactaactaaagccgagcagcgagagagagaaaccctagcaaaaatgccggctggtcacggtttgagatcccgcaccagagattccttctctcgtcccttcaggaagaagggtaccatcgccctcaccacatacctcagaacctaccacgtcggcgattatgtcgacgtcaaggttaacggcgccgtccacaagggaatgcctcacaagttctaccatggccgcaccggtcgcgtctggaatgtcaccaaacgtgctgttggggtcgaagt

SEQ ID NO: 443 - DNA, 272 bp, Glycine max
  Clone ID: 700906352H1
caaagaaaaaaaaaaacccttagccaacacaaccatcatggccacctctgctattcagcaatcagcattcactggtcaaactgctctgaagcagctcaatgagttcgtccgcaagaccggtggcgccggcaaaggtcgcactaacatgcgccgcaccgtcaagagtgctcctcagagcatttggtatggccctgaccgtcccaagtacttgggtccattctcggagcagattccatcatacctgaccggagaattccctggtgactacggat

SEQ ID NO: 444 - DNA, 106 bp, Glycine max
  Clone ID: 700906391H1
caagttttctggtgtaatgaacattttgccagtgaggccctagcagcctaatctgctttttgtggttatatggtcctgtataaaatttaattacagcagctcttct

SEQ ID NO: 445 - DNA, 260 bp, Glycine max
  Clone ID: 700906396H1
ttacaaattgtcatacttgttgttggaactagaggcgacgtacaaccttttctggccattgcaaagagacttcaggagtatggtcatcatgttaggctggcaactcatgataattttaaaacatttgtgaagtcagctaatgtagatttctatcctctgggtggtgatcctcgtattttggctggatacatggcaaggaataaaggtttaatcccttctggaccggctgaaatatctgtccaaagaaagcagctgaaggc

SEQ ID NO: 446 - DNA, 265 bp, Glycine max
  Clone ID: 700906442H1
cgaaatctttaatccacagcatgtgctttacgctacctgtatatatgtaagatggtcaaaattcttcaaatactttttttattgtataggagcagaaccagaagagaaggctcaaccacaaagggatccaatttcatttttcatcttcctcttcttcactctcttttatggctccaagcaagctcaattcctcgggaaatactagtatgccatgttcacaggctgagaatggttttgtcaattccttttctctcttccccgagaa

SEQ ID NO: 447 - DNA, 269 bp, Glycine max
  Clone ID: 700906468H1
ccgggcaatgggttttctccccagaaatcccaaccgatgttattgttgcagttggagaatccactttttctctccataagtttattctggcggctaagagtaactacatcagaaaagtgataatggaatcagaggagagtgacctaacaagaatagagatttccaacatacctggaggacaagaagcttttgagaaagccgcgaaattctgttacggcgttaacttcgagatcaccgttcacaacgtggcggcgctgcactgcgccgcc

SEQ ID NO: 448 - DNA, 259 bp, Glycine max
  Clone ID: 700906470H1
ccggagtttgattcaccggtcggagagtttctgcggcggtggagggttgcggagggatcagtttccgaaggggtttcggtcggagagggagcgatcgcggagggaggggagcgtgtcgtcgaccgcccgccgtttcgtccatgcagccgctgccttctcctaaccccgtcgacacctccgctgtttctcagagactccaaaaggaattaatgactctcatgatgagtggaggagatcttggggtatcggcttttcctga

SEQ ID NO: 449 - DNA, 266 bp, Glycine max
  Clone ID: 700906495H1
ctctggcaaagcacctgttagaccaaaagttcatttatcatgtagcccgggacagaaaatctcatcaatcaaatttgctagctttggtactccagcaggttcttgtggaaacttccatgaaggaagctgtcatgctcacaagtcttatgatgcctttgaaaggaattgtgttggacagaactggtgcacagtaacagtgtcacctgaaaattttggaggagatccatgtccaaatgtcttgaagaaactctcagtggaagctattt

SEQ ID NO: 450 - DNA, 79 bp, Glycine max
  Clone ID: 700906502H1
agcgatatctgaaacaggctattgtagacaagaatccagttgttgcaagtgcagccctagttagcggcattcatatact

SEQ ID NO: 451 - DNA, 258 bp, Glycine max
  Clone ID: 700906522H1
caagcaccgcgcgcaggagtatgtcagccacgacaacgcagcagcgcttctggctgctggccttgctcgcacctttgacagaatgccttatctgctgtctctgtcttcctttgtggctgacgatgttgccgctgctgttcctgctgctcaagatctgggggagcagtggtcttattaatggatgtgcttcaattcaaatagtctcgcactagtcatcattccctttgtttctgttgcttgcttggttgttcttcttct

SEQ ID NO: 452 - DNA, 254 bp, Glycine max
  Clone ID: 700906527H1
gagctattgggagctaggaaggcataccattccctctttgaccactccattgaagaagatgttgcctctcacatccatggcattgaaagaaagctattggttgccctactaagtgcctatagatacgaaggaacaaaggttaaagatgacactgcaaaatcagaagccaaaatcctttccaatgcaattaagaatgctcataagaagcctattaatgaggatgatgaagtgataaggatattggcaacaagaag

SEQ ID NO: 453 - DNA, 256 bp, Glycine max
  Clone ID: 700906541H1
ctctattttgcgttcattctgttttccagttgaagtctttccctagccaatggccactgatcgtttgacccgggttcacagtctccgtgagaggcttgatgaaaccctcactgccaacaggaacgaaattttggcccttctgtcaaggatcgaagctaagggcaaggggatcctgcaacaccaccaggtcattgctgagtttgaggaaatccctgaggagaacaggcagaagcttactgatggtgcctttggagaa

SEQ ID NO: 454 - DNA, 109 bp, Glycine max
  Clone ID: 700906544H1
tgagattttgccacactgtagaaggggtgttcttgtaatttcatcgcttggaatcatccagaagcaaacccccactttagcctctttgtttttgttctgttcctactcc

SEQ ID NO: 455 - DNA, 90 bp, Glycine max
  unsure (1)..(90): unsure at all n locations
  Clone ID: 700906560H1
cttcgatcaaaccgttcgagaaataaagagagaggtgaatctgaaggtgctcacaattccacacaacatcacgagtcgcgcganaggggg

SEQ ID NO: 456 - DNA, 59 bp, Glycine max
  unsure (1)..(59): unsure at all n locations
  Clone ID: 700906665H1
tttcccttctgagcttngattagtgnggcctagttgttgttttctccgacccncnangc

SEQ ID NO: 457 - DNA, 266 bp, Glycine max
  Clone ID: 700906723H1
gtttctgaacgtgttgttcatttggctttcctcccaagtgctgggattggccatcttaacccatgtcttagaatagcagcactgttcctccgctatggttgcaaagtcactctcatcactcccaaacccacagtctctctcgctgaatcaaacctcatctctcgcttctgttcttccttccctcaccaagttacccgaacagacttaaatctcatccctttggatccaaccacagttaacaccagtgaccctttttggcttcagtt

SEQ ID NO: 458 - DNA, 271 bp, Glycine max
  unsure (1)..(271): unsure at all n locations
  Clone ID: 700906733H1
agtttccctaccggtcaggccctgggtggccacaagcgctgccactacgacggcgggaacaaccacagtaacagcaacgccaacggaaacaacagcagcggcgccactacctccgacggcggcgctgcctcctcctcccacacgctccgtgggtttgacctgaaccttccggcgccgctgacggagttctggangccgatggggtttgatttcgggaagaagaaggtaggcggtgaacaagaggtggaaagcccgttgccggtaaccgcca

SEQ ID NO: 459 - DNA, 265 bp, Glycine max
  Clone ID: 700906740H1
ctgaatcatccttctcatgctgcaattggacttagactcagactcaaaccctacccaaccaatttcacctgcaaggcagttttctccgacgatgccccctttgccgccgcaatcggtgcttgcatgttcacttctttgcttttaccagtctctacttcctccgaagacgacgatgccgactccgccgtcaccacaaccgacgcaaggctcgccgtcatggggattctcagtttcatcccttatttcaattggctcacttgggttt

SEQ ID NO: 460 - DNA, 262 bp, Glycine max
  Clone ID: 700906801H1
cagtaattggtgtggattcgaaaaagatgaaggtttggagatgggtggtgagtttgatgttagtggggttactgcccgtgtcaacaatgggtcgattcgtggtggagaagaacagcctgagagtgacatcgccggaaaaataagagggacacacgacagtgccattggcaacttcggaatacctcaatacggtggtagcatggccgggaacgtaatttaccctaaggataacaaaaagggttgcaaagagttcgatgagttc

SEQ ID NO: 461 - DNA, 259 bp, Glycine max
  Clone ID: 700906813H1
gtcagtttcgggggaagagatccagcagcaatggtgtacgtcaaggctcagaaatcaaaagcctacttcaagagatatcaagtcaagttcaagagaagaagagagggaaaaaccgattaccgtgccaggattcggtgattaatcaggacaagaacaaatataacactccgaaataccgatttgtggttcgctttagcaacaaggacattgttgcacaaataatatctgctagcattgccggcgatttagttcttgctac

SEQ ID NO: 462 - DNA, 246 bp, Glycine max
  Clone ID: 700906858H1
cccaaattgaaagttcctttcatacttaggacgcctgacatgtcagccatgcaccatgacacaagttctgatctgaaagtggttggaaacaagttaaaggatatattagagatctcaaacacatccttaaaatgaggaagatcgttgttgaactgtgtgacattgttgctactcgcggagtcggcttgctgctgctggtattttgggcatccttaagaaaataggaagagacacagttaaggttgg

SEQ ID NO: 463 - DNA, 270 bp, Glycine max
  unsure (1)..(270): unsure at all n locations
  Clone ID: 700906912H1
caaaaactcccgttttctctctctgtttttccatggccatctgatcaaacttttcttgattctctctctcagtttttgctattctgagtgatgggtatgccctgccgctgttcccacacctcccacatcantgaaatcatcatcaccagcttcttccgccacaagtcttaaattacaacaatttccctcaattattcatcaaccaaccaccttaatagccttttccaatggttccttaaagatccaacttggtcggagtaaacatggcgg

SEQ ID NO: 464 - DNA, 265 bp, Glycine max
  Clone ID: 700906929H1
aaaatttagaaacaaaaacatgttggtgaaggtgtacggtccaacctatggagcccccaagagggtgctggtgtgtctgattgagaaggaaattgagtttgaaacagtacatattgatctcttcaagggagagaataaggaacctgagttcctaaagctgcagccatttggatcacttcctgttattcaagatggtgattatactctctatgaatctcgtgcaataatcagatactttgcagagaagtataaagaccaagggaca

SEQ ID NO: 465 - DNA, 261 bp, Glycine max
  Clone ID: 700906939H1
ggaaatatcaatatgctgcttgacaatgtaacgagcactagcactagcactaacactagcaaatatcctctattgagaagaaggcgtaggttgattgttatagcacttgatttgtatgacaataatggagctccggagaagaaaatgattgagatggtgcaaaagataattaaagctgtgcaactagaccctcaaactgctagagttacagggtttgctttatcaactgctatgccagtgatagaaacagtagagttccta

SEQ ID NO: 466 - DNA, 256 bp, Glycine max
  Clone ID: 700906968H1
agtaactgccctctttggcggtttcattctttggaggcatgacgcagaagccttatggtttacagcagggtctgttctgaatgctatgctttctgttttgctcaaacgtatactgaatcaggaacggccttcaaccctgaaatctgaccctgggatgccatcatcacatgcacaatccatattctttactgtcttctttgttattttgtcaggcgtagaatggcttgggctaaatggattcaccattgccatcagt

SEQ ID NO: 467 - DNA, 266 bp, Glycine max
  Clone ID: 700907037H1
gattacccatagatagagagcgcggcataacctaaacttacccttcttctctctgtgtgtgtgcgcatcaaacgcaaccagaagcagccatggccactgcaagaactgtgaaggacgtttctcctcatgagttcgtcaaagcttactcttctcacctcaagcgatctggcaagatggagctgccagagtggctgatattgtgaaaactgcaagatttaaggagttggctccttatgatcctgactggtactatgtcagagctgctt

SEQ ID NO: 468 - DNA, 56 bp, Glycine max
  unsure (1)..(56): unsure at all n locations
  Clone ID: 700907048H1
ccactctncagttagannggaaccaccaatgccaacgtgctgnccatacnaccntg

SEQ ID NO: 469 - DNA, 262 bp, Glycine max
  Clone ID: 700907076H1
attttgataggacgaccctttggtgtttggatcttcaagaaagagagacccttgggatttcgtcaccatgagtctcttcggtcttggaaacagaaaccaaaaaacatttcgtccaaaaaagagtgctccatctggaagtaagggtgctcaacttcaaaaacacatcgatgccacgttgggtagtgggaacttgagggaggctgttaaactgcctcccggtgaagatattaatgaatggctagctgtaaacaccgtggacttc

SEQ ID NO: 470 - DNA, 262 bp, Glycine max
  Clone ID: 700907080H1
ccaagtgaaaaagcaactaagcatagtgtgtaagaaagggagaaaaacaagtgctgtgtagagagaaaaatggctaggtggtgcatgatcttggtggttcttgctcttgccgtggttgcaagtgccagaaacatgcccaatgacgctggtttggaggaccagaagaacttccttgggtatgggttttcggagttggcaacaatggccttccctttggtggagtgggttctgggtttgatggtaatatgggtgggccttctgg

SEQ ID NO: 471 - DNA, 250 bp, Glycine max
  Clone ID: 700907118H1
ttccgtttcctagtctcacacccaaacctcatggaaggctctgtcaacgaacgtcttgattttgggaagatgggatatgggtgcaatcattaccggagaagatgcaggattcgtgctccctgctgcaacgagatctactcatgccgtcactgtcataacgacgctgcgagcttgttgaagaatccctttgatcgccacgagctcgttcgccaagatgttaaacaagttgtttgttcagtttgtgacactg

SEQ ID NO: 472 - DNA, 248 bp, Glycine max
  Clone ID: 700907135H1
gtatattattaaactgtgcaagatcatatagtcgctttgaatgtggtccacatagcttattttgcattaacttttctactctagcaaagttcattgtgcaggctagctaccataaaaccctggtaaaatgctcaaagaaaatattgttagtaattgaatgacttgatgaaaaggactataaatctgtaaggcatagaatgtgtcctgccattgcagaatgtgagagatttggcactgtaatggtcaag

SEQ ID NO: 473 - DNA, 248 bp, Glycine max
  Clone ID: 700907138H1
aatactagtacagataaagaatgctcatcaagcaaaaaagttaatcatccttgtaatctttgcaaggtctagtttcaaaaccaccaccttccctctcctccaacgtgtatggcatgtaggtacccaagattttgtcccacataacgaagaatggctgcgagaagttgtacttgttgccatagagctggtgatgtacatcatggtaggctgagttgtttttgaaaaagatgtggaaaaggttcccgggg

SEQ ID NO: 474 - DNA, 246 bp, Glycine max
  Clone ID: 700907155H1
agaaggcaagatgtcgaagagaggacgcggtggttcggcggggaacaagttccggatgtcgctgggtctgccggtggcggcgacggtgaactgcgccgacaatacgggggcgaagaacctctacatcatatcggtgaaagggatcaaagggcgtttgaaccgtctcccctcggcttgcgttggcgacatggtgatggccaccgtgaagaaggggaaacccgatctgaggaagaaggttttgccagc

SEQ ID NO: 475 - DNA, 242 bp, Glycine max
  Clone ID: 700907157H1
ccaacatcttgcttgatgagaatttcacagccaaggtttctgattttggtctttcaaaggatgcaccaatggggcagggtcatgttagcactgctgtgaagggtagctttggttatcttgaccctgagtacttcaggaggcagcaactgactgaaaagtctgatgtgtactcatttggggtggttctgcttgaggcactctgtgcaagaccagccatcaaccctcagttgccccgcgaacaa

SEQ ID NO: 476 - DNA, 248 bp, Glycine max
  unsure (1)..(248): unsure at all n locations
  Clone ID: 700907167H1
ttcacagctgatctatttgccatgaaccacacagatttcattntcnaccagtaccttccaggagattgctggaagcaaggacactgttggacagtatgagtctcacacagcctttacccttcctggactctaccgtgttgtgcacggcattgatgtctttgatccaaaattcaacattgtctcccctggagctgatcaaaccatttacttcccccccaccgaaactagccgtaggttgacctccttcc

SEQ ID NO: 477 - DNA, 258 bp, Glycine max
  Clone ID: 700907214H1
ccaacttggtcccatatcccagaatccatttcatgctttcctcctatgctccagttatctctgctgagaaggcctaccatgaacagctttcagtggctgaaattaccaacagtgctttcgagccatcgtccatgatggccaagtgtgaccctcgccacggaaagtacatggcatgttgcctgatgtaccgtggtgacgttgtgcccaaagatgtgaatgctgctgttgccaccatcaagaccaagaggacaattcagt

SEQ ID NO: 478 - DNA, 254 bp, Glycine max
  Clone ID: 700907219H1
ctaagatagatctcgagatgggtcgtggcaagattgagataaagttgattgagaaccccaccaacaggcaagtcacctactccaagcgaaggaatggtatcttcaagaaagctcatgaactcagtgttctctgtgatgccaaggtttcactcatcatgttctctaaaaacaacaagatgcatgaatacattagccctggcctcacgacaaaaaagatcattgatcagtatcagaagactttgggggatattgat

SEQ ID NO: 479 - DNA, 254 bp, Glycine max
  Clone ID: 700907227H1
gtcagccgaaaagataattctagtgaagagatggatagactaagacgtttgtggatgtctcttcttccatttggatttctgttgttctttagttcagctttcatcggagtacctggtgcccttgcctggagcaaagagggtcatgttatgacatgccaaattgcacaggcacttttagagcctgaggcatcggaagccgtgtaccaattgttacctgaccatgtcaaaggtaacctatcagccctctgcacatg

SEQ ID NO: 480 - DNA, 255 bp, Glycine max
  Clone ID: 700907234H1
gggtttgccgtgtttgcgttctttgttccatcggagaagacccttttcccttttagcttcactcttttctctctctttatctgtcaacgatccaagtctacttctgaagcatctttttactgtcacttgacatggcatcaagacaccgtgttcacagagaacccttgaatgctcgaaggggttacccaccggaagggccatatgctcgggtggctcccatgcctcgaccactgcctcctattcctcctcatccgt

SEQ ID NO: 481 - DNA, 107 bp, Glycine max
  Clone ID: 700907235H1
gagggatccttgcttctgtggactcaagagtgctagttttggcaggatcaacagtgggtggtggctctgctgttaattggtcagcctgcattaagaccccacacaac

SEQ ID NO: 482 - DNA, 276 bp, Glycine max
  Clone ID: 700907301H1
ctaccatccagcgatctgaaagtgtaaattccttctttgacaaatatgttcataagaagacctctgtccaagattttgtcaaacagtatgaagcaatcttgcaagacaggtatgaagaggaagcaaaagcagattctgatacatggaataaagtggcaaccttaaaaactccttctcctttggagaagagtgttgcagggattttcacacatgctgtattcaagaagattcaagctgaggttattggtgcagttgcttgtcatcctaaagctgaca

SEQ ID NO: 483 - DNA, 270 bp, Glycine max
  unsure (1)..(270): unsure at all n locations
  Clone ID: 700907314H1
gtgaaccttctagaactataatagacttatattccatggctccgccgctcgaacacaacggcgtttccaccagcggtgactctctgagatctattccgacgccgtttctcaccaaaaccttccaactcgtcgacgatcacaccatcgaccatgtgatttcgtggaacgattctggatcgtccttcatcgtctggaacaccacggtttcgccaaggntttgttccnaaatatttcaagngcnncaactnctccagcttcgttngcnaatca

SEQ ID NO: 484 - DNA, 273 bp, Glycine max
  Clone ID: 700907315H1
gcagagagtaacctctcaatcctagcttcaattatattgattttttcacatttctaaatccacctctaccatatatatctccctctaattaaacctctctatccatatctaaaatttcaaaaagatctcaattaattagatttccctctctctttctctctctaactatattgcaaacctttccctctgctttcaaaatcagcaaattcatgggtcttagagacattggtgcttcactgcccccagggtttcggttttacccgagtgatgagg

SEQ ID NO: 485 - DNA, 273 bp, Glycine max
  Clone ID: 700907328H1
cactccctcctcttcacacattttcttagctctctccaacaatccctctcgttcacactttcagattgtgtgaagatgggggctggtggccgaactgctgttcctcctgccaacaggaagtcagaggctgaccctttgaagcgggtaccatttgaaaaacctcagtttagtctcagccagattaagaaggccattccacctcactgtttccagcgctctgttctccgctcattctcctatgttgtttatgacctcaccatagccttctgcctc

SEQ ID NO: 486 - DNA, 270 bp, Glycine max
  Clone ID: 700907347H1
ctctaccactccgattgcatcacgccgtggatagaactcaactcgtcgtgtccgctatgcaggtttcggttggaggaagaagaggaggaaggtggtgacgccgacgctgacgccgacgccgttatgacggagatcaggagggagatcattgcgaggctgacggagctgacggaggaggatttctacgggctcaggaccacgctcagccacattgcctcgcgccacgcgctcatcgaagagaaccagaatcatcgcgcgcagattggcgag

SEQ ID NO: 487 - DNA, 269 bp, Glycine max
  Clone ID: 700907370H1
ctgcaattcactctgtacaattcttcgttcgttctctgcagttatatcctttttgagcttcaatggcggacgctgaaaccttcgctttccaggctgagatcaaccagcttctaagtctcatcatcaacacattctacagcaacaaggagattttcttgcgtgaactcatcagcaatgcttctgatgctttggataagattcgattcgagagcttaaccgacaagagcaagctcgatgctcagccagagctcttcattcgtcttgtgcct

SEQ ID NO: 488 - DNA, 268 bp, Glycine max
  Clone ID: 700907378H1
cccaagagttgaagaagaatcagagttcagaatccatggcaggtgctatagtaaagtacggaatcataggagtaggaatgatgggtagagagcatcttgtgaatttgtaccatcttcgcacccaaggcgtggcagttgttgctattgctgaccctcatcttccctctcaacaactcgctcttgacttagcacactcctttacttggcctctcaaggttttctcaggtcaccaggagctgttggacagtggactatgtgatgttttggt

SEQ ID NO: 489 - DNA, 266 bp, Glycine max
  Clone ID: 700907395H1
aaattaacacccctgaatttcacactccctctcccaaactcatcatcctataatacaaagggtttggaatatatatcaaatatcaaaatacatcacaacatcaaaatggcctcaattgttactatggccaccattgtcacattagtcctcgcactagcatgttgtggcatgtctgccccgacctcagtgccgaaaaccactgcagcggccccggccccggagagcaatggctgcttgatggcactagcaaacatgtcagattgtct

SEQ ID NO: 490 - DNA, 261 bp, Glycine max
  Clone ID: 700907401H1
gcaaccctttggatgccacttgttccaatgcttcggaatatgtcttttgggatagttatcatccaacagaaggagtttacagaaagctcgtaaattatgttcttgaaaagtacatagatcgattgttttgagctcgattaagtttgcctacgggaagtaatatcaattattagttatgttgatgtcaacgaagacaatgagtattttgatttgtcgagttttggtgtgattgttcggtactttttgtagatttcaatgttc

SEQ ID NO: 491 - DNA, 257 bp, Glycine max
  Clone ID: 700907407H1
agcagtggcactccgcgtgcaaggtgatcgttcagtgttctttgattgcgctatgcgtggttaccaagacacattgtatgcccacgcccatcgtcagttctaccgcaactgcgaaatctctggaacaattgacttcatcttcggctactccaccaccttgatccagaactcaaagatcttggtgaggaaacccatgccaaatcaacagaatatagtggtggctgatggcacaggccagaagaacatgcccactggag

SEQ ID NO: 492 - DNA, 161 bp, Glycine max
  unsure (1)..(161): unsure at all n locations
  Clone ID: 700907410H1
caggattgtctgaggatttgatttccaagtatttgacagaaacantatactgttcatctgagcaaagttcaagaagaagaagcttgttgtatatgtcctcctcatggaagggtgtcatcatcagatgcaaatgcttttaatcacgaggcaagtcatttcct

SEQ ID NO: 493 - DNA, 259 bp, Glycine max
  Clone ID: 700907460H1
gtgatggtcttggtgctgagattgttggcactttcatccttgtttacaccgttttctccgccaccgatgccaaacgtagcgccagagactcccacgtccccattttggcacccttgccaattgggttcgctgtgttcttggttcacttggcaaccatccccatcaccggaactggtatcaaccctgctcgtagtcttggtgctgctatcatcttcaacaaggaccttggttgggatgaacactggatcttctgggtggg

SEQ ID NO: 494 - DNA, 254 bp, Glycine max
  Clone ID: 700907475H1
gcgtgacaaaagcaaaaggaaagaatatcaacaaggtaaagtagattccttactagacatggcgttgaaggacacattctacatatctcatggatcaccaactttgtccatagatgaatccattcaggccaggaagttccttcagtcatggaagaaggacgtgtttcctcaaagaccctcttcaattcttgtcatctctggtcattgggaaaccgcagttcccacggtcaacgtcgttgactccatcaacgaca

SEQ ID NO: 495 - DNA, 263 bp, Glycine max
  Clone ID: 700907502H1
gtttttcaggtgtcaagcatgcaacaggacttcagaattgttgggttgggttaaagatgtcttccagcactgtgcaccgtcatgggatggagaagccttaatgagggaacttgattatgttagtaggatctttcatgggagtaaagacccccgaggaaggaagctattttggaagtgtgatgatctcaaggaaaaatttttaagtaaaaaaatggattcaaaagctgtttgccgggcaatactgatgtttttccaagagcttg

SEQ ID NO: 496 - DNA, 257 bp, Glycine max
  Clone ID: 700907508H1
aagcgaggtgtgggggcaacacgtccccgtgaataactccattgaggcattgacagcaacacgtcatcgtttcgtgtgctgctaccgtctgggcgcacgttagactacacctgtcctatgtcatttgctccatcctcgtgcccccctctcgtcgtttttaaaccaaatactattagttatttaatatcattaagatattagtatatctatttctctttctctgtcatacataaccttttacaagagttattaaaata

SEQ ID NO: 497 - DNA, 254 bp, Glycine max
  Clone ID: 700907511H1
acggttcagcttggaggcagccagagaaggaggagatggcgcataaagttagctcgtaagatcagaattcccaaaatctcttctccaaagaaattggtgctgtgggtcagagacgcctacgtcaggatgatgctgggtatggctaactccatgggtgcctccgccgtcggctacggcggagacgccgcgttcaccgccaagggtggattcgagagggccccaccgcccaaggagtacgaccagaagatgatcat

SEQ ID NO: 498 - DNA, 256 bp, Glycine max
  Clone ID: 700907519H1
ggttgataagtactactataatagtataactaaggaaggagtaagggtgatggtggttctgatctgacttttggcggtgtgggagtcacgagagcagcaaggggaagtcacaagagtcacaagaatggagagaggttcgggcaagctgagcaggaagaaaagtggtggtggaaacggacaggttctagacggttctaatattatggagttggttggaaaccagcaagttttcaccaccttcgtggaccataagttt

SEQ ID NO: 499 - DNA, 254 bp, Glycine max
  Clone ID: 700907525H1
aactcaatttttctctcaaccggcccaatttagcataagcccagcatggccaccgcaacagcagcagccacctcgtccttcatggggacgcgcctcctggaggcccactccggggcggggcgggtgcaggcccggttcgggtttggcaagaagaaagccgccgccccgaagaaagtttccagggggtcgggctctagctccgataggcccctgtggtatccgggcgccaaggcgcccgagtacctggatgggag

SEQ ID NO: 500 - DNA, 252 bp, Glycine max
  Clone ID: 700907528H1
tggcgtccatggccactttcttcacccaaacctccttcccctcccactctctctccaaaaccttcgatacccatttcgccccatccccgaaagtcaacgtatttgcgaacttcccggcgaggaggcacgtgggggttcgagtttcgaacgcgctgatcgaaccagacggagggaagctggtggagcttgtggtgagggataattcagaaagagacttgaagaagggtgaggctctttcgttgccgaggatca

SEQ ID NO: 501 - DNA, 258 bp, Glycine max
  Clone ID: 700907534H1
cttctctggttgattcggatctagagtcttcagtttctcctcgttgttcttcgctttcctgttttcaatttcgattctttcgttaatttaataagatgtttgggagggcaccgaagaagagcgataatacgaggtactacgaaatcctcggcgtctccaagaacgcttcgcaggatgatctgaagaaggcttacaagaaagccgccattaagaatcaccccgacaagggcggtgatcccgagaagtttaaagagctgg

SEQ ID NO: 502 - DNA, 253 bp, Glycine max
  Clone ID: 700907535H1
aggtggtctcagtgtggtttatcatcaacttgacgtagtagactattcatccatcaaccagtttgttgagtggttgcgggaaaattgtggtggtttagatattctggtaaataatgctggtgttaattttaatcttgggtctgataactcagtcgaaaatgctcgtaaagttattgaaacaaattattatggcaccaagcgtatgactgaagctattatttcattgatgaagccatcccttgttggtgcgcgt

SEQ ID NO: 503 - DNA, 251 bp, Glycine max
  Clone ID: 700907539H1
gaatggtataatactaatgtggggcctttagatcaaagaaagagcaccgtggacccagcattggtgactgctgaagaaggcgctaaggttgtaaaggtgatgcaagatggcagtggggaattcaagaccatcactgatgccattaaaagtatacctagtgggaacactaagcgtgtaattatttacattggagctggaaattataatgagaaaatcaaaattgagaagacaaagccttttgtcaccttgta

SEQ ID NO: 504 - DNA, 251 bp, Glycine max
  Clone ID: 700907542H1
tccaaatggccctttacattacactaataattggcctcctagtaaacaccctagtactctataaatagcatttgcatgcaccttagtcttcaccaaaatactcctcttggcatcttgtgttgtgtccctcttttaagctatttccttctcttaacacaattggttgtgccaattgccatagtcaccaaccaattaacaaaggtatatatatcatcatatcatcaccaaatgaaaaatattgggttgttttt

SEQ ID NO: 505 - DNA, 257 bp, Glycine max
  Clone ID: 700907549H1
ctggttttctgctatgactatgaagagtgtgggaagtgctgctctgaagatggttgaagaagtacgcaggcaattcaacaccattccagggttgatggagggaactgctaagcctgactatgccacatgtgttaagatctccactgatgcttccattaaagaaatgattccacctggtgctcttgtcatgcttacaccgcttgttgttggaatcctttttggtgttgaaacactttctggtgtcctagctggatctt

SEQ ID NO: 506 - DNA, 253 bp, Glycine max
  Clone ID: 700907551H1
atagcccaagccctatacaaccaaaccctaacacacacccatttgattcagtttccatggctagcctcaaggttgcatttttggctgcagtgctctgcatggttgtggtgagtgcacccatggcacatgcagctatcacgtgcgggcaggtgacgaatagcctgatcaattgcatcggttacctccagaacggaggaacgccgccgtcgggatgctgcaacggagtgaagagcctcaatgccgccgccaagac

SEQ ID NO: 507 - DNA, 249 bp, Glycine max
  Clone ID: 700907554H1
agttgctcttcttctttttttcttttctttcaccctcaaaatttctcactctctttatcttcaccttttcagtttaaagcttcagatcacaacagatccaccattcacctcaccactttctcttcacaaggcaaatctaacaagaaaaagtagtctctgaagccgatccagtgtcttgtgaatttggaattggtagtgaatttagatctaaaaagccatagcaatgtcttttatcggtacccagcaaaa

SEQ ID NO: 508 - DNA, 250 bp, Glycine max
  Clone ID: 700907555H1
gctgattgttgtgttcttgtatatgatgttaattcaatgaaatcatttgacaaccttaataactggagggaggaatttctgattcaagcaagtccttccgatccagagaattttccttttgttgtcataggaaacaaaatagatattgatggtggaaacagcagagtggtgtcagaaaagaaggctcgggcttggtgtgcatcaaaaggaaatattccatattttgagacatctgccaaagaaggtatta

SEQ ID NO: 509 - DNA, 254 bp, Glycine max
  Clone ID: 700907566H1
aacacaaagcacaaagcaaagctcatccttgagttaaaaaatggcagcagcttcttccatggctctctcatccccatccttggctggcaaggccgtgaagctgggcccatcagccccagaagtgggaagggtgagcatgaggaagaccgtcaccaagcaggtctcctcaggaagcccatggtacggcccagaccgagtcaagtacttgggcccattctctggcgagcccccgtcctacctaaccggtgagttcc

SEQ ID NO: 510 - DNA, 250 bp, Glycine max
  Clone ID: 700907571H1
gaactagaaagcatccctagcaaaagtcaaggttggccccttgcgtcaatcgccggcttcgaaatcgctgtcaattatggcatcacactgtgtaatggccgtgacgccctcaacccctcttctctccttcctcgaacgcctccaagaaacagccttcgaaaccttcgcccattccaacttcgatcccaaaacctacgtggacatgcctctcaagtccgccctcacggttaccgaggacgcgttccagaag

SEQ ID NO: 511 - DNA, 248 bp, Glycine max
  Clone ID: 700907573H1
ccaaaggccaatgaccaatatttgcctccttttgttattgttgacgagagtgggaaacctgttggtccgatagttgatggtgatgctgttgttacattcaacttccgagctgatcgtatgacaatgattgctaaagctcttgagtatgaaaattttgacaaatttgatagagttcgttacccaaaaatccgctatgctggaatgcttgaatatgatggtgaattgaaacttccaagtcattaccttgt

SEQ ID NO: 512 - DNA, 245 bp, Glycine max
  Clone ID: 700907575H1
cttagccaccaagtagagaccgaataacaatgagtattctcttcccaagaagttcctcagcagcaaagaggaaaagggtcattagagaacttgttcagggtcgagactatgctactcagttgaagtttctgcttcagaagcctattggccctgatgggtctgtttctgctaaggaacttgtggccaatgtgctgagatctttcgctgaaactctctctgtgttgacttcttcttccgaggattca

SEQ ID NO: 513 - DNA, 245 bp, Glycine max
  Clone ID: 700907576H1
ataaagtccgtgaaacaacagctttcatggttccattggtggctggtgatggaaccaaaactcaggcacttgctgtttgccactcagatacttctggaatgaatcatcacatgcttcatgaactcatgggagttgatcctggaactaaccctgtttgccatttccttggaagcaaggccattttatgggtacccaatttatctatggacactgcctatcagactaacgttgttgtttaattagtc

SEQ ID NO: 514 - DNA, 248 bp, Glycine max
  Clone ID: 700907584H1
caacgatcagcgcggttcaggtggagttcctggagtttccagcggtggttacttcaccagcctccggcaagacctatttcctcggcggcgcaggggagagaggattgacgattgaggggaagttcataaagttcacaggcataggagtatacttggaggataaggcggtgccatcactcgccgctaagtggaagggtaaaacttcagaggagttagttcacaccctccacttctacagggatatcatt

SEQ ID NO: 515 - DNA, 245 bp, Glycine max
  Clone ID: 700907585H1
ggagtgctgggggtgagattgcgcccaccactaggcactataggagtgtctccatggatagtttcattgggaagttgaatttcgatgaggagtcgcccaagctgcctccttcccccgggcagagaagtgctctgatgtcgcctgctggtggaattgatgggaattcggcggccttcagcttggagtttggaaatggggagttcagtgggcctgaactgaagaaaattatggccaatgaaaagctt

SEQ ID NO: 516 - DNA, 246 bp, Glycine max
  Clone ID: 700907589H1
catcaatcctcgttgctttatttgaggccacattatacgcatctctccatctctctctccttacctcctcaaaatgcgtcttcctcgccagctcatttgctctatgagatagaatctgcgcgagaaagcgacaccaatccttgcaatagagatggtggttaccagaaatattgtgttgttactgctttctattacttttgttgctccaattgtgctctacactgatcgttttggcaccttcaagta

SEQ ID NO: 517 - DNA, 254 bp, Glycine max
  Clone ID: 700907612H1
catagccgcgcacctgcccaagagaactgacaacgacatcaagaactactggaacaccaacatcaagaaaggactcatcggaaagggcttagatccccttacctacaaaccaataaaatccaacacttttcaagcctatggtggtaatttccttgacccttccattgacaccaccaatatgaaccatgtggctcaatcggagagtgctcaaatcgaagccgaagcaagagaatctatgttgcatttggatctct

SEQ ID NO: 518 - DNA, 252 bp, Glycine max
  unsure (1)..(252): unsure at all n locations
  Clone ID: 700907613H1
tgaaccttcnagaactataatagacttatattccatggctcngncgctcncaacacaacgncgtttccaccagcggtgantctctgagatctattccgacgccgtttcncaccaaaaccttccaactcgtcgacgatcacaccatcgaccatgtgattncgtggaagattctggatcncccttcatcgtctggancaccacngctttngccaaggattgnntcctananaattnaaggggaacaacntctcc

SEQ ID NO: 519 - DNA, 258 bp, Glycine max
  Clone ID: 700907621H1
ataaaggtgaaaaggagttgcactcactgaatgcggatagagttactcaaggtctaagtactgtatggagtttgattcttctaaggcctcccattcgagatacttgcttacaaattgctctacagagtgcagtgcatcacctggaagaagtgcgtatgaaggcgatacgtctggtggcaaataagctttatcctctgtcatccatttctaagcaaatagaagatttttcaaaggaaatgcttttctccgtgatgagtg

SEQ ID NO: 520 - DNA, 253 bp, Glycine max
  Clone ID: 700907625H1
gaccgacacgcttttattattaattgcgtccctttcttctctaataccctcctccgatggaaggaatgttacgcgactctctcttgtcgcttattatgaattactacaagtactcacaagagaacgtacgacaaggttttgttctttattttatcgtcaagagaaacagaggaggttgaagcaaagccagggtaagaggagaaagatagtctccctccatattgatttcaattgttatgaataaataaaaagg

SEQ ID NO: 521 - DNA, 250 bp, Glycine max
  Clone ID: 700907647H1
ctgaattcctcttattcaggaatttggagagtattgatatatcaaggtaggataaaccagtagccaaggaagatatggagttttctatgattttcattgttagcaacattatgctgcttttcagttcagcatttgccaaaactgctagtcctccctctctgagcccaactccagcaccagccccggcaccagacttcgtgaacctcactgagttactcagtgttgctggtccgtttcacaccttccttgg

SEQ ID NO: 522 - DNA, 253 bp, Glycine max
  Clone ID: 700907653H1
ccttggtgttggagatcgtgatgaccttcggtctggtgtacacggtctacgcaactgccattgaccccaagaagggtaatttgggaattattgctcccatcgccattggtttcattgtcggcgctaacattttgttgggtggggccttctctggagcggccatgaaccccgctgtgacatttgggcctgctgtcgtgagctggacctggaccaaccactggatctactgggccgggcctctcatcggtggtgg

SEQ ID NO: 523 - DNA, 248 bp, Glycine max
  Clone ID: 700907663H1
gagaaatagtgacatacttttcgtacccaaaaagagagagggactattcaaggtggccagacacgccagaagggtggagatcggtgactgaggaatacagcgacaaagtaatgggtctagcttgcaagctcatggaggtgttgtccgaagcaatggggttagagaaagagggtttaagcaaagcatgtgttgacatggaccagaaggtggtggttaattactaccccaaatgccctcaacctgacctc

SEQ ID NO: 524 - DNA, 263 bp, Glycine max
  Clone ID: 700907665H1
tttttcttccgattaaaaaaaaatcagtcaaataaagtgttgttcgcattttaatgcatgatcaaatgatcaaattttcatacacacttttatcgccccttgctcttgagacccaaaacacgtgacataaacgtgaatataaatacgaactcagtttctcaacactctacaatggtgacgacgcttctaaaattctaaaaccctaaccctaaccctaaggaaaaaaaatcccaatcttcgcaagactcgatgaacgtggatca

SEQ ID NO: 525 - DNA, 253 bp, Glycine max
  Clone ID: 700907716H1
gtttgttccagcgttggaaacgtgcgctcggattaaaataaccgacccgaacccgaaatgggatatggaaacaatgcccggtgctagagtcatgagtgacatggttttactcccgaacggcgacgttttgattgttaatggagcagccgtagggactgcgggctgggaattgggccgtaacccgctactgagtccgtttctttataaaccaaataatcgggtcgggtcgagatttgaggttcaaacatcgtct

SEQ ID NO: 526 - DNA, 238 bp, Glycine max
  Clone ID: 700907759H1
cataaatattccgttttgcgtttctctgcctaaaaggattgaaagatgggtcaagcactaggttgctatcaagttgatcagtcaaatgtggctatcaaggagcattttggaaaatttgatgatgtcctagaacctggatgtcattgcctgccttggtgtcttgggtaccagattgctggtagtttgtcactgcgtgtgcagcaacttgatgttcgatgtgagacgaaaaccaaggaca

SEQ ID NO: 527 - DNA, 241 bp, Glycine max
  Clone ID: 700907761H1
tatagcccaagccctatacaaccaaaccctaacacacacccatttgattcagtttccatggctagcctcaaggttgcatttttggctgcagtgctctgcatggttgtggtgagtgcacccatggcacatgcagctatcacgtgcgggcaggtgacgaatagcctgatcaattgcatcggttacctccagaacggaggaacgccgccgtcgggatgctgcaacggagtgaagagcctcaatg

SEQ ID NO: 528 - DNA, 228 bp, Glycine max
  Clone ID: 700907781H1
gtggcggggtagtgacattacagtgtgggcataaaattttcaaagtcgaagcgagaacttgccatttcgagggttttagggttagggttttctcaaattgcaagaacatgggtttcaacattcaaccctatgggattcagtccatgctcaaggaaggccataagcacctttctggcctcgatgaagcggttctcaagaacatcgacgcctgcaaacaactttccacac

SEQ ID NO: 529 - DNA, 236 bp, Glycine max
  Clone ID: 700907786H1
gaaaccttcgccaagaaccgtgaactcgaagtgatccactccaggtgggccatgctcggagccttgggctgcgtcttcccggagttgctgtcccgcaacggggtgaagttcggagaagccgtgtggttcaaggccgggtcccagatcttcagcgagggtgggctcgactacttgggcaacccaagcctgatccacgcccagagcatcctcgccatctgggccacacccattaggat

SEQ ID NO: 530 - DNA, 235 bp, Glycine max
  Clone ID: 700907791H1
cagtgttgtttcctccattttttttcttcttctcctctcaatgggttgcatttactcgcgagtctgcataggcgacaattgcagaggctccagcatcaacggagaccccatcgcgcgaaacgacgtcgccgaagtcgtgaatttctccccttcctcttcggatgttgaagaaggcgaaatcagagaccaattgaaccaattgagcatcaccagagactctgaagctggaatccga

SEQ ID NO: 531 - DNA, 249 bp, Glycine max
  unsure (1)..(249): unsure at all n locations
  Clone ID: 700907805H1
caaatattttttcacttgctctccatcttttttcagttcatcagnggccaggtaggccatgggangggctccatgttgtgacaaatccaatgtgaaaagagggccttggtctcctgatgaagatgccaccctcaaaaactacnttgagaaacatggcacaggtggtaactggatagctctccccaaaaaagcaggccttaagcgttgtgggaagagctgtcgtctaagatggctaaactatctcaggcc

SEQ ID NO: 532 - DNA, 255 bp, Glycine max
  Clone ID: 700907809H1
ctaacctacctctttttcttctctctcaacaacttcaccttcttcctcctcgatcatgtctcacttcaagggcaagtaccatgatgagcttatcgccaatgctgcgtacattggcactcctggaaagggtattcttgctgctgatgagtcaacagggacaattggcaagcgtttggccagcatcagtgtagagaacattaaatccaacaggcgagctcttagggagctgcttttcactgctcctggtgttcttca

SEQ ID NO: 533 - DNA, 253 bp, Glycine max
  Clone ID: 700907874H1
tgggattggagggattgacgctgcgtctcttcctcttctctttcgatccatccctcattcctaatcctccaatccaaccacctcagcctcacactcacatatacacatatctgaacgcgtatcgtccctcctatggcttcaaagcgcatcctcaaggagctcaaggacttgcagaaagacccaccaacttcttgcagcgctggtccagtagctgaggacatgttccattggcaagcaacaataatgggtcctg

SEQ ID NO: 534 - DNA, 248 bp, Glycine max
  unsure (1)..(248): unsure at all n locations
  Clone ID: 700907885H1
ccttgtttggggtttgcatttttcctggttgaaaaagggaagaacttgaactaattggttaagtnnnnnnnnnnnnnnnnnnnnnngggtataatattttatatcagttatnaaaggaaagaaaganagaaacgaagatgggaaggggtaaggtacagctgaagaggatagagaacaagatcaatcgccaggtaactttctccanncggagaagtgggttgctcaagaaagctcatgagatctctgta

SEQ ID NO: 535 - DNA, 261 bp, Glycine max
  Clone ID: 700907906H1
gaaagatgctgctcagaaaacattttttgatattttaaaaggtcgaggggaaaagcttttgcggtatcccccacttgttgctgttgatctttccccgccaccagcagtgagggaaggggtatctgtacttcttgaagttatcgacaactacaacagcatgatggttcctgcttctggccaaaaacctgcttttggtccagttatatctgctatactggatccaatagttcagatgtgtgaacaagcagggaggcacacaag

SEQ ID NO: 536 - DNA, 255 bp, Glycine max
  Clone ID: 700907916H1
actggctatgggctggttttctttgcccagctcatgcttgctgacatgaataaagaacttaaaggattaagatgtgctgtgagtggttctggaaagattgcaatgcatgtcttagagaagctaattgcttatggtgctcttcccatttcagtatcagattctagaggatatttggttgatgaggatggatttgactacatgaaaatatcatttttgagagacatcaaagctcaacaaagaagttacgagactatt

SEQ ID NO: 537 - DNA, 257 bp, Glycine max
  Clone ID: 700907924H1
tttttatgtcattaaagggagcaatggaaatcttaagacttccttttgtgctgatcaatcaaggtcttctcaggcaaatgatgtccgcaagcaaatcgttggcagcgctgttccagttcttaaaggcgaaaagttttccttgcggatactggtggaccattctattgttgaaagctttgctcaaggtggaaggacggttgtgacatctcgggtttatccaacaaaggcaatctatggagctgctagttgttcttgtt

SEQ ID NO: 538 - DNA, 259 bp, Glycine max
  Clone ID: 700907935H1
aaatttctctgaagtaatagaaattcttcagcagatagcaaaagaggtcaatgatcacaaagataaagcatcccatggctttctctcagctcttagacgggcccatcattgatattgatataagagtattacgcgacagtatagcctttttgtcctgtatagtagtcagactctgactaaatatctattgagttcgttgtttataatactcttgaaagattccgttgtattgtgtttgccttaaattctgttacaatct

SEQ ID NO: 539 - DNA, 256 bp, Glycine max
  Clone ID: 700907938H1
gtggtgctgcatttccgaggtgccgacgtgtcattgccggcgacgaattacttgattccggtggataacagtgggagcttctgcttcgcgtttgcgggaactatgagcggtttgtccataattggtaacatccaacaacaagggttccgggtctccttcgaccttgcgggttctcgggtcgggtttgcccctagaggttgcgtttgagacttgggaaatgggaacaactctttccctgttgtttctaattatgatt

SEQ ID NO: 540 - DNA, 257 bp, Glycine max
  Clone ID: 700907950H1
gcaaacatagcggtccctatcttgaaatagtcaattcctccatcccagcagcatgtcaacatgtctcagaagttgcagcataccgtctcatattccttgactccaattcagtcttctatggcagcctctatgttggtgacgtagccaactctcgcattaggccagcgctgaggatcctcaagcaaaacatcacgctgatgactacacttgtggcagatagagctcaagcacttgcaatgaaggaatgatgaaggcat

SEQ ID NO: 541 - DNA, 253 bp, Glycine max
  Clone ID: 700907956H1
ctgtatttcaaacacgtgagagaatcatttgagtctggcagccaaacttgtcttgcaaaagtcttggggatatatcaggttactaaaagacacgttaaaagtggaaaagaggttaaatatgaccccctcatggtgatggaaaatcttacctacaatagaaatattactcgccagtatgatcttaaaggtgctctttatgcccggtacaattctgctgctgatggagctggagatgttctgtggatcagaactt

SEQ ID NO: 542 - DNA, 248 bp, Glycine max
  unsure (1)..(248): unsure at all n locations
  Clone ID: 700907958H1
tctctnctnaaatgtttagaggcttcctnggccctctgtagcatttgtaatncatcctcctgaagatgcagttgtntncagtttgtggncatgttttctgnaaccaatgcatctgtgaacatcttaccggcgatgacaatcagtgccctgctgcaaattgcaaaagtcgactgagcacatctatggtattttcaaaaaccacactgnacagttgtctttctgaccagagttgtgatattcacccagtc

SEQ ID NO: 543 - DNA, 253 bp, Glycine max
  Clone ID: 700907970H1
cttgtattgtctcaagcaaccatggcaatggcaacccaagcctctctcttaaccccacccctctccggtctcaaagccagcgaccgcgcctccgtgccatggaagcaaaactccagcctctccttctccagcccgaagcccctcaagttctccagaacaatcagagcagcagccgccgacgagaccacagaggcaccagcaaaagtagaggctgcaccggtcgggttcaccccaccagaactgacccaaacac

SEQ ID NO: 544 - DNA, 137 bp, Glycine max
  Clone ID: 700907989H1
catcttgtcattcaccgagaaagtcgtactgattcctcttcatctttcgttaaagcgagtacttttcgttcttgatctgttggttacgatgtcgtattcaaggagatctaggtattctccttctccttctccttctc

SEQ ID NO: 545 - DNA, 146 bp, Glycine max
  Clone ID: 700907992H1
ctccaatctgtttctgattggtttttggttttttcttttttggccactgatctgttttagtgtgctgaggaatgtacatgtatcataattttactgagcatttatttgcccatgcagactccaatatatcgccccattttcctttt

SEQ ID NO: 546 - DNA, 243 bp, Glycine max
  Clone ID: 700907994H1
gttcaggatattgtttttattagttctgcatcgcgttttgctctggactctcaccgttccttcagagtggaaccctagttgtctctatccttaaggttccgccaccgcaccaagtctcagcacccaaccaggtcttctttcattcatggcggaggaacttatttctcaattaaacaatatgctagaagaaaatggaacaccaagtcatgtagaaagggctgctgatgctgagctgatgctgag

SEQ ID NO: 547 - DNA, 245 bp, Glycine max
  Clone ID: 700907996H1
cttcaaaaactttgcagagctacggaaaaagttactgccattttcattggcccttttcagttttggagaagtaaatggcctgttgacaagagatgattttcagagagcagcatcacatgtatgtggcatatctctctcggacactgtggttgaaattgttttccatttgtttgatgcaaatcgggatggaaacctaagttttgacgagtttgtcagagtgctacacaagcgcgaagggacattgc

SEQ ID NO: 548 - DNA, 251 bp, Glycine max
  unsure (1)..(251): unsure at all n locations
  Clone ID: 700908079H1
cactgtgttcctgtttttgttcttcgatggcngcaacctcaacatcactggcttctcaactctacattggcctgcgccgcccctgcctcaagctcgattctttcaattctcaatctttctctctcttcgaccctaatcttcgcctntccctctctccacccaaaccctcacgcgccgtcatcgccatggccggcaccgggaagttctttgttggtggcaatggaagtgtaacggaaaaaagatcaatcagc

SEQ ID NO: 549 - DNA, 143 bp, Glycine max
  unsure (1)..(143): unsure at all n locations
  Clone ID: 700908082H1
gncttgantccntactttgaacaccccaaattagaanagtgtgttgtgttgtgttnaagnagcngnctaacanagatgtttgggntncttaggnggcantaangggcacaanatcaangatatgtggtgttgatgagcaanaa

SEQ ID NO: 550 - DNA, 110 bp, Glycine max
  Clone ID: 700908108H1
actttgcgcagattgttgcctcgcgttgtggtggtatgtgatctggaacttcctctcactatggcgatgttcttgtcaattcttgttctgtagatctgatgattgttgtt

SEQ ID NO: 551 - DNA, 265 bp, Glycine max
  Clone ID: 700908153H1
aataacccacgcaaaaaccttaaattgcccattaaaactgaaaccccttttgttttttgccttagattacaactgcaaaagggtcacagcttctcgggtttgtttccttttgagaccacattcaattttttgatgtgaatcctcacaacaatgtctgggttggaggaattgagaaaaaagcttgcacctttatttgatgccgagaaggggttctcatcaagttcaacgttggacccttgtgattcttacacattctcggatggtg

SEQ ID NO: 552 - DNA, 225 bp, Glycine max
  Clone ID: 700908163H1
atttcaagggctgaaacatactatctttaactgtattctccctttgtttcctcaccagttgattcaggttgcaaacatggcttttccagacccatccatgtcagtttctccacagaggaagatgggaagggggaagattgagatcaagaggattgagaacactaccaatcgccaagtcacattctgcaagcgcaggaacggcttgctcaagaaagcatatgaatt

SEQ ID NO: 553 - DNA, 260 bp, Glycine max
  Clone ID: 700908175H1
ggttttgatgcaagctatgtatggagttaaggtggagactgtatttatttgcagggtgtttactgcagcattctctggctcgtcaaagaagttatcagacttgaatgtggccgacatacattcatgggctccagattttagaaggttgcaggatcttgtaaatgaggaaattagagttagattttctggtggtaaatttactgtattgaatgagttggaagcggttgatgcctctgtgaagatattatatcctactatcc

SEQ ID NO: 554 - DNA, 263 bp, Glycine max
  Clone ID: 700908178H1
aggtaagctaggacatcacttttttcataaaggcctgcttctccaggcatttgtacatccttcttacaataagcttggaggaggctgttatcagcgattggagtttcttggagatgctgtcttggattatttgattacttcatatctattctcagcttatcccaaactaaagcctggtcaattgacagatttgagatcattgtctgttaacaacaaggcatttgcttgtctagcggtagatcgcagttttgataattttcttt

SEQ ID NO: 555 - DNA, 210 bp, Glycine max
  Clone ID: 700908190H1
tgtgtgtctgtggggtgtgtgcgtgttaactttggaatggttttgatcattggaagccacttcagaagagaacctaatcaagttatagttattggaggtcgttttagcatcatgtgatcattttccttatcctttgtaaccttcgggaaatgtcacttgcaccttgaaaaagcacgagattgaaaaaatgaatgtaatatgtttgaagtt

SEQ ID NO: 556 - DNA, 270 bp, Glycine max
  unsure (1)..(270): unsure at all n locations
  Clone ID: 700908207H1
gtggttgcntcatctatgtnatgcacatcaggaantgcagtcatagngcagaagctgctcagtgtgctgttgctgttgctngtgttgtaatgcnggcccttggngccagaaacgatggtgtttgagcaaagacnacgtttctgctttacggaanattgatcctatggttagcaatganattacgtctgaagcatctgctgcggaggttgagggatatggtgcttcaaaactgcctcttgnactcggntgtgaaatacttgcagcttgctt

SEQ ID NO: 557 - DNA, 260 bp, Glycine max
  Clone ID: 700908241H1
ggcgctcgtcgcgttctaccagaagtacgttgatgaacagagtaagaaggagatcaaggacattctggtgaggtacgatcgtaccttgctcgtcgcggatcccaggcgctgcgagccaagaagtttggtgggcgtggcgcacgtgcgaggttccagaagtcttaccgttgaaggagaatggtggtgtttttgtgtttttttgtttttggttcggttcatgttttatgctgtggaaaaaatgaaaacttttgttggtggtt

SEQ ID NO: 558 - DNA, 264 bp, Glycine max
  Clone ID: 700908266H1
gttgttatgctaggaggaaggatacttgagatattgtccataaatcttgggcttagagaggattttctcctaaatgcatttggtggggaaaatgaccttggtgcttgcttaaggggaatttctaccctaaatgcccacaacctgacctcactcttggcttgtcccctcactcagaccctggtggcatgaccattcttctccctgatgaaaatgtgtcaggacttcaagtacgcagaggagaagattggatcactgttaagccag

SEQ ID NO: 559 - DNA, 256 bp, Glycine max
  Clone ID: 700908276H1
caacactgacagccagaatggtccgttaaaaaaatctagttctaggaaagttcaaagtaacaatcaatcaagattttcttttgcatggcaggaggaatccaaattccaagccatgtacctccatcttctggtgctacccagccatttccaaagaatggctcactcatccaggattttgtggaaagagacttttctttgaacaagctgggttttgcaaatggcttcccctccaataacctcaaggaatctggaaatc

SEQ ID NO: 560 - DNA, 99 bp, Glycine max
  Clone ID: 700908279H1
caaatgacttgctatttgggtcaaaaactacattttgtataaaatatcttggttttggggcttcctccttcaattcaaatgcatacatgttctccctcc

SEQ ID NO: 561 - DNA, 150 bp, Glycine max
  Clone ID: 700908291H1
agaagaccgtttcaaatatctgtgctctcaaggttccaagaaagtctttttgtagtactgagggtgtgaaagttgctggttgctctattccagaggtttccaatgaccagagaagaagcaggctattagcaaagttattccacacaacat

SEQ ID NO: 562 - DNA, 259 bp, Glycine max
  Clone ID: 700908303H1
gcagtgagatctgtatcgccaaaattcatgatttcgtgttgaatgcatcgtccgagttaggttaatttttcgacattttttggtgtaaaatggaggtgccaactaggagaaaacccgtgatctactggatttgccttttcgtcattgtcaatgcgtttgtacaaattagcaatgcattttatcttccgggaagctacatgcacacttactcaaatggagataatatatatgccaaggttaattcattgacttctattga

SEQ ID NO: 563 - DNA, 260 bp, Glycine max
  Clone ID: 700908304H1
gatagctagaagcaataagatgaaaatgaaagtgcttgttttgtttgttgctacagttttggtagcatatgaatgccatggctcagactaccagaagttccctctccaaatgaaaactgggtttggtgggcaatacagcaatgaggtggcatgtgccagttggaggcttggcgtggaagcaaacaacgtagtcaagtggcaaactgttcctgcagcttgcggagagtacatagctgactacgttctaggagaccaatata

SEQ ID NO: 564 - DNA, 257 bp, Glycine max
  Clone ID: 700908318H1
ttctcgttctggtttatagatctttgcgaaggaggtttacagcgctcaaccaaagatgcagaacgaggaaggacagatcactgagctttacattcctaggaagtgctccgccacaaacagattgattaccgctaaggaccatgcttcggttcagatcaacattgggcatgtggatgagaatggcgtctacaatggccatttctccacttttgccctctgcggattcatccgtgctcagggtgatgctgacagtgctc

SEQ ID NO: 565 - DNA, 261 bp, Glycine max
  Clone ID: 700908325H1
gttcttgaggacatgagtgatgtaaaggaattggttcctgagctattttacctacctgaggtcctcacaaatgaaaattcaattgattttggcacaacacaaatgggaggaaagcttgatactgtaaagcttcctgcttgggctgaaaatccaattgattttattcacaagcaccggaaggctctagagagcgagtatgtatctgctcatttgcatgagtggattgacctcatatttgggtataagcaacgaggcaaggaa

SEQ ID NO: 566 - DNA, 258 bp, Glycine max
  Clone ID: 700908327H1
cactgttgtgccatgtacatggtcagcatcagaaactttgaagatgaagccagacggggttcttttcagcaatggccctggagatccgtctgctgttccttatgccgttgaaacagtgaagaatattatcggaaaggtgcctgtttttggaatttgcatgggccatcaattgctaggccaggctttaggaggtaaaaccttcaagatgaaatttggtcaccatggaggaaatcaccctgttcgtaaccttcgaagtgg

SEQ ID NO: 567 - DNA, 255 bp, Glycine max
  Clone ID: 700908337H1
gccaactagaggaccctaagactcagagatcaggctggcagcttgtatttgttgaccgggagaatgatgttcttcttcttggtgatgatccttggcaggagtttgtgaacaatgtgtggtacataaaaatactatctccactagaagtgcaacaaatgggcaaaggtcttagtccttctacttctgccccaggtaacaaactttctactcctgccaactcttgtgataattatgtgagtcaacaagagttgagaa

SEQ ID NO: 568 - DNA, 257 bp, Glycine max
  Clone ID: 700908340H1
gcaaaatgaaaggcagtggaaatgtgccaaaacaagtggcactgtgatttgtgaccacaacaaatgcatagttcattttatggttcagaccaatcaacccgtagactccttataagtgcgcagaagttcaagtgtagagaatgagtcagcctaagattaaacgccgagttggtaaatacgaggtggggaggaccattggtgaaggtacatttgcaaaggtgaaatttgcaaggaactctgagacaggagagcccgtg

SEQ ID NO: 569 - DNA, 253 bp, Glycine max
  Clone ID: 700908351H1
gagattctggagcctaacacgtgcattaggggttgctgcaccagcccctctattccccttcatctccctccctcttcttatacccttctctctcctattgcccgagggtctgagagtgttgtttatgaagggactttggatggcacgagggttgctgtgaagaaacccatcttgtcaacttcagaagacattaataagtttcataaagaattgcaattgttgtgcaagttagatcatccaggaatagcaacac

SEQ ID NO: 570 - DNA, 252 bp, Glycine max
  Clone ID: 700908354H1
gtccagcagtgtggtcaaaacacagaaggtggctgttaatgtccatgctttgcctgaatcccgtagcttgttcatttgtggatcttcaattccctaatgggcaactaacctacgtatctggtgagggtctaagtaccagtgctttcctacctgtttgtggaggtcttcttcaagctcagggtcaatatcctggggaaatgagattcagcttttcatgcaagaataagtggggaacaagaatcacaccaatgg

SEQ ID NO: 571 - DNA, 254 bp, Glycine max
  Clone ID: 700908357H1
atattttgcaaacaaatgtgttcaccggtggcaagggtgacagagaacaaagaatctacctctggtttgaccctacaagagaatatcacagatactcagtgctatggaacatgtaccagattgttttctatgtggatgactacccaataagggtgttcaagaacagcaatgacttgggagtgaagttcccatttaaccaaccaatgaagatatacaacagtttgtggaatgctgatgactgggccacaaggggt

SEQ ID NO: 572 - DNA, 253 bp, Glycine max
  Clone ID: 700908358H1
gacgaatgtgatggacacgcttaacatgcttggccttgcgaaaagaattggggctaggtttctgcttactagtactagttaggtttacggtgatccgttggagcatcctcagaaagagacttactggggaaatgtgaatccaattggtgagaggagttgttacgatgaagggaaaaggattgtggagacgttggccatggattatcatcggggtgctggtgttgaggtcaaacatatgagaggcaatccatcc

SEQ ID NO: 573 - DNA, 255 bp, Glycine max
  Clone ID: 700908360H1
aaaaaagaaaaaagagagcataaaccaatggctacttcactttcagcaactgggtgtgttggttcttccttctatggaagttggggaacttcaattgttggtgaggactacaccatgctggccaagtcagtgccatcacaagttcgcatggggaagggaaagcccacgagattgcagcctatgatgaagaatgttaatgaagggaaaggtatatttgcacctcttgtggtgatcactcgcaacatcgttggcaag

SEQ ID NO: 574 - DNA, 250 bp, Glycine max
  Clone ID: 700908365H1
ctctgactcttccaaagtcgcttatgttcttcaaggtagtggagtggctggaatagtgttgcctgaatcagaagagaaggttgttgcaataaagaagggtgatgccttggcactcccctttggtgttgtgacctggtggtataacaaggaagaaactgagttggttgttctgttccttggggacacttccaaggctcacaaggctggtgaattcactgacttttttctgactggttccaatggaatcttc

SEQ ID NO: 575 - DNA, 254 bp, Glycine max
  Clone ID: 700908373H1
cccttttcctaacctcaccggcgggtgctcgtactgctactgtcatgcctagaagggcggcggtcatcgtgtcggcggcgacggcggagacgccgaagaagaagggcgaatcgaaagggttcgtggaagagatgaggttcgtggcgatgaggctgcacacgagggaccaggccagggagggcgagaaggaggtcaagcagcccgaggagaaagccgttaccaagtgggacccatccgtcgaagggtacctgaaa

SEQ ID NO: 576 - DNA, 252 bp, Glycine max
  Clone ID: 700908374H1
agagtcctgagagtgatggtgcgcagaaagatcttcagtgcacaagaatcagagacaggagaaaccctcttcggcttgacacgagcctcgaagtggatccttcgcgacacgaaaatgaccctagcacccatgttgctgctggagaaccacccaattcacctgaaccctgcgcactacatcagtgagattattagagaaggcacaaaaaatggcactgctttctttaagtgccatggacatgagcaatttgag

SEQ ID NO: 577 - DNA, 252 bp, Glycine max
  Clone ID: 700908376H1
aaacaacagagtttatttctttttggttccttggttcacgctggctgcaaggcttgtgtttggtgggagcagcttctcaccgtgacgctgctctacgaagacgacgacaacctcgtgtgacaacatcaaataatgggaaaaggaaacatggaactcgagacaaacaaggtctatgactacgaggatgcacgaggggacgttgaagtcccagataccgctcatcagataagcactgattcatggtttcaagtg

SEQ ID NO: 578 - DNA, 248 bp, Glycine max
  Clone ID: 700908382H1
attctgttcagtttcacccgctaaacaacgtcacctaagagatctacttcaaaacacaaccaaaatcttaaatttcttggaacccttttaattgttttttttctttaaaaaaatcattttcctttaaacttcaaatttagagttctctctctgattcatccccagcaatggcttgtgcattgcaagcaaccttagcagccaacgcctatgtcttttcttccaggagattctccttgaagctccaaaag

SEQ ID NO: 579 - DNA, 228 bp, Glycine max
  Clone ID: 700908389H1
gttgctattgtgcctgtcatgctaaaagtggatttcttgttctgtacttctgtatacatttagtttccggctgtcacattttgcaagtgtcttatcgaagcctgaatttttatgttaaagatataagatactctgatatcgtatggagttgtcatctttattatggctgagttacctgagtaaatgagtaatcagggaagggaactatttcccttaacccgtatatgg

SEQ ID NO: 580 - DNA, 254 bp, Glycine max
  Clone ID: 700908396H1
cctttgccgctgttgttgttgctgcaccaccgaacaacttcccctgtaaatcgcgtttcgtttgtgcaaggttttaaaagatggctgatgctgaggacattcaacctcttgttgttgataatggaactggaatggtcaaggctggttttgcaggtgatgatgctcctagggccgtgttccccagcattattgggagaccacgccatactggtgtaatggttgggatgggtcagaaggatgcttacgtgggtgat

SEQ ID NO: 581 - DNA, 261 bp, Glycine max
  Clone ID: 700908409H1
ggaactgagcaagcattggttgctgaattgagtgccttggatgaacatctcaagacccatggtccatacattgctggggagaaagtcactgctgttgatctgagtttggcaccaaaactgtaccatcttgtggtagcactgggccacttcaagaattggaatattccagaaagtttggtacatgtgcacaattacactaagctgctgttctcccgagagtcatttgagaaaacaaagactccaaaggaggaatatgttatt

SEQ ID NO: 582 - DNA, 258 bp, Glycine max
  Clone ID: 700908411H1
gccgtcgtcgctgtttttgtgtgtcgcttcttcgtaggtgcagctgcaatggtgaagggacgccaaggagaacgtgtcagactctacgtgaggggtacaatccttggatacaaaaggtccaagtcaaaccagtatccaaatacatccctgatccaaattgagggtgtgaatgccaaagaagaagtagcatggtatgctggcaagaaaatggcctatatctacaaggctaaggtgaagaagaatggaagccattaccgc

SEQ ID NO: 583 - DNA, 252 bp, Glycine max
  Clone ID: 700908415H1
ggagatgggtattgtgggagtttctttcagaggtgcaagccttacatagccatggtttctctgcaattcggatttgcgggtatgaacataatcactaaggtttccctcaaccgtgggatgagccactatgtgcttgtggtttatagacacgcctttgctactgcagctattgctctttttgctattgttctagagaggaaagtgaggcccaagatgacatttctcatgttcatgcaaatatttgtgttgggt

SEQ ID NO: 584 - DNA, 261 bp, Glycine max
  Clone ID: 700908424H1
gagaaaacaatgcgcttgtgggaagttttatggacacattatccgtctgagcatttgcacctgtatgtatgtgtggcaatcttgaaacgatatcgtggtaaaataattggagagcaaatggacttcgacacccttttgaagtttattaatgagttaagtggtcacatcgatcttgatgcaaccctcagagatgcagaggctctatgtatatgtgccggtgagaacggtgctgctcgtataccccctggaaccccaccgtcg

SEQ ID NO: 585 - DNA, 253 bp, Glycine max
  unsure (1)..(253): unsure at all n locations
  Clone ID: 700908428H1
attggattngcattaggttnctctgaaatacgcaattgacatggcgagcgcgatggtagangacgcgaacttcgaagatgaccaactagccaatatgaccaccgacgacatcgtcngagcttctcgtcttctcgacaacgagattcgcatcctcaaggaagagttgcagaggaccaatttggaattggaatcgtacaaggacaagatcaaggagaatcaggagaagattaagctcaataagcagttgccctac

SEQ ID NO: 586 - DNA, 252 bp, Glycine max
  Clone ID: 700908429H1
gccagtagtcatatgcttgtctcaaagattaagccatgcatgtgtaagtatgaactaattcagactgtgaaactgcgaatggctcattaaatcagttatagtttgtttgatggtatctactactcggataaccgtagtaattctagagctaatacgtgcaacaaaccccgacttctggaagggatgcatttattagataaaaggtcaacacaggctctgcctgttgctttgatgattcatgataactcgtcg

SEQ ID NO: 587 - DNA, 261 bp, Glycine max
  Clone ID: 700908434H1
gcaagaaatcaaagcttggtttcacagtctacccctctcctcaggtgtccacctctgttgttgagccatacaacagtgtcctctccacccattctctcttggagcacaccgatgttgctgtcctcttggacaatgaagccatttatgacatctgcagacgctctctcgacattgagcgtcccacctacaccaacctcaaccgccttgtttctcaggtgatttcatctttgactgcttccttgaggtttgatggtgccctga

SEQ ID NO: 588 - DNA, 261 bp, Glycine max
  Clone ID: 700908435H1
ggtgagaccaaggtgttcagccctgaggaaatcagtgccatgattctgactaagatgaaggaaactgcggaagcattccttggaaagaaaattaatgatgccgtggtcactgtcccagcttacttcaatgatgctcagaggcaggccaccaaggatgctggtgtcattgctggtctcaatgttgctagaattatcaatgaacccactgctgctgccattgcctatggattggacaagaaaggtggcgagaagaacattcta

SEQ ID NO: 589 - DNA, 251 bp, Glycine max
  Clone ID: 700908444H1
gtttggaaaaaagggtttgttcggttggttcttgtagcagggatcttgtggatgttattaattcttcttgcattattgttccatatatggtcttgtcaaacttccgtctcctttttatcagctatgtgtaacaaagatagcaaggttttcaacatgttagacaatatgggacttgtatcaaaacctcacagatgtccaattcctctttccaatgaccctgataaaatagttatcccaactggaagaactcc

SEQ ID NO: 590 - DNA, 255 bp, Glycine max
  Clone ID: 700908467H1
caaggatggtgttcatcgtccgagggcgcataaaacgcaaccaaagccttagcaaaggcatggtagcctcaagcatccttgagccaggagggtttttgggtgacgagctgctttcatggtgccttcgcaggccgtttatcgatagacttccggcctcctcggctacatttgtgtgtcttgaatcatcagaagcctttggccttgatgccaatcacttgaggtacatcactgatcacttccggtacaaatttgcga

SEQ ID NO: 591 - DNA, 152 bp, Glycine max
  Clone ID: 700908471H1
cattcatcgttctgcaagcaagatgaatagacttatagttctggcatttcatgtcgtccatgcctggtgctttactcttccagtttatgggcgtgcatattctgccttgtgttataaactcatgagttataattacatccgattcatttgct

SEQ ID NO: 592 - DNA, 254 bp, Glycine max
  Clone ID: 700908472H1
ctaagattgctttcttagggacccatttgcaggttcaaccttctcctgttgtagcggcttttagctccagaggaccaaatgcactcaccccaaagattctcaaaccggatctaatagcaccaggagtcaacattttagccggttggaccggtgcggttggaccaactgggttgactgttgacacccgccatgtcagcttcaacataatttctggaacatccatgtcatgccctcatgtaagtggcttagccgca

SEQ ID NO: 593 - DNA, 251 bp, Glycine max
  Clone ID: 700908473H1
aacaaggcttacctagctcgtccatggaagaattactctaggaccattatcatggacacgtacattgatgatttgattgacgctgatgggtatttgccatggcaaggactagagggtccttctggtatggatacttgcttctatgccgagtaccacaacattggccccggttcagacaaatccaagcgtgtgaaatgggctgggatttggaacctcaattcaaaagcagcacgttggttctcaccatctaa

SEQ ID NO: 594 - DNA, 246 bp, Glycine max
  Clone ID: 700908476H1
cacttccctcttcccactccccagatcccaaaggagtgtcttttctttttttatcaagtttgttgtttatatttaacaacctagagttaaggattttttttgtgctaattagatttaaggatttttaataatggacataaaagtgctttcttccggagttcagtactcaaatctgccggagagttacatccgacccgaatcggagcgacctcgtctttccgaggtttcggagtgcgaggatgttcc

SEQ ID NO: 595 - DNA, 244 bp, Glycine max
  Clone ID: 700908478H1
acaggagctcagaagaatatgtcttcaatcactcaaacttggccaggcgtgctctgaagaatgttgctcttgcttatcttggatgccttgaggaaaaagaattcaccgatcttgtgttgcatgagtataaaactgctacaaatatgactgagcagtttgctgccttggctgccatagctcagaaccctggtaaaacccgtgatgatgttcttgatgacttttatggcaagtggcagcatgattt

SEQ ID NO: 596 - DNA, 253 bp, Glycine max
  Clone ID: 700908481H1
cttccaggttgtgaatgaacctacagatgctcactgtcctgttgtggagatgtctacacgttcaaaacttagttgcttgagttggaataaatatgctaagaatcaaatagctagtagtgattatgaaggaattgtgactgtttgggatgtaaccactcgaaagagtttaatggaatatgaagagcatgaaaagcgtgcatggagtgttgatttttcaagaacagatccctctatgcttgtatctggtagcgat

SEQ ID NO: 597 - DNA, 252 bp, Glycine max
  Clone ID: 700908483H1
gctctcctgaccccaattttacattggatgcgcatcaaaaaggagtgaattgtgttgattactttacaggtggtgacaagccttatctaataactggttctgatgatcacactgccaaggtatgggattatcaaaccaaaagttgtgtccagactctagaaggtcacacacacaatgtatctgctgtatgctttcatcctgaactacctataatcattactggctctgaggatggcacagtgcgcatttggc

SEQ ID NO: 598 - DNA, 253 bp, Glycine max
  Clone ID: 700908484H1
ccatcgctggacgtgagacaagacgtagtggtgatggaggtgccgaagctgggaaaacaagccgcaacgaaagcgattaaggagtggggtcaaccaaagtcaaagatcacacaccttgtgttctgcaccacttcaggcgtggacatgcccggagcagattaccagctcacgaagcttctcggcctgaggccctccgtgaagcgcctcatgatgtatcagcagggctgcttcgccggcggcaccgtactccgcc

SEQ ID NO: 599 - DNA, 251 bp, Glycine max
  Clone ID: 700908487H1
gctttggttataaactgtcacatgatgcttcattacatccccgatgaaaccctatctgatacaacaggcttgacctcttttctctacgattcttcttctcttgctgcttcttctgctgttagcgttactcccacttcctcactgcgatcattgttccttaagtccctgcgaggtttagacccaacggtcgtaatcttggtcgacgaagatgcggatttgacttcgaacaacttggtatgcagactaagatc

SEQ ID NO: 600 - DNA, 236 bp, Glycine max
  Clone ID: 700908512H1
aagagctgatggttttgatctcaaggttgtgacagcagatcttaaggacattgattacaagtctggggatgtttgtggtgtgcttgtgcagtaccctggcactgagggagaggttttggactatggagagtttgtgaagaaggctcatgctcatgaggtgaaggttgttatggcaagtgatttgttggcactgactgtgttgaagcctcctggggagtttggggcagatattgttg

SEQ ID NO: 601 - DNA, 256 bp, Glycine max
  Clone ID: 700908519H1
ggaggttgagtagttcttcatcatagtcttaaacattaaaccttagcaaaactcaacaatgctagacatcaaaggctacctcgtactcttcttcctatggttcatatcaaccattctgatacgttccatcttcaagaaaccacagcgtctaagactcccaccgggtcctccaatttcaatacccttgctgggacacgcgccatatctccgttcactgctccaccaagcattgtacaagctatcactgcgctatgga

SEQ ID NO: 602 - DNA, 241 bp, Glycine max
  Clone ID: 700908540H1
ctctctctctttggaatcttccttctgcttggaaccctaaaaatctgattacgtacctacccattatttaattggtccgtttttataattggggttgtcggctgaactaattaatcatttggggttggaggaacaagaggagtgagagcttcaatttttctgtttttaaaaattagggcttcttcatttggtacccgattcccttgtttcttgggcttctggaattgatgcaaattttagg

SEQ ID NO: 603 - DNA, 235 bp, Glycine max
  Clone ID: 700908543H1
aatttgtcaaccagaattgttgtttttctctttaattgtagattttttttcaaaaaatttgttttattttttttgaagctctttccgctctctgcaatggtggagatttgagttactgtgtcgcgtctttctcggagttcaacctcaaccgttcaaaattatgcttctgggttttcgtcatttcagacaaaagtttctatttttgaggtgtttctgagcagttacaactttttct

SEQ ID NO: 604 - DNA, 254 bp, Glycine max
  Clone ID: 700908550H1
tcagcattgacatggttcacaacaacaacttgcaggccgtgcataaccaacaggctgacttcaagaactggctcagcgctgttatctcgtaccaacaggcctgcatggagggttttgacgatggcaaagaaggtgagaagaagatcaaggagcagtttcataccgagaccttggacaatgttcagaaactcactggcatcacccttgacattgtgagtggtttgtccaacatcctcgagaagttcgggttgaag

SEQ ID NO: 605 - DNA, 232 bp, Glycine max
  Clone ID: 700908559H1
ccgaatcatgtgtgaaaccatctgctcaacttaccatcttctatgctggtactgtcaatatctttgatgatatctccactgagaaggcacaagctatcatgttgttggctggcaatagcttatctgcagcttctaacatggcacagccaaatgttcaggtgcctatctcgaagttgggtgctggtgctggtgtgcctgtgagtcaacctgcaaatacatcacctggctctgg

SEQ ID NO: 606 - DNA, 231 bp, Glycine max
  Clone ID: 700908561H1
ggccaattactgtggaggaactaagccaaccaccagaagggtacccttcatccaaagtagttcttactggccttgaagcagagtcattgatgtttatttcagtaccctttggtgaagacaacataacattctatgatcgcataactagtgccttgagagaaagtgatgctatagccattagaacaagtagggaaattgagggtaacttttgtgactacattgcatcacagt

SEQ ID NO: 607 - DNA, 253 bp, Glycine max
  Clone ID: 700908566H1
cttatgacagctatgaaaaactttcctctgctgttgatgagctctttaggggcctccttgcagagatgaagttatctcatattggctcttcccaatgctgttctggtcaaagagattcctgtgctggtggaattcaaaacaaggaacaggaagagaaatccaataagggtttattggttggaagtggggaatatactcttgtttatgaggataatgaaggagacaggatgcttgttggagatgtgccgtggca

SEQ ID NO: 608 - DNA, 150 bp, Glycine max
  Clone ID: 700908570H1
atttttttgtgccagctctagtttatcactagcttttaaggaaggattctccaagtatctaggtgtttatcaattggtatttgtgtttattgttgtatctaaaaaattatatattttaaataattttgtgacgctatatattaatcaggt

SEQ ID NO: 609 - DNA, 239 bp, Glycine max
  Clone ID: 700908571H1
ggccccaagagaggtgctaaggtgaagattcttaggaaggaatcttactggtacaaaggcaccggttcagtggttgctgttgatcaggaccccaacactcgctaccctgttgtggttcgattcaacaaagtcaactatgccaatgtatcaacaaacaactatgctttggatgagatcgtggaagtcgaatgaatccaacttaattgtaattttgatacttgtcatgctatcgcagttac

SEQ ID NO: 610 - DNA, 231 bp, Glycine max
  Clone ID: 700908575H1
gtcaaaggttggacttgttgtgtatgattctcaagtgcctattggtgccactccggagtatatggctggtttctacatgctgcaaagtgcaagctcttttctgcctgttatggctttggctcctcaagagaaggaacgtgtcattgatatggcagctgcacctggtggtaaaacaacttacattgctgctctaatgaagaatactggaataatatttgcaaatgaaatgaa

SEQ ID NO: 611 - DNA, 230 bp, Glycine max
  Clone ID: 700908576H1
cgtgatcaaagcgttcaacatgagcgacaggctgacggtggaacacggcaacagcagcgccggaatgaagatggctctggaggattgtaaggacttgttgcagtccgccatccacgacctagaggcctcaggcgtgttggtcaaagagagcagcctacaggacgtgcaccagcgcaccgccgagctcaagaactggttgggagccgttgttgcctaccagcaatcgtgcc

SEQ ID NO: 612 - DNA, 230 bp, Glycine max
  Clone ID: 700908577H1
tccactggaggtttcgctctctcagtttcttttccccaaattgtttttcatctaacaatttactttgcagaaccctaaccctagccccttcgcctaccttgtaaccttcctttcgatccttcatctcgcagacaatgggtgaaactaaggacgaagcatacgaggaagagcttctcgattacgaggaggaagacgacaaggcccccgactccgccggagctaaagtcaac

SEQ ID NO: 613 - DNA, 229 bp, Glycine max
  Clone ID: 700908579H1
cttttattaagactccaagcacccgggtagaatcattcacagtggtggaccccactaaacgtgctggtacagagttgaaatacgggccatatgaaaatcatcccccgtattcatattctcctgtacttattcattttgaaaataacaatgcatttgctgttgttgaggagctagaacgtgaaattgaaatatctcactggggaagcattcaagtcactgagcaatatag

SEQ ID NO: 614 - DNA, 250 bp, Glycine max
  Clone ID: 700908582H1
gcttcttgagcgattgcgtgtcccttctgagtatgccacaagtttgacaggaggttcatttgatgaagcccgaatgcttcaaaatgtagaagcatgtgaatggttgaccagtgccttgcgtggtcttgaaatgcctaatctagaccctagttatgcaaacatgagagctgttaaagagaagcgtgcagaacttgaaaaattaaaatctacttttgtcaggagagcctctgaattcttgagaaattatttt

SEQ ID NO: 615 - DNA, 243 bp, Glycine max
  Clone ID: 700908584H1
gggaagtggtgtgcgacgagcacggcatagatccgacggggaagtacgtcggaaactcagatctacaactcgagcgcgtgaacgtgtactacaacgaagcttcctgcgggcggtttgtcccacgcgcagtgctgatggacctggagcccggaaccatggacagcgtgcggactgggccgtacgggcagatattccggcccgacaacttcgtgttcgggcagtccggcgcgggcaacaactggg

SEQ ID NO: 616 - DNA, 238 bp, Glycine max
  Clone ID: 700908586H1
agttaacataccttcaagctgtggtcaaagaaactttaagattatacccttcagttcctctctcatcacctcgtgaattcatagaggattgcactttaggtggctacaatgtcaaaaaaggaactcgtctaattacaaatatttggaagatccacacagatcttagtgtttggtcaaatccattagagttcaaaccagaaaggtttctaaccacccataaagacattgatgttagggg

SEQ ID NO: 617 - DNA, 230 bp, Glycine max
  Clone ID: 700908590H1
ggaaaggcagccttagacggctgaggaaaaagtaccagtcagtagagtctgatgatgatggccgtcacgaagaaaagataattgctgatgacagtatggatgaccaaacccaggaaatcaaagatgatgaagatatcctacctatttcatctctttacaagaataaagcctctcaaagggtcttggacgaggaaatggatgctagtgttgacagacaggcaggtgatgcc

SEQ ID NO: 618 - DNA, 230 bp, Glycine max
  Clone ID: 700908591H1
gaaacatcgtgtgcacagtaccccagaagatcgaacaaggatctccacgaagacaaacctctgttctcaactgtgtttctttacctctcacctactttcagaccataccaggctgagaagatgcagcagacaccgcctatgattcctatgatgccttcgttcccacctacgaacataaccaccgagcagattcaaaaataccttgatgagaacaagaagctgattctggc

SEQ ID NO: 619 - DNA, 229 bp, Glycine max
  Clone ID: 700908592H1
cagaacagttgaagtgaatggcataaaaatgcatgttgcagagaaaggagagggtccagtggtgttgttcctccacggcttccctgagctctggtactcatggcgccatcagattctctctctcagctccctcggctaccgcgccgtcgctcccgatctccgtggctacggtgacaccgaagcaccaccttcaatcagcagctacaactgcttccacatagtgggtgat

SEQ ID NO: 620 - DNA, 273 bp, Glycine max
  Clone ID: 700908601H1
caatagcaagtcggtcgctcagacacgcacagatctgatctgatctgatctatctgaagccgaaaacgccgacggtgatgatgaagatggggtgttcacgttgctccttcttcctcttcctcatcctcttagtggcgctcttcccctcgtcgctctccgagatccgcttctccgagatccgaaacgacgatcgccgcatcatccccttcgatcagtttggattcacccacaagggtcgccttgagctcagcgtttccaaaatctcactctcca

SEQ ID NO: 621 - DNA, 259 bp, Glycine max
  Clone ID: 700908610H1
gcgtcttactggcatctacaagaatattttgaacaatgctggggtcaagctgattgaaggccatgggaagattatagatcctcacacagttgatgttaatggaaagctatattcagccaaacacattttagttaccgttggaggtcgccccttcattcctgatattcctgggaatgaatatgcaatagattcagatgctgcccttgatttaccaacaaaacctgagaaaatagccattgtgggtggtggttacattgcc

SEQ ID NO: 622 - DNA, 257 bp, Glycine max
  Clone ID: 700908640H1
gcgaggagaggaatcagaatcgcgttagggagaagaagagaaaatcgcaggtgaaaatgagcggaacggtgaagaaagtaaccgatgtagcattcaaggtgggaaggaacatcgattgggatggaatggcgaacttctcgtctccgatgaggctcgcagggagttctccaatctccgtcgcgctttcgacgaggttaactcccaactcgaaaccaagttcagccaggaacctgaacccatagactgggattactata

SEQ ID NO: 623 - DNA, 259 bp, Glycine max
  Clone ID: 700908645H1
ggagccaatgaactcagtgaagggtacagcacaggtgttggattgggtgctgagattattggaaccttcgttttggtctacactgtcttctctgcaactgaccccaagaggaatgctagagattctcatgtgccggttttggcaccacttccaattggctttgctgtgttcatggttcacttggcaaccatcccagtaacaggcactggcattaaccctgctaggagcctaggagctgctgtcatgtacaaccaacaga

SEQ ID NO: 624 - DNA, 253 bp, Glycine max
  Clone ID: 700908658H1
gccttctttctttttttcaatttccaaatcacgaaactcaagaagatggagaaagcgatcaacagacagaagattttgcttcatcatctcaacccttcatcatccacccaccccaacgaatcatcctccctccatgcttcagcatgtgtggcgggggatagcgctgcttatcaaaggacatcgacattcggggacgatgttgtgatcgtggctgcttatcggactgctcattgcaaagctaaacgaggtggtt

SEQ ID NO: 625 - DNA, 258 bp, Glycine max
  Clone ID: 700908666H1
ctcctatcacataataacaaccttaaccttaaccttaaaccccccaattttcatgtctcggatcccgtgattcggatccccaacaaaaaaagaaacctcgtatttgttattttcgtcggatccggttgggaacgctcatgacgcggcgttgctcgcattgcagccacaatgggcacaactccagaacctgccctaaccgcggggttaagctcttcggggtccgattaaccgacgggtcgatccggaagagcgccagat

SEQ ID NO: 626 - DNA, 250 bp, Glycine max
  Clone ID: 700908674H1
ctcagaggaatggacagaagaaccataagaaaccacgaaacgcatgacatcggctagtaactggagttgcaaatgatccataaggcataaaccaagcatgtgactgatgatgctgtggagaaagttttgacttttgagttgtttcggagacatcacatattgtagtgacaaggtgataattttggcaagatgaaaaattcaagaggacgcagcatgaaacatgcacatttatttcattgtgaagatcaaa

SEQ ID NO: 627 - DNA, 256 bp, Glycine max
  Clone ID: 700908678H1
gccagaatgtccaagtgcgggtgaggggttatcattcatgttatataatattatttacccttctcagtatttgaacttcgtgatagagggcgccaatatcttgccctacacaggttttccgtgtgttttttccccctttcttttttcggtggtgggatgtgttggtaggaaaacatgcagtgagtatctaaggcccatttttcactaatgtagggaatcatcagccgttgtaaatctgtattaaactgttgagtat

SEQ ID NO: 628 - DNA, 254 bp, Glycine max
  Clone ID: 700908693H1
ggagagcccattgcaactctgcgtttgctgcactatgaaggtcaagtttcggatcccttgaaaggattatatggagctggagctcatactgactatggtttaattacactgttagcaacagatgatgtctcgggtcttcaaatatgcaaagatagggatgctaaacctcagaaatgggaggatgtagcaccattgaagggagcattcatagtgaatcttggtgacatgctggagcgctggagcaactgcgtttt

SEQ ID NO: 629 - DNA, 249 bp, Glycine max
  Clone ID: 700908708H1
gcaatttcccggcacacatgttaaggaaaaatggtcaaaaaacctttaccttgcctgtttgtgctacggacgcacagtatgctgatttccatgacattttaaagcattttattgacaagcggattatgagttgtcatctgccccaccacaaaagatctttttgtagaaaggaactaattgttgtgccagcagagaaccttattttgttatgttataagaatattgttctgttccctgtccctccccttc

SEQ ID NO: 630 - DNA, 251 bp, Glycine max
  Clone ID: 700908709H1
caagaagttctggaaatggagatcaccaatgtcagcgagtatgaagctattgcaaagcagaagttgccaaagatggtgtttgactactacgcatctggtgcagaggaccagtggactctgcaggagaacagaaatgccttttccagaattttgtttcggccacgtattcttattgatgtgagcaagatagacatcacaactactgtcctgggcttcaaaatatccatgccaatcatgcttgccccaacagc

SEQ ID NO: 631 - DNA, 248 bp, Glycine max
  Clone ID: 700908710H1
atgaagatgagatctcaatacattcctgaggaggccaggagcaccatcatgaactttttccgcattcctctcaacatttttgtgtgtgttgtgctgtacaatgttgatgcattccctatcactgttatgtttggcatgtgctcaattttccttttggtggcttgtatcttgcaaaggcgactgatggtgatttccgataagccaaaaacagaagattggcaattgaaggatagggacgcagagtcaga

SEQ ID NO: 632 - DNA, 249 bp, Glycine max
  Clone ID: 700908712H1
atttcttaaaaaaatatggtaaaacaggaggagaatttgagacaatagacccaagaaccggagaggtgattgcaaggattgcagagggaaccaaagaagacattgaccttgccgtcaaagcgtctcgtctggctttcgaccatggtccatggcctcgtatgcctgccgtagaaagagcaagaattatgatgaaatgggctgacctaattgaccaacacgtagaagaaattgcagcactggatgccattg

SEQ ID NO: 633 - DNA, 250 bp, Glycine max
  Clone ID: 700908714H1
cttatagcttcatcccaaaaagctcttttccttctaaatttgattccttagttcagcattctattattatatatggcttcttcaccttcctcagaaaacaaaaacctagagggagtagctggtggtgccggagagaaacccattccacttggtgagaacgttctgcagaagcatgctgcattctttgacttgaataaagatggtgtcatctacccatgggagacttttaaagggttgcgtgaaatcggga

SEQ ID NO: 634 - DNA, 256 bp, Glycine max
  Clone ID: 700908719H1
ggaaaattcaacctccatggagttttgggagagattgttgaactgataaaaccaatagcatccgtgaaaaagttacctatcaccttaattctgtctcctgatctgcctactcatgccattggtgatgaaaagcggcttacacaaactcttttgaatgtcgtgggtaatgctgtcaaattcactaaggagggctatgtttctgtaagagtatcagttgcaaaaccagaatcttcacaggattggcgacctccagagt

SEQ ID NO: 635 - DNA, 248 bp, Glycine max
  Clone ID: 700908745H1
ggaagagagagggagattctttgtttgctaccttctctcggaaaaatggttacgttcaggtttcaccagtaccaggtggttgggagggctcttcccacggaagcagatcagcaccccaagatctaccgaatgaagctctgggccaccaacgaggttcgcgccaagtccaagttctggtattttctgaggaaactgaaaaaggtgaagaagagcaatggccaagtgcttgccatcaacgagatttttga

SEQ ID NO: 636 - DNA, 257 bp, Glycine max
  Clone ID: 700908749H1
gttgaaacacaaagaagaaaaaatgggttcctctttgtggacttgtctgattttgttatcacttgcttctgcttccttcgccgccaacccaagaacaccaattgatgtgccatttggcagaaactatgtgcctacttgggcctttgatcacatcaaatacctcaatggtggttctgagattcagcttcatcttgataagtacactggtactggcttccaatccaaaggatcctacctgtttggtcacttcagcatgt

SEQ ID NO: 637 - DNA, 253 bp, Glycine max
  Clone ID: 700908751H1
ccggtcccttgtgatttgctcacaaaaccagtgtcggtcacaccatctctcccttttctccacctgcaacgatgtcggttaaggagtgccaccaccaccacaagggaaagaagcacaagctctggagacgcatcttctggggaatagtgatcttcgccttcatcgtgttactgacagttcttataatctgggcaatcctaaagccttcaaaaccaaccttcatcctccaagacgtcaccgtttacggcttcaa

SEQ ID NO: 638 - DNA, 244 bp, Glycine max
  Clone ID: 700908755H1
ggtttcgagatcaaggactctctgctagggacatggttgctttatctggagctcacacatttggcaaagcaaggtgtactagtttcagagatcgcatatacaatcaaaccaacattgatagaacatttgcattggccaggcagaggaggtgtcctaggactaatggcacaggtgacaacaatctagcaaatctagacttcagaactccaaatcattttgacaacaactacttcaaaaaccttct

SEQ ID NO: 639 - DNA, 246 bp, Glycine max
  Clone ID: 700908757H1
attcaacctgtaagatccgcgagctaaaactcccacactccacagcttttcttgttttcctttcctcagatcagatcttcacgccgttatgcttagaacattagctagggtgttcaagcgagccacccttgccaatgacttgcttcaaaaacgcagcagattctatgcaaccacggttggtggaagaagtgacaggttagaaggaaaagtggcactcataactggatcagcaagtggactcggcaa

SEQ ID NO: 640 - DNA, 246 bp, Glycine max
  Clone ID: 700908761H1
gaaaagggtcctcatcctcttgctcaagctggaactggctctttccctggaggcttcattgggaaacataggttgcaagcagccataaccaacctcaataaccaaattagtattttgcaggaagaattggaaaaagttgaaacaattggtgaatcctccaccgtttgcaaggatttaatttcaagcgttgaatccattccagatcctctccttccattcaccaaaagttcagttgatgctggttgg

SEQ ID NO: 641 - DNA, 244 bp, Glycine max
  Clone ID: 700908775H1
aaaattagcctcacaaaagcaaagatcaaacaaaccaaggacgagaacacgatgttgcttgaacttgcacttggtttattggttttggctctgtttctgcacttgcgtcccacacccactgcaaaatcaaaagcacttcgccatctcccaaacccaccaagcccaaagcctcgtcttcccttcataggacaccttcatctcttaaaagacaaacttctccactacgcactcatcgacctctcca

SEQ ID NO: 642 - DNA, 241 bp, Glycine max
  Clone ID: 700908776H1
aaaccctgaagaaagacacagccattgtttgtttactttccattgattgagcgaaagctttgttttttctgcgatcattttccattgggtggaagaaagtctcaacctttagtcgaaagagcaaggatctgagtgagtgagcgatcatgtgtggtggtgcgattatctccgacttcattccagcgggtcccgccggcggggcgcacgcgtgaccgccgacatcctgtggccgaatttgagg

SEQ ID NO: 643 - DNA, 252 bp, Glycine max
  Clone ID: 700908782H1
gagacaattcaacttaagagatcaatatggccaccaccactacccagcctccctctaatatctgttttttccttctgttgttgcttctagcacactttcatttgggcataagccaacttgagctgaattactactctaaaagctgcccaaaagctgaagagatcatcaaggaacaagtcacacaactatataacaagcatggaaacactgccgtttcgtgggtcagaaatctcttccacgattgcgtggtta

SEQ ID NO: 644 - DNA, 260 bp, Glycine max
  Clone ID: 700908825H1
cttcattcatttcctgtggctcaatgaggcaccagttggggagctacagtaaggcaaataaaatggtggcgtgccttcagaacccaatgggtattgcaaaaaaaaatgttcagttcaggggaaatttctccatacagtatttttttttatcagcatttctccaattttgtgagttaagcagcctaacttgatgcagcatataaactctcattggttacttttgtgcttgcttgctagcagttttatatttagttttgtta

SEQ ID NO: 645 - DNA, 264 bp, Glycine max
  Clone ID: 700908847H1
caaaagacaaaaaaataaccaccaaataaacatctttctccacaaacctagcgggtctccacttatccaaaaaaagaattcactatccatcatggacattaggaaggttacctgtgccgttctcattgccgctgcctccatgagtgcagcattggctaccacagaggtctctgcacccgcccctggccctagcagcggtgcctccgccgccactgttggctccttggttggtgcctcagtcttgtccttctttgccttgttcca

SEQ ID NO: 646 - DNA, 256 bp, Glycine max
  Clone ID: 700908867H1
cgaggataagaaaccagaggggtatgatgacatcccaaaagagctcccagatcctgaagccaagaagcctgaagattgggatgatgaggaagatggtgagtggacaccccctaccattgccaaccctgattacaagggcccatggaaggcaaagaaaatcaagaaccccaactataaaggaaaatggaaggcaccattgattgataacccagatttcaaggatgaccccgacctatatgttttccccaacttgaag

SEQ ID NO: 647 - DNA, 256 bp, Glycine max
  Clone ID: 700908871H1
cttcactttcattcgatcaatcatgagaactcgaaacgccgattccgcctccaaatccgcaacccctaagaagacgccgccgaagaaatcccctgcggccaagcgcaccaccgccaccaaaaccagagccaccaagaagaacgagctctcgcccgcacccgattccaaccccgatcaatctcctctggaacagaaatcgttaggcagtgctagcagcgcaaaatctgtgaaaaagaagactccggggagatcgaga

SEQ ID NO: 648 - DNA, 267 bp, Glycine max
  unsure (1)..(267): unsure at all n locations
  Clone ID: 700908904H1
gnngtcttttnctgctctttggaaaaagtagggtctttgcttgattttggangntgtctctgctctcagatctcaacaanctnaancntcancgataccaccgagnaggtgancgcagantacatntgnttcngtgnatcaggagtngaacctgtggagcanggcntggactctcccangancagttagcgaccctacagaagcttcccaagtgggactnngntgnttccaagcgcnggtcaagctnctggtgaaanacagtgaaat

SEQ ID NO: 649 - DNA, 256 bp, Glycine max
  Clone ID: 700908915H1
gatttggacattttgctatcgcaactccagatgtttacaaattggttgaagacatccgggctaagggtggaaatgtcaccagggagcctggtccagttaagggtgggaaatctgttattgccttcgtgaaggatcctgatggttatgcttttgagctcattcaaagaccttcaacccctgaaccattgtgccaagtaatgcttcgcgttggtgatttagagcgctcaattaagttttatgaaaaggctttgggttt

SEQ ID NO: 650 - DNA, 260 bp, Glycine max
  Clone ID: 700908919H1
caccgattgctagaatggaatttcgatgctcagtcatctcttttaccattctcttctctcttgctcttgcaggagagagccatgtccatgcatcgctacctgaggaagattattgggaagctgtttggccaaacactcccattcccactgcactgcgagagcttctaaagcctctccctgcaggtgttgaaatcgatgaactccctaagcaaattgatgatacacagtacccaaaaacattcttctataaagaagacctt

SEQ ID NO: 651 - DNA, 258 bp, Glycine max
  Clone ID: 700908934H1
caccatcaataaggtgactggtgcttttggacacacgccatggctcttgggtgccaacttgaaccattatcaccttgagaggttttactggttgatgtgtgtacttagtggactcaacttcgttcattttctcttctgggccaattcctacaaatacagatgttcaaccaaaccgggatatactagctagaacgtacaaacctacctgcatttatgaatctatttggatataaaagtagaagtgcttttttgagagtt

SEQ ID NO: 652 - DNA, 257 bp, Glycine max
  Clone ID: 700908938H1
ctctctcaccctttctcccccactccctagtcagctagctcctgcaacaacaaccactcctcttctttttctcacccaaatccacgcttcccttacaccgcgtttggatctccgttatacaaactcattaaaatgttgcgagagaaaaacaaaacagaaaaaaaattcagttaattattaaattttgttatggctttccacgaccatctccagcacgagatagcgttccagcgtttcacggaggagcaagagttgaa

SEQ ID NO: 653 - DNA, 256 bp, Glycine max
  Clone ID: 700908950H1
ggctttcagagctgaatatgaattcccagaatggatttctccgcaggccaagaatcttatttcgaatctcctcgttgctgatcctggcaagaggtattccattcctgatataatgagggatccttggtttcaagttgggttcatgaggccaatcgcgttttctattaaggagtcttacgttgaagacaacattgatttcgacgatgtggagaacaaccaggaggaggaggttacaatgaggaaacctgccaggccg

SEQ ID NO: 654 - DNA, 253 bp, Glycine max
  Clone ID: 700908953H1
tatggcgatatctgatgcggtggcgaggaacttcagcaccatcttcgtgggtctcatggcgtgttttgaggcctatggctttgcttcggggagaaggtttagcggcggttatgttgttattgtgtccaccgccgcggtcattctcttcctcgtggcaacgctcacgtgggacgtctcgcgtaaggccacgtgtgcctttcacagagaccacgctgacagccaagaggatgtgtgcaagggaggtatctgttgg

SEQ ID NO: 655 - DNA, 248 bp, Glycine max
  Clone ID: 700908960H1
cgttttgtggggagggtgatgtcgagaagggaagggagctttttgatgagatgttgatgaggaaggttagtcccaatgtggttacatacagctgtttgatgcagggtcttggcaagaccgggcggtgactcaaggcttctgagatgttgaaggacacgatggatgagaacagaggacgaggctaaggtgttggatttgatggtgcaggagggggaggagccgggtactttgacatacaatgttgttgt

SEQ ID NO: 656 - DNA, 250 bp, Glycine max
  Clone ID: 700908961H1
ctttgctgcaccagcacaaacttatgctaagcgcaatttgctttgctgttagaactggaaacactttcttgggctcactattgtgggtggattatgctcgctgggttggagtccagaagatacgggattaggcataatggttcttcagttacaagatattttcataggatgatttgggtcaaatcttgtctgttgattcattattgaagtacagttggtttgttgtatttttttttattcctcctgaaag

SEQ ID NO: 657 - DNA, 123 bp, Glycine max
  Clone ID: 700908963H1
taacaattaacttatgctttattttgatgacacaatgtagctgatggtacgtacttaatccctcgacgcagtttttaacatttgtttttaccaagtaaaattgaatgaataatatagcagtgt

SEQ ID NO: 658 - DNA, 252 bp, Glycine max
  Clone ID: 700908967H1
cgcggcttcaaccttgtagttattctctttcttcttttttagctatccctctcttgaaaaatctagatctcgttcttccttgatctacgttacgcttttagtgaccggatctgtatggatctgaaccagatctacacgccgatggtggttttggcctggtctttcatagatctgatgcatggaggctcagatctactgtacagaggtgtgcgattcatgttcgtctctcttttggaatctgtttcgtagaaa

SEQ ID NO: 659 - DNA, 250 bp, Glycine max
  Clone ID: 700908972H1
cgttgattccatatcgattcgcatttgcgtacacccctgaccccttgatttctctcagttccgttctgcatcatagagtatggccagccacgatcttcgattcttcgagttgaacacaggcgctaagataccttccgttggtttgggaacgtggctcgctgaacctggcgttgttgctcgcgccttggccactgcaataaacgttggatatcggcatatagattgtgcgcaaatttatggcaatgaaaag

SEQ ID NO: 660 - DNA, 249 bp, Glycine max
  Clone ID: 700908974H1
atgcacctataagagtatgtagtttctactttgttgataaccacatgctctctacatcttacaaagaagcatcctctatagactaatgggtttgttcagaagtaagggtgtgatttataggccagtgaaggatgttaacttaggtcctgatagcactgaattctatctccaagccaatgtcaaagctccccgcatgactggaatcctggtcaagattttcacttggttcttggagtctccaatacttgg

SEQ ID NO: 661 - DNA, 250 bp, Glycine max
  Clone ID: 700908975H1
ctcataacacaaagcacaaagcaaagctcatccttgagttaaaaaatggcagcagcttcttccatggctctctcatccccatccttggctggcaaggccgtgaagctgggcccatcagccccagaagtgggaagggtgagcatgaggaagaccgtcaccaagcaggtctcctcaggaagcccatggtacggcccagaccgagtcaagtacttgggcccattctctggcgagcccccgtcctacctaaccg

SEQ ID NO: 662 - DNA, 247 bp, Glycine max
  Clone ID: 700908978H1
caatgatgttgacttggagtttccaaaatttggatttcttcatgcggatgcctcagtggacaggaaagatgatcaacaatcaaaggactcgtgtcatagtgctgaaccgatgaaaggggattttgtagaagatcatttctggaaagatcatcctttcatgttggccaacttttatcctcttgatcagcaagactgggaagataaaatcctttggggcaattctcctgttccaagttataataatgtt

SEQ ID NO: 663 - DNA, 247 bp, Glycine max
  Clone ID: 700908979H1
aagaaaccaagcaaatctttgttttttgtttctgttttgtgttgtgtaatttccccctagccaccaccaatggccaacaaagagatggaagttgtgaagggtttggatttgcaaaggtacatggggcgttggtatgagatagcctctttcccttcaaggaatcagcccaaggatggtgagaacaccagagccacatacactcttaggaatgatggtactgtgcaagtgctcaacgagacttggagta

SEQ ID NO: 664 - DNA, 253 bp, Glycine max
  Clone ID: 700908981H1
gggatcttgtctttcttactgcaagtgaagaagtgaaaaagtgctgaagtgaacacaatggagagaagggttggctatgaggtgctggtggctttggtgacccttttggttttctcattgacttgtgtcactgcttcaccatcagggccaacaaaacttcaagaccatgtgaagcaattcagggggaatcttcttgctaatggccttggtagaactcctccaatgggatggaacagttggaatcatttcagct

SEQ ID NO: 665 - DNA, 250 bp, Glycine max
  Clone ID: 700908983H1
gttcagagattactagtatttgactacatggccaatggaaatttgagggactgtttagatggagtttctggaaaacatatcgattgggccactcgtgttatgattgcaataggagctgcaaggggcttggagtatctccatgaagcagctgctccaagaattcttcatagagatgtcaaatcaactaacattcttctggatgaaaattggcaagcaaaaataactgatcttggcatggctaaaaacttga

SEQ ID NO: 666 - DNA, 251 bp, Glycine max
  Clone ID: 700908985H1
aagaaagcaagataaatgggatcattgaaagtaagccatttgcagcttcttcaatcaagactcccactgccactgtgccagctactttggtaactgaagcatctgcaaagccaccccatccagataccaagtacttaggccaggtatattcagtacctaaggtggagcagtggtctgattttgatgatcaagagtggctatttgacaccaatgtttcacaagaaagaaaatctgtggtgaaatcttcaata

SEQ ID NO: 667 - DNA, 248 bp, Glycine max
  Clone ID: 700908991H1
tcaaatccaaatggccctttacattacactaataattggcctcctagtaaacaccctagtactctataaatagcatttgcatgcaccttagtcttcaccaaaatactcctcttggcatcttgtgttgtgtccctcttttaagctatttccttctcttaacacaattggttgtgccaattgccatagtcaccaaccaattaacaaaggtatatatatcatcatatcatcaccaaatgaaaaatattggg

SEQ ID NO: 668 - DNA, 267 bp, Glycine max
  Clone ID: 700909005H1
gtgaggaacaagcaagtgcttctaaaggactatgttaccggttttcccaaagaatccgacatgaatattgtcgaaagtaccataacattgaagcttccacaaggttccaatgatgtcttgctcaaaaatttgtacttgtcttgtgatccgtatatgaggaatctcatgaacaagcccgaaggccctcccaatagtcgtgcttacactcctggctctccattaataggatatggtgtgtctaaagtcctggaatctgggcacccagat

SEQ ID NO: 669 - DNA, 251 bp, Glycine max
  Clone ID: 700909015H1
cttactctagactcttccttttctcttctctgtctaaggggtgccctgagatcacattgaacaatggtgaaggctgtggccgttcttggcagcagtgagggtgtcactggaactattcacttcgttcaggagggaagtggtccaaccaccgtaactggatctcttgctggtcttaagcctggtctccatggtttccatgtccatgccttgggggacactaccaatggttgcctctcaactggatcacattt

SEQ ID NO: 670 - DNA, 273 bp, Glycine max
  Clone ID: 700909018H1
ggatattctgaaatcccatccaatcgaaggctgtgaagtgtgtgatgcactctatccttctttctgcttgaacccataattccatgactcggcgttgctcccactgcagcaacaacggccacaattcccggacatgcccttcgcgtgggggcggaggtgtgaagcttttcggggtcaggctgacggatggatcaatcattaagaagagcgccagcatgggcaacctaaacctctcctccgccgccgcacatcaccattccattcatctccttc

SEQ ID NO: 671 - DNA, 269 bp, Glycine max
  Clone ID: 700909035H1
caccctctttccctcattgtgatttgtgagtaattaagatatgtatatgtctccaggccaagacatgtcatccatgtctaatgacagaaacaacatgtctatgatgatgcacaacagtttctactggggcaaagatgccatagtgcttttccctaggtggcctgagaacaatgttggcatgtacatcttagccctaatttttgtgttcttccttgccatggctgttgaagtgttatctaaccaaccactcctcaagccagggactagtc

SEQ ID NO: 672 - DNA, 264 bp, Glycine max
  Clone ID: 700909037H1
tttcttagttgttcagacacggttctgggaactgccagcttgcaagtctgagttttatgtctggaatccaagcttctgatgttcccacattttttttaagccacaacatttcccagtgagctttctcatgggttttcaatggtgacagtcttgagttcctttctactgggtaggggtaggggtatttgatccttattttctagaggggttattttagattcatctagttgaacaaagcccttgcaaaaccctttttccagcaca

SEQ ID NO: 673 - DNA, 257 bp, Glycine max
  Clone ID: 700909040H1
ggatgaagctcgttgcgccgagaagtatagagagatatgggccgagtatcgtaaacttgttccatggagaatattgccttacgtttattaggatgaaaaaaaaaagggcttcaccatgaattcttcatcccttctctctctccagattaacagaagcaagctcatcctagagttttaaaaatggcagcagcctcctccatggctctctcttccccatccttggctggcaaggccgtgaagctgggcccatcagcccc

SEQ ID NO: 674 - DNA, 254 bp, Glycine max
  Clone ID: 700909041H1
tagagagagacgcttcgcaaatctcaatcgaatctcagaaaaatgagagaaatcatcagcattcacataggtcaggccgggatccaggtcggaaactcctgctgggaactctactgcctcgaacatggcatccagcccgacggcatgatgccttctgactccaccttcggtgtagcccacgacgccttcaacaccttcttcagcgaaaccggatctggcaagcacgtcccccgtgctgtcttcgtcgacctcga

SEQ ID NO: 675 - DNA, 250 bp, Glycine max
  Clone ID: 700909047H1
cctgcacagactcaggggatttcgatttccaagaccatgcagttggaaagttctattcaaacccctggttccagtactttaaccgaaacccctagttctattcacgcgattccgcagaaccagagcgtcttctccagagaattgaacttttctgagtatggtttcgacccaaagactgggaacaatcagaatcaccattctctgaagccggaatccggcgagattctcagcttcggcgagagcaagagaa

SEQ ID NO: 676 - DNA, 250 bp, Glycine max
  Clone ID: 700909048H1
gtcaccaacaacgaggagttgaaaacaattgggtccaacctttggaaggaagagccaaagtgtctagaatggcttaactcaaaagaaccaaattcagtggtttatgtgaactttgggagcattatggtcatgactagtgaccaattgacagagttagcttggggacttgcaaatagtaacaaaaactttttgtgggtcattaggcccgatcttgtggcagggggaattaattgtgcgttacccaatgaat

SEQ ID NO: 677 - DNA, 252 bp, Glycine max
  unsure (1)..(252): unsure at all n locations
  Clone ID: 700909057H1
cagatagatacacacactctctcttttccactccctctttcgccgccaaaacanaccaaacccacacttcactctcactctcatccaattncnaatnntcgttgttggtgcactgaatgatcgagtaccggatgaacctgtggaccgacgacaactcctccgtcatggaggcctncatgagctcctccgacctctcctccctctggctccccacgccgcaatccgccgcctctactaccactcctggactgg

SEQ ID NO: 678 - DNA, 247 bp, Glycine max
  Clone ID: 700909059H1
gctgttcagagttgtgatgcttcactgttgctggactccacaagaaggagcttgtctgagaaggaaacagatagaagctttgggttgagaaatttcaggtacattgagaccatcaaagaagctttggaaagagaatgccctggagttgtttcatgtgctgatatcctcgttctctctgccagagatggcattgtttcgctaggaggtccccatatccctcttaagactggaagaagggatggtagaa

SEQ ID NO: 679 - DNA, 246 bp, Glycine max
  Clone ID: 700909063H1
gcatttgctaatggattgcagactattaacaatgatgatttggaggagatccgtgagcttggttctggaacctatggagctgtttatcatgggaaatggaaaggttctgacgttgccattaagagaataaaagccagttgttttgctggaaggccatctgaaagagcaagattgatcacagatttctggaaggaggcgttgatgttgagttcattgcatcatccaaatgttgtctccttttatggc

SEQ ID NO: 680 - DNA, 249 bp, Glycine max
  Clone ID: 700909064H1
caatttgattttggattggagagaaaaattttagccgaagcagagaaggataacccaaattggagcaaatttggatcagaaaatgttccgactaaagtttctgattcatcaacagcaaaggttactgctttggatcccattgtgagcaaatttatggccatggggcttagccaagaggctgttcccattgccgttgaaaattatggtgataatccaaccaaagttcaggaattcgtcaatggctacacc

SEQ ID NO: 681 - DNA, 246 bp, Glycine max
  Clone ID: 700909075H1
gttcatgaacattattcgaggcataatggaagaaattggaaggcctaatgttgcagacttgtttcccattcttcgtccacttgaccctcaacgtgtccttgctaggacgaccaattattttaagaggttgcttaagattatcgatgaaattattgaagaaagaatgccttcaagagtttcaaaatccgaccactccaaggtgtgcaaggatgtattggattcacttcttaacgatattgaagaaac

SEQ ID NO: 682 - DNA, 107 bp, Glycine max
  unsure (1)..(107): unsure at all n locations
  Clone ID: 700909076H1
gngnaagtcaagntagctgngcnggttctcttanaatgggttcattctctggcacttgtgaaatagntgaagcaaggggngnggctaaatagcaagnaangctccgg

SEQ ID NO: 683 - DNA, 244 bp, Glycine max
  Clone ID: 700909078H1
gtcttggtttaataatgtctgggaccattcgagtgcatgatgacctgcttctggctgcctctgaggctttggctgcacaagtgagccaagagaactttgataagggactcatatacccaccattcaccaacataagaaagatttcagcacacatagctgccaatgttgctgctaaggcttatgagcttggcttggccactcgccttcctcaacctaaagatttggtgaagtttgcagagagctg

SEQ ID NO: 684 - DNA, 264 bp, Glycine max
  Clone ID: 700909082H1
cgtacacgcacattctcctcaaagacaacaatggcaccaacagccaagactctgacttacctggcccaggagaaaaccctagaatcgagcttcgttcgggacgaggaggagcgtcccaaggttgcctacaacgaattcagcgacgagatcccagtgatttctcttgccggaatcgacgaggtggatggacgcagaagagagatttgtgagaagatcgtggaggcttgcgagaattggggtatattccaggttgttgatcacggt

SEQ ID NO: 685 - DNA, 255 bp, Glycine max
  Clone ID: 700909085H1
atcaagagaaacgataggacattcaagcttacagagccattgtcagagcactgccctcctggtgaattcgttcgtgaaatccctctttcaactcgaattcctgaagatgccaatatagaagcatactatgatgagccaggatctgtgcttgagataatggtgccaaaacttcttccaggagcagaagagcatgaagttcgtgtttgccttcgcccaaatgtggggaatgatctcatgttgacttgagttatagac

SEQ ID NO: 686 - DNA, 254 bp, Glycine max
  Clone ID: 700909103H1
acgcagaactgcccaatcttcaagctaacataaacaccatggaagccgtccaagtcatatccaccactacaatcaaggcaccaccgagtcacaataaccatgactcagttcagaaaatcgatttaactccctgggatcttcagttcctcccaattgaaaccattcagaaaggccttctttttcgcaacaaaaaacacacagaaaaccaaatcgagcacctccaacactccctttcatccactctcgccttcttt

SEQ ID NO: 687 - DNA, 252 bp, Glycine max
  Clone ID: 700909104H1
cctaaccctagaagaagaaaaaaaccacaaccaccaccatctagggtttttctttttctcatggctagtttgtcaactaggattttcttcatcatgtcccttgtgtgcctggctctcggtccaatggcacaaggggaaatgacatgtggccaggttgtgagcaacctgaccccatgcatctcctatgtggtgtatggtggaaccaatgttcctgaacagtgctgcaatgggataagaaatctctatggcatg

SEQ ID NO: 688 - DNA, 246 bp, Glycine max
  Clone ID: 700909142H1
gtgcaatttcgtcctctaacactcttccaaatcatggctagctcactgcttgtgagggttgccagctgcatggttgtggtgtggatgtttagttttgggcacataattcccttggcagaagctgaaattccatgtggcagggtgcaaatcactgtggctccatgcatagggtacctaaggggtcctggtggaggtgtccctgcaccatgctgcaatggggttaagagcataaacaaccaagccaaa

SEQ ID NO: 689 - DNA, 247 bp, Glycine max
  Clone ID: 700909143H1
cagcttcttgttgccctgagaaactttgtggttgcacttggttaccagtcacccatttgctacaatatactactgccaattctggagaatggaattgatattaatagtccagatgaactcaatctcctagaagatagcatgctgttatgggaggccacactttctcatgctccatcaatggtgcctcaattgttacaatatttttcacgccttgtggagattatggaaagaaattttgaccatttac

SEQ ID NO: 690 - DNA, 245 bp, Glycine max
  Clone ID: 700909145H1
gaggttgtgacggttacaaagggggcgatggtgtgcttgaagtggagattcgctgaggtgtgttcagatggtttgttggttttggttggggagaggggcgcgtcggaacctggcgtggccggtacgggttcggccgaggagggatatgaccttcttgaacttggagactgccacgtcagcgacgaccttgcagtccatggcgatggcgatttcattagagctattgttgttgatttgatggcggg

SEQ ID NO: 691 - DNA, 245 bp, Glycine max
  Clone ID: 700909150H1
agttctctcacacactcattcggtgctccgaatctcagattctagggttagggttcccaatttctccaccgatcagaaaatgagttcaactggtggttctaccaagggcggaaggggcaagcccaaagcctccaaatccgtttcaagatcgcagaaagctggtctccaattccccgttggaagaatcgctcgattccttaaggctgggaaatacgccgagcgtgttggtgctggtgctcctgtgt

SEQ ID NO: 692 - DNA, 299 bp, Glycine max
  unsure (1)..(299): unsure at all n locations
  Clone ID: 700909203H1
gtgttttcggagttattcggagtgtttgggttncacgtagaccacntggttntgcntttattgactttgatgaccgcagagatgcacaggatgctatccgngaatnggatggnatgnttngaagnatgatgttgttggaatgtantaganttnagatcaannttanaatgtgcatatatntgnatatttgctacattctntctnatctgctaatntgntattgttttaacccccanngtnttttccggntgatatgttgaagggttttcctcaactagctagttaagtctctttgtggg

SEQ ID NO: 693 - DNA, 288 bp, Glycine max
  unsure (1)..(288): unsure at all n locations
  Clone ID: 700909222H1
atgggagttacacagtgcacaatcgcgcatgcacttgagaagacaaaatatccagattcagatttatattggaagaaatttgaggataaataccacttttcatggccaatttactgctgancntaatagccatgantnatgctgatttaatcatcacnngtnnataccnggggattgnnggaccgaaaatnanggtnggccnngnnnngaanccngctggtttncccttcctgggtcccnaangggtgttcnangcnntgnagttttgnancccaggtcaatngnggc

SEQ ID NO: 694 - DNA, 136 bp, Glycine max
  Clone ID: 700909237H1
aaatggtattaaaatcacacaatagtttgatttccggtttttggactgaatgagtcaataagacatgtattttatttgcttatgtaatttttcagctataaatggactcctgtattaataattcttgcacagctct

SEQ ID NO: 695 - DNA, 274 bp, Glycine max
  Clone ID: 700909308H1
gttatcctaatgggtgccgttgaaggttaccgtattgctggtggccccctcggtgaggtcactgacccaatctacccaggtggcagcttcgacccattgggccttgctgatgacccagaggcttttgctgagcttaaggtgaagaactcaagaacggacgattggccatgttctctatgtttggcttctttgttcaggccattgtcaccggaaagggtccattggagaacctcgccgatcaccttgctgaccctgtcaacaacaacgcctgggc

SEQ ID NO: 696 - DNA, 279 bp, Glycine max
  Clone ID: 700909312H1
ttcccatgctggtagcctcacaaatttggcaaagtgcccctcttcaactcttcaaattcttggtgcggagaaggctttgttcagggcattaaaaacaagaggaaacactcccaaatatggtttgatattccactcttcttttattggcgggcatctgccaaaaataagggcagaatggctcgatatcttgcaaacaaatgctcaattgcatcacggattgactgctttgctgaaaggggtactactgtttttggggagaaactgcgtgagcaagttgag

SEQ ID NO: 697 - DNA, 280 bp, Glycine max
  Clone ID: 700909314H1
attagttcattctctttgcgcagttccctacctctcctttcaagatgcagatcttcgtcaagaccctcaccggaaagaccatcacccttgaggtggaaagctctgacaccatcgacaacgtcaaggccaagatccaggacaaggaagaattcccccggatcagcaacgtctcatcttcgccggaaagcagctcgaggacggccgtaccctcgccgactacaacatccagaaggagtcaacccttcaccttgtccttcgtctccgtggtggcatgcagatc

SEQ ID NO: 698 - DNA, 273 bp, Glycine max
  Clone ID: 700909322H1
ctgaaacatcttcatcatctacgaacgaccataaattttctctctttccctttccctctctctgtctgtgttttttcttaaaaaattctgtgagaggcatagaggaagatgaaggaaagcagtgatgggtttgtgagagcggacagattgatctgaagagcatagatgaacagttggagaggcacctcagcaaggtgttgaccatagaaaagaaaaagcgctctgaaggggaagaagatgctgatcatgttcatcttcatgttcacaccacca

SEQ ID NO: 699 - DNA, 273 bp, Glycine max
  Clone ID: 700909347H1
ctagcattgtgatgttgattgcatatgtagtctacattgtctttcaactgtggacacacaggcagttatttgaagccgaagatgagggtgaggatggtgaggacggtgaagaagaacaagctgtgattggattatggagtgcattgcttggttggtagggatgactgtgttcattgctgtgttgtctgaatatgtggtggatacaattgaggatgcatcagattcgtggggtttgtctgtgagctttctcagcataatcttgctaccaatagt

SEQ ID NO: 700 - DNA, 267 bp, Glycine max
  Clone ID: 700909378H1
tgccatcgaaaaagactactgtgaagcacaagaacttaaatcctgaatggaatgaagaattcaatatggttgttaaagatccagactcccaggttttagagattaatgtttatgactgggagcaggttgggaagcagacaagatgggtatgaatgtgatccctttaaaagaagtttcccctgaagagactaaacgtttttctcttgacctcctaaaaaatatggatcctaatgatgtccaaaatgagaagtcacgagggcagattgt

SEQ ID NO: 701 - DNA, 256 bp, Glycine max
  Clone ID: 700909383H1
gcccaagaggccctccgacaagcctctaaggcttccattgcaggatgtctacaagattggtggtattggtactgtgccagtgggacgtgtagagactggggttgtgaagcctggtatggtggtgactttggtcccactgggctgacaactgaggttaagtctgttgagatgcaccatgaggctctcacagaggctcttccaggtgacaatgttggatttaatgtgaagaatgttgcagtcaaggatctcaagcgtg

SEQ ID NO: 702 - DNA, 288 bp, Glycine max
  Clone ID: 700909401H1
cagaagtgctcacgaaaatctccttcaggctcccttattgtctagatcaaatagcactgaggcttcattggcaaaggataattcctctaatgatgtaaaaaatggtcaagggtacaaaggtcatagtatgcttgctcctttcacggctgggtggcagtcttctgatttgcaccctctgatcatagaaaagtcagagggaagctatgtatatgacattaatgggaagaaatatcttgatgcacttgctggtctatgggccacttctttagggggaagtgagccacgcct

SEQ ID NO: 703 - DNA, 280 bp, Glycine max
  Clone ID: 700909410H1
gtaatccctgaagtccatagacatggtggtgcagctcaccacaacaacctccttttgaaatggacataaattaatatttacaggtatctgattctagcttgagctcccatttctgtatgattctgggtaatgatttccttaccggtttggtcagtgtaagctaccaacttggctatttaaagtgtcatatgttattgctttaattaacttattgccacagcagtagtgaagataaacttcttgatatagcactagtaaacatgtggattgatttaattgc

SEQ ID NO: 704 - DNA, 280 bp, Glycine max
  Clone ID: 700909414H1
ggaaagctgaaaggcattgttggagagagcagaacaaactacatcctatccaatagtctttatcttgtggtggcaggtagtgacgacattgccaacacctattttgttgctcacgccagaatattacagtatgacattccttcttacaccgaccttatggtcaactcagcctctaattttgtaaaggaactgtataatctgggagctcgtagagtttcagtactgggtgcaccaccgattggatgcgtgccatcacagagaactctggctggagggctaa

SEQ ID NO: 705 - DNA, 278 bp, Glycine max
  Clone ID: 700909421H1
agagattataacatatctgttaaaggtgtgacggatctttcttttcatgctaatcaaaagcttggtggagatcataagtggggtcttgcatctttgactgaaaaacttctatcaaaacagcttaaaaagcccaacaaaataagactgggaaattgggaggctcctgttttgtcaaaggagcaactagagtatgctgcaacagatgcttttgcttcttggtgtctttatcaggcgattaaagatctcccggacgcccagaaagtcactgacagaagtgg

SEQ ID NO: 706 - DNA, 281 bp, Glycine max
  Clone ID: 700909422H1
gctctttctctcttagaaaacaccctctaccgcctctaagtcctacaagaacccatcccctccccagccgctcccaaaatctcactcttcttactcttcttcctccaagagaagtaaacaaccctcacattcaccacagcagcacacacagacaaagacaaccttgtttgtctccaatcaaaacctttcaagctggcgttcgaaaaccaagacaaccctgtccgagaaatcaagcccaagaataggagaatcatgggtgctggaggccctgatgatgagga

SEQ ID NO: 707 - DNA, 276 bp, Glycine max
  Clone ID: 700909437H1
agataaccccagcattaaatcttcctaaagatctcccatgttttggtacaaacaacaaacaaattatgttgaactataaaaaagattgcagggattgtgaaagattattccaaggcatcctccatttccatgaggtgagtgaatcgaaattgtgcttgaaacacaggaaagccacatccttgaggtgcactttcagaatttgattagtagagtgctttgctggaatgccatctggataccagtagcatttatgttgaagaagggtgccaatgtttg

SEQ ID NO: 708 - DNA, 275 bp, Glycine max
  Clone ID: 700909441H1
gcagagatgatgttaaagtggctttagctggtgatattattgctcttgcaggtttgaaagatactattacaggtgaaacattgtgtgaccctgataatccaatcgtgctcgagcggatggacttccctgatcctgttattaaggttgcaattgaaccgaaaactaaagctgatgttgacaagatggcaactggtttaatcaaacttgcacaggaagacccttctttccacttctcccgtgatgaagagataaaccagacagtaattgaaggaatg

SEQ ID NO: 709 - DNA, 276 bp, Glycine max
  Clone ID: 700909443H1
taaatctcttgttgccttctttcttacagattgttctctttcatgctagcatatcatccataaatgcatgcatgctttgcaatttgcaaaacagttttatgccaaattcaactaactttagtttttggttggtgatggggttttaggggactacagaacttctatggccaaaacgtagttacatgtgaaactattaggtgaaacattgatgtattaggaaaacaccataactaactgcgatattgacgattatgtccttgttggaaatgagttgca

SEQ ID NO: 710 - DNA, 274 bp, Glycine max
  Clone ID: 700909453H1
gtgaaatctaacaccgagcgtgtagatagtctatgaaatccaattaaatgttcttctgagaacaaagaacataagataacaaacagaaagcgcttataaatggctttccacgaccatctaccgcacgaaatcacgttccagccgtttaccgaggagcagcagttaggtcagagcagggacatgcagcggctgctcccgctctccggcggggcgccgacgtggctgaacaacagcaccgcggcgacgctccgccagcagaatttcctccacctgc

SEQ ID NO: 711 - DNA, 275 bp, Glycine max
  Clone ID: 700909456H1
gagagagagtgagagagtgagtgagatagagagagacgcttcgcaaatctcaatcgaatctcagaaaaatgagagaaatcatcagcattcacataggtcaggccgggatccaggtcggaaactcctgctgggaactctactgcctcgaacatggcatccagcccgacggcatgatgccttctgactccaccttcggtgtagcccacgacgccttcaacaccttcttcagcgaaaccggatctggcaagcacgtcccccgtgctgtcttcgtcgac

SEQ ID NO: 712 - DNA, 272 bp, Glycine max
  Clone ID: 700909460H1
gtggagtcagtagaagtttagaatatatcaactgcaagttaattagtcaatattacctatttattttggaatgtatatgcagtgaattagtaattaataacgtttttattatattaactcaattaactagacatgttttcatgcacatatatgttttttcctatcaagttcagtctagctggaacttgttgtcaaccctttacccctgtcccttgaagatgtttcactctttcaatgaatgttcaagaagtaaaattcatcagcagattcaa

SEQ ID NO: 713 - DNA, 270 bp, Glycine max
  Clone ID: 700909471H1
agactacatcattctgtcttgtgttagaagtaatgaacatcagggcattggatttctgaatgatcctaggaggctcaatgttgcttgacacgagcaagatatggcattgttattttgggaaaccctaaagttttgagcaaacagcctctatggaatagtttattgactcactacaaggaacatgagtgcttagttgaagggcctttaaataacttgaagcaaagtatggttcagttccagaaacccaagaagatttacaatgaacgaggc

SEQ ID NO: 714 - DNA, 183 bp, Glycine max
  Clone ID: 700909485H1
tccatatacatgtactttttaattacccattcaatcccatatgatttatggctccttggagctgattttgtaattgtaacaattcacttttgtaatttatgtacaacaaccaagaattgctaaacgcatatacagtttggcgattcacattcaattttttaattccatttctccatcacacac

SEQ ID NO: 715 - DNA, 159 bp, Glycine max
  unsure (1)..(159): unsure at all n locations
  Clone ID: 700909487H1
gcagtatctggcaatttgcagaatgaaatggtgcacatctatctttctgaagtacttgattggtatgctgatttaagtgctcaagaaaaatgggatgagaaagatcattccccaacaaggnaaaaattnttgactgccttagagagtatagcaggatac

SEQ ID NO: 716 - DNA, 151 bp, Glycine max
  Clone ID: 700909527H1
aagatggcttcctttgtatccttcctagtgctgcttcttgcagcccttatcctcatgcctcaagggcttgctacttactacaaaccaattaagaagccaccagtgtacaagcctccagtgtacaagccaccagtgtacaaaccaccggttt

SEQ ID NO: 717 - DNA, 244 bp, Glycine max
  unsure (1)..(244): unsure at all n locations
  Clone ID: 700909529H1
agcaaanangcgaagacccctttttcnggttattnncagagtcatccnanncccangtctnctangctctgtagctcnnatggtnggctantattntcngacctttgggttggggttgtnatggcttgcgcaagcgataggttgatnagcttgactgcacttgaatctctgtagtctcatgagnngcntatgatcggntgaatgtggtgnaaatagtgggntaggngtgaacnttanngccggc

SEQ ID NO: 718 - DNA, 255 bp, Glycine max
  Clone ID: 700909534H1
catgagggtgtgtgttagagatatgatataaaaccatttatctatgttcacctaataacttaagcttttgagatagttagttcattacattattaaatattttggagtttcaacataattgctatgtaggaaattcataagaggaaaccttaggggatgcatgtgtagttactcttataaatttgagtcctgtatacattcggtttcacatacttatcatgtaagattgaatggatataaaatagttcctctctc

SEQ ID NO: 719 - DNA, 249 bp, Glycine max
  Clone ID: 700909558H1
tgttgagaagcgtcagatgaccaaggctgtagcaatattggatgaaatgaatgtggcaggtgttggaccaaatgaacacacatatacaactcttatgcaaggttatgcttcactgggtgacactgaaaaggcctttcagtactttacagtgttgaggaatgagggcctggagattgatgtttatacttacgaagcgttattgaagtcatgttgcaaatcaggcagaatgcagagtgcccttgcagtcac

SEQ ID NO: 720 - DNA, 245 bp, Glycine max
  Clone ID: 700909579H1
atgagatttgggatctaggtaacaaagaacagtttatgctgcttccatatctgatatagaatccttgaaaatgacatttgtatttaaagattggggttgaagagctctgtcatggggaaaagaatccatacttggttgaaggaggcttttattcttggatgaaacaaggtctccgtatcaaggaactcaaacctgagacagcactttccatcctcaatgaggaagctgaagcaattctggaggat

SEQ ID NO: 721 - DNA, 245 bp, Glycine max
  Clone ID: 700909594H1
atcgtatcttcaagtactcaggttgcagcccatcatgctttgtcgtggcacacatatatgtggacagattcattcaacacacagaaatcaaattgacttcactttatgtgcaccggcttctgataacaagcatcatgctagcagcaaagtttatagatgacgcattctacaacaatgcttactatgcaaaagttggaggagtgagcacgtctgaattaaacaggttggagatgagctttctattt

SEQ ID NO: 722 - DNA, 244 bp, Glycine max
  unsure (1)..(244): unsure at all n locations
  Clone ID: 700909657H1
atcagaaaaagcttgatgttgttntcaaatgagggtttctncaaactgcttgaggtcaagtgggaggacagggataatagcatcagaggaggaagatgtgccagtggcagtagaagagagttattctggaaactacattgtggngtttgaccccacttgatgggtcngcccaatantgatgctgcagtgtccaactggggtccattttgggatatacagccccangatgagtgncttgctgaca

SEQ ID NO: 723 - DNA, 235 bp, Glycine max
  unsure (1)..(235): unsure at all n locations
  Clone ID: 700909696H1
tttgaaaatggtatccaaaaacccgaacccgcccgagggatnctacttggatcctagtggtggcatggctcttccggggaagcctcccttcgcttccgtnnnnnnnnnnnnnnnnnnnnngaactcgtcggaggacgccgccaagaagatccgcaagccctacaccatcacaaagtcaagggagaactggaccgaacccgaacacgacaattcctcgaagcantcaatgtttgac

SEQ ID NO: 724 - DNA, 258 bp, Glycine max
  Clone ID: 700909715H1
caagttgtaatatttgtggggtaaaagccatgattcagataattggggcttgctgacataaaggcatgattgaactctccactcctttctatataatcccttccacacgcacttctccatggtcatagtcacaactagagatgacggttcaaaaggaagatttgggcttgagtctaagtttgagcttccctctcctctcctcttctccttccagcccacaaccctcagaaaccctcttggaacgaccctattttcact

SEQ ID NO: 725 - DNA, 260 bp, Glycine max
  Clone ID: 700909719H1
actccgtccaatggaatcctgcaagcatcatattctctgtggacgggaccccaataagggagttcaagaatttggagacaaaaggggttccattcccaaagagccaacccatgagaatatactctagtctttggaacgctgaggattgggccacaaggggtgggcttgtgaaaacggattggagcaaggccccattcacagcctcatacagaaacttcaattcccaaacttcttcctccactggccaatcactggacgcc

SEQ ID NO: 726 - DNA, 262 bp, Glycine max
  Clone ID: 700909720H1
gaaagaaggaaggagacatttataaaaagctctttcccttcccctaaatccctcacactcattccatttttacctttctctctcgctcgcaaacgcaaataataaaaaacaaggttttagccatggcatcgaagcggatcttgaaggaactcaaggatctccaaaaggatcctcctacctcatgcagcgccggtcctgttgctgaagacatgtttcactggcaagcaacaattatgggtcctccagacagtccttatgctgg

SEQ ID NO: 727 - DNA, 257 bp, Glycine max
  Clone ID: 700909723H1
aaataattctcgtagctttgttgctcttataaattctattctggttgacgcttctctcaccatccccatttcgcgttggtgcaaagcatccttcgtttcaatttctctctctcagcgctttctgcaatcgaacctttcatctccaaagggatccacaggccgaaggagaaatggggctgacattcacaaagcttttcagtcggcttttcgcgaagaaggaaatgcgaattctgatggttggtcttgatgctgctggt

SEQ ID NO: 728 - DNA, 255 bp, Glycine max
  Clone ID: 700909725H1
gtggagtaacaacaatcaccctgaacatgacaaaactgttcgttttggagagtatcagaactcgggacctggtgcagaccccaaagggcgtgctactataactaagcaactaagtgaaacgcaggttaaaccttacataacacttgcgatgattgaaggctccaaatggctacttcctcctccaactcccaaggtttaattaattaccacatttttgtctggcttgaggaataatgcaccccatgttttagtgga

SEQ ID NO: 729 - DNA, 253 bp, Glycine max
  Clone ID: 700909728H1
gggaagtggtagccatgactggggatggtgttaatgatgctcctgccttgaagcttgcagacattggtattgcaatgggcattgcagggacagaggtggcaaaggaagcttcagatatggtgttggcagatgataattttagttcaattgttgctgctgttggtgagggtagatctatctacaataatatgaaggcctttatcaggtatatgatctcttccaatattggcgaggttgcttctatatttttaac

SEQ ID NO: 730 - DNA, 252 bp, Glycine max
  Clone ID: 700909731H1
cttgactggtacaagggaccaactctccttgaggctcttgaccaaatcaatgagcccaagaggccctcagacaagccactcaggcttccattgcaggatgtctacaaaattggtggtattggtaccgtgccagtgggacgtgttgagactggtgtcgtgaagcccggtatggtggtgacttttggtcccactgggctgacaactgaggttaagtctgttgagatgcaccatgaggctctcacagaggctctt

SEQ ID NO: 731 - DNA, 257 bp, Glycine max
  Clone ID: 700909734H1
aaaattcactatggattaacagtctcatattatggttttgttggtgatgtgttggaactttctgaaaaatatcagaagcgctttggcccgctgcggtattttgttgctggattcttcaagttcctatgcttaccacgctacaactatgaagttgaatatcttccagcttcaaagactgagagagaaggaaagctttctggtgaaaaggaagtagttgacatgtcagatctgtatactgacatcatgagcagatcaaa

SEQ ID NO: 732 - DNA, 256 bp, Glycine max
  Clone ID: 700909737H1
cactgctgctcactggtcagagaagtacaaccatgtgatcaaggccatgactcaaaagggttatagtttcgtcgggtatctacctttgattcccattgaagagatagccaaggcattcaagcagggagaggcgaacttaaaaggagataatgcagcctctgaggaacaaagattagaatctgcatctgattctgattaaattcagctttacttcttcaaaaaaatttgcttatgagtgaacttgttttgtgggttg

SEQ ID NO: 733 - DNA, 255 bp, Glycine max
  Clone ID: 700909738H1
ttggaattcaactcttctctttctctgtcgaagaacaagtagtttcagaaagatgctagagaatcttcaggctcctccgtcaacaacggaatcggccccagtggtgaagcgctatgctccacccaaccagaggaaccgttctgctaacaggcgcaaatcatctgatcggcttgatcggacaaacagtgtcgggaatgacttagaaaagaatcaagttgcttcttcaagaagtgttcacattccagatcatgaaga

SEQ ID NO: 734 - DNA, 249 bp, Glycine max
  Clone ID: 700909747H1
cttggcatcttgtgttgtgtccctcttttaagctatttccttctcttaacacaattggttgtgccaattgccatagtcaccaaccaattaacaaaggtatatatatcatcatatcatcaccaaatgaaaaatattgggttgttttttcttgtggtggtggctacttttgtggtggcagccacagctggtagcttttaccaagactttgaaataacgtggggtggtgagcgtgccaaaatctatgagaat

SEQ ID NO: 735 - DNA, 254 bp, Glycine max
  Clone ID: 700909751H1
ccacattcaaatccaaatggccctttacattacactaataattggcctcctagtaaacaccctagtactctataaatagcatttgcatgcaccttagtcttcaccaaaatactcctcttggcatcttgtgttgtgtccctcttttaagctatttccttctcttaacacaattggttgtgccaattgccatagtcaccaaccaattaacaaaggtatatatatcatcatatcatcaccaaatgaaaaatattggg

SEQ ID NO: 736 - DNA, 255 bp, Glycine max
  unsure (1)..(255): unsure at all n locations
  Clone ID: 700909752H1
gggntctgnatgaggagttaactagaaaagttgtcactttggtggcagagaatgaaaacctaaagagggagaaagaattggctttgaaagagtatgagtctttggagactacaaataagaacttgaagacacagatagccaagtcaataaacactgnaagtggagaaaactcctgttgagcctgtgtcatctgtggctgagataacaccttcatccggtaatggtccatggttcctttataacctttttccagtt

SEQ ID NO: 737 - DNA, 252 bp, Glycine max
  Clone ID: 700909756H1
gacaaaggctcgtgaagttctgcaaagagaagatgacctgaatgaaattgtccagcttgtgggcaaggatgctttagctgaaggagataagatcaccttagaaactgcaaagcttttgagagaggattatcttgctcaaaatgcctttacaccatatgataaattttgccccttctacaagtctgtttggatgatgcgcaacattatccatttctacaatttggcaaatcaggcagtagagaggggagctgg

SEQ ID NO: 738 - DNA, 245 bp, Glycine max
  Clone ID: 700909764H1
atggaaatgaagaagccgtgttgtgaagagtcagagacaattgttggatcctgggaatgttggttcgacgatgcatgcatcgttgacatggattactttgtgaagaccctttcaagcatcaaacagaaaggtgttcgtgcagacttgattggttccatcatcactcattatgcctccatatggctccctgacctctcttcctctgctgaaaatggtgtcaccactcacttccaatcccccgaaag

SEQ ID NO: 739 - DNA, 248 bp, Glycine max
  Clone ID: 700909769H1
acaatttctggctcaaaaaactccctcttgttgtgtctcactttcatctttctataatgatacccttgttccctgcctaacatgtgcatgtggctgccaaagtaactcatctcagtcagggacttgtgtagatccagatacaccacatttggcatcagttgttgctggctctgggaagaataacttttcacctttggttcaatgtactcatcatatgtgcccagtcagtatccactggcatgttaagc

SEQ ID NO: 740 - DNA, 247 bp, Glycine max
  Clone ID: 700909772H1
aaaataagacattgtttggtttggttacttgctcgaatttcctcgaatcgcttaatttgtatttgattagttaaaccgcaacgcggaatctcttttctcgaactggctaactctcaggcaagtggttcggacgctgattccagcaacaagcggctggtgctcgcactgtatgacgccctaaactccggcgactccgacgccgtcgtcaagatcgtcgccgccgacctcgagtggtggttccatggtc

SEQ ID NO: 741 - DNA, 244 bp, Glycine max
  Clone ID: 700909776H1
cgaacagtgaaccctcacctaacaatcagaacccaggatttggtgaaacgatgaacagtgataggaaaattggggttgccttggacttttccaaaggaagcaaaatcgctctgaaatgggctattgacaatcttatcagcaacggtgacactctctacatcgtccacaccaagccttccggaggaagtgaatcaggaaatcttctctggtccaccactggttcacctctgattccattgtcgga

SEQ ID NO: 742 - DNA, 242 bp, Glycine max
  Clone ID: 700909778H1
agggtcttggcttgtgttctgatgatagcaatggtggaacacattctggtgatgctctttctccgtttcttatctcttgcaatccacatcaacctaaattttcacaaccagttcaagttgcatgtggggctgctcatactgtcattattgcgcatgagggttgcaagctatggtcttgggggagaggaaggagtggagttcttggaaatggtaagactatggatagttacactcccaccata

SEQ ID NO: 743 - DNA, 245 bp, Glycine max
  Clone ID: 700909786H1
gcaattggttggcatcagtgccatgctgatggcatccaaatatgaagaaatttggactcttgaggttgatgaattagtccgcctcacagattatactcatgaacaggttctggtcatggagaaaaccatattgaataagctggaatggaatttgactgtgccaacaacttttgttttcctggttcgtttcatcaaggcatcagtcccagatcaggagttagaaaacatggcacattttctgtctg

SEQ ID NO: 744 - DNA, 238 bp, Glycine max
  Clone ID: 700909796H1
atcagactccaaaacagttaaccaacaagcttacttttatgccagagacctcgaagtccatcccaaggacacatttgtgttcagtatagatggcaccgtactctctaatattccatactacaaaaaacatggatatggggtggagaaatttaactcgaccttgtatgatgaatgggttaacaagggcaatgcaccggcactgcccgagactcttaagaattacaacaagctggtgtct

SEQ ID NO: 745 - DNA, 237 bp, Glycine max
  unsure (1)..(237): unsure at all n locations
  Clone ID: 700909828H1
cgaaacagtggctacagcctctccagcagttaccaagtctacaccagaagggaagncaaacattgaggaagggcagtgttgtgataactggggcttcatctggactaggcctggccactgctaaggctttggctgagacgggaaaatggcatgtaataatggcctgcagggattacctcaaagctgcaagagctgcaaaatccgctggcatggctaaggaaaactacaccatcatgc

SEQ ID NO: 746 - DNA, 240 bp, Glycine max
  Clone ID: 700909836H1
cttttatttcactccatgatcatcactcacacatcaaacactactactagctccttgtatgagtgtcattccttctagctaaatctctctcttttggggtatggaattcaacaagttcagaatcagaagctatgaggggcaatctgatagggctcaagtggaagatcttgagagaagatgcgaggtagggccatcagaaagcgtgtttctcttcacagacactatgggtgaccccatttg

SEQ ID NO: 747 - DNA, 240 bp, Glycine max
  unsure (1)..(240): unsure at all n locations
  Clone ID: 700909837H1
gtgtgatactntcctttcatcntcttcttctctctgcgataaaagcaaaacctaaaatttggtttaggcataggaatctgttgtagagttgatctacctggaatggagggagcatcgtggaatagtagtgtttgtgtggcaccgtttctgagcaagacctacgacatggttgatgatccttccaccgacttagtggtgtcgtggggcganaacaacaactcctttgttgtttggaacgtt

SEQ ID NO: 748 - DNA, 80 bp, Glycine max
  unsure (1)..(80): unsure at all n locations
  Clone ID: 700909838H1
gcgctcggtgcgttcggtctgcggcgagcggttatncagactcatctacancaggacngtaatanggttatgccacanaa

SEQ ID NO: 749 - DNA, 242 bp, Glycine max
  Clone ID: 700909849H1
agtgcctataatcatgattggtcctggcactggattggctcctttcagaggtttcttgcaggaaagattagctctgaaagaaggaggagctgaactcggcccctcagttttattctttggatgcaggaaccgtcaaatggactacatctatgaagacgagttgagtcacttcgttaatactggcgcacttgatgagctcattcttgccttctctcgagagggacccaccaaggagtatgtac

SEQ ID NO: 750 - DNA, 233 bp, Glycine max
  Clone ID: 700909860H1
ggattgtcatagtccaggacaaggtttgatgcctgctagttttaaggttaggacagttcctttggacggtgatgattctgcaacagaagaagttttggatcctgactttggagaggcagccattggtcgtgttgctccagttgattcaggattgtggtggattattttattacgagcatacggaaaatgctctggtgatctatcagttcaggagagagttgatgttcaaacag

SEQ ID NO: 751 - DNA, 235 bp, Glycine max
  Clone ID: 700909886H1
gtcttcttcggatcggtggaacttgaccctgccggcgtgaattccgacgctactcgtggcgccgaattgctatagcggtgacgaatatgaaggttttcgttaagactctcaaaggcactcacttcgaaatcgaagtgacgccgcaagacacggtttctgaagtgaaaaaaaatatagaaactgttcagggtgcagatgtctatcctgctgcacagcaaatgctaattcatcaagg

SEQ ID NO: 752 - DNA, 233 bp, Glycine max
  Clone ID: 700909892H1
gaaaattttatcctcgtttcaaccttgaagataccataagtttccaggatttggatgatcatagcaagaatgttctcaaacgattataccatgactactatttctgtcgtcaagagaatctttggaggcaaaatgcattgaagaccctgcctgtacttctaaattcatcagacatgctggcctgtggggaagatttgggtctcattccatcttgtgtccatcctgttatgcaa

SEQ ID NO: 753 - DNA, 257 bp, Glycine max
  Clone ID: 700909911H1
tgcaatctctacagaatgaagtggagatattatcaatgaaactggcagcagttaacccagtaattgatttcaacctcgatagcttactggctaccgaaggagtgactccaatggactgtaacttccctccgacagttgcacctgtcatgtggccagaaatcccacagaacggaaacagacaacaatatcagcaaccgtggcagtttgatgcattccaccaacccctttgggggagggaagaagacaaaactaacatg

SEQ ID NO: 754 - DNA, 263 bp, Glycine max
  Clone ID: 700909918H1
ttcatagtgaggcgtcagttgagaaaaatgccagagagctaaaagagtacattgaggaaatttattggggttcaaataaacgtgttatgcttcttggacatagcaaaggaggagtagatgcagcagctgctttatctttgtattggtctgatttgaaagataaagttgctgggttggcattagcacaaagtccctatggtggaactcctatagcttcagatcttctgcgagaaggacagcttggtgattatgtaaatttacgg

SEQ ID NO: 755 - DNA, 258 bp, Glycine max
  Clone ID: 700909925H1
gccgctggtggagctcgtggcggaacaggggaacggcatggcggagaaggccatggtggtgctgaacagcctggcggggattcaggaagggaaggacgcgattgtggaagaaggcggaattgctgctcttgtggaagctattgaggatgggtctgtgaaagggaaggaattcgcggttttgacccttcttcagctctgtgttgatagtgtcataaacagagggtttcttgttagagagggtgggattcctcctctcgt

SEQ ID NO: 756 - DNA, 259 bp, Glycine max
  Clone ID: 700909928H1
tttccattgccttcatttctcttacatacgtggtggtgggatcacagtccagatggcttgcaatatatgctacagtgattggaagcttgataatgctctctacaattggctccatgtgctattgtgtaattttgcacaggatggaggagacaaaattgagagccgagagtcgatcgttctccatgtctcatgcatcagaccaagagattttgaacagtgaatacaagagaatgtacgcactgtagtctgtagtgtagtt

SEQ ID NO: 757 - DNA, 260 bp, Glycine max
  Clone ID: 700909929H1
cttccttatgatggctctagtggaaagaagataattggagagatggaggttgatatggcaagtttaataataattgggaatgcttttggcttgtgttttgcaacgtttctttgaccctctcgattatgtcttcaagattgtggataagtgtagattaaagtctctttcatgacagggggagccttttgcactttcctctgtggtgttcttccctttagtgtgtcatttttttcttttaagttattctcttcagctgtcat

SEQ ID NO: 758 - DNA, 156 bp, Glycine max
  Clone ID: 700909950H1
tctcagaactgtttcctgctggctctgatgttatttcagaacttcacaaactctatcactccccaaaattagttgctcttcatgagattcttgaagaatgtggaattggagttgacaattctggttctgagggtgcggttaacgttgggcagcata

SEQ ID NO: 759 - DNA, 257 bp, Glycine max
  Clone ID: 700909976H1
gcacctcgtaatcccagggttacccaagattcacaccgatgacttgccggagcagatgcaggatcgtgcgaacgaaggttaccaggtttttatcgacatcgccacgtgcatgagggacagtgacggggttatagtaaatacttgtgaagccatggaaggtagggttgtagaagctttttccgaaggattgatggaaggaaccacgccgaaagtgttttgcattggacccgtgatttcttctgctccttgtagaaagg

SEQ ID NO: 760 - DNA, 265 bp, Glycine max
  Clone ID: 700910014H1
gatcaagcagctgaaccgcaacggccaccaagggcacaaggagtggatcaacgaggtgaacctgttaggtgtcatgaagcaccctaatttggtgaagttggttgggtactgtgccgaagacgatgagagagggattagaggcttttggtttacgagtttatgccgaataagagcttggaggatcatctccttgcaagagtgccatcgacgataatcccttggggaaccaggttgaggatcgcgcaggatgcggcgaggggtttgg

SEQ ID NO: 761 - DNA, 265 bp, Glycine max
  Clone ID: 700910023H1
gctgcaagacttttagaagtattgctgaacaatgtgaagattcgagaaacgaaagtaacaaagtcagctatcgtaccattatcacagtatcttttggacccacaaactcaagcacagcaggcaaggttgttggcatttggctcttggggatctgtttcagaatgaggctcttgctcgaacaagtgatgcagtttcagcttgtcgtgctttagtgaatgtgcttgaagagcaaccaacagaagaaatgaaagttgtagccatatgt

SEQ ID NO: 762 - DNA, 264 bp, Glycine max
  Clone ID: 700910028H1
gcatctcagaggccaattctttcgccgcttcttctctctttccaacgcttccccctgtggtgttctcgtgttgctggtaacaatatggttgttgacgctttgaatgaggatttgagaatcaacggagcagttgaacttgcctgaggactttgatgcaacagctgtaatcatagatcccgtgcctttggcagttgtagacaatggcattgtcaaggaggaggcgcagatcattaaaggaaaagagaaaagagaaatagtactggg

SEQ ID NO: 763 - DNA, 260 bp, Glycine max
  Clone ID: 700910034H1
gaggtttctggaataaaaaatactatggagacaagaaaaggtgaatttattactgaagaaattaaacatgcaagtgtgcagatcatgtgtgctggtgttgtaattggactggtaactttggttggtttaaagttttacctactaggaatggctcacccattcttcgtaaaatgactggttccgcaatggtgtcagatactatcaacttaggttccttgggagatgaagaaaaagtagagcagctaccaaaaatggatgca

SEQ ID NO: 764 - DNA, 262 bp, Glycine max
  Clone ID: 700910038H1
gagaaaaaggcatctgttgaagaaaatttcaataatgttttaagtccagacatgaacaagaccaatagcagcgatgatgtggggtatcccgaagagttgaacttggacagaagttctggtgatgattctatggagaggatttgcctgagactaagcaaattgattctaagtttaatgttgatgaacttaaagacaaaatagagattgaagagcctattgtgaaggaggaaagtagtactatagctgttggagatggtctgtc

SEQ ID NO: 765 - DNA, 261 bp, Glycine max
  Clone ID: 700910046H1
gggtgtcgtgggtttggccaaaggactgagaaaggccaaaagcatgtaccctttggtggttgctgtgttaccagatgttcctgaagaacatcgtgagattctcaaatcccaaggttgcattgtcagggagattgacctgtgtaccctcctgagaaccagacccagttcgccatggcctattatgtcatcaattactccaagctacgtatttgggagttcgtggagtacaagaagacgatatacctagacggtgacatccaa

SEQ ID NO: 766 - DNA, 264 bp, Glycine max
  Clone ID: 700910061H1
ggctaatccctcactcttgttcttcagtctcctcctattatccgccaccgtagccaccaccttctccgccttcaagacaaagttcggcaagacctacgccacgcaggaggagcacgaccaccgcttccgtatctcaagaacaacttgctccgcgccaagtcacaccagaaattggatccctccgccgtccacggcgtcaccaggttctccgatctcactccggcggagtttcgccgccagttcctcggcctgaagccgctccgc

SEQ ID NO: 767 - DNA, 259 bp, Glycine max
  Clone ID: 700910066H1
gagaagatagttttttctctctccaagttcatggattcttcaaactccaatggagcatcacagaggctcctggacttggctcaacggctccgcctgtacaaacccccaccattccctgaagacatcttggtcagatcatggaagagaagggagataaggttgtctcagaagtgagttacacgaaatcagccaccccaattgctcaaaacacagcaaaaatcggatacaagagagctgctgttttgatctgcatctttga

SEQ ID NO: 768 - DNA, 259 bp, Glycine max
  Clone ID: 700910084H1
aactgctactcgctcatcccgtggaggtttcgctctctcagtttcttttccccaaattggtttttcatctaacaatttactttgcagaaccgtaaccctaaccccttcccctaccttgtaaccttcctttgatccttcacctcgcagataatgggagaaacaaaggacgaagcatacgaggaagagcttctcgattacgaggaggaagacgaaaaggcccccgactccgccggagctaaagtcaacggcgaagtaccaa

SEQ ID NO: 769 - DNA, 263 bp, Glycine max
  unsure (1)..(263): unsure at all n locations
  Clone ID: 700910094H1
gtctaggtggatttgacacagcacatgcgggatgctcgtgcttatgatagagcggctattaaattccgaggagtggaggctgacattaacttcaatattgaagactatgaagatgacttgaagcagatgagcatcttaccaagncaagagttcgtccacgtgcttcgccgacaaagcactggatttccgagaggaagctccaaatatagaggtgtcactttgcacaagtgtggaagatgggaggctcgaatgggccaattttt

SEQ ID NO: 770 - DNA, 331 bp, Glycine max
  Clone ID: 700862947H1
cgaggaatcaccgtcgtcgttggtgagcgagggggatgaagatttattagaaccatatgaaactgagatctctctaaaatgcttgcttttgcttcttctctctaaaactgcatccttggaatcaggcgagacagagttttcttcattctcgaaaattggcaaaggtaggtagttagttatttgcaatgatagaaggtggtagcatccggctgaagacatggcagcaggcagctgtggcagtgggttcggcggtgggggcgttgttggaccctcgaagagcggatttgatagcagctcttggtgagacaactggaaagcctgcttttgagag

SEQ ID NO: 771 - DNA, 327 bp, Glycine max
  Clone ID: 700862961H1
atttgatgaagaagatgacagcattgaaacaatcacacttggggataaaaggattggcattaagactagtgtcttggaggagaaggctaccgcttgtaacatgctatgttgctatgctgatgagttgaaggaaggatttttcccttggattgaccaggttgctttcacattggttcctcttcttaaattttacttccacgaagaagttaggaaggctgcagtttcagccatgccagaactgttgtcctcggcaaaatcagctgtagagaagggacagtcgcaaggtcgtgataagacttacgtaaaacagttgtctgattatataat

SEQ ID NO: 772 - DNA, 197 bp, Glycine max
  Clone ID: 700862986H1
cacagaacaagaaaactgagatatacaccagaattctttccatccttaagaatggcatagttgttggtgataagaagtttgaatttctagcattctcatcaagtcagttgcgggaaaactctctctggatgtttgctcctacagaaactggatgtactgctgcttacataaggaaatggatgggaaattttagccag

SEQ ID NO: 773 - DNA, 331 bp, Glycine max
  Clone ID: 700862987H1
gtgagtgagatagagagagacgcttcgcaaatctcaatcgaatctcagaaaaatgagagaaatcatcagcattcacataggtcaggccgggatccaggtcggaaactcctgctgggaactctactgcctcgaacatggcatccagcccgacggcatgatgccttctgactccaccttcggtgtagcccacgacgccttcaacaccttcttcagcgaaaccggatctggcaagcacgtcccccgtgctgtcttcgtcgacctcgaacccaccgtcatcgacgaggtccgctgcggcacctaccgtcaactcttccaccccgaacaactcatc

SEQ ID NO: 774 - DNA, 249 bp, Glycine max
  Clone ID: 700863002H1
ctttctgccacccccacaaaagggtgcttgcgtttctttctgtgatctcaaccatgaagcgtccactcacaccttcagccagcggcatgaagactaacaagaaagccaaggcgatggaaaatgacgaagacgtggaggggctggggctttcgacgacaaccttctgttcgaggtgttgaagcacgtggacgcgcggacgctggcgatggcgggatgcgtgaacaaacagtggcacaaaactgcgcaaga

SEQ ID NO: 775 - DNA, 247 bp, Glycine max
  Clone ID: 700863003H1
ggggattctgacagtctcaaagagtctggctcaaagaaaagggttaggtctgagtcatgtgctgcttctggctccaaggcatgtcgggagaagttgagaagggataggcttaatgacaagtttgttgaattgggcgccattttggagcctggaaggcctgccaaaacagacaaggctgctatcctgattgatgctgtccgaatggtgacccagttacggggtgaagcccagaagttgaaagacacta

SEQ ID NO: 776 - DNA, 245 bp, Glycine max
  Clone ID: 700863012H1
gaaggatattagtggaaatgccagagcattgaggaggttgagaacagcatgtgagagggccaagaggactctctcttccactgctcaaaccaccattgagattgattccttgtatgagggtattgacttctacacaaccatcaccgtgcccgtttcgaagagcttaacatggacctattcaggaagtgcatggagcccgtggagaagtgtttgcgggatgctaagatggacaagagcaccgtcca

SEQ ID NO: 777 - DNA, 248 bp, Glycine max
  Clone ID: 700863017H1
ttgaaatggccatgagcattgttgaacagagtggaggccagtaccatgtgttggtgataatcgcagatggccaggtaacaaaaaatgttgacactaaacatgggagaccaagtccacaagaacagaagactgtggatgccatagtgcagctagtaaatttcctctttcaatcatattggttggcgttggagatggaccgtgggacatgatgaaggaatttgatgacaatatcccagctcgggcctttg

SEQ ID NO: 778 - DNA, 240 bp, Glycine max
  Clone ID: 700863020H1
gtgaaataacatcaggtgaaaaatgcttgaacatagccatacttcaattttggaccatgtatatgaatgagtggagtaatggcttgggtcatcgatcggtgtatggattccttgagcctcaatctatacacaatgcaaaggtagacgtgggcaatgtgaagaatatattgaaaaatggcttaaggaatctcaacgacaactgtacataggagcttatttgaatgacgcccattggcaaat

SEQ ID NO: 779 - DNA, 240 bp, Glycine max
  Clone ID: 700863021H1
gtaattttgacagatatctggtgaaacagtaggtgaagtgaggattgtttcagatatgcacgagcgtaaggctgcaatggcacaagaagctgatgcatttgttgctctccctggaggatatggaaccatggaagagctgttgagatgataacttgggcccaacttggaatccataaaaaaccggtaacatagtatttttactctgtagtacaaaatctttaatataacaatcaagtgcta

SEQ ID NO: 780 - DNA, 242 bp, Glycine max
  Clone ID: 700863026H1
tgcatttgcattacttgttatatctctaattcacagttttatttcatcagtatcatatggtaactttgactcactgtttcgaaaatgaacgacctatttctgttggatgatctagttttcatcagttcttcatttgttggtgttttctctgcagatgctttcattggtgtcaacattggtacagatgtcaccaacatgccaagtccaacagaggttgttgcccttcttaaggctcaaggtat

SEQ ID NO: 781 - DNA, 246 bp, Glycine max
  Clone ID: 700863034H1
cttgacagaaagcatgaaatccaatgttgtaattaataggacaagtgatgttgacataatgcaactcctgaatcacatacataatgctagaaatgccgtatatcagaaacatccgaaaagtgaaagtataattgtgcactctgaatgaaaggctttatacttgctcagggctgctcccaagataacaagctatcagttgcaattaacagccagggtatccagtcgagagcagatgagaagtgggga

SEQ ID NO: 782 - DNA, 243 bp, Glycine max
  Clone ID: 700863043H1
taatgttgtgcttgacgacaacttcataagtaatcttggaaggactttcaatgagtcattacagattcaagatgctcataaatctgttcttgcttctgaggagaatgatatctataatgtgaatgaggaaaaattatgtgaacaatgaaagatcaagagacaaacataaatatgacgtgcttgaaaaaatctgcaacttttccaattcctaatacaatgttgccttcaagcccatctgataag

SEQ ID NO: 783 - DNA, 243 bp, Glycine max
  Clone ID: 700863047H1
ctaacattaattttctctctcaactcaaaaccagtggaaaaaaaaagtattatttgctccttccttctttcgaatctcatactcacccaactaccctcgtgccagttctatctctttctcctccaaaataattggagttatgaaagttatcatcttttctctaaattggtttctgggtaatccttgttcatagcttttggattttcccatcaagcctccttttttgttgctagggcttcaacc

SEQ ID NO: 784 - DNA, 242 bp, Glycine max
  Clone ID: 700863051H1
gcaggtagcaaatcatcttgaccgtatggtatcaacccttggaagaaatcctctgaaggttttggtgcaagtaaattcgagtggagaagaatgtaagttcagcttaaaattataatgagttactctaactccttgttatacttttggatcttatgaggtttcctcactccctttgggtgtgaggaaaattcttgcttgaggcattagaaatccttcttttgtacattgtaacttgtaaattt

SEQ ID NO: 785 - DNA, 240 bp, Glycine max
  Clone ID: 700863052H1
cgtttcttgtgtcgcactgctgctagttttgtttctgcccttatgggaatcatctctaagcctccaatattgccaaatgatattggaatagctagagaaaggaatggtggtttgatagttgtgggatcatatgttccaaaacaacaaagcaggttgaagagctcaaattacagtgtggtcagttcttaaaaagcattgaggtatcagttgaaaaacttgcaatgagtcctattgaggaga

SEQ ID NO: 786 - DNA, 247 bp, Glycine max
  Clone ID: 700863065H1
cttcacaccattctcagtttccaagaaatgaaaatgggctaactcttggtacacgacaaccagccactcctggatttcagaatgtcagcatttcaaatcctaattatagaggattggaggactacttcccagaggatgagattcaactagaagtcacgagatgctagaaaatgaagatatgcagcatctgctccgtatatttaatatgggaggagggcaatctcatgctccctttaatactcaagaa

SEQ ID NO: 787 - DNA, 239 bp, Glycine max
  Clone ID: 700863068H1
gagaaaaatatatccaactaatggctacccttattgctcctagccaccattcccgggttgaggatgctgaagctctccgaaatgctttcaaaggatggggggctgatgacaaggccattatagcaatactgggtcacagaatgttcatcagaggcaagaaatcagaaaagcttatgaggagatttaccaagaggatctcatcaaacgccttgagtccgagatctctggtgactttgaga

SEQ ID NO: 788 - DNA, 240 bp, Glycine max
  Clone ID: 700863073H1
ctttgttgcagatctcacaaatgatttcaaagagaccagaatctccaacttcacagaagaggacacaatttaccatggaagctgaagcagagatcaagcaaagacattataaggaagaaggtgtatgtgtgcccagaaccagttgcgtgcaccacgagccttcaagggccctgggggacctcactggcatcaagaagcacttctgcagaaaacacggcgagaagaagtggaaatgtgaca

SEQ ID NO: 789 - DNA, 241 bp, Glycine max
  Clone ID: 700863090H1
ggtgaatgtggttgatggactgaagttgtatgaagatttatttgatagcactgaaattgcaaatcttgtttcattggtcaatgatctaagggtttctggaaaaaaaggacagttacaaggaagtcaggcatatatagtttcaagaaggcccatgaaagggcatggaagggagatgattcagttgggtgttccaattgctgatgccccagcagaaggggaaaatatgacaggagcctccaaa

SEQ ID NO: 790 - DNA, 250 bp, Glycine max
  Clone ID: 700951714H1
ggaaagggcaaaagccgctaaagtggacagtcaggcagcttattttgaagacccatattcagtctccagcaacttcacttccagtgttagcgaactcacaattggcaagaaggatttacgaaggaacttgaagggaaaatatcgtggtgacggtccatgcatagccacaaaccccatcgacaggtgttggaggtgtgaccccaattgggccaacaatcgccagaagctcgcagattgcgtccaaggcttc

SEQ ID NO: 791 - DNA, 238 bp, Glycine max
  Clone ID: 700951786H1
gcaggatgaggagggaaaagatttcaggttctactttgattttgagcatttaaaggaggcggcgtctgtattggacaaggagcagttttgggcagattggaaccaatggcaacaaaaagatgggatgagtcttcatcttgtggaggatttcagggtcacgcccatgaagcttatggatgtgaaggatgccttgatcatgaggaagtttggatctgtcgagccggataactactggtat

SEQ ID NO: 792 - DNA, 238 bp, Glycine max
  Clone ID: 700951788H1
gtttggtctgttgttgatttacattaaacattacattacattacctgccgactagtttacgctatcagcaatagcaagtcggtcgctcagacacgcacagatctgatctgatctgatctatctgaagccgaaaacgccgacggtgatgatgaagatggggtgttcacgttgctccttcttcctcttcctcatcctcttagtggcgctcttcccctcgtcgctctccgagatccgcttc

SEQ ID NO: 793 - DNA, 274 bp, Glycine max
  Clone ID: 700951822H1
gtttagttatctactcttttctgcatgtttgttctctcaacgactcctccgcgaaagagtattattcaatattttggttgggttgaatcccggggttgaagcgttgcagacatcacggctattctaagagtgtctcgctccctcattcatgtccgatctgtacgacggaggacgggtagttgcgtaactgccgttaacccttcgccgcacggtgggcgtggtgctttgccttctgaaggtggtagcccttcagacttgctcttcctcgctggtg

SEQ ID NO: 794 - DNA, 161 bp, Glycine max
  Clone ID: 700951912H1
gtatatctattatagtttactactcaactaagatggactcgaagaggaagatagcattacttatttcaggccttctggccatgctcattttaatctcctcagatgtggcagccagagaattgaaagaggtcactggtgctggcttgtctggtggtcgtggg

SEQ ID NO: 795 - DNA, 268 bp, Glycine max
  Clone ID: 700951916H1
agatcaaggagcagtttcataccgagaccttggacaatgttcagaaactcactggcatcacccttgacattgtgagtggtttgtccaacatcctcgagaagttcgggttgaagtttaatcttaaacccgcgtctcgccgtcttctcggcaaggatgggttgcccacttggttctctgctgctgatcgtaagcttttgggtcgtggatggagatcacgtgtcaagcccaatgttgtggttgcccaggatggcactggtcagttcaaaac

SEQ ID NO: 796 - DNA, 261 bp, Glycine max
  Clone ID: 700951943H1
gttttctctctccacactctgcctctaacttgaaaaaaaaactcaaacactctgttctcgtcgcatgcacataaacaataacaaatggcttccacaactatgttgttgctggtcgtgttcatgattctatgtatatcacacccctcatttcaaatggttcttgtgcctttaacacacacactttccaaagcccaattcaacagcacccaccaccttctcaaatccacttccacccgttccgcaaaacgcttccgccgccaa

SEQ ID NO: 797 - DNA, 263 bp, Glycine max
  Clone ID: 700951946H1
gttcattctctttgcgcagttccctacctctcctttcaagatgcagatcttcgtcaagaccctcaccggaaagaccatcacccttgaggtggaaagctctgacaccatcgacaacgtcaaggccaagatccaggacaaggaaggaattcccccggatcagcaacgtctcatcttcgccggaaagcagctcgaggacggccgtaccctcgccgactacaacatccagaaggagtcaacccttcaccttgtccttcgtctccgtg

SEQ ID NO: 798 - DNA, 263 bp, Glycine max
  Clone ID: 700951950H1
ctgcatgtttgttctctcaacgactcctccgcgaaagagtattattcaatattttggttgggttgaatcccggggttgaagcgttgcagacatcacggctattctaagagtgtctcgctccctcattcatgtccgatctgtacgacggaggacgggtagttgcgtaactgccgttaacccttcgccgcacggtgggcgtggtgctttgccttctgaaggtggtagcccttcagacttgctcttcctcgctggtggtggtttct

SEQ ID NO: 799 - DNA, 132 bp, Glycine max
  Clone ID: 700951971H1
ccaaaaacaagctgtgattgatgatttaaaaggttccaaagtgtaagggtaggcaacctgataaaggatgataattgtctaccatgtaaacataacatttttattatcaataaagggtatatctgtaattct

SEQ ID NO: 800 - DNA, 257 bp, Glycine max
  Clone ID: 700951976H1
ctttgtcagctttttcttgcttccgtagttcatatggcgtgtgttcaagtcatcacagtttttctctttgcattggctctagctaaaatttacccctcaacatgtcaagtggtgcagggaaaagtctcctgcgttgactgcactcacaactatgacttatctgatattaaggtttcggtgaggtgtgatggtgtgaaaaaactggctttggctactacagaaaatgatggctccttcaaggttgatcttcccctaga

SEQ ID NO: 801 - DNA, 257 bp, Glycine max
  Clone ID: 700951986H1
cctgatttcagtgataggtatgatagaaatggcagtggtgggtctaacgaagctggatcacggaataatcagagttccaaagggggaagttatgcttctcatgatgtttcaaatggaacacatgttgctggcaatgttgattcttctgtcagaggtcatggggcttcggatgctggagctggactatctcctgagtcttatcgacatcggcatgaaatatctgtgactggagacaatgtacctccaccccttgcatc

SEQ ID NO: 802 - DNA, 256 bp, Glycine max
  Clone ID: 700951987H1
gctggtattattgctcaagaagttgccggtgatgtccgtatgactgatacccgtgcagatgaagctgagcgtggtattaccatcaagtctacaggtatctcactctactatgaaatgactgatgaagctctcaagagttttaagggagagcgcaatgggaatgagtatcttatcaatctcattgactcccctgggcacgttgacttctcatctgaggttactgctgcactccgtattactgatggagctctagttg

SEQ ID NO: 803 - DNA, 257 bp, Glycine max
  Clone ID: 700951992H1
gtcattcccgaaggcatcagcaagcatgcaaaccggagcaaatattttcttgctggtggaatagcaggaggtatttctcgtacagcaactgctcctcttgatcgtctgaaggtggtcttacaagttcaaagcgaacgtgcttctatcatgccagcagtaacaaggatatggaagcaagatggtctgttaggattttttcgaggtaatggattgaatgttgtgaaggtagcaccagaaagtgccatcaaattttatgc

SEQ ID NO: 804 - DNA, 257 bp, Glycine max
  Clone ID: 700951993H1
gtcttcccttagtgcccgcgacatgccaccagacgacttgaacatgatgtctgatcttgatggccagcagcagcatcctttgaatgacttgagctgttacttacagccgcggcctggtgctggttctgtgagtagatctggtcggtccaagatcctaactccatcaaatcttgaagatctcttttctgctgagatttcttcatctccccggtattctgatccagcagcgggttccgtgttttcccctacgcacaaat

SEQ ID NO: 805 - DNA, 252 bp, Glycine max
  Clone ID: 700952042H1
gtttttgagagttgcatttgcactttgtaggatcatctcctagcattgatcgattgagatggcagacgaagctaacagaactgctttccttgaaattcaaagtcgcatgatcgatactactggaaaaataaaacaggtgcaaacccagatgcgttccaaagaagcagaaaaaaagcgtgcttttctgaccatggaggagctgaagcaagttcctgatgatacgaatgtttacaaatccattggagaatgttt

SEQ ID NO: 806 - DNA, 268 bp, Glycine max
  Clone ID: 700952101H1
acacaccttgttttcctttctatagagacacacagagagagcaataaacacccttcaatggctaccactaccactaaagtttacattgtttactattctatgtacggacatgttgagaagctagctgaagagattaaaaaaggagctgcttctgttgaaggagtagaagcaaagctatggcaggtacctgaaacactgcctcaagaggtccttgggaaaatgggagcacctccaaagagtgatgtaccaattattacacccaatgagc

SEQ ID NO: 807 - DNA, 256 bp, Glycine max
  Clone ID: 700952109H1
aaattcatgaacgagaagtactgtgttcgtactgcatatagtttgttgaggtttctgttcctccttcattcccttcctacactcttcatgcactattttcattttgctaagggatcgatcataaggaggaagaaatacaaggttttgggacctcttctcttggcttataaaaagtccaaaacaggagccttcttggtgttttagaaaggaggaggcttgggggaaaagggtggagaaaaaagtggttaaagggaca

SEQ ID NO: 808 - DNA, 251 bp, Glycine max
  Clone ID: 700952113H1
gatcaagtcaaccggctcttagaacgctctgataggtcaaaaggaatgaaaaagtatactgccgtagacaaatggaacacacaacttaaatctctttaccaaactatcagcaacagagttggttaaaccgtggtgtctaacgggagagttatctgttttattgtccccgctgcagttttgttatgtgaattaatgtatctattatggagagttagggatgtgtattgcaccaatagtgaaccaaagcgaga

SEQ ID NO: 809 - DNA, 255 bp, Glycine max
  Clone ID: 700952123H1
aaagtcaataaggattccagagctttatattgaggttcctgaaacttcaactgttggttcactaaagaggactatcgtggaggcagtgatggctatacttggaggtggtgcacatgttggtgttcttcttcaggggaaaaaagttagagatgacaatagaacacttgtgcagactggtatatcttgcaatgaaaatttggataccctgagttcatgttggagcccacttcactacaagcttctccaactgtttgt

SEQ ID NO: 810 - DNA, 252 bp, Glycine max
  Clone ID: 700952125H1
cttcatcgttcgattcttctcctcctaaagatgcagatcttcgtgaaaactttgaccggtaagaccatcacccttgaggtggagtcctccgacaccatcgataacgtgaaagctaagattcaagacaaggaagggatcccacctgaccagcagagacttatctttgcgggtaaacagcttgaggatggtcgaacccttgccgactacaacatccaaaaggaatccactctccacctcgtgcttcgcctcagg

SEQ ID NO: 811 - DNA, 257 bp, Glycine max
  Clone ID: 700952137H1
cttcaatggaatttggcaaaaagtagccatcgccccaacgatcccatttcccttgacttctctacgtgaagatccttgtgtcgcatagagctagttaaaatgtctgagggaaatgcagggaaaggaaagagaatcgccatcattggcgtctcagccttattgttggtggctatggttgtggcaatcacagttggggtcaatctcaatgagaatggttccaacaatgatacagaggacaacaagaaaaatcatgttgt

SEQ ID NO: 812 - DNA, 254 bp, Glycine max
  Clone ID: 700952139H1
gtcgacggcgaatcgtggaagttccagcgcaagatggcgagtctcgaactcggcagcgtggcgattcggacgtacgcgatggaattagtcaacgaggagatccacgcgcgactgatcccgatcatggaatcaaccgcgcgtggcgaattaaactccgtctgcgttttggatttgcaagatatactacgaagattctcgttcgacaacatatgcaaattctcgttcgggctcgacccgggttgtctcctaccgaa

SEQ ID NO: 813 - DNA, 249 bp, Glycine max
  Clone ID: 700952156H1
tttccctctatcgtcttctccctccttgttcaatggtcttagggtttccggtgtccatgcgtagaagctagcaataatgcgtttttgaaacccgtattcatctgtatccaacgatttactagaaggagatcgcaatttctccatcttctcgtttcggtggctcgtgaaatcgaaagttatcgaaactttcgcgcgacacgaagtattgggaaccaagcaaaatttctatggctgacgaaccactatatc

SEQ ID NO: 814 - DNA, 192 bp, Glycine max
  Clone ID: 700952161H1
gttgtacacaaaaatagtccaagagggacccattttcgtcgtgctgggcctgctcagaaggtatattttgattcagaggaagtacacgcttgtattgtcacgtgcggtggactttgtcctggtctaaatacagtgataagagaaatagtatgcggcttatatcatatgtatggggtgcacaaagttttggga

SEQ ID NO: 815 - DNA, 256 bp, Glycine max
  Clone ID: 700952166H1
ccctcgcgccgcatttttatttttctctttcattatttttttaccatttttttatggacctcttcgccggcgaccacttccctgtccccgaccacgtcgctccgttccccgattccggcgacctcgtcttcgccgccgacctcctctcccaccgccccaacccccagaagctccgccctatcaggtccgtccccgccgcccccattgcccaccctcctccgccccctctctcgcacgatccgattccctccgggtc

SEQ ID NO: 816 - DNA, 248 bp, Glycine max
  Clone ID: 700952171H1
tcttcacctttaagttaaatagtttttcattgtttcatttaatctacaatggctgcttcaacaatggctctctcttcatcatcattggctggccaagctatcaagcttgccccctccacccctcagcttggtgttggaagggttagcatgaggaaaacagcctccaagactgtttcttctggaagcccatggtacggcccagaccgtgtcaagtacttgggcccattctctggtgagcccccatccta

SEQ ID NO: 817 - DNA, 245 bp, Glycine max
  Clone ID: 700952180H1
atctctcttcccagttctcacctcaccgctgcatcttcacgtcgtctctaacgagggaaaatgagtcgaggaggtgcagcagcagcgaagggaaagaagaagggtgctacattcaccattgactgtgcaaagccagtagaagacaagatcatggacattgcttctctcgagaagtttcttcaagagaggatcaaggttggtggcaaagctggtgctcttggtgactctgttaccgttacacgtga

SEQ ID NO: 818 - DNA, 250 bp, Glycine max
  Clone ID: 700952183H1
aaaaaaactcaaacaccttcaagaacttgtatctttctttgttagtatttgttactacaattttacattcttttcatctctacatatttcattagtcatggcacctcaagcagtttccttcaagtccttcgccgttgctcttattgtggcgcttttcttctccgcctccgctctggacttagtttcggggcagtcgccggtgccggcgccggcgccggcaccagatgccggagcagctggatccgtgtcg

SEQ ID NO: 819 - DNA, 239 bp, Glycine max
  Clone ID: 700952191H1
atccattcattgtcttaatgttagcaatgtcttcctctttctccatccatttcttcctcctcctctcaatagcccttttctcagtttgttgcttagcagcatctcaagctcccaccaccaaatcacacccctatatccttcccattaagaaagaccccgcaacaaatttgtactacacttcagttggcattggaactcctaggcacaactttgatttagtcattgatctttctggtgaa

SEQ ID NO: 820 - DNA, 238 bp, Glycine max
  Clone ID: 700952193H1
caaccagtgagtggagttttggatcttctgtcaaaaacaaccgaaggtgctaatgctatgagaatgaaaattgcatctgctataacatctgatgaacaacttctcaggaggagactgcctcgtgttataggtggtgataatctgctaaaactatacgatgagtacaaagctcaaggacaggtcatactgcagttggcagaatcaggttcattttttggtcaggttgatctgttcaagg

SEQ ID NO: 821 - DNA, 238 bp, Glycine max
  Clone ID: 700952194H1
gggaaactaggagatatggtgttattgaatgtgatcctctggtgcaaaatggccttgaaaagtctgcaaggcacatggtcatcccctatatgccaatgttggtgccacctataaactggacagggtatgacaaaggagcatacttgtttttgccatcgtatgttatgagagtacatggagcaaagcagcaacgtgaagcagttaagagggctcccaagagtcaacttgatcctgtttt

SEQ ID NO: 822 - DNA, 259 bp, Glycine max
  Clone ID: 700952201H1
gagataactagaaacagtgtgatgaaaatgaaggtccttgttttcttcgttgctacaattttggtagcatggcaatgccatgcgtacgatatgttccctctccgaatgaacactggctatggtgcccgtactccggaggtgaaatgcgcaagttggaggcttgctgtggaagcacacaacatctttggctttgagaccattcctgaagagtgcgttgaagcaacaaaggaatacatccatggcgaacaatatagatcag

SEQ ID NO: 823 - DNA, 253 bp, Glycine max
  Clone ID: 700952204H1
agagaaacaagacaagcacaacaagcattctgaaattctcttatttgttagtatcaggactagtaacaattaaccttgaaaataaagcttcatctagttttatcttccataggtagaaaagtgatcaagagaatacacaagtcaccaggtgggaatgtaccatcatcaccaacaccaaggaaaaaacattcattcttcttccagaatgccaatcccctctgagaggcacatgttccttcaaacaggaaatgga

SEQ ID NO: 824 - DNA, 255 bp, Glycine max
  Clone ID: 700952211H1
gaaggtcattgttacaaccaaacacaatgatgatgaacagtatgtttgggagtctcaagctggaggttctttcactgtcaccagggataacactggtgaggttcttggcaggggtactaagatcactctctacctcaaggaagatcagcttgagtaccttgaggagcgtcgcttgaaggatctgatcaagaagcattctgagttcattagctacccaatttctctttggattgagaaaactactgagaaggagat

SEQ ID NO: 825 - DNA, 256 bp, Glycine max
  Clone ID: 700952212H1
catcatttccactgccttgatgactattgggattgcaattgttagttggattgcactcccaacttccttcactatcttcaattttggagtgcagaaagatgtcaagaattggcagctattcttgtgtgttgctgttggtctttgggcagggcttattattggatttgtaactgagtactatactagcaatgcatatagtccggtgcaagacgttgcagactcctgcaggactggtgctgcaactaatgttatcttt

SEQ ID NO: 826 - DNA, 250 bp, Glycine max
  Clone ID: 700952216H1
actaaacatatacctcaccttatctcgtctttgccttttcatgtttttgtttatcggtttgattctaatgcaatgatatctcatcatgattgtcctagcaggtgacaaaaaaacagatgaggaggttgtggttgtgaatgcatcatcatggattgatgacaggtttgattttgaccctgaggagtgcaatgttgcaaatgggaaatgggtgtttaaccattcaataaagcctctctactcagacataagc

SEQ ID NO: 827 - DNA, 246 bp, Glycine max
  Clone ID: 700952223H1
cactgttaaaatggctgtacagtacatgcggagggttattgagaagaaggcaaagtttgatattatgaatctgaactgtttgcaggttgcaccgaagacattcattcctgttttatttggacatgcaagcgatgacaaattcattcagcctcaccattctgatctcatctctgaagcctatgcaggtgacaaaaatgtcataaaatttgacggtgatcacaactcgtctcgaccacaattctttta

SEQ ID NO: 828 - DNA, 261 bp, Glycine max
  Clone ID: 700952230H1
ctagcctaatataattggccaccatgaccgatgaacaacgagaaccacaagcttccccgagcaatggcgtccacaagttagaaagaaaacaaatagctgaaagagaaagaaaacaaatagctggaagggatagatcggtttttagaggcaggcgtccacgacctgggttttctgattcattttcaagcactgacttggaagctttagagattgaagagggctctcctaggagtcaagggtctgaaaccccaagttcaaggg

SEQ ID NO: 829 - DNA, 246 bp, Glycine max
  Clone ID: 700952234H1
cgcttcttgtgggtgctgctttgaaccttgtgggatatggctgggtctggcttgttgtcacttctcaagtccctgtcttgcctctctgggctatgtgtgctcttatctttgtgggaacaaatggtgaaacctacttcaatacagtttctctggtgtcttgtgtacaaaatttccccaaaagccggggtcctgtggtgggaattctaaagggctttgctgggttgagtggtgcaatcttgactcaga

SEQ ID NO: 830 - DNA, 245 bp, Glycine max
  Clone ID: 700952241H1
ggaaaatgctggagaagatattactggtgcaaagaatgaagtgaagtgtgacaaccaagcacctgaaaacaagagtgagacagagaaatccataccagtaacgaagaaagatggcgaaaatcctacacctgcaaaagctgaagttcctgacaacgagtttgagaagcgcataagaccagaggttatccctgcaaatgagataggggttacatttgcagatattggtgcgttggatgagattaaag

SEQ ID NO: 831 - DNA, 244 bp, Glycine max
  Clone ID: 700952250H1
caaagtctcttattcctctttgtattaattttttcctcttctcccttttcattttccggtggcaattcaaatcgcactctttgcgtttgtgctgatccactgtgaatgaaaaaaacaaaactaagagagagaagagagaaaaattacaacaacattattatttattgtaactaattagctaattaattggttattaaaaattataaggccatgtttggcgaaaccgttccgcgaccacagttca

SEQ ID NO: 832 - DNA, 242 bp, Glycine max
  Clone ID: 700952251H1
tgccactttctgagtacaatacaacactgccatggctgcctcagtctccactattggagctgtcaacagagctccactgagcttgaacagctctgaagctggagattcggttcccagttcagccttctttggcacaagcttgaagaaggttactgcctcaagggtccctaacgtcaagatttcttctggaagtttcaaaatcgttgcggcggagaaagagattgatgagcaacaacagacaa

SEQ ID NO: 833 - DNA, 235 bp, Glycine max
  Clone ID: 700952271H1
gtggatgatcacccttttgatttggacaagatggttttaatggactggagggattctcatttggggaatgaaccctacttgagagctagtaattcaaggtttcctactttcctctatgcaatgccatttagttccaatttgatatttcttgaggagacttcccttgtgagccgtccagtgttgtcttacatggaagtgaagaggaggatggttgcaaggctaaggcacttaggca

SEQ ID NO: 834 - DNA, 238 bp, Glycine max
  Clone ID: 700952282H1
caaggctaactcctacagtgtgcatggaagtgcactgggtgccaaagaagttgatgccacaaggcagaaccttggatggtcacatgagccattccacgtgcctgaggatgtcaaaaagcattggagtcgccacacccctgagggtgctgcacttgaagctgaatggaatgctaagtttgctgagtatgaaaagaaatacaaggaggaagctgcagaattgaaatctattatcaatggt

SEQ ID NO: 835 - DNA, 234 bp, Glycine max
  Clone ID: 700952285H1
caacttaagagatcaatatggccaccaccactacccagcctccctctaatatctgttttttccttctgttgttgcttctagcacactttcatttgggcataagccaacttgagctgaattactactctaaaagctgcccaaaagctgaagagatcatcaaggaacaagtcacacaactatataacaagcatggaaacactgccgtttcgtgggtcagaaatctcttccacgatt

SEQ ID NO: 836 - DNA, 250 bp, Glycine max
  unsure (1)..(250): unsure at all n locations
  Clone ID: 700952294H1
ctgagcgtgagaaagagaaggggaagaaagagagagagtgatgggaaggggaagagtggagttgaagaganttgagaacaagatcaacaggcaagtgacctttggcaaaacgaaggaacgggcttttgaagaaagcttatgagctttccgttctttgtgatgccgaggttgctctcatcatcttctccaatagagganaagcagtacgagttttgcagcggttcaagcatgctcaaaacgctggagaggt

SEQ ID NO: 837 - DNA, 255 bp, Glycine max
  Clone ID: 700952295H1
caccacgaacccgaacgagcgacacggtccttagttggagtcttgaaccacaacccagagttgaagttgtgagtggcaaggggtgttcgaggctgttttcatcttcacttccttcattcagaggtttgcaaccattggagccaatgtctcctgcttcctcccctttgcaagtgccatcatcaactactccttttgctggtcttgtcatctgcgttactggtttatctaaagaagcaaggaatcaggtcatggagg

SEQ ID NO: 838 - DNA, 280 bp, Glycine max
  Clone ID: 700952301H1
atcggaagaagaagacagtgaaagaggtggaagcagaacattggacaagaaaaccaacaaaatattcggctttgcggtagcccatgatgacagtgaccacccacccgtgacccatcagttttttcctgttgaggactccgaactgcctgtctccgccgccgccgcaggcagtggaggcggtggcggcggaagctccttcccacgtgctcactgggtaggtgtcaaattttgtcaatcggaaacacccggcgccggaaaagcagtgaaagtgtcggagccg

SEQ ID NO: 839 - DNA, 277 bp, Glycine max
  Clone ID: 700952303H1
caggaaattaaagaagcagttgagcttcccctgacacatcctgaactgtatgaagacattggtatcaagcctcctaagggagttattttatatggggaaccaggaactgggaagacattgcttgcaaaggctgtggcaaactcaacatcagcaacctttttgcgtgttgttggtagtgaattaatacaaaaatacttgggagatggtccaaagcttgtaagggaacttttccgagttgctgatgatctttccccatctattgtcttcatgatgagat

SEQ ID NO: 840 - DNA, 278 bp, Glycine max
  Clone ID: 700952318H1
ctgcaacagtagggtacatggcatccccagctagacaaagagaagatgacatgagaaaaccaccttcagggttccctgattgttccatcaagctgcatgcacatgaagttcggttccttgctgcagcaaggaaactagagtttggcaatggtgttcttttctatgatcgtatctcagttggtgcagatttgtctgatgctattggattcaaaggttgtagagaaattgaagggccttatgtggactatctagagacacaatttggtaagcccgttttg

SEQ ID NO: 841 - DNA, 270 bp, Glycine max
  Clone ID: 700952326H1
agaatcttggttactggaggagctggattcattgggtctcacttagttgacagattgatggaaaatgaaaaaaatgaggtcattgttgctgacaactacttcactggatccaaggataacctcaaaaagtggattggtcatccaagatttgagcttatccgtcatgatgtcacggagcctttattgatcgaggttgatcagatctaccatcttgcatgccctgcctctcctattttctacaaatacaatccagtaaagacaataaagaca

SEQ ID NO: 842 - DNA, 272 bp, Glycine max
  unsure (1)..(272): unsure at all n locations
  Clone ID: 700952338H1
tttatttctctcttctctctgcatcgcttcaggttcttctgaaaagatgtctcgcgtgtatgttggtaacttggattcacgagtcaccgagagagatctcgaagacgnattccgtgttttcggagttattcggagtgtttgggttgcacgtagaccacctggtnatgcttttattgactttgatgaccgcagagatgcacaggatgctatccgtgaattggatgggttttcctcaactagctagttaagtcttctttttggcctatggggca

SEQ ID NO: 843 - DNA, 276 bp, Glycine max
  Clone ID: 700952349H1
acacaaagtaatggacaaaaaaccatgcaactcatcatctcatgatcctgaagtgagaaagggaccatggaccatggaagaagacttgatcttgataaactatattgcaaatcacggtgaaggtgtttggaactccttagccaaagcttctggtctcaaacgaacgggaaagagttgtcgactccgttggctaaactaccttcgtcctgatgttagaagaggaaacattacacccgaggaacagcttttgatcatagaacttcatgcaaagtgggg

SEQ ID NO: 844 - DNA, 274 bp, Glycine max
  Clone ID: 700952351H1
gttactatctataattaattaaattcctcgtggaatattgaagaagccatgtctacagctgggcaggtcatcaagtgcagagctgcggtggcatgggaagcagggaagccactgtcaatagaaaccatagaagtggcaccaccccagaaaggtgaagtgcgtttgaggatcctcttcaactccctttgccgtagtgatgtttattggtgggatgctaaggaccagactcctctgtttcctcgtatcttaggccacgaagcttcagggattgtgg

SEQ ID NO: 845 - DNA, 273 bp, Glycine max
  Clone ID: 700952353H1
aatttgacaaaaaagtagccactgccccaacgatcccatttcccttgacttctctacgtgaagctccttgttttgcataggagctagttgaaatgtccgagggaaatgcagggaaaggaaagaaaatcgccatcattggtgtctcaaccttattgttggtggctatggttgtggcggtcacaattggggtcaatctcaatgagaatggttccaacaatgatatagaggacaacaagaaagatcatgttgcttcttccataaaagccgtccaaa

SEQ ID NO: 846 - DNA, 269 bp, Glycine max
  Clone ID: 700952358H1
cttcaagattcaggtactgcgtttcggaagcagacacagatggctcgtacgaagcaaaccgctcgtaagtccacaggaggaaaggctcctaggaagcagcttgcaaccaaggctgcacgtaagtctgcaccaactactggtggtgtgaagaagccccaccgttatcgtcctggtaccgttgctcttcgtgagattaggaaataccagaagagtaccgagcttttgatccggaagctccccttccagaggctggttcgtgaaattgctca

SEQ ID NO: 847 - DNA, 270 bp, Glycine max
  Clone ID: 700952362H1
aaagatggtatcagagaggccagtggtgatattcagcaagagctcgtgctgcatgagccacaccataaagaccctcttgtgtgactttggggtgaatccagcggttcatgagctggatgagatcccaagaggcagagacattgagcaagctctttcaaggcttggttgttctccatctgttcctgctgtcttcatttctggtgagcttgttggtggagccaatgaagtcatgagccttcaccttaatcgctccttaattccaatgcttaa

SEQ ID NO: 848 - DNA, 273 bp, Glycine max
  Clone ID: 700952364H1
gtatttacttccacaggcatggaaactgaagaacctcctgcacctgctgagaagaaagaggcgccaaaaagacggggtgctgctaaaaagaagtcaagtgccatagtgttggacgactcagatagtgataatgaaattcatgatgttgaggacgacgatgacaactttgaaatcatgcagccggttgccctagaagcagggaaaaagaaaggagggagaaagcctgctgctcaaaatgccaagaaggcacctgctgctgcttctaccaaaaag

SEQ ID NO: 849 - DNA, 270 bp, Glycine max
  Clone ID: 700952371H1
ataattgttgcttgtcaaaacaacaaattgaatgagaaagttgatgatcttgttcaggtatatgaaacagtggagaaaatgttattggatcctgaagaagctctaaagatgattaggcagacagaggaatcaacaatggttaccggtgaaccaaggagcccgtttaggacgcttagccttatctttggaggcaaagataaattattgaggaagtctgtctcaaaagatcagacaaacgacgaagagaagtcaggtcggcagtcattctct

SEQ ID NO: 850 - DNA, 270 bp, Glycine max
  Clone ID: 700952372H1
aacggctttgcctgcaagattttgcacgaattgatggatggtttttgccaaattcaagttccaaattatcaccattttcccaaagtgagtttggaagaacagaatctggtgccataatattcactgacattaacatgataagtggtatggaacagaccagttttctatttcagcaagcttctaaggtcagcttccaagcaggtcaaaatccttacaacgtaacaagtctttttctcgccgtgaaggaactcgaaaagtgtttgtcatttt

SEQ ID NO: 851 - DNA, 268 bp, Glycine max
  Clone ID: 700952373H1
cttcttgaaacctctcttgagagagggacacctctgcaagaagtcaatgatcttatttttgaagccattggctgtggtgaattggaggatgtcaacgttgaaagtgtcaaagaagttgatgcagtcagcacaagcgaacaccctactgtggtggtagctggttcacaagaatgtgtgattctacactaacaaggctctaaaattatgaacaaattcagcaaatccgtagtgctttaagaataattgctgaattgtgtcaccgtttaag

SEQ ID NO: 852 - DNA, 267 bp, Glycine max
  Clone ID: 700952378H1
ctcgctttcgattcgacgcctgaacaagtgaacatggaccctaatcacctcttcttcacgcatttccgcgatggtgctattgcctcacgcattgagggccaacacagaggagctcttccttctgttattgtgattggtgctggaatatctggacttgcagcagcacgaagtctctatgatgcatcttttaaggtgactgtactggagtcacgagataggcttggtggtcgcattcatactgacttctcatttggctgtccagttgac

SEQ ID NO: 853 - DNA, 270 bp, Glycine max
  Clone ID: 700952380H1
gccaagtgaaagagagaagaaaagtcaaagacaatgtcagggatcattcacaagattgaggagacccttcatgtgggaggccacaagaaggaggaggagcacaagggtgagcagcaccatggtggagaatacaaaggggagcatcatggtgaacacagtactgaatacaaaggagagcatcatgttggtgagcacaagccggagcaccatggaggagaagagcacaaagaggggttcctagacaagatcaaggacaagatccacggcgag

SEQ ID NO: 854 - DNA, 271 bp, Glycine max
  Clone ID: 700952383H1
gggaaaactcgagccaagcagtattacgcaaatgacgtggatagaacgaagaacatgggtgtgttgattcatggagatggaagttttgctggacagggtgtggtctatgaaaccctgcatttaagtgctcttccaaattacactactggtgggacgattcacatcgtgtttaacaatcaggttgcatttacaactgatccgacttctggcaggtcttcacaatattgcactgatgttgccaaggctttggatgctcccatctttcacgtga

SEQ ID NO: 855 - DNA, 271 bp, Glycine max
  Clone ID: 700952384H1
cttactggaagccttgttgtgagtaagagaaaaggcttcctgcaccgagcacaccaacttgatacctctgattctttctttgcttagaattccacagaatatggagactgttcttttcaatcactccccacctttggaattcaagggtttgagcaaggaggaggaagactcattgctagggcaagtggaaatatggaggtacatgacatgcttcacggactccgtggccttgaaagctgtcatagagcttcgtatagcggacatactagac

SEQ ID NO: 856 - DNA, 266 bp, Glycine max
  Clone ID: 700952392H1
gcagctgatacatagatagataaggatagggatagggttaaggccatggagcgcatcatcggcgccaagtacaagctaggtcgcaagatcggaagcggatccttcggcgaaatctacctcgccactcatattgataccttcgagatcgtcgccgtcaagattgaaaacggtaaaacgaagcatccgcaattgctttatgaggccaagctctacaatattcttcaaggaggaagtggaatcccgagcataaaatggtgtggtgtaga

SEQ ID NO: 857 - DNA, 265 bp, Glycine max
  unsure (1)..(265): unsure at all n locations
  Clone ID: 700952403H1
ctcaccagtcaccacctctgaactctctctctcatctataagtcaacatggctcatcatgaagattcaagtgcatggaattcgagtaaacctcaccctaagctcaatgaaagaattctgtcttctctgtcacggagaactgttgctgctcacccctggcacganttagngattgggccaggagctccagcagttttcaactgtgtggttgaaattggcaaaggaagtaaggttaagtatgagctggacaagacaagtggacttat

SEQ ID NO: 858 - DNA, 262 bp, Glycine max
  Clone ID: 700952406H1
cagaaacaaacgaaacccagtagacatggcgaaatcggcgtcgaattctctgatgcagagcctgaagcggttcataaagaagccatgggagatcacgggcccgtgcgcggaccctgagtacaaatccgcattgcccttggccgtggagtaccgcctcagctgccccgccaccgtcaaggagaagcccatcatccccaactccctcccggagaccgtctacgacatcaagtacttcacccgcgaccagcgccgcaaccgccct

SEQ ID NO: 859 - DNA, 260 bp, Glycine max
  Clone ID: 700952408H1
gaagagttaaaaatttgaattggagatagaagagctatagtcacaaaggattggaatacatcttgggttggcaatttgtacttatcagttgtaatgtcctcccctgaataaccgacataaggttatggttcttgctcaaagcgcattccttcatttttgcccagttatgtttatcagaatttttgttgtaattttatcatatcatgtgaaatgatgcttacaagagaatctgttcaaagaaatatgatgttaatgttatc

SEQ ID NO: 860 - DNA, 261 bp, Glycine max
  Clone ID: 700952450H1
cagcactagtgttctctctgttatctcatctctctaacccacactacaccaccgcgccgtcgtttgagtgtttgacggtgacatccctgttaaatttctctcgcggactcgccgtcactgtctcacggaggctactggagctgtttggaacagcgtccaatggcgtccctttctcaatctcaccgtatcgcactccctttctaaacgcacgcggcgagtgatgatggcgagactcgctccccctttcagtatcttcacaca

SEQ ID NO: 861 - DNA, 255 bp, Glycine max
  Clone ID: 700952459H1
agcatacaacgatggctatgaatggatcacctcgacggtgggacgtgagattagttttgacattttctctacttttaatctcagcctctgtttctgctcttgaacatgtaaaccacaaaaagattgatcccaccaccgctgaaactagttttcttggcaaagtcatgaactttttgtggagctcatctgggtctggatacgaacatacttggccagaaatagaatttgggtggagaataataacgggtacgataa

SEQ ID NO: 862 - DNA, 236 bp, Glycine max
  unsure (1)..(236): unsure at all n locations
  Clone ID: 700952476H1
gtccttgctgtantcatgaggaaantgaggaaaggggcatanncggttcaagaagatcagacactcattgcttacattcagaaacatggcacaggaagctggcgtaccttgnccacaaaaagcaggtcttcaaagatgtggnaganttncnnggctgagatggtttaactaccttagacctgacattaagagaggaaaattaagccaagaagaagagcagacaattataaaacttc

SEQ ID NO: 863 - DNA, 256 bp, Glycine max
  Clone ID: 700952479H1
ctctaaaccctaaacaactctttctcttcttccttcgctcgttgttctccctcgcgtagatcgacaatggcggagacagagacgtttgctttccaggctgagatcaaccagctcctcagtctcatcatcaacaccttctactccaacaaggagattttccttcgtgaactcatcagcaacgcctccgatgctttggacaagattcgatttgagagtttgacagataagagcaagctcgatgctcagccagagttgt

SEQ ID NO: 864 - DNA, 254 bp, Glycine max
  Clone ID: 700952488H1
gccaagtgaaagagagaagaaaagtcaaagacaatgtcagggatcattcacaagattgaggagacccttcatgtgggaggccacaagaaggaggaggagcacaagggtgagcagcaccatggtggagaatacaaaggggagcatcatggtgaacacagtactgaatacaaaggagagcatcatgttggtgagcacaagccggagcaccatggaggagaagagcacaaagaggggttcctagacaagatcaagga

SEQ ID NO: 865 - DNA, 125 bp, Glycine max
  Clone ID: 700952492H1
gtgagctcaaaagaattttatggtgagggatatgatgatagtgacaagagaatccctgacatgaccataataaacaggcagcttggatggaatcccaagacttcactttgggacctgcttgagtc

SEQ ID NO: 866 - DNA, 254 bp, Glycine max
  Clone ID: 700952496H1
cttcttatagcttcatcccaaaaagctcttttccttctaaatttgattccttagttcagcattctattattatatatggcttcttcaccttcctcagaaaacaaaaacctagagggagtagctggtggtgccggagagaaacccattccacttggtgagaacgttctgcagaagcatgctgcattctttgacttgaataaagatggtgtcatctacccatgggagacttttaaagggttgcgtgaaatcgggac

SEQ ID NO: 867 - DNA, 265 bp, Glycine max
  Clone ID: 700952502H1
ctctgacttaccgtgaagtcatcgctattctgatgcagagacatgttcttgttgatggaaaagtcaggactgacaagacttaccctgctggtttcatggatgttgtttcaatcccaaaaaccaatgagaacttccgcctgctctatgacactaaaggccgattccgtctccattctgtcagggatgatgaggcaaagttcaagctctgcaaggttaggtcagtgcagtttggccagaaaggtatcccatacctgaacacctatga

SEQ ID NO: 868 - DNA, 259 bp, Glycine max
  Clone ID: 700952504H1
ggtgggactatgttcaggtgaataataagttgttcaaagacatgaaccgttttcttgcgtactataaagggctaacaacttgggctaagtgggttcagagaaacgtcaatccagcaaaaaccaaggtcttcttcttaggaatttctcctgtgcattaccaggggaaagattggaatcgaccaacaaagtcatgtatgggcgagacacaaccattctttggactgaagtaccctgcagggacaccaatggcttggagggt

SEQ ID NO: 869 - DNA, 256 bp, Glycine max
  Clone ID: 700952507H1
gttcgtagaattgggtaacattttagaccctgataggcccaaaaatgacaaagcaaccattctgtgtgatacaattcaattgctgaaggacctaatttctcaagttagtaaactcaaagatgaatatgctatgctaaatgaagaatctcgtgagttgactctagagaaaactgatctcagggaagagaaggcttctcttaaatcagatattgacaacttgaataatcagtatcagcagcagctcaggaccatgttt

SEQ ID NO: 870 - DNA, 255 bp, Glycine max
  Clone ID: 700952508H1
gggccgattaccatggcaaggttaccagggtgatagcaaatccttccttgtttgcaaaaagaagatggggacatctcctgagacgctatgctgcttgtgtcctcctccttttaggcattttcttgagattgtagtgaatatgaaatttgatgaagaacctaattattccaagctaatatctttgtttgatggtacgattggacccaatccagcattgcggccaattaatactgaaggtgcccaaaaggttgggca

SEQ ID NO: 871 - DNA, 254 bp, Glycine max
  Clone ID: 700952511H1
aaaaggaagaaaaacaaaatcaaagaacacaaacaaagaagagagcaaaatgaagagtgcgatttgtgggagaatcctctctcccaaccacgtcttcaaaccaggggacacacattcaatttgtaaaggaccatactccaatctttgtgtacccatggttgtattggcaacagggcctggtataggaggtggggtgctggaaaagccagttattgaaaaagtcacccctggccgtgagtctgaatttgatttaa

SEQ ID NO: 872 - DNA, 251 bp, Glycine max
  Clone ID: 700952525H1
ggaaaaatggagttgttcttctacgcggtgttcggcggtttgggagcggttgttgcagtgacggagctgagcaagagcaacaaggaccgaatcaacacctcttccgcattcaattccttcaagaacaactacctcatcgtctattccctcatgatggctggagattggctacaaggtccatatgtctactacctttacagtacatatggatatgggaagggagacataggacaactcttcattgctggttt

SEQ ID NO: 873 - DNA, 261 bp, Glycine max
  Clone ID: 700952550H1
ggagaagaaaagcataacaagcagagcacattgtttagtgctagcatttccaggtcaaggccatatcaatcccatgcttcaattctccaagctattggagcgtcaaggggtgagaataacacttgttactactcgtttctattccaagaatttgcaaaacgtgcctccttccattgctcttgaaaccatttctgatgggtttgatgaagttgggccccaagaggctgggagccccaaggcctatatagatcgcttgtgcca

SEQ ID NO: 874 - DNA, 256 bp, Glycine max
  Clone ID: 700952552H1
atcggccagcaccaacagcatcggcggcgacagtcactctccgacaacaacacttccgcggcgaaaaatgtctctggtggcgaacgaggatttccagcacattctgcgtgtgctgaacaccaacgtggatgggaagcagaagataatgttcgctatgacctccatcaagggtattggaaggagattcgccaacatcgcttgcaagaaggccgatgttgacatgaacaaaagggctggtgagttgagtgctgcagag

SEQ ID NO: 875 - DNA, 255 bp, Glycine max
  Clone ID: 700952554H1
cacgttccgagttttctgatcgctcatagagagttcgacgcggcggttgcagaagaagattgcaagatgaagttcaacatcgcgagtcccaccactggatgccagaagaagctcgagatcgacgacgatcagaaactacgagcattttgggacaagaggatctcacaggaggtcagcggagatgcacttggtgaggaatttaagggctatgtcttcaaaattactggaggttgtgacaaacaaggattcccgatg

SEQ ID NO: 876 - DNA, 253 bp, Glycine max
  Clone ID: 700952562H1
ttctaaacaatagtatcttttcgcttcaaatttcatttagatccaaaatttctgaatcagtgaagaatcttagattctgtgggaaaagcttctcaatctttgacgaagataaacaacaatgtcttcacttgcggctgctagagcagacaacttttactatcccccagaatgggaaccgaatcagggttcgctgaacaagtttcatggtcaacatgccttgcgagagagggcgagaaaattagatcagggtatc

SEQ ID NO: 877 - DNA, 255 bp, Glycine max
  Clone ID: 700952563H1
cacaaaacatctcatcattcacccaacaaaatggcgctgcttctgataattcccatctcactggtcaccctctggctcggttacaccctataccagcgattaagattcaagctccctccgggtccacggccctggccggtagtcggtaacctctacgacataaaacccgtccgcttccggtgcttcgcggagtgggcgcagtcttacggccccataatatcggtttggttcggttcgaccctaaacgtcatcgtt

SEQ ID NO: 878 - DNA, 256 bp, Glycine max
  Clone ID: 700952568H1
gtggtggaggaggaatacacgaagcataggcaatgaaatgaggcgttttgactgaccttcttggatctgatcgaatccaaacccaaaccctaatctaatcccaaaaagcttattagtctctctcgatcaatcgaaccagcgagcaagattgtctctctcctaggccatgcgaccaccctgttcctccgccatcgccctctccagagaggtttcctttttcgttttcgccgatttctccatcgattccgccagccat

SEQ ID NO: 879 - DNA, 253 bp, Glycine max
  Clone ID: 700952569H1
ataacggccattattcttcttccgaccatccccaagaatgcttttctcacccttcctcactctcactttcttcctcctcttctcttcttccgttgctgcgatttactcagcggcaacatgttctaacatagtgccgctgagataccgcagcgacagaatctccataacggacttcggtggtgtcggcgacggccgcacgctgaacacgaaagcgttcagagcggccgtgtaccgcattcagcacctgagaagg

SEQ ID NO: 880 - DNA, 253 bp, Glycine max
  Clone ID: 700952570H1
acaagataagaaaaaagaaaaaatgtttgcagggaaaggggctgtttggttctccagagcggtggcgttggcagcaatcgcggtggtagcttgcgttgggcttacacaggcccaacccgaggccaggttcaagtgcaacagcgcgaacatccccacgtgtcgcgcgctcataagctactctcacccgaacaccaccaccctcggcgacatccaaaagctcttcaacgtgaaacacatcctcgacatcgtggga

SEQ ID NO: 881 - DNA, 254 bp, Glycine max
  Clone ID: 700952571H1
ccttggctttggaagaaactcagcagttagttgaagcacagattcaaccagaagatttggctgctcctgtgtccacagggggtacttcaaatcatgttgaaaacgggaaagtagaggtagaggcacgcgtggaggataaaattgtgaaaccagaagcggattcagagtgcattccactacaagatgtcctaaatagtataaatactcttcactcagtccccgtaatggacgatgctcaagttttaaataacgca

SEQ ID NO: 882 - DNA, 254 bp, Glycine max
  Clone ID: 700952579H1
gaacataccaatctacaataaacgatgattctcattatctccctcattttttctcttctctctttctcccatgcttctgtcctagatttctgtgttgcagattatgcaggtcctattggacctgcaggatattcctgcaagaagccttcaaaggtcacagcagatgattttgcttacagtggccttggcattgctggtaacacctcaaacattatcaaagctgcagtgacccctgcatttgatgctcagtttgc

SEQ ID NO: 883 - DNA, 253 bp, Glycine max
  Clone ID: 700952587H1
atggccactcttcttcttcccacgctcctccttctcatacccttcgccaccctcgtctccgcccgccctcacctcgccggagactttctccgactgccctccgaaaccgataacgatgacaacgtccagggcacccgctgggccgtcctcctcgccggttccaatggctactggaattacagacatcaggctgatgtttgtcacgcctatcaaatactaaggaaaggtggcctgaaagaagaaaatattattg

SEQ ID NO: 884 - DNA, 258 bp, Glycine max
  unsure (1)..(258): unsure at all n locations
  Clone ID: 700952613H1
acattctaaancaaaggacccagttttacatttntntttgttcctgagttccaatggctcttcaggctgcttccntggtttctgcttctttttctattgctaaagagggaaagtctggtgtatctctcagggacaccanaatgtttggtgtttcattgtcggatactctcaaatctgacttcagctctccctcatcgacttgnaaaagggnattccancaaaaatttggccctttgagggttcagtcagtggcaaaac

SEQ ID NO: 885 - DNA, 262 bp, Glycine max
  unsure (1)..(262): unsure at all n locations
  Clone ID: 700952665H1
cccgttttctctctctgtttntccanggccatctgatcaaactnttcttgattctctctctcagtttttgctattctgagtgatgggtatgccctgccgctgttcccacacctcccacatcactgaaatcatcatcaccagcntcttccgccacaagtcttaaattacaacaattnccctcanttatncatcaaccaaccaccttaanagccttttcnaatggttccttaaagatccaacttggtcggagtnaacatggcgg

SEQ ID NO: 886 - DNA, 249 bp, Glycine max
  Clone ID: 700952677H1
ctttctctctgtctctctctcgctcttcttctcatccagcaccgagtcacagactcaccgatcttccgattccctttcgtcttggtttatgagctcgaaggagagacccactcttggtggcacgcggattaagacccgcaaacggaatattgctgcgccgctggaccctgcagcattctcggatgcagtggtccagatttatttggataatgctggtgatctggaacttattgctaagagcattgaatc

SEQ ID NO: 887 - DNA, 278 bp, Glycine max
  Clone ID: 700952702H1
ttgaagacagcttcagaatcagatctggtgtggtgtggtggctgttactgttagcacttagcagcgatggccaaagcgtcgatattcatttacatactcgtcgcagcggcgcttctcttattcctctctcattccccggataagcactccggccaccgccaccgccgcctcaagctccgctccaacttcaccctcgccccctcgcgccaccacgccgtcgccttcgaccctctcgtcgctgagctcgagcgccaccgcgaggacaaggagtgggagaa

SEQ ID NO: 888 - DNA, 278 bp, Glycine max
  Clone ID: 700952705H1
ctccgctctcaaatccgccgtcgccggattgaacgaaatcagtgagaatgagaagaacggattcatccagcctcgtcggccgctatctcagtggcgaacgcagcatgtggaatggagcaagatccagacgcctacggacgaagtggttgtgccttacgacactttggcgccaactcctgaaggttcttcggaggtgaagaatctattggacaagcttgtggtgttgaagctaaatggaggcttgggaacaactatgggttgcactggtcctaaatctg

SEQ ID NO: 889 - DNA, 272 bp, Glycine max
  Clone ID: 700952735H1
ggtttttagatggatgcaaaaacaacgatggtatattgctgataatgggatttactcaaaactcatatcagttatggggaaaaaagggcaaaccagaatggctatgtggcttttctcagagatgcgtaatactggttgtcgtcctgatacttctgtctacaatgcgctaattacagctcaccttcattcgcgggacaaaacaaaggctttggctaaagccattggctactttcagaagatgaaaggaatggagcggtgtaagcccaacattg

SEQ ID NO: 890 - DNA, 273 bp, Glycine max
  Clone ID: 700952736H1
tcaagatcgaattgttggtgcccatttcttcagtcctgcacatgttatgccgcttctggaaattgtacgtaccaagcagacctctgcccaagtgatagttgacgtgttagatatttcaaagaagataaagaaaactccagtggtggttggaaactgcacaggatttgctgttaataggatgttcttcccatatacccaagcaggtctcttgcttgttgaacgtggtgcagatgtttatcaaattgatagagtaataaccaaatttggaatgcc

SEQ ID NO: 891 - DNA, 274 bp, Glycine max
  unsure (1)..(274): unsure at all n locations
  Clone ID: 700952739H1
actaaactaaactagcgaagagaaatgtccgaaaacggagaagaganattactcgcngtggcgcggcacatagcgaaaacgctgggccacaacaacaccatgtctgatgacatattccaaatactatcgaacttcgacggaagattctcgagagagaatctttctgagaaaggcgcagatgcggatcccagaggctgcgccgcactggatcattccctcaaaaccctagaccgccggatctctctctacgtctcctacgaccgccctatctggt

SEQ ID NO: 892 - DNA, 272 bp, Glycine max
  Clone ID: 700952742H1
ggggcctgtaagcaaagttgattataaagcggctgaggaaacaatagcaacgctagaggctctgaaaattgcccttgctcagattagaatctgttccagactggaagccttattgctgaagaaaaaaaatttaagcaatggagactctcccgaaattcatgctcaaaaggttgataagctgaaggtattaacggagtctcttgccaactctgctacaaaagctgaaaagcgtattttagataacagactacaaaaagaggaagcattaaagg

SEQ ID NO: 893 - DNA, 270 bp, Glycine max
  Clone ID: 700952745H1
cccatttctggacaaagacacatctttgaatttcattggattcaattcatttgggtatcaatcaagattgaattgttgttgtcgtcgtcttggggatgggatcgtgcctgtagatgacgggggcacgggtgtgacgttgctgaagcagggacaggaccttgttattgtgaatgtagatgactccagagctgtattagctgcccaagatcgtagcaatggttctcttattgctgtccagttgagcactgaccacaagccacatcttccaag

SEQ ID NO: 894 - DNA, 269 bp, Glycine max
  Clone ID: 700952758H1
tctttaccaactgctactcttgacggacccataccacctgtaggagccttgagtagcgctctcagtagattacaatcaaataggcctcttagagaattgagagaggttgccaagggagttactaaacgaattggaggtcctatgcatgaattggctgcaaaagttgacgagtatgctcgtggcatgatcagtggttctggatcatcactttttgaagagcttggactctactatattggtcctgttgatggtcataacataaatgatct

SEQ ID NO: 895 - DNA, 268 bp, Glycine max
  Clone ID: 700952761H1
ctttctctctctcattctcttctccatcgcgcgtaagaaacacattttagttgctactaatgggaactgttgaagctgcaaacaaggatgcaaatggaagtctcctagagaaaaatccttcagttgtttttgtgttaggtggcccaggaagtggaaagggtacccaatgtgcaaatattgtccaaaattttgggtatactcatctcagcgctggtgatcttctgcgagcagaaatcaaatctggttctgaaaatggtacaatgattca

SEQ ID NO: 896 - DNA, 267 bp, Glycine max
  Clone ID: 700952781H1
cagctacactcaacaccgtgtttagatggaagcctaagttttgcggcaactttggaaaatacttcaaaagtgcgttcaagtctcacaaaacggtgcattggaacacgtgtcaatggattaaaacggtaaaacgaacacacccttgttacttggacgtggaaattcacgttcgcgctcctttttatcttggcattgcgtttgtgtgtgtgtgcaatatcacacaacccaaccttattcgttcttctgttgttctgaggcgagccatga

SEQ ID NO: 897 - DNA, 267 bp, Glycine max
  Clone ID: 700952783H1
tccatttgccgcctctggaactccgaacgttgaacatggacgctgccaaagaagaatttctcagagactttggtgaacactacggctaccctaacggccccaagtccgttgatcaaattcgagctactgaattcaagagattacaattacaagatcttgtatacttggatcatgctggggcaactctatactctgacctgcaaatggaatctgttttcaatgatctcactactaacctatacgcaaatcctcacagccaaagtgact

SEQ ID NO: 898 - DNA, 266 bp, Glycine max
  Clone ID: 700952789H1
ccaagatgtaaacaacctggatcaagttcgtgctttggagaatgagatgctccatcgcattaagcaacaaggattggacattgttcctcgtattctcattatcacccgtcttctccccgatgcagtaggaactacttgtggccaacgtcttgagaaggtgttcggaactgagcactcccacattcttcgagttccctttagaactgagaagggaattgttcgcaagtggatctcaagattcgaagtctggccctacttggaaactt

SEQ ID NO: 899 - DNA, 258 bp, Glycine max
  Clone ID: 700952801H1
gggagaagggaaggtgagtagtaatggtcatggatgttgcaaatcagggccaggctatgcttccccactggaagccatttctggtcccagagagtctctcatttatgtaacctctgtctacacagggaccggaatagagaagccagactatttggcgacagtggatgtggatccaaactctccaacttattccaaagtcatccataggcttcctgttccttatttaggtgacgaattgcatcacacaggctggaattc

SEQ ID NO: 900 - DNA, 256 bp, Glycine max
  Clone ID: 700952805H1
ggcaattgggtacaccatagcagcttccataagcatgatggcagtcaaaaggtctaattgttatcatagtagcggagggaaaaatccatgcaaaatgaatagcaattggtacatgatttcatatggtgttgcggaaattatcttctcccaaattccagatttccatgagttgtggtggctctctattgtagctgctgtcatgtccttcacatactcattcattggacttggccttggtattggtaaagttatagga

SEQ ID NO: 901 - DNA, 256 bp, Glycine max
  Clone ID: 700952806H1
gcgtcgctgctccgtaccagtttcactgcataaatttgagagaaaactctgcaaacatgttggtttatcaggacctccttacaggtgatgagcttctctcggactccttccgttacaatgaaattgagaatggaatgctgtgggaagttgaggggaagtgggttgttaagggagcagttgatgttgacattggtgcaaacccttctgctgagggtggagaagatgagggagtcgatgacgcagctgttaaggttgt

SEQ ID NO: 902 - DNA, 255 bp, Glycine max
  Clone ID: 700952808H1
gtttattcgttgggtccgctgggcttcttgggcttggtggtgggcctttgtcattaacttcacaaatcaaagcgacgtcgttttcgtactgtttagtggatcgcgactcgggaaaatcgtccacgctcgagttcaactcacctcgacccggtgactcggtcgttgcaccgttgttgaagaatcagaaggtgaacactttctactacgtggagctcaccggagttagcgtcggcggggaaatcgtgaccgttccgc

SEQ ID NO: 903 - DNA, 255 bp, Glycine max
  Clone ID: 700952809H1
ccagacagcagcagcaacaacaaacaaactctttctggattcagtttttgatgtgaaaatggcagtgactcttacatcaacactctttctggctttgctatttgctgcttcagcttttgctgctcttcagcctagagtacctgaagcttacctccaaaatgggaactttgaggagcagccaaaccctaaatacctgaagaaaacaaagctctttggtaaatacgctttgcctaaatgggagatcaatggtctggt

SEQ ID NO: 904 - DNA, 251 bp, Glycine max
  Clone ID: 700952812H1
ctctgttctgctcttgtcctgcttttccatccatttatgtgaaaaaggaaaaattgcctgaggtggttcaatcactatggaatcctgcaattgtattgacccacaagtgccagctgatgacttattgatgaaataccaatatatctctgatttcttcattgcccttgcttatttctcaatccctttggagcttatctactttgttaagaaatcagcagtatttccatatagatgggtccttgttcagtttg

SEQ ID NO: 905 - DNA, 250 bp, Glycine max
  Clone ID: 700952813H1
catatccccccctagctacagagcagccaaaggggaggaataataataagcctatattctaaggccggaaaaataaaaaaggaataacaaaaatgtctggaaaggtaattatctcggctgtttctctcatcctggtggttggagtggccataggtgtggtggtggccgtcaacaagaagggcgaggatcccacacttcaatctcaacaaaaatcagtaggggttatctgccaaaacactgatgaccagaa

SEQ ID NO: 906 - DNA, 251 bp, Glycine max
  Clone ID: 700952815H1
catcatcttcatccttgtctttccaatcattatttcttgctcctgggcctcgtcgttgggcctgagtagcaatgcgacgaccatctacgaggtcctgagcgagcacgggctgcccatgggcctgttcccgcagggcgtgcgggagttcgcggtgggcgaggatggtagcttctgggtgcgcctcgacgaggcctgcaacgccaagttcgagaacgagctgcattacgagcgcaacgtctccggccacctca

SEQ ID NO: 907 - DNA, 254 bp, Glycine max
  Clone ID: 700952823H1
gaaaatccaaagaaagaaaggaaacggaataattcgatacccctctcgtctcgtaactaaccatggcagcgttccgatggaagagcttcgaggagaatgaggatcgcccagccaagcctcgtcattttggcgtcaccgagattcaaagcccccactgcactctcttctcccacaaccttcttcaggatatttttgaatctatgggagactatgtagatgggttaaagttttctggaggttctcacagcatgatg

SEQ ID NO: 908 - DNA, 248 bp, Glycine max
  Clone ID: 700952827H1
ctaaacaactctttctcttcttccttcgctcgttgttctccctcgcgtagatcgacaatggcggagacagagacgtttgctttccaggctgagatcaaccagctcctcagtctcatcatcaacaccttctactccaacaaggagattttccttcgtgaactcatcagcaacgcctccgatgctttggacaagattcgatttgagagtttgacagataagagcaagctcgatgctcagccagagttgtt

SEQ ID NO: 909 - DNA, 247 bp, Glycine max
  Clone ID: 700952828H1
aaaaacttcaaagtgggtgataaagttggagttggtgtgatagtggagtcttgcaaggaatgtgaaagttgccaacaagatctggagagttactgtccccgccctgtttttacctataactctccttattatgatgggacacgaaccaaaggtggttattctaacatcatggttgtgcaccagcgttatgtgctccgatttcctgagaacttgcctcttgatgctggtgctcctctgctgtgtgctg

SEQ ID NO: 910 - DNA, 248 bp, Glycine max
  Clone ID: 700952837H1
gtatatcctagttgttctgatgcaagggtaatgtgggatcagaagacaggccgttccaggggatttgggtttgtttcttttcggaatcagcaggatgctcaaagtgctataaatgatttgactggaaaatggcttggaagtagacagattcgttgtaattgggcaaccaaaggggccagtgccagtgatgaaaagcagacttcagattcgagaagtgtcgtggagttgaccaatggatcatctgaaga

SEQ ID NO: 911 - DNA, 248 bp, Glycine max
  unsure (1)..(248): unsure at all n locations
  Clone ID: 700952838H1
gttcatggaagggaaaccagatctagttattggaaattacactgatggaaatttggtagcatcactaatggctagaaaacttgggataactcagggaactatagcacatgctttagagaagaccaagtatgaagactcagatgtcaagtggaaagagttggaccccaagtaccacttctcgtgtcaattcatggcggatacagtggcaatgaatgcatctgatttcatcataaccagcacataccngg

SEQ ID NO: 912 - DNA, 250 bp, Glycine max
  Clone ID: 700952840H1
gaacgatcctcgtcttctaaaggaagatactcttaataatgaactgagttcatcaagaagagatatgcaattatctgtaagggatgcacttaactcaaagaaagacgagcctcagaaagattcagatgctggtagcatggcatgtcttaatttcagtgatgacgatgaagcagattttgatgcaagaatgcgcatgcaaatactcaaaaagaggaaggagttgggtgatctccctcccaagccaaagttg

SEQ ID NO: 913 - DNA, 243 bp, Glycine max
  Clone ID: 700952845H1
gcattttggaagttaagccagtggacattactcacacagaccaaataaaggaagaccaacatggcacattggtctcagcaaacagcattggtgtttaccatgaccatttctacatattccatcttgattttgacattgatggtgtggaaaattcctttgtgaagaccagtctcaagactctacaagtcacagacaacagttccaagagaaagagctattggacaactagtaatgaagttgtta

SEQ ID NO: 914 - DNA, 243 bp, Glycine max
  Clone ID: 700952847H1
gtctcatctgcagtccgagtggagactggagttaaagaaggagacaaagttagcatgcactatgatcctatgattgctaagcttgtggtgtggggagaaaatcgtgctgctgccttggtcaaactcaaggatagtctgtcaaagtttcaggttgcaggtctgccaaccaatgtcaactttcttcaaaagcttgctaatcacagggcatttgcaaatggcaatgtggagactcattttattgat

SEQ ID NO: 915 - DNA, 247 bp, Glycine max
  Clone ID: 700952849H1
ggaagacaagataaagatggttgtacaccgttgcactgggctgcattaaggggaaatgcagaggcatgtgctgtgcttgtacatgcaggcacaaaagaagaactgatgatgaaggacaatgctgggaacacacctgtacagcttgcatatgataaaggtcatcggcatgtcgctcctttcctttcaaatcaacaacgggctcatagcaactactggaaagggaaactgtgtagtgggatagtgacag

SEQ ID NO: 916 - DNA, 240 bp, Glycine max
  Clone ID: 700952858H1
gtatttatggaatggatttctttgttgttctggagcgacctggctatcgtgttggacgtcgccgaagatgcaagtcccgtgttggaattcagcaccgagtcacaaaggaggatgctatgaagtggttccaggtgaagtacgagggagtgatccttaacaagtcccaggctattctttagttagattgagttcactttaggagtgtgttatcagttttgtcaactatagctcgatctttct

SEQ ID NO: 917 - DNA, 140 bp, Glycine max
  Clone ID: 700952862H1
accaacaatgcatgcagttggcattctgctaaaaaaacattgtaatcttttttactacttccttaaatatttgcttgctacaagcattcaaacactcgtcaatcctcaactgcttaaagtaaagttcttatttaatattg

SEQ ID NO: 918 - DNA, 234 bp, Glycine max
  Clone ID: 700952876H1
cggcaaacctggccgccgacgccttttgaacaacaacgttcttggccacgactactttgaccttcccgaatgggttgatgatcaagttggtgttcgcaaactcctacatatgactggacggaaacgcatggcccatgtggttgttgcaaaggatggcagtggaaatttcaccaccatcaatgaagcattgaagcacgtgcccaagaaaaacctaaggccatttgttatctacgt

SEQ ID NO: 919 - DNA, 238 bp, Glycine max
  Clone ID: 700952882H1
ttgttattgagggaacgggagtgtttgtggatggccctggggctggcaaacacatccaagcaggtgctaagaaggttatcatcactgctccagcaaagggtgctgatattccaacttatgttgtcggagtaaatgaaggggactacactcatgagatctctaacattataagcaacgcttcctgcaccacaaactgtcttgctccctttgtgaagatcctggatgcagagtttggaat

SEQ ID NO: 920 - DNA, 237 bp, Glycine max
  Clone ID: 700952886H1
caaaatcactctattttttagcaccaacttcaattattacaacaaagtataattaattaggcagagaaatatggtggtgaaggtgtatggtccagcaagtgcagcctgtcctcaaagggtgttggtttgcctcttagagaaaggagtagagtttgaacttgtgcatgttgatcttgatctaggagagcataagaaacctgaatttcttctcagacagccctttggtcaagttccagc

SEQ ID NO: 921 - DNA, 203 bp, Glycine max
  Clone ID: 700952891H1
ggacgtgttccttccatttgttaaaagacattaatgtataatctttcttttcattcccgctgttgacgtattgaggataagtctcgtgctgtccacataacaataggaggattttgagtttgtttgtatgaaacttctcctgtgagtgctggaaaatatctgtagctgtgttcttcagtgtattcccacttatttatcttttc

SEQ ID NO: 922 - DNA, 231 bp, Glycine max
  Clone ID: 700952892H1
gtaacccttattttatctattctctctctttcttttgtgttctaagcagctagaagcaatggagaggaaaagaagccatgcctctttcaccatgtttgcaatgcttgttggagtgatctctcagagccttgtcattcctgtagtatccaccactgttgaagatcagaagaactactacaccccagatccacatgctggaagtcccccctcaggtttctccgattctctgtg

SEQ ID NO: 923 - DNA, 52 bp, Glycine max
  unsure (1)..(52): unsure at all n locations
  Clone ID: 700952903H1
gcttncattccacacgcttttgntatccacttcgttntantttatnnagcga

SEQ ID NO: 924 - DNA, 62 bp, Glycine max
  unsure (1)..(62): unsure at all n locations
  Clone ID: 700952908H1
atcaggctgttaatggngaatgcgaangttgactgagcattncncatananctctatnatgc

SEQ ID NO: 925 - DNA, 95 bp, Glycine max
  unsure (1)..(95): unsure at all n locations
  Clone ID: 700952948H1
ggtttgacccacngtttgangacggananngtccgtcgacgtgtatnanaactnngcgagtctctggcgacgcgcnngcatctccaactgggctg

SEQ ID NO: 926 - DNA, 104 bp, Glycine max
  Clone ID: 700952967H1
cagaactgcagttatcttgttagtttgggttttcatgattggatgctagtgtgtaagttgtattgtcattttacagtttgtacccgcctgtgttctgccactga

SEQ ID NO: 927 - DNA, 256 bp, Glycine max
  unsure (1)..(256): unsure at all n locations
  Clone ID: 700952976H1
gaattaattgatgaatganattcaaatactaattgttgctatcacaattcacaagagattggattttggaatggaaagggtgttgtcagtagatgagatatcggagcaatactgggtggctgnnnnnnnnnnnnnnnnnnnnnnnnnnnnnnnnntcaagtcaaagatgaaccggagcgantccgaatgggcctttcagcagttcctacagcaggaagctgcttcttcttcatctaattctgatcatgntgatgat

SEQ ID NO: 928 - DNA, 256 bp, Glycine max
  Clone ID: 700953008H1
gtccaataccatggcacaaatggtcaaggcagtgcgcatgatccttgggctagaatcctttggccctacaccaaagaagccattaaatgaatgcttggatattgaaattgaggacgatgaaccaaaacgaaaaccatctttggaagagattgatgccttggaggtacacaccctttacatttatttaattagtattttgatttctcctcttcaagttttattttctgctgtggaattaaaacatatgttgtctact

SEQ ID NO: 929 - DNA, 257 bp, Glycine max
  Clone ID: 700953011H1
gtggcactaacgtctgccaaagaagtgtcaccgctgaagggatatttcacaatatttttaggcacaaggttactcacatggggggtgcaccgacagttttaaacatgataatcaattcaccacccaaagtccggaagccgcttccgggaaaggtcgaagtgatgacaggtggtgcaccaccgcctccggatgtgattatcaggatggaagaactaggatttaatgtgactcattcatatggtttgacagaaacctat

SEQ ID NO: 930 - DNA, 130 bp, Glycine max
  Clone ID: 700953015H1
gaccaacttactcatgtttacacatttatcctccgtccggatgcaacctacagcatcctgattgataatgtggagaagcaaactggtagtctctactctgattgggatcttctccctccaaagacaatca

SEQ ID NO: 931 - DNA, 255 bp, Glycine max
  Clone ID: 700953017H1
cgccgtgataacacactaacaccaccacttcatcaactttacttgacaacaatattgtaaaactacaaaatctagtttcatactttttttcttcttcttgaaatggctctccaggctgcttctcttgttcctgcttctttctcggttcttaaagagggaaagagtggtgtgtctctcaaggactccaccttgttcggtctttcattttcagaacctatcaaagctaacttcagctcttctgcatgaggtgcaaga

SEQ ID NO: 932 - DNA, 253 bp, Glycine max
  Clone ID: 700953019H1
gaggcaaaggtgcaaaagaaggaaagtagttcagatgattcttcttcagaatctgaagatgagaaacctgcacccaaatctgctgttctttcaaaaaagatacctgctaagaatggtgctgcccctccaaagaaaggcaagctcgcctccagttcttctgaagatgactcctctgatgaggatggtgtgcgtgcaaagaagccacagaaaatggttgctgagaaacaaaagaatggagcaacgtgcaaaagaa

SEQ ID NO: 933 - DNA, 250 bp, Glycine max
  Clone ID: 700953042H1
cggccaccctttcttttcttttttcttttttctctttcctcattctacttaaaactcccaccagtgatggcaggtttggctccagagggaacacaattcgatggtcgccaatatgatgctaagatgagtgaattgctttccactgatgggcaagaattcttcacctcttatgatgaagtgtatgacagctttgatgcaatgggattgcaagagaatcttctgcgaggcatatatgcttaggttttgagag

SEQ ID NO: 934 - DNA, 114 bp, Glycine max
  Clone ID: 700953047H1
tccatttccatttcctctctctcagtttccaagaatcttaagctatgggaaagtcttacccaaccgtgagcgctgattaccagaaggccgttgagaaggcgaagaagaagctca

SEQ ID NO: 935 - DNA, 245 bp, Glycine max
  Clone ID: 700953068H1
caacttctgctacttcctactccaaccgcacttctgctccgcaattatcatgggcaaggtcaagatcggaatcaacggatttggaagaattggccgtttggtagccagagtggctctgcagagagacgatgttgaactcgttgccgttaacgaccctttcatcaccaccgattacatgacatacatgtttaaatacgacagtgttcatggacactggaagcatcacgatgtcacgttaaggacga

SEQ ID NO: 936 - DNA, 247 bp, Glycine max
  Clone ID: 700953075H1
cgcgactactatgtcaacataagaaaagctatgctagctgggtatttcatgcaggtagctcatctggagcgtacaggacactacttgacagtgaaagacaaccaggtggtgcatttgcatccatccaattgcctggatcacaagcctgaatgggtcatttataatgaatatgttcttaccagtcggaattttattcgtactgttacagacatacgtggggaatggttggttgatgtgcaccacatta

SEQ ID NO: 937 - DNA, 101 bp, Glycine max
  Clone ID: 700953080H1
cctcgctctatttctcagtctctgtgtttgcggctgaggattccgaacgagtgaccttcttcgtttctcgcaaagtttaagtaatcatgggtaaggaaaag

SEQ ID NO: 938 - DNA, 127 bp, Glycine max
  Clone ID: 700953083H1
cttatctgagtgggttcggtggaaccaaagcgtgcttcctcttgctcctatcctaagtcctaattcagcatcgtgctgttccaattcgaaactcatatatataaatacagatcccaactcaaaagcc

SEQ ID NO: 939 - DNA, 243 bp, Glycine max
  Clone ID: 700953084H1
ttcggatctagagtcttcagtttctcctcgttgttcttcgctttcctgttttcaatttcgattctttcgttaatttaataagatgtttgggagggcaccgaagaagagcgataatacgaggtactacgaaatcctcggcgtctccaagaacgcttcgcaggatgatctgaagaaggcttacaagaaagccgccattaagaatcaccccgacaagggcggtgatcccgagaagttaaagagctg

SEQ ID NO: 940 - DNA, 151 bp, Glycine max
  Clone ID: 700953094H1
ccatagcccgcctcctccacggcagaactgacaacgccatcaaaaaccactggaactccaccttgaagcgcaagtgcacttcaaccatgattgacgacgacaacactcccccgctcaaaagatccctcagtgccggcgctgctattccagt

SEQ ID NO: 941 - DNA, 256 bp, Glycine max
  Clone ID: 700953101H1
gattgacccgtattggacagtgatacctgtgatgcttgttcattactattcaactcaccctttggcacagtatcagtggtggaggtcgaggatcgtaacgttgttgacttgggcgtggagtgttaggctgatccacaactacttcaggcgagaaaagtggcagtggggtgccagggaggattggcgtttcactgatttgagccatcgctatggaaggcattggtggtgggcttctttcttcgccatctacgtccct

SEQ ID NO: 942 - DNA, 255 bp, Glycine max
  Clone ID: 700953112H1
ctaaggatggggaacagtgggtttttgtattacaatcaagcaagtggaggaccctcttcttataagagtactcttgggggtcatcaccaccaagcattgttggcacagacccaccagggacatgttgggtttggggcagcatcatcgtctacatcatccttaggtgttgtgaatgcgttgaggaattcaaaatatgccaaagctgctcaggaattgcttgaagagttttgcagtgttgggagaggccagttcaag

SEQ ID NO: 943 - DNA, 256 bp, Glycine max
  Clone ID: 700953113H1
caattccattctctttgcctgcctagtttcaattctgtccaatttccaaaaccaaaacaagccacacaagttcatggcaactcccaataacagactctctcttgccatggagagaactgggcaatgggttttctctcaagacataccaactgatgttatagtggaagttggagaaacaactttctctctgcacaagttcatgctagtggcaaaaagcaactacataagaaaactgatattggaatcagatgagagc

SEQ ID NO: 944 - DNA, 257 bp, Glycine max
  Clone ID: 700953115H1
gttcaggatcaagtaaacgtgcaccccaatttaagtctctgatttgtctctccacagatcacaacaacgctctcacgcactagtttgaccacttcgctgtttgcacttttggttcctcaccgatccacacaggttggagacacggagtggcagcagaaaaaaaataaaaataaaaaagctaccttttttatttattttgtgttgggggatgggaaaaagtgacccttatatttatataacggtaatttggaaatgag

SEQ ID NO: 945 - DNA, 257 bp, Glycine max
  Clone ID: 700953116H1
aaagatcatgggtgttaaagttccttcaagcatacttggaattcacccattgcttttcattagagttttgcagatgtgccagtggcgttttcctccagatgttcctcccccttataagggatacagggatgaggactggcaagacaatgatggagcactaaatacaatatccatgactcatcctcgcctcccaattgaacaccccaactgcttggttgaaaaggaatcagactgccaaccattacaacctggcatct

SEQ ID NO: 946 - DNA, 255 bp, Glycine max
  Clone ID: 700953117H1
agaaagataaagcattccatagcctcccataaaaatgaagaatactatcttctctgctctctttctactttgtgccttcaccacctcatacctaccttcaaccaccgcggtggtcgataccgacggtgatattcttcagaatcctggcacatactttatcttgtccgtttttcgacccggcggcggagtagaattcgccgccactggaaacgaaacttgccctctcactgtcgtgcagactctcttcgggagggg

SEQ ID NO: 947 - DNA, 253 bp, Glycine max
  Clone ID: 700953119H1
tgcagttggccagaaaatggacttggtgttttatacattgcagcttggtttctttgacatggattttgatctcatttccaaaagcatagacaaagccaaaaacttgtttgaggaaggtggtgattgggaaaggaagaataggctgaaagtgtatgaaggcctgtactgcatgtccactcgaaatttcaagaaggctgccaagttatttttggattctatttcaaccttcaccacctatgaactttttccctat

SEQ ID NO: 948 - DNA, 255 bp, Glycine max
  Clone ID: 700953130H1
ctggatttcttaatactagttggtagcacagaatcgattcgaaatcgaaccaaaaaaaatatcacgttcttgtaacaagtcaaagacacaactcaacttgaaccaaaaaataacaaaatgcgttcgatctaaggtctgaactaaaaacatcccatttccactcccaactctgtttcaccatttcttcaattgaatacttctctgaatcactatgatatattcactctctttctgctgcatcccacttttattctg

SEQ ID NO: 949 - DNA, 253 bp, Glycine max
  Clone ID: 700953131H1
ccaaaatccccggtaacaccgaatgtgacggcgttggcattttgggcatcgcttgggccttcggtggcatgatcttcatccttgtttactgcactgccggaatctctgggggacacatcaaccctgcggtgacattcgggttgttccttggacgcaaggtgtctttggtgagggcgttgttgtacatgatagcacagtgtgccggtgcaatctgcggtgctgggttggccaaagggttccagaaatcgttcta

SEQ ID NO: 950 - DNA, 252 bp, Glycine max
  Clone ID: 700953134H1
ccatatccccccctagctacagagcagccaaaggggaggaataataataagcctatattctaaggccggaaaaataaaaaaggaataacaaaaatgtctggaaaggtaattatctcggctgtttctctcatcctggtggttggagtggccataggtgtggtggtggccgtcaacaagaagggcgaggatcccacacttcaatctcaacaaaaatcagtaggggttatctgccaaaacactgatgaccagaag

SEQ ID NO: 951 - DNA, 252 bp, Glycine max
  Clone ID: 700953136H1
gccatttcaatccccagtttcttcttcaacgtcctcttacgagcagatcccaattctccttcccagtttcaaaccctaattccctcattcccatggcctcagaagagcccactgtcgcggtggaacccgctcccgaacctgccaccgccgagcctcccccggaggagaaggaggagcccaaacctgaagccaaggctaagaaaaccaaggaacccaaacctaaaaaggtttccagaccacgcaaccctccca

SEQ ID NO: 952 - DNA, 252 bp, Glycine max
  Clone ID: 700953140H1
ttgttgaggaagcacatggctggtagtagttcaaagccagtgatatgtccgcgaaccagggacaaacttggctttcccatggccccacttccaattaccactccttcaatcatcttgtttcaagaggaggaattggaaggctcagtcgttgttgttgtactttcaatttcaggttaagaaagagcaaaacggctgcgttttcggtcatgagaaactttggcgtgacgacggaggaagaccatgagttcgtga

SEQ ID NO: 953 - DNA, 253 bp, Glycine max
  Clone ID: 700953148H1
atcgtcatcgtactactactacccacgttctgctcctttgcggatcgtgtccacaaaagatggcagacaatgaggatggaagggataagactactcgtgggaatgaatgggaggttgtatctctgacagcatcgacatatgcagctgctcctggtcctgatgaagttgagatgaaggatgatgggaacgaagatgtatatggacaagatgaaggagaaacgttacatgctttatttatgtctcgtcactttgt

SEQ ID NO: 954 - DNA, 250 bp, Glycine max
  Clone ID: 700953149H1
aatttatcatcgcagcccattattttcagaggtcattcagatggcatatccagtttctccatttggggccaagatgttatttcaatttcccggaatagaattgggcttctctccttgtctaaatctcccaatgaaacagatgggcagcatcacattagccctcagaaactatatgtttctgataatggtcagagaagcttgtcagcgttatcaagtattagtatacttccattctctcgattgtttctca

SEQ ID NO: 955 - DNA, 249 bp, Glycine max
  Clone ID: 700953152H1
gtttacaaccccaaacagctaggaaagaaggtaatttggtgggtgaaaaagttagataaagagacgctcctagctactgttttatttagttggatgtttgcttctttgttgggaccctgttgtgttggttcacgtgacaaagaacgtagcaacataatctgtgagcatgcaagacatgatctgctggattgacaaactatgttagcacgaactgtttggatctattttttgaggaaatatggtttaatt

SEQ ID NO: 956 - DNA, 250 bp, Glycine max
  Clone ID: 700953153H1
cttcagagcacagggcaccggtatgaaggtggattctggacagaccatgcaaagcatgatccattggacaatgaaagacatgttgcaatagtgacaactgctagtcttccttggatgacgggaacagctgtaaacccactatttcgagctgcatatttatcacaatctgcaaagcagaaagttactctgttggttccatggctttgtaaatcagatcaagaactggtttatcccagcaatctcactttta

SEQ ID NO: 957 - DNA, 250 bp, Glycine max
  Clone ID: 700953160H1
caacggaaaggaactttgcaagagtattaacccagatgaagctgttgcttatggtgctgcagtgcaggctgcgattctcagtggcgagggtaatgagaaagtgcaggatcttcttttgttggatgttactcctctatccactggtttggagactgcaggaggagtcatgactgtgttgattcccagaaacacaaccattcccaccaagaaggagcaggtgttctcaacctactctgacaaccagcccggt

SEQ ID NO: 958 - DNA, 250 bp, Glycine max
  Clone ID: 700953161H1
gccactatagtaaacaatcttctctatctaaaatggagtttgttctaaactacctaaatgccactgccattggagttctttctctaaccctcttctttttgtttttgtataatcccttcaaatttgcattaggtaaaaaagaggctcccgaagttgcaggtgcatggccaatacttggtcacctaccactattgagtggttcagagacacctgatagggttttgggtgctttggctgataagtatggacc

SEQ ID NO: 959 - DNA, 248 bp, Glycine max
  Clone ID: 700953167H1
gggattgaagagtaaacataggatccacgatcaactcgattttatacttttgtttctatttctctggaggcagctagctagggtcatactcatggggagcttgaaaggagacagtggacatgccaatggcgaaaatcttaccgaagctcttttgccaacacgagatgcacaacaacaacatcaaacagacgacgaggaacaaagatttggtgacaagctctggcttgaaaccaggaagttatggctca

SEQ ID NO: 960 - DNA, 247 bp, Glycine max
  Clone ID: 700953168H1
gtggggtgggaggcacacgcacaaacgcagagtcagaatctccaatcttcaatcggagacaaagctagctcgaacgaacgaagtagagtagtgtgctacgaaaaatgtggcggtgcatcgcacgtggtctccgtggacctgcttccaccagatccacctccaatcactcacttggatctcaactttctagattcttctctagtggggcgaactcctcgtacaccgtggtggatcatacttatgatgc

SEQ ID NO: 961 - DNA, 249 bp, Glycine max
  unsure (1)..(249): unsure at all n locations
  Clone ID: 700953178H1
gtcgagctcgcctccgcggaggtcatttttcagaaccccgatctgatgaacaaggtgcgtgatttgttnnnnnnnnnnnnnnnnnnnnnnnnnnnnnnncctgaaacgtgttcctgggcgttgaattgcgttgccaccaccgatcaaggcgagaacgacccttcctcgctctggctcaaccctgaaatcaaagactcctccaccgtctcgccgccgaattccacggttaataagacgatgcatttcgaa

SEQ ID NO: 962 - DNA, 250 bp, Glycine max
  Clone ID: 700953180H1
caaaaaggaaagaagcagattctgtcctttgaaatcaacaagaaaagatgtcaggtgaagaggtagctgttgcagttgaggtacctgctacttcaattccaggtgagccaatggacatcatgactgctctacagcttgtgctgagaaaatctctggcctatggtggtcttgcacgaggtcttcatgaaggtgccaaggtgatcgagaagcatgctgcacagctctgtgttctagcagaagattgtgacca

SEQ ID NO: 963 - DNA, 246 bp, Glycine max
  Clone ID: 700953184H1
ctctttcaaaagggagaagaaaaggaaaggaaacaaaacgcacaaaggattattatagcaatggcagaacaaaaccaaaaccagacaactgaagctggaaggcaccaagaggttggccacaagagccttctccagagtgatgctctttaccagtatattctggagaccagtgtctacccaagagaacctgaatccatgaaagaactgagagagttgacagcaaaacacccatggaacatcatgaca

SEQ ID NO: 964 - DNA, 246 bp, Glycine max
  Clone ID: 700953185H1
acttgtccttctttgcgagattgaatcgtaagcagcggctaccctaatcctctcctcttcctctctactaatttcagctatggccgacgaagctgtggttgttccagatcccacccagatcgatgtcaagctctttaaccgctggagcttcgacgatattgagattactgacatttctctggctgattatatcggagtggcgacatccaagcacgccacgtatgtgcctcacaccgccggcaggta

SEQ ID NO: 965 - DNA, 244 bp, Glycine max
  Clone ID: 700953189H1
agctgcgatcctctgcttcgatggccaccgtgcaactccaatccctaacccttgttcgctcctcagcacttccttccgccaccttctcccctccgatcgccgtctccggccgccgcaactccgccgcgctgccgcgctactccggcctccggctccgacccgccgctgagaccagtttcccgactcacgccagctcgagaaccgcttctcgcggcggaggtgtcaagtgcgaggcaggagacac

SEQ ID NO: 966 - DNA, 247 bp, Glycine max
  Clone ID: 700953195H1
cgtctttctcgtcttcgattcatcgccaaaccccaacctttcctatctcctcattcaacaccatcccatttttctctcacccccaaaaccaagaaaccgaatcgattccgattccgattccgatcaatggctgcggaacccaaggaatcgccttccaacaaccccggtcttcacactacccctgacgaagccaccaagggttacatcatgcaacaaactatgttcagaatcaaggaccccaaagtga

SEQ ID NO: 967 - DNA, 277 bp, Glycine max
  Clone ID: 700953210H1
tctacctctgccactttctgagtacaatacaacactgccatggctgcctcagtctccactattggagctgtcaacagagctccactgagcttgaacagctctgaagctggagattcggttcccagttcagccttctttggcacaagcttgaagaaggttactgcctcaagggtccctaacgtcaagatttcttctggaagtttcaaaatcgttgcggcggagaaagagattgatgagcaacaacagacaaacaaggacagatggaaaggtcttgcct

SEQ ID NO: 968 - DNA, 276 bp, Glycine max
  unsure (1)..(276): unsure at all n locations
  Clone ID: 700953222H1
gtttgatacaggagcatntgttggtggaagcaaacagatctttgaccatgaagctggaagaaatcanttcaagaaaccagtataggcaaacatgggaagctggtgagcaaagtatgccatatggaacccaaaatgctcactctcaaggcttcttccagcctttggagtgcaaccccacattggcagataggttctgactacaggtacatccctgaagcctcagagcagcagctagctgccacaactcaagcttcaacaagtcatggatttttcctg

SEQ ID NO: 969 - DNA, 278 bp, Glycine max
  Clone ID: 700953228H1
caaaccctaaccctagaagaagaaaaaaaccacaaccaccaccatctagggtttttctttttctcatggctagtttgtcaactaggattttcttcatcatgtcccttgtgtgcctggctctcggtccaatggcacaaggggaaatgacatgtggccaggttgtgagcaacctgaccccatgcatctcctatgtggtgtatggtggaaccaatgttcctgaacagtgctgcaatgggataagaaatctctatggcatggctcagaccaaaccagaccgc

SEQ ID NO: 970 - DNA, 283 bp, Glycine max
  unsure (1)..(283): unsure at all n locations
  Clone ID: 700953247H1
gatgaaagggantnttgantccacttctggggttggcgatggttcgagctgcggaagggagaataatgatcgagccaaacaaggagttgaactcagcacagcacagagacaagagcttcagatgaagaagtccaagcttgtgaccatgctcgatgaggtggagcaaaggtacagacagtatcaccaccaaatgcaagttgtgctaacatcgtttgagcaagcagcgggtgttggtgcggcaaagtctttacacgggccttgccttgaagacaatctcaaagca

SEQ ID NO: 971 - DNA, 271 bp, Glycine max
  unsure (1)..(271): unsure at all n locations
  Clone ID: 700953253H1
gcactacatggggttggtggagcatntgcaaagagtatntttgtggatgagcttggggcacaagaaagctctttactgaactgtacaccaaaggaagactttggaggaggacacccagaccccaatttgacatatgcaaaagagttggttgctcgtatgggattgggcaaatccgaaccacaagatgatcccccagagtttggtgctgcttctgatggtgatgcagatcgcaacatgatacttggtaaaaggttttttgtcactcctcaga

SEQ ID NO: 972 - DNA, 281 bp, Glycine max
  Clone ID: 700953264H1
gagctttattactgggaaacctgtatttggtactctcgttgctcttctacaaaatggcacaccaatccttggcataattgatcaacctgtgttaagagaaaggtggatcgggatagcaggaaagagaacctcactgaacggacaagaaatatctacacgcacttgtgcggacctttctcaagcatacctgtacaccacaagcccacatctgttcagtggagatgcagaagaggcattcattcgtgttagaagcaaggttaaaattccattgtatggctgcg

SEQ ID NO: 973 - DNA, 267 bp, Glycine max
  unsure (1)..(267): unsure at all n locations
  Clone ID: 700953271H1
gttttggatggatacnttgcatgtggttcagaatctaatgaggtgtactgttatcacaaatcactgcctgtgccaattgctactcataaatttgagtcaattgatcacatttctggtcatctaaatagtggtgataataatggacagtttgtttctagtgtttgctggagaaagaaatctaacatgcttgttgctgccaactcagttggaattgtgaaactattgcagatggtctgacacaaaagagaaaatatttggttaacattt

SEQ ID NO: 974 - DNA, 271 bp, Glycine max
  Clone ID: 700953282H1
gtgacttttgcaccaactggactgacaaccgaagttaagtctgtggaaatgcaccatgaagctctcacagaggctcttcccggtgataatgttggattcaatgttaagaatgttgctgttaaggatctcaagcgtggttatgttgcctcgaactcaaaggatgatcctgccaaggaggctgctaacttcactgcccaggttatcatcatgaaccatcctggtcagattggaaatggctatgcccctgttcttgactgccacacttcccaca

SEQ ID NO: 975 - DNA, 263 bp, Glycine max
  Clone ID: 700953290H1
tcgtgaccgcacgatcaagctgtggaacaccctgggagagtgtaagtacacaatccaagacggcgatgcgcattctgattgggtaagctgcgtccgtttcagccctagcacccttcagcccactattgtttctgcctcgtgggaccgcaccgttaaggtttggaacctgacaaactgcaagttgaggaacacgcttgctggacacaatggttatgtgaacactgttgctgtttcccctgatggctctctgtgtgccagtggtg

SEQ ID NO: 976 - DNA, 268 bp, Glycine max
  Clone ID: 700953302H1
ctggagggggccaaaatcctaaagataattatcttgtgaagtttctttttctgctaccattttgtgctgtgctgttctgctgttgtcgttcgtttctaaagaatcagaggtactttggttcctgttgtagaaattcactatgcgatcatgtcagacacctttattacaggattaaatcaagggtgccacttgcatatactaccatttctacctcaactttcaattccctcataaggtcatcttttgcttctatatcttcttatttagg

SEQ ID NO: 977 - DNA, 265 bp, Glycine max
  Clone ID: 700953304H1
gatcaaggtcagtgatgcggacttggagttcctcacaggaagtgacaagattgatgatgaatctgctttgtcattgtggcaccccaatttgaagttgctccttgtcactcttggggaacatggttccagatactacaccaagagtttcaaaggatcggtagatgctttccatgtcaatacagttgatacaactggtgccggtgattcctttgttggtgctttattgccaagattgtcgatgatcagtccatacttgaagatgaac

SEQ ID NO: 978 - DNA, 265 bp, Glycine max
  Clone ID: 700953308H1
gtaagatcgaagcaacgataggtccatagtaagttggcagacatgtttggcatagaaaaatctgaaatgttaagtagggtgctttactgcgattcagttggggctatcaaacacattggtgatgagccattcagtgacttcacaagaacagccaaaaggttgactattctaatggattctggcagcaacaatgtaggagtgtagtggggcagaataaactattctttaattgtacagatagttcacgaagtctcattttctaacc

SEQ ID NO: 979 - DNA, 264 bp, Glycine max
  Clone ID: 700953311H1
caatggaggcgattaggaagagtaggattcttatatttggaggaactggttacatagggaagtatatggtgaaggcaagcgtcacgttaggccatccaacttttgtctacactcgccctcttgatgcacaaactccttcctctaaggcacagctttgcaaggagttcaactctatgggggtcacacttgtccatggagaacttgagcatgaccagattctggcatgattaaacaagtagacattgtgatatgttctcttccata

SEQ ID NO: 980 - DNA, 264 bp, Glycine max
  Clone ID: 700953312H1
cgaaaatgtggaagagaacgggttttgaagaagaagcagttcaattgatcaactcagatttcagggacctaagtctagctgctaatagactcgcccatcatgccatcaaacttggtggcattggctttggagcctcttttttcggattgtttgctgccattgctgctatttatctgttgattttggatcgtacaaactggaaaacaaatattctcacagcactatcattccatacattttcttcagcttgccttcattaatttt

SEQ ID NO: 981 - DNA, 263 bp, Glycine max
  Clone ID: 700953319H1
ctcgagatgcacaagcaaaactcaaggcacgtcaaggagtggcccatgttgggatggaagacctagatgtgaaagatcctcacacaatgaagagtgtaccagctgatgctaaaaccatgggtgaggtgatgttcaggggcaacactgtgatgaatggatatctgaaggacttgaaagcaacacaagaggcatttaaaggtggatggttttggactggtgatttggagtaaagcatcctgatggatacatagagcttaaggatc

SEQ ID NO: 982 - DNA, 264 bp, Glycine max
  Clone ID: 700953324H1
gagattacggcgtcctcaaagccaattatgaatcacttaaacttaactacgacaccctccaacaagaccacgaagccttactcaaagagataaaggaattgaaatcgaggctggtgcaagaagagaacaacaacaacactgaaagcgatgtttcggtgaaggaagagatgctgaccaccacgctctgtgaaaccgccattcctggatcggacacgaaggagttggttacgagtgttttaacaagagtgatgaggtgggaggggg

SEQ ID NO: 983 - DNA, 262 bp, Glycine max
  Clone ID: 700953327H1
tcgggattgactgcctcaattgctctagaaaaggcaggacagatggaatctggaaaagtggtccttgttactgctgcggcaggaggaacggggcaatttgctgttcagctagcaaaattagcaggaaatacagtggttgcaacttgtggaggtggggcaaaagccaagcttctgaaagatttgggagttaacagagtcatagactatcatagtgaagatgtaaaactgttctaagggaagagttccccaaaggtattgacat

SEQ ID NO: 984 - DNA, 262 bp, Glycine max
  Clone ID: 700953328H1
cttgaatcttcgttatccttctttttttctccttgaactcgaatattcactatggcagatgaggtggttctgctagatttctggccaagtccatttgggatgagggtcaggattgcacttgctgaaaagggtatcaaatatgagtccaaagaagaggacttgcagaacaagagccctttgctcctcaaaatgaacccggttcacaagaaaatcccggttctctccacaatggcaaacccatttgtgaatctctcgttgctgt

SEQ ID NO: 985 - DNA, 264 bp, Glycine max
  Clone ID: 700953330H1
gcgagcgagcgagcagtttcaaagagaggatttgggattgggaaggcgagggattgcgctgcgtctcttcctcttctctttcgattcatccctcattcataatcttccaatccaacaacctcagcctcacactcacacatacacacatctgaacgcgtatcgtccctcccatggcttcaaagcgcatcctcaaggagctcaaggacttgcagaaagacccaccacttcttgcagcgctggtccagtagctgaggacatgttcca

SEQ ID NO: 986 - DNA, 261 bp, Glycine max
  Clone ID: 700953335H1
caacttctgctacttcctactccaaccgcacttctgctccgcaattatcatgggcaaggtcaagatcggaatcaacggatttggaagaattggccgtttggtagccagagtggctctgcagagagacgatgttgaactcgttgccgttaacgaccctttcatcaccaccgattacatgacatacatgtttaaatacgacagtgttcatggacactggaagctcacgatgtcaccgttaaggacgagaagacccttctcttc

SEQ ID NO: 987 - DNA, 260 bp, Glycine max
  Clone ID: 700953336H1
ctcaacattttacactcttttcttcttctcgttgttgcttcgctgttgaatcatggatcagaaggtcgatttcagcgctccccattccatgggaaccactatcatcggcgttacttacaacggcggtgtcgttctcggagccgactctcgaaccagcaccggagtgtatgttgccaaccgagcatcggacaaaatcactcagctcactgataatgtatactgtgtcgctctggatcggctgctgattctcagattgtctc

SEQ ID NO: 988 - DNA, 261 bp, Glycine max
  Clone ID: 700953341H1
caacctccaaaacacaacaccacaaggaaacaaaacaacccattgagagcttgcacaactctcatggtagtagtagcactactacttcacacactctctctctgagtgcctcacaccacagattctgtgatatatataccaatggaggccctcaatgctgctggcttgacccctctatctgtgctctctgatacaaaaacaacaagaactaaacacccttcgtttctgtatgcaaagtctcaaacttttccacctcaacca

SEQ ID NO: 989 - DNA, 260 bp, Glycine max
  Clone ID: 700953344H1
ctgtggttgtcaaaaaggtagatttgaatttatttaagagagaatcgtatgttgtggaattgggactattaagtaaggttccacatgcaagattggttccaatcctgggccactgcttggacaatgaaaatgagaaatgcatagtttacaagtacatgccaaatcgagatttagctacttccttgcacagagtcactggttcagatggtaaaatacagtcctggattggatcacgagattgaaaattgcgataggagctg

SEQ ID NO: 990 - DNA, 260 bp, Glycine max
  Clone ID: 700953345H1
acaaaatacggtgcgttgaatggtggtgccaactttgttgcccctggttacaccaagggtgatggtcttggtgctgagattgttggcactttcatccttgtttacaccgttttctccgccaccgatgccaaacgtagcgccagagactcccacgtccccattttggcacccttgccaattgggttcgctgtgttcttggttcacttggcaaccatccccacaccggaactggtatcaaccctgctcgtagtcttggtgct

SEQ ID NO: 991 - DNA, 260 bp, Glycine max
  Clone ID: 700953350H1
gtttctttgcacgctaattccatcttcaaattctgccttcattcgattcaggggggaattaaattgtttctattttttttcgaatttaccacaaattagaaatcgataaagaaaaatggtgagggtgttgagaagctgcattcaatcgattttgaagctggtgaactcggtgattgggatggcggggctagccatgattctgtactccgcatggatgattgggtttggcagaggaagatgggcgaacttccctttggtca

SEQ ID NO: 992 - DNA, 259 bp, Glycine max
  unsure (1)..(259): unsure at all n locations
  Clone ID: 700953353H1
gttcctgtattaatttttctctccctgagattaccaagctctgcaactttgcttctcaacatggagtatcgtctcctacccatttttactttactcaatcttgcactggtggcaatccatgctgctttacctcctgaagtttactggaagtcggtgcttcctactacgccaatgccaaaagccatcactgatatcctttaccccgattgggtggaaganaaagtacctcagtgaatgttggaggcaagggcgtaaacgt

SEQ ID NO: 993 - DNA, 258 bp, Glycine max
  Clone ID: 700953361H1
ttcgacccctccaagcgcaaaggatacttatcgtgggatgactattttatggcaattgcgtttttgtcagctgagaggtccaaagaccctaataggcaggttggggcttgtttggtgagtcaagatggtgtaattcttggaattggttataatggatttccaagaggttgttctgatgacaagctaccctgggcaaagaaatccaggactgggaatccttggagacaaagtacccttatgtttgtcatgcagaagtaa

SEQ ID NO: 994 - DNA, 256 bp, Glycine max
  Clone ID: 700953375H1
gatgttcttctaccctttttgccactcactcgacaacaccataaccataaaccaccccattagagacggcgacgttttggtctccaacggtttaggaaactttgcgctcggtttcttcagcccgcgaaactccacaaaccgttacgttgggatttggtacaacaaaatctcggaacaaacggttgtgtgggttgccaacagagacactcctcttaagacacttccggtgttctcaaaataagcaacaacggaaacc

SEQ ID NO: 995 - DNA, 257 bp, Glycine max
  Clone ID: 700953381H1
gagcataaaagaatttcaattatttaaaatttctccctcatccaatcacacttttaatgaacgtggcaattcaattgtgcgtttcagcatccaattttttaattgatgaaaggtgcgaggtgttctacgaatgctgcaagggttttctggtcccccattcttttgggataaaaatgcaaacattttccgtgcaaagagcggagtgtacgttagtcattctcacagaaaagtcttcactctctgctcaatcagtttat

SEQ ID NO: 996 - DNA, 256 bp, Glycine max
  Clone ID: 700953382H1
atttgtcagggcatgctagataaatttattccttagaaaatatataataattgctcccaaacataaataaaatatacttttgtggaaaataattcaagcttcgtgttattttctttttttagtttcattgacgaaatataaaagtttctgaccgttcaatgcaaactcctgggcaagactaaaaggtagtttgaatgctgtgaaagtatggttggcttcaattttccaagttcctaagatgagccaaaattttcaa

SEQ ID NO: 997 - DNA, 253 bp, Glycine max
  Clone ID: 700953387H1
gtcagcacaggctttaggcggccatatgaatgttcatagaagagatagggcaagactcaagcagccatatagccctcagaatgaaatcctaagtgttgatcttgagaaaattaccacgcaacccctgaattcagttcagatttcttttacttctttgggttacttatacccatcttctcttggtgtattgacccataataacactaaccctaatctgatccttattctcatgctcctccttcaccttccaagg

SEQ ID NO: 998 - DNA, 254 bp, Glycine max
  Clone ID: 700953392H1
ggagcagaagaaggcaaagatagtggcagagctccaagctgtgaagcacaacagtggcaagtcctacaatcagttagcggaggagactggactcaccaacgtctatgttgctcagcttctcaggagacaggctcagctcaatccccaaactgcccctctacttcgggcagcgctgcccgacctgccccaagaccttgtttctgagatgatgagacccctttgaggtcttatgaccctaatctcatccaagaccc

SEQ ID NO: 999 - DNA, 254 bp, Glycine max
  Clone ID: 700953393H1
gtttaggaagggatggaagcggcagtggtggacgtcggctctaagctcctcaaagcgggctttgcaattcctgaccagactcctgccatggcccgcacttggagaggttttatctccttcaatgcataattctaagtttctaacccacttagctattctcaagtattactttggacttcacaaccgcacaatcatatcaccactttagtacctactatacctaactatctatctctgtcagaatccctaattga

SEQ ID NO: 1000 - DNA, 254 bp, Glycine max
  Clone ID: 700953394H1
cgcactgatggtattcctgaacaggacattgtcaagcttgttgacaccttccctggccaatccattgatttctttggtgcactgagggccagagtatatgatgatgaagtgaggaagtggatttctggtgttggtgttgacagtgttgggaagaagcttgtgaactcaaaagatggacctccaacctttgagcagcccaagatgactctggagagctcttgctgtatggtaacatgcttgtccaagaacaagag

SEQ ID NO: 1001 - DNA, 253 bp, Glycine max
  Clone ID: 700953411H1
gaacaagggtttctctgtctgcttcttcactttctctcgtttcaatcgaaaccaaaacaaaaacatgggcagaaaattcttcgtcggtggcaactggaaatgcaatgggaccactgaggaggtaaagaagattgttatactttgaatgaggctaaagtccctggagaagatgtcgtagaagttgttgtgagccctccttttgtgttccttcctgttgtaaaaagtttgctgcgccctgatttccatgtttcgg

SEQ ID NO: 1002 - DNA, 256 bp, Glycine max
  Clone ID: 700953418H1
ccaacgtgtcctcgaagtcgtcgaattttagcgacgatttcgatgatgcgttggaggcagccgttagagcctaccagaagaacttcaacctcaacatcacaggggagctcgacgaccccacgatgaaccaaatcgtcagccacgctgcggcgtggctgacatcatcaacggaaccacaacaatgaactccggcaagacaaacaccacggattcaccgacgttccacacggtagcgcattattctttctttgacggc

SEQ ID NO: 1003 - DNA, 254 bp, Glycine max
  Clone ID: 700953436H1
cagacactgatttatgtagatagataaccataaccataccatagcttacaaattaagctccgctcactctctttctctctagaatccatggcagccattggtctgaatggcgtaaaggttgggacgacgtcgtctcaggcgtaccttgaaggcaaggcagtgaaggagacgagagcgttgatggctgaactgtgtcgccatttctacacccttggatgggtgacagggacaggtggcagcatctccatgaaggt

SEQ ID NO: 1004 - DNA, 245 bp, Glycine max
  Clone ID: 700953445H1
cagcaatggagctgtcttccagtgcatttgtggtaatattgttggcagtcgcagctacagcagtactctcaaatgggttggatctatctttcttgcccagcgatttcctctttggcattgcttcttcctcttaccagtatgaaggagcttacaagagtgacggcaaaggactgagcaactgggataactacactcacggaccaggtagaagtgtaataatggatggaagcaatggggatatcgcg

SEQ ID NO: 1005 - DNA, 249 bp, Glycine max
  Clone ID: 700953457H1
cttaatacagcctatgactcatggcaggtccaaacaagcttagctccttcatcagcagatccccatggcttttggcatgattgtagattaaatcatgctaaatgtacttcttcacaaatccaatatttgcaagtggtttgacatatgagaaatagctttcacaagaagtataaatatgtcttcagtaaattactgtaacaagtcatttccctgtatctaatgcaggattcaggaatcaaatgctgaatg

SEQ ID NO: 1006 - DNA, 182 bp, Glycine max
  Clone ID: 700953470H1
gtaatataagagaatctattctctttctttgtcgttttttaattatcttggagctttagaataaagtgtttgctatgtgttttgttggtcttttataaatatgtaatttgaatcatcaatctctgcttataatgaatacttttggtgttatatgaataaaaagtttgttgggttatttcatt

SEQ ID NO: 1007 - DNA, 246 bp, Glycine max
  Clone ID: 700953485H1
ctcagtgaaagagaatccgaggcgaagagaagagaaaaattaagatggaggggaaggagcaggatgtgtcgctgggagcgaacaagttcccggagagacagccgattgggacggcggcgcagagccaagacgacggcaaggactaccaggagccggcgccggcgccactggttgacccgacggagtttacgtcatggtccttttacagagcagggatagcagagtttgtggccacttttctgtttc

SEQ ID NO: 1008 - DNA, 113 bp, Glycine max
  Clone ID: 700953486H1
gttctcagttgaagcgttaccctcgctggcgccgcatctctccgcagcaaagcgccgcacctcaccgcagcaacgcgccgcacctcactgcagcagctccgtcgccggcaacg

SEQ ID NO: 1009 - DNA, 242 bp, Glycine max
  Clone ID: 700953509H1
atttctttcgagctgacaatcctgaaggtgtggaggcacgtaacgaggtagcaaagatggcatttgaagatatgatatcttggatgcaagaaggtggccaggttgggatatttgatgccacaaacagtagcaagcagcgaagaaacatgctgatgaaattggctgaaggtagatgcaagatcatttttctggaaacaatatgcaatgatgtagacataattgagaggaatattcgctttaaa

SEQ ID NO: 1010 - DNA, 243 bp, Glycine max
  Clone ID: 700953515H1
caacaacttctcaaccacaacgagttgctattcccttcgattcacgaacccagaaaattaaaacattaaaaaagatatcaagtatcaaaatctaaacggcatcagcaaacatgtctcaacaccatggtgatgaaatggagtatgcggcagatgataatgaaatggcagaggtagaagaggatatgtatttccgtggcagggcatttggtgaatcagattcggatgatgacgacgactacgaat

SEQ ID NO: 1011 - DNA, 251 bp, Glycine max
  Clone ID: 700953517H1
gcaatttggccactatgaacacagggcttgctgcaggtgcagccttgcttgcactcttggctatcaccttctccttgttgagccctcaaaccctgttttctccgcctgagattccgggctcgaaggaccaccttcacgctgctcggttactccatgtcaccggagccgtcgggccggagagtcttgtcttcgacgctgacggcggagggccctacaccggcgtcgccgatggccggattctcaagtgggaa

SEQ ID NO: 1012 - DNA, 239 bp, Glycine max
  Clone ID: 700953529H1
tttgtcataaaaatgttgtttttaacaacatagactagtattaataatgtgactgaagttgtgtttctgggtcaactaaggcatccacatctcgtgaagctgattggatattgctgtgaagaagaacacaggcttctggtatatgagtatttaccacgaggcagcttagagaatcaactatttagaagatatacggcatcgttaccatggtcaacaagaatgaaaattgcagctggagc

SEQ ID NO: 1013 - DNA, 238 bp, Glycine max
  Clone ID: 700953530H1
gctagatggaaaccaacttgctgaggctgacgaatttgaggataagatgaaggagttggagagcatttgtaatcccatcatagcaaagatgtaccagggtgctggtggtgatgcgggtggagccatggatgaggatggtcctgcagctggcagtggaagcggtgctggacccaaaattgaggaagtcgattaagcagaagattctcatgggttgttcttgattttgtcaaagaccctt

SEQ ID NO: 1014 - DNA, 240 bp, Glycine max
  Clone ID: 700953531H1
gtgcctgccatgtatgttgcaattcaggctgtcttgtctctgtatgccagtggacgtactacaggtattgtgcttgattctggtgatggtgtgagccacacggtgcccatatatgaagggtatgctcttcctcatgcaattcttcggttggaccttgctggccgtgatttaacagagtacttggtgaaaatccttaccgagagaggatactccttcagcacctctgccgaaaaggaaatt

SEQ ID NO: 1015 - DNA, 247 bp, Glycine max
  Clone ID: 700953535H1
catctttctctcagcttcaccttcaccttcaccttccgaattgtatcaaacctcaaaaaatggatcatcaaaacaaacacgtagcagtctttgctttcccctttggcagccaccttatgcctctcttaaaccttgtcctcaaactagctcattcccttccaaactgttcattctctttcattggcacacacaaatccaatgcaatccttttcccaaaaccccacatcccaaataacatcaaggccta

SEQ ID NO: 1016 - DNA, 234 bp, Glycine max
  Clone ID: 700953543H1
cgcaacaaaaagaaagaatcccaggcgaggagaaagatggaggggaaggagcaggatgtgtcgttgggagcgaacaagttccccgagagacagccgattgggacggcggcgcagagccaagacgacggcaaggactaccaggagccggcgccggcgccgctggttgacccgacggagtttacgtcatggtcgttttacagagcagggatagcagagtttgtggccacttttctg

SEQ ID NO: 1017 - DNA, 238 bp, Glycine max
  Clone ID: 700953557H1
ggaatcagaggctccccctaacttctggggccacaccccggaagaagaatactacacctcccaaggcgttcgcaacaccaagtcccacttcgaaacccccaacggcaaaatcttcacccagtccttcctccctctcaacctccaaccccaccaagtcaaagccaccgtctttatgacccacggctacggctccgacaccggctggctcttccagaaaatctgcatcaacttcgccacc

SEQ ID NO: 1018 - DNA, 235 bp, Glycine max
  Clone ID: 700953560H1
ctgcgactctctttccttccctctttttccgaatctgaatcgaaatggcttcggagactgagacgtttgcttttcaggccgagatcaaccagctcctcagtctaatcatcaacaccttctacagcaacaaggagatctttcttcgtgagctcatcagcaatgcctctgatgctttggacaagattcgatttgagagtcttacagacaagagcaagcttgatgctcagccagagtt

SEQ ID NO: 1019 - DNA, 230 bp, Glycine max
  Clone ID: 700953575H1
ctcggatcgcgcattcacaaataaggttgaagagggccctgccggaagaagataaataccgtctttcattttccggcgatctcttttttcttccatcaccgttttccggctatccctaatccttaacagaaatgacgacatcaaggcgccttgcggacaggaaggtggagaagtttgagaaaaacatcaccaaaagaggatttgtgccagacacaaccactaaaaagggg

SEQ ID NO: 1020 - DNA, 126 bp, Glycine max
  Clone ID: 700953578H1
ggaactatcactggagaagagtctgtttttcattggaattacttgtatttcaacatctaatccttttaggaggaggatatttgagcccatgggccgcatattgaattttggattagtcctaatttt

SEQ ID NO: 1021 - DNA, 230 bp, Glycine max
  Clone ID: 700953592H1
atggccactcttcttcttcccacgctcctccttctcatacccttcgccaccctcgtctccgcccgccctcacctcgccggagactttctccgactgccctccgaaaccgataacgatgacaacgtccagggcacccgctgggccgtcctcctcgccggttccaatggctactggaattacagacatcaggctgatgtttgtcacgcctatcaaatactaaggaaaggtgg

SEQ ID NO: 1022 - DNA, 231 bp, Glycine max
  Clone ID: 700953593H1
ggaacaacaatgagtttggactcgtcacttctgattccttgcttaaccctacacagaaaagaagctttgattcttcttcttcacaaaaggatgattctgagtcccaacaacaacattccctcaggcacttcattgatgactctcccaaaccaccatctcataatcatcatcgttcgtcgtccatttggcccgaactcgacaacatacagtcagataggactcagttatcaa

SEQ ID NO: 1023 - DNA, 259 bp, Glycine max
  Clone ID: 700953609H1
ccaagcttctctgttaaaaaaaaattaggcgtctaaagggccaaagcttagaaagttgaagctttttttgttgaggtgaaagtgaaatggttggcaaggataatctgagggctgaggacttgaacttgtgctttaagaagcttatgatggtggccgggagtgggaacagtgagaaaggggtgaacttgaaggttggggtgatcaccgagtggaaggatattcctgtggagcttctgatgcaaattctgtcccttgtgga

SEQ ID NO: 1024 - DNA, 260 bp, Glycine max
  Clone ID: 700953610H1
ccgacgtctccactttcaacatcttaattagggctttgtgcaaggcccatcagctccggcccgcgattcttatgcttgaggacatgcccaactacgggctcaggcccgacgaaaaaacgttcaccacacttatgcaggggtttatagaagaggctgacgtggaaggcgcgctgaggattaaggaactcatggtggagtctgggtgcgagctcacgagtgtttcggttaatgttttggtgaatgggctttgcaaagagggg

SEQ ID NO: 1025 - DNA, 261 bp, Glycine max
  Clone ID: 700953611H1
cacaaaacttgctatagcagtaagctataactcatttgaggctctgtgagaattgagaaatggctaaagatgttgaggttcaagagcaaggaggagagtactctgccaaagactaccatgaccctcctccagcacctttgttcgacccagaggagctcacacagtggtccttctatagagccctcatcgctgagttcatagcaacccttctcttcctttatgtcactgtgctcaccattattggctacaaaaggcagactg

SEQ ID NO: 1026 - DNA, 258 bp, Glycine max
  Clone ID: 700953618H1
ggaaaaggcgtcttcataaacgccgcccaaaacttctcatacccttttattcattccattcgtttctagggttttcttttctttgccgagaaaatgagagagtgcatttcgatccacattggccaggccggtatccaggttggaaacgcctgctgggaactctattgccttgaacacggcattcagcccgatggacagatgccgagtgacaagaccgttggcggaggagacgacgccttcaacacatttttcagcgag

SEQ ID NO: 1027 - DNA, 266 bp, Glycine max
  Clone ID: 700953630H1
gtgagatacactaagttatcctcataaatacactctaattaggtggcaagataagtgtctaaccttagtaacattgccacatattgtgttcattttggaattgtgccactaaaattctattcaattcatctatggctgcctcttcttatgctatgcaatcaatcctggcaaaccctttgatccgcatttccagcgggtctagggtgaaccaatttggcgttcctgctttgcacatgagaaggaatgttggcctgagagttaggtcc

SEQ ID NO: 1028 - DNA, 254 bp, Glycine max
  Clone ID: 700953643H1
ggcggagtttcagccttacttcgtcctcggggatttgtgggagttctttcgggaatggagtgcttatggcgcaggagtgccacttgtactgaatgacaaggatagtgttgtgcagtactatgttccctatctttctgggatccaaatttattcccagaatgtgaagccagctgtaaagtcaaggcaacttggggaggatagcgacagtgattttagggactcaagtagtgatggtagcagtgatagcgaacctg

SEQ ID NO: 1029 - DNA, 250 bp, Glycine max
  Clone ID: 700953653H1
cagtgaagtaaatgacaagtcagtttctggtacaactcaacttgtttgtgagagatgttggtgtgctattgaaaataacaaaggtattacatcattggactctatcagtcctggagagggaataaactctgttaataactctggcgctgcatcagctggctgtaatagcagcagagaagttacaaaagtgaaaaagaacaccgtattgaaagagcaacttgaattttctcaaagttcaaagagtagccaa

SEQ ID NO: 1030 - DNA, 251 bp, Glycine max
  Clone ID: 700953656H1
gtttcttcttctgttgcgttgtgtgtgagtgtgggcacggtaagatgcagaccattgctaggcgcttagggcagcaatcgctgaggccatcgacgtcgctcaagtccatctatccaatttccgatcaccattatggaatggatcacgagcgttacgtttctaccctcgccaccaagggagttggtcacctcgttcgtaagggcactggtggacgatcctccgtcagtggcattattgctacagtatttggg

SEQ ID NO: 1031 - DNA, 253 bp, Glycine max
  Clone ID: 700953657H1
gggttatcatatctccatttccatttcctctctctcagtttccaagaatcttaagctatgggaaagtcttacccaaccgtgagcgctgattaccagaaggccgttgagaaggcgaagaagaagctcagaggcttcatcgctgagaagagatgcgctcctctaatgctccgtttggcatggcactctgctggaacttacgacgtgagctcgaagaccggtggtcccttcggaaccataaagcacccctccgaac

SEQ ID NO: 1032 - DNA, 250 bp, Glycine max
  Clone ID: 700953673H1
gggtttattgccaaatgaagaaggctcacgagatacgcatgggatcagtcacatgctagcgctcctccttcttcttctctctccggtggtggtgactcgccggaagacaccaacttccaccttcaacgccgccgctgaagtgctcagtgataccctttgtttagaacaatgagagcagggaaagggagccaggaagaggatgagtacgaggaagaagagtttggttcttccaagaaacagggtacttcct

SEQ ID NO: 1033 - DNA, 251 bp, Glycine max
  Clone ID: 700953675H1
gtatttccctacctctcccttcaagatgcagatcttcgtcaagaccctcaccggcaagaccatcacccttgaggtggaaagctctgacaccatcgacaacgtcaaggccaagatccaggacaaggaaggaatccccccggaccagcaacgtctcattttcgccggaaagcaacttgaggacggccgtacccttgctgactacaacattcagaaggagagtactcttcacctcgtcctccgtctccgtggtg

SEQ ID NO: 1034 - DNA, 257 bp, Glycine max
  Clone ID: 700953678H1
gaaacaaggagaaagaaagaagatggcaggaaagaaaatcccagatgtgttgctgaattcaggacacaaaatgccagttataggcatgggaacttcagtggagaatcgtccatcaaatgagacccttgcttctatctatgttgaagccattgaggtgggttaccgtcattttgacactgctgcagtgtatggaacagaggaagccataggcctagccgtggccaaagccatagacaaaggccttataaagagtagag

SEQ ID NO: 1035 - DNA, 247 bp, Glycine max
  Clone ID: 700953685H1
cagaaaatggcacagtcctcctcgatcgtcgttactctgaggcagcacttgtttaaaaggaacctcacctctctcactctgcctcactctccttctcttccttccttctccttctctctgagaacaacaccccacactcctctctctctctccgcttccttctcttctcacacctccatggcccacacttcccttccctccgccgatgccggcatggacgctgtccagcgccgtctcatgttcgaag

SEQ ID NO: 1036 - DNA, 250 bp, Glycine max
  Clone ID: 700953689H1
gagaaaaagcatatggtctcccgtcacagatccaagaagtggtttcaaccgggaatccagaactttccacagcctcaagccccctctccgtctccctccccccaacgccgccgtctccgcagccgccttcgccctcttcctccgccgcaactcgcagttcccggactcctccaccgcctttatcgactctgccaccggccaccgcctctcctacggcgagctcctccaccgcgccaaaaccctagcctcg

SEQ ID NO: 1037 - DNA, 254 bp, Glycine max
  Clone ID: 700953693H1
cttagatcagattcgtttcaaaagggtggtacttggtagtgctagttcaaacttcaaagagctgatatcgattattgaaatttcaaattttcaatatttttcattggttgttggattgagatatatggccatagctcggttagttcggcaagcaaagcgccctcatgggttgtgggtgaagatgacagccgtgaccatattgggtctctgcttcatctttgtgtggggggtgttttcgtcttcttcaacctctg

SEQ ID NO: 1038 - DNA, 260 bp, Glycine max
  Clone ID: 700953701H1
gccaacgcaaacgtatcgagccagcctcacaagctagggttcttcaccgcgctccacccttcttccctctcccttcgtcccctccaattggaatgtgtttgtgacttcatatgctggtagttgacattttgaaattgtaactgtggtgggagcaataatatattttgacatcatcatggagatacagacttgtggcaggccgattgactccttgctagagaaagtgctttgtatgaatattctgtcgtctgattacttca

SEQ ID NO: 1039 - DNA, 249 bp, Glycine max
  Clone ID: 700953709H1
ggattacaccggcgaagatgttactgttgataacttttttgctgctttacttggaaataagtcagcactgactggtggcagtgggaaggttgtggacagtggtcctgatgatcatatatttgtatactatactgaccatggaggtcctggggtgctcgggatgcctgctggtccttacttatacgcggatgatctgattgaagtcttgaagaaaaagcatgcttctggaacatataaaaacctagtatt

SEQ ID NO: 1040 - DNA, 249 bp, Glycine max
  Clone ID: 700953713H1
atcatcacccgccccaccaccatcaccagccggtgacaatagatttccctcccgagaaacccaccaacaatattgcaactccgggtctcggcaacactgtccacatcaatttctgctcttcctgctcttacaagggaacagcagtgacgatgaaaaatatgttggagattgcatttcctggaactgaggttattcttgcgaattatcccccaacgcttccgaagcgtctgctaagcaaattggttccag

SEQ ID NO: 1041 - DNA, 252 bp, Glycine max
  Clone ID: 700953715H1
ccctaaacaactctttctcttcttccttcgctcgttgttctccctcgcgtagatcgacaatggcggagacagagacgtttgctttccaggctgagatcaaccagctcctcagtctcatcatcaacaccttctactccaacaaggagattttccttcgtgaactcatcagcaacgcctccgatgctttggacaagattcgatttgagagtttgacagataagagcaagctcgatgctcagccagagttgttca

SEQ ID NO: 1042 - DNA, 254 bp, Glycine max
  Clone ID: 700953719H1
caaatattcatggctttctttattctctccttcctcttccttcttcttgtttcatctgccactgcttgtgatcgctgcttgtatcaatccaaggcttcctatttctccaaagcttctgctctttcatctggggcatgtgggtatggctctttggcactagacataagtggtggacaccttgcagctggtgtggattctctcttcaaaaatggagcaggttgtggtgcctgctttcagataagatgcaagaaccc

SEQ ID NO: 1043 - DNA, 247 bp, Glycine max
  Clone ID: 700953726H1
agcacaaccacaacagatctccttcacaaggttcgccttttgacgacaaatgttccctctttatatgcgtgggacagtgtctgtgttacaatctcgagccgttttcattttggtcaggtctgtttccagagacaaatattcgtggagctttgaagagctgcggtgtagatatatacaacaactctggccaactctctagtcatatcttccccaactgtagcaggtgttcgtccttgctgttgtggtt

SEQ ID NO: 1044 - DNA, 249 bp, Glycine max
  Clone ID: 700953740H1
cacaccatgaaaccccttctccgcttcggaatcgccttcatcctcctcctccattcctccctcgcttctcatatcccctaccccaaagcaatttccgatttgaaggatacaattgtgaagggatttgggttcacggcggaagatgatgttacgattacggggttcgatcctcgagacgccgaggtagggcattccgtggagtaccaattcgacctcgaaatcgatcacaaggttattcccttcaagctc

SEQ ID NO: 1045 - DNA, 246 bp, Glycine max
  Clone ID: 700953743H1
tctactctcgggaaacacctctcaaagtccatcttcattgtggtgattggtggcaatgatatctttggttactttgactcaaaggatcttcaaaagaaaaacacccctcagcagtacgtggattccatggcttccacattaaaagtgcaactacagagattatacaacaatggtgcaaagaaatttgagattgctggtgttggtgcaattgggtgctgccctgcatacagggtcaagaacaaaaca

SEQ ID NO: 1046 - DNA, 250 bp, Glycine max
  Clone ID: 700953755H1
aatagaccaccgctaagcctcaggactccagctcctgttctgccctttgaccctcccattcataataataataagcccaaagataaaagatttccgtttgatgctggactccttcaaccaaaagattcaggagaccagcgtgaggcttctgcacttcgtgatgaggttgatatgctgcaggaagagaatgaaagtattctagacaagctcagactcgaggaagagagatgcaaggaatcagaggccagag

SEQ ID NO: 1047 - DNA, 249 bp, Glycine max
  Clone ID: 700953756H1
caaaaccttaaggttcttgtcaatttttcagtcttcaccacgaaattgttgtgcatctgagggaggacttcacctcatacttgcatttcaacaagtatcatagtagtagtactctcctacgggagttcctggcagcaacctatccttattaggtggagctcgacaccgggcattaaatcttgtacttgcatagcctcttaggagaaactagagtctagagatataatccttcaacggtttgcttggttt

SEQ ID NO: 1048 - DNA, 246 bp, Glycine max
  Clone ID: 700953760H1
gatcgatcttaatttgcgcttcccattttcttcttcctttcccccaaaagttaattaaacattaattcccgtccgttactgtaatagttacgatattaatctaattttggtggggtgagagatgttgatcaatgtgaagcaatccaccatggttcggccggcggaggagacgccgcggagggcgttgtggaactccaacgtggatttggtggtgccgaacttccacacgccgagcgtgtatttcta

SEQ ID NO: 1049 - DNA, 251 bp, Glycine max
  Clone ID: 700953763H1
cattcttcccatcattacttttctcatgcttgttgtggcaactaatgctgatgctgcattacctcctgcattttactggaagtccaagcttcctaccacaccaatgccgaaagccatcactgatttgctacaacctgattggaaggaagagaaagacacctctgtggatgtagggaaaggtggagtaaatgttggtgtagaaaagggaaaccaaggaccaggagatggcactgatgttaatgttggtggtg

SEQ ID NO: 1050 - DNA, 253 bp, Glycine max
  Clone ID: 700953764H1
ctgtaatgtgatgtaggacatctcctattttgataaagaaagagttggtgacttgacaagcagacttgcagcagattgtcaacgactatcccatgttataggaaatgatcttcagctgatattacgcaactcttgtcagggaactggagcaataattaatttgatggctttatcttggcctctggcattatctgccttggtgatttgttctattttatctgcaattttcctggtttatggccagtatcaaaga

SEQ ID NO: 1051 - DNA, 249 bp, Glycine max
  Clone ID: 700953770H1
atctcaccaaaggacaagacattaagaaaggagtgaattttgcatacgctggttcaactgcacttgataaggattttttagtacaaaaaagaatcaatatagaggaagctactttttcattgagtgctcaatttgattggtttaaaggactcaaatcctccctttgtacaagcaaagaagagtgcgataattacttcaaaaactcattgtttctagtaggagagattggtgggaatgacatcaatgcac

SEQ ID NO: 1052 - DNA, 246 bp, Glycine max
  Clone ID: 700953777H1
gaaacaaagaagtaaacacactgtttcatactttcgtttcgttcattcggcgtagaagcaaaagagagagatagagagagggaaaaaggttgctaccaacaacaaacaaaaacagtgttgcttgattccgcggtggcgagaaccgacgtgagcggcggaggagaggcgcggaacggtggtcttcagggttttctgacgtctctgttctcgaccctcggcggtgttttcgggtcaacgtttcaagaa

SEQ ID NO: 1053 - DNA, 247 bp, Glycine max
  unsure (1)..(247): unsure at all n locations
  Clone ID: 700953788H1
gaaagagagaaaagaactagctagctggagtctgagaactctagcatgtactagtactactcctacattcctccatcttcctttgtacnnnnnnnnnnnnnnnnnnnnnngcaagagcacaaagatggtgagagctccttgttgtgaaaagatgggtttgaagaagggtccttgggctcccgaggaagatcaaatcctcacatcttacgttgacaaacatggtcatggcaattggcgtgccctccca

SEQ ID NO: 1054 - DNA, 244 bp, Glycine max
  Clone ID: 700953790H1
gctttgattagtgtggcctagttgttgttttctcgatgagaaaggcttcttccactatgcattgcgcacttctgcgcttttgggttcccttgttgctgcttgctagcttcagctatgctccttctgtttcggccacaactgaaatttcagggaatgaagtgaacacagatgggaaggtgataaatgaagagttagcaaaaccaagtctaaaaggacatgatgaagaagcaaagttcaaaggatt

SEQ ID NO: 1055 - DNA, 244 bp, Glycine max
  Clone ID: 700953791H1
cgcttcctcaactgcacaacattcctattcaattccagaggaaagaatcatgagttgtttcagctgttgtgaagaagatgactaccagaaggcttctgaaagtggaggacagcatgtagtaaaaaactcaacaggaaatcatggaaatggtcgtgcatccgaaactgcaaagcagggcactcaagctgtgaaaattcagcccattgaagttcctgaattaccagtggatgaactcaaagaaatt

SEQ ID NO: 1056 - DNA, 247 bp, Glycine max
  unsure (1)..(247): unsure at all n locations
  Clone ID: 700953795H1
gaaccttcctccatagacgaggttgggttgtggtatggccgccacaaagagtcaaagaagatggtcaacgagcaaagaactcctttgatggttgctgccacctacggtagcattgatgtcatgacgttgatnctntctctatcagangctgatgtgaaccgatcatctggcctgacaaaagcactgcacttcactgtgcagcttcaggtgggtctgaaaacgccgtcgatgctgtgaaatgcttcta

SEQ ID NO: 1057 - DNA, 247 bp, Glycine max
  Clone ID: 700953806H1
ctctagggtttgatcagactcaagggtttaagccatgggaaaaaggaaggcaaaggcaaagcctcctccaaagaagcgaatggataagctcgataccgtcttcagctgccctttctgcaatcatggcagcagcgtcgaatgccgccttgacatgaagaacttgataggggaagctatttgcgggatatgccaagagagctttagcactaccatcacagctttatcagagccaatagacatatacagt

SEQ ID NO: 1058 - DNA, 248 bp, Glycine max
  Clone ID: 700953808H1
agaaagtgttcaaactggagccaaaagaagaggtggcgctggtggtctaaacaaagtttgtggtgtttctcctgaacttcaggcagttgttggtgagccggcaatgccaagaactgagattgtgaggcagctgtgggcatacataaagaaaaacaacctccaagatcctggtaacaaaagaaagataatttgtgatgatgcactgcgtttggtatttgagacagactgcaccgacatgttcaagatga

SEQ ID NO: 1059 - DNA, 245 bp, Glycine max
  Clone ID: 700953814H1
gcctcgaaatcggtgacgattacgctttcaattcctggatcccttattgctccgttgcacaccatgtccccaaaaacagaatgcctgaggctttctccctcttgagggaactcaagcttccggtttccggttacgccatggatatcgctctcgttcagttctctccggttcgggaaatcttctcgtttgtgctcggcaacaacagttgagataccagtctcaggagtgcttgccggtgtgctgga

SEQ ID NO: 1060 - DNA, 207 bp, Glycine max
  Clone ID: 700953820H1
atttcaagggctgaaacatctatctttaactgtattctccctttgtttcctcaccagttgattcaggttgcaaacatggcttttccagacccatccatgtcagtttctccacagaggaagatgggaagggggaagattgagatcaagaggattgagaacactaccaatcgccaagtcacattctgcaagcgcaggaacggcttgctc

SEQ ID NO: 1061 - DNA, 254 bp, Glycine max
  Clone ID: 700953850H1
ggaacaagcaagtgcttctaaaggactatgttaccggttttcccaaagaatccgacatgaatattgtcgaaagtaccataacattgaagcttccacaaggttccaatgatgtcttgctcaaaaatttgtacttgtcttgtgatccgtatatgaggaatctcatgaacaagcccgaaggccctcccaatagtcgtgcttacactcctggctctccattaataggatatggtgtgtctaaagtcctggaatctggg

SEQ ID NO: 1062 - DNA, 238 bp, Glycine max
  Clone ID: 700953863H1
taaagatatatatagtcattcacatagtaatcatcattaatttcagaagcgccaatatatgatgaatggtagtggcggttttatgatgctgacgcttaagtccggcggttttcctgtggaagtcaacacccaaaagctgaaacgcactgacagcagacaaacgggcgtgttctctgtggaaaggttcatcacatactcggtggttggtatgcagcgactcctttcattgaagataact

SEQ ID NO: 1063 - DNA, 253 bp, Glycine max
  Clone ID: 700953865H1
ctcgcgcagtgcacgccggacttggctgcctgagactgcaaactgtgtgttgccgatgcggtggccgagtttgtcaagtcttgttgcggagggagcataggggcgagtgttctgtttcccagttgcattgtaaggtatgagacgtatccgttttatcagcattcgggaacctctgcgccaacaatgattcagcgtggaagaaatattggaactgaagtgcttgtgatcgttgttgtcttgcttgtggttttgg

SEQ ID NO: 1064 - DNA, 252 bp, Glycine max
  Clone ID: 700953866H1
cagagatccttgagaagaatggtgtcaaattcggcgaggccgtgtggttcaaggccggtgcacagatcttctcagagggaggccttgactacttgggcaacccaaacctgatccatgctcagagcatccttgctatctgggctgttcaggttgtgctcatggggtttgttgaaggttacagagttggtggaggaccacttggtgaaggacttgacccaatctaccctggtggtgcttttgaccctcttggtc

SEQ ID NO: 1065 - DNA, 242 bp, Glycine max
  Clone ID: 700953870H1
attggggttgtttcaaatgcacaatcccttatgcatggtttccatcaacatatatataatgacaatatatacaaaatatataaaatatttgaattaaagctcataaacttgcacctcatttgttcacaactaattggattaggatttactaaaaaatcacatttcctcttggcaactaatcttccagtgagattacctatcaaatacgaagcttcatctagacatttttgtatatcgctgaa

SEQ ID NO: 1066 - DNA, 244 bp, Glycine max
  Clone ID: 700953871H1
gagaagctgagcttgttatcttctccgccatggattctttgttcaccaaaactggtctcaaacctaaggacatagacattctcattgtgaactgcagccttttttctcccactccttctttgtctgccatggtcatcaacaagtacaagctcaggagtaacatcaagagcttcaacctctccggcatgggctgcagtgctggtttgatatccgttgacttggcacgtgaccttctccaggttca

SEQ ID NO: 1067 - DNA, 242 bp, Glycine max
  Clone ID: 700953877H1
agatgtcaaggaattgggattccttgttaagcatatggagggaatggtgaggaaaatggatagatatgttactgtcactaggaatttgtacagtgagatggaggtgttgaatgagttggagcaagcagtgaagaagtttcagcataaccagcacgaggagagtaggagggcttttgagcagaagctcatgtggcagaagcaagatgtgaggcatcttaaggatgtttctctttggaatcaga

SEQ ID NO: 1068 - DNA, 241 bp, Glycine max
  Clone ID: 700953878H1
tttattttgcggcgactgaaatctgatgtgatgcaacaacttgttccaaaaatacagcaggttgaatatgttataatggaaaagcagcaggaaactgcttacaaggaagccattgaagagtatcgtgctgtttcacaagctcggatggaaaaatgttccaatcttaattcaaagagtgttcttgaagttcttcctcgacgacagataaacaactattttgttcagttccgcaagatagcaa

SEQ ID NO: 1069 - DNA, 237 bp, Glycine max
  Clone ID: 700953879H1
gcaattcactctgtacaattcttcgttcgttctctgcagttatatcctttttgagcttcaatggcggacgctgaaaccttcgctttccaggctgagatcaaccagcttctaagtctcatcatcaacacattctacagcaacaaggagattttcttgcgtgaactcatcagcaatgcttctgatgctttggataagattcgattcgagagcttaaccgacaagagcaagctcgatgct

SEQ ID NO: 1070 - DNA, 251 bp, Glycine max
  Clone ID: 700953882H1
ttcctatggctaacaagcaagtagtacatctttgggagtgcgacttatggagggagaggcgaatttgtccaagcttatgctcacttccccgaccgattgaaagagaatattcttccatggcctccaagcggattctaaaggaactcaaggacctctagaaagaccctccaacctcttgcagttccggtcccgtagcggaacatatgtttcattggcaagcaactaaaatggatcccccttatagcccttat

SEQ ID NO: 1071 - DNA, 246 bp, Glycine max
  Clone ID: 700953884H1
caaatcagcaacccggtttaaacatcataacagaatacataattggttacatgtatccagagcgtcctgtggctaacatgtgctttaaggtctacggctacatcagcatggttcaagcattaacctttttgcaagacttcaaacttggacactatatgaagattccaccaagaacaatgttcatggcacaggtggtaggaacaatcttatcagtatttatatacacagtaacagcatggtggttga

SEQ ID NO: 1072 - DNA, 259 bp, Glycine max
  Clone ID: 700953916H1
ctcctatactctatttttcgcgtcacataaacaaaaaaaataaactggggagaagcatgttgttgatgttgggactatgcttcctattgttctctgcatttccacttgcgttctctgagagatgccacccacaagacaagaaagcgttgctccaactccagaaggacctcggcaacccttatcacatcatatcctggaacgcaaaggaggattgctgcgagtggttctgctgcgttaagtgtgacgagaaaacaaaccg

SEQ ID NO: 1073 - DNA, 252 bp, Glycine max
  Clone ID: 700953920H1
gtagttcttcatcatagtcttaaacattaaaccttagcaaaactcaacaatgctagacatcaaaggctacctcgtactcttcttcctatggttcatatcaaccattctgatacgttccatcttcaagaaaccacagcgtctaagactcccaccgggtcctccaatttcaatacccttgctgggacacgcgccatatctccgttcactgctccaccaagcattgtacaagctatcactgcgctatggaccctt

SEQ ID NO: 1074 - DNA, 247 bp, Glycine max
  Clone ID: 700953922H1
aacaataaaagaccatgtcggtgaaggagtgcgagcaccacaaggggaagaagaggaagatcttccggcaagtgttctggtgcttagtggtgttccttttcatcgtgctggtcacaattcttttgatatgggcaatccttagacccaccaaacccaccttcacgctccaagacgtcaccgtctacgccttcaacgccaccgtggcgaacttcctcacttcgaattttcaggtcacgctcatctcgcg

SEQ ID NO: 1075 - DNA, 249 bp, Glycine max
  Clone ID: 700953926H1
ctagcacacaaaacttgctatagcagtaagctataactcatttgaggctctgtgagaattgagaaatggctaaagatgttgaggttcaagagcaaggaggagagtactctgccaaagactaccatgaccctcctccagcacctttgttcgacccagaggagctcacacagtggtccttctatagagccctcatcgctgagttcatagcaacccttctcttcctttatgtcactgtgctcaccattattg

SEQ ID NO: 1076 - DNA, 252 bp, Glycine max
  Clone ID: 700953929H1
gaaaaaagtgctatttttttacttcttttcttgagactttctgtgctgtgctgccatgggtgtgacacagttgaaccccacttgctcaaaacctcgtcttcactcatctcagctctcttttctatcaaggactcttcctagacatcgccactgcacttttgcgccacttcatagaactcaacaagctaggatttcctgttctgttgcaccaaatgaagtgcaggtgccaactgtgaaaacccaggatcccaa

SEQ ID NO: 1077 - DNA, 255 bp, Glycine max
  Clone ID: 700953930H1
ctcagaaagaagagagagaaagggaagaaagagaaagaacaaagaaggggaaaaataactgataactgagataacaataccatagatatagagagatagttccgagctccaattcccagaaaataaaaattaaaactttgcttcgctttttctcttcattgtttttcttcctcttctacccctttgatctcatgcaatctctcctcatggatccctttgatttgattcgcaaagggtttggctgaagctatctgg

SEQ ID NO: 1078 - DNA, 257 bp, Glycine max
  Clone ID: 700953931H1
ggttcgagaaggaggctgctgagatgaacaagaggtcattcaagtatgcctgggtgcttgacaagctcaaggctgagcgcgaaagaggaattaccattgatattgctttgtggaagtttgaaaccaccaagtactactgcacagtcatcgatgcccccggacatcgtgactttatcaagaacatgattactggtacctcccaggctgattgtgctgtccttatcattgactccaccactggtggttttgaagctggt

SEQ ID NO: 1079 - DNA, 246 bp, Glycine max
  Clone ID: 700953938H1
gactatccttatgcttctgatgggctagagatatgggatgccatcaagtcctgggtgcaagaatatgtctcattctactacaagtcagatgaggaactccaaaaagaccctgaactccaagcttggtggaaagaacttgtagaggtgggtcatggtgatttgaaagataagccatggtggcaaaagatgcaaactcgtgaagagttggttgaagcttccgctatcctcatatggattgcttcagcc

SEQ ID NO: 1080 - DNA, 244 bp, Glycine max
  Clone ID: 700953940H1
gtctgtatttgtttttgcctacccttacgagagatgtcaagttcaaggtttcttccttccaaccaaggttaagtcacaaaccatatataattgccttctttgtgacgaaagcattatagccaacggtttgtcaaccttcacccgccctaccgtttaagcttttagacagtgttggaattggatatgcccccagcctcatatcttcggcatcactcaaattctcaattaaagataacaactgaga

SEQ ID NO: 1081 - DNA, 248 bp, Glycine max
  Clone ID: 700953944H1
gttggttggacaggttgtggaggtttcaacttccaaaactggcaagcatggacacgcaaagtgtcactttgttgcaattgacatcttcactgggaaaaagcttgaggatattgtcccatcttcccataactgtgatgttccccatgttaatcgcattgactaccagctcattgacatctcagaggatggatttgtaagatttcagttgcacttgtgtcccttattcattccccttttcttttaagcta

SEQ ID NO: 1082 - DNA, 251 bp, Glycine max
  Clone ID: 700953946H1
tgatcttcttgaagatctaatatgtttcattgatgaaacttgcgatgagggtgccatccttgtatttctacctggaatgtctgaaataaactatttacatgataagttggtggcatcttcccaatttggtgggccatcttctgaatgggttattcctttgcattcagcagtagcatcaagtgaacagaaaagggtatttttacgtcctccaggaaatatacgtaaggtcgttatagcgacaaatatagcag

SEQ ID NO: 1083 - DNA, 246 bp, Glycine max
  Clone ID: 700953953H1
tcacaaccttaaacctttctttcttgtaaactttattgattgattctgagaatagaactaagagggtatagacatggctagcgcaattgcagcttcttttttggttctgcttctggctttccccactgtatttggagctgaccatgaagttggtgacactagtggatgggccctcggagttaattacaacacctgggcctctgggaaaactttcacagttggtgacactttggtgttcaagtatga

SEQ ID NO: 1084 - DNA, 246 bp, Glycine max
  Clone ID: 700953958H1
cgaaacaaaaccccatcactgaactgagaaagaggctaccaacagacaccacctattttatgcctttcttcttcttctctcgacaatggtggataaaccaatgagcattcatcgaacccggttcccattctcgatcaccaagctcctcttctggtcgcttatcctactcagcttcattgtgctcttcttcttgggatctcccccgtcctccgcttccccttcccaccgccggcgctccctccgcgg

SEQ ID NO: 1085 - DNA, 249 bp, Glycine max
  Clone ID: 700953961H1
cgggatttattcaggtcaacagtgaaatagcaatgggtgcaaccatttccccagtttctggataccgaaactctcagttcgatatcagtatccttatctggaaggatccaaaagagggacactggtggatgcaatttgggaatgactatgtattggggtattggccttctttcctgttctcatatttggctgacagtgcttccatgattgagtggggaggtgaagttgttaactctgagcctgatggtc

SEQ ID NO: 1086 - DNA, 252 bp, Glycine max
  Clone ID: 700953967H1
ttcttcttcgcgaaattcgtatgcgaagaaggaggtaggaattcacgctcctgcattctcagaccgttaggattccaattgtgcctaaatatatcttgtattctgcgaagaagaagctgagagaggttgaagatgggaggagatgattttgattggaatactgatgatgagcttgaaattgagaactataactcttcatcttcgtgtttaacccttcctaatggggatgctggagaggcaagctcgtctgca

SEQ ID NO: 1087 - DNA, 247 bp, Glycine max
  Clone ID: 700953969H1
gtcttctcgaggttcctccgaatcagctctacgcagctgctgcattcgtgattttcacaacgctgcttcttctctcaattcggttgttcaagcgtgcgaagtcaaacactgttgtgttggccgggctcagcgggagtggaaaaactgttatcttctatcagcttagggatggctctactcatcagggtactgttacatcaatggagcctaatgaaggcacttttattcttcacaacgagaaaacaag

SEQ ID NO: 1088 - DNA, 247 bp, Glycine max
  Clone ID: 700953976H1
gacttttcttcaacaagaatgctgcaaaatgcttttagaatgtctctcagaggactcagtatgtccactcctccaagtggtttcttcaatgccatcatgtagacttattaaagaatcattgcagaggagaatttccatgaactttgactattatatcagtgcgagtactgactttgtgttattagatgagacaactttaatcaatatcattaagcatccagatctgacagtaacgtctgaagagaaa

SEQ ID NO: 1089 - DNA, 251 bp, Glycine max
  Clone ID: 700953978H1
gggaaagaaacctaatacaataccctttttctcagaaatcacactctcacacccacttcccccaattcccattctctctgaattacgagggttttcgaaatcgaagagtctctgatcgatttcgattcggaaaaatggcgtcttcgagcgcaaccggtgctggatccaccgatcccacagctgccagaagaaacaccaagcgacccaagtattcaaagtttactcagcaagaacttccagcgtgtaagccg

SEQ ID NO: 1090 - DNA, 253 bp, Glycine max
  Clone ID: 700953979H1
ggagaatgttttgcctgttctacagagttatggtattgctgcaatctctccattttctcacagactgagttttgacaacttgcctatggatattcaacacctacgctgtaaagtcaacttccaagctttaacctttgttcctcatatcagagcacttggagatgcccttatcagccgccttcgctatcctgaaggctcagctggagaaatgggctccaactaccttcaagaggtcactggtgcaggtgctagg

SEQ ID NO: 1091 - DNA, 244 bp, Glycine max
  Clone ID: 700953985H1
tgagaacgccgttttgtctgagtttctctgccaccaaacacctccgtcaaatacaggcgcggccgtccagatcttgcatcaagatggcgtcaactaaaacggtggagcacattgtcctgttcaaggtgaaggaggaaacggagccgtcaaaggtgagtgacatggtgaacggactcggctctctggtgtcgctggacccggttctccacctcagcgtgggcccactcctccgcaaccgatcctc

SEQ ID NO: 1092 - DNA, 243 bp, Glycine max
  Clone ID: 700953988H1
gagaaaaacagatagtgtgggagagagaagagcggaagagaaaatgacgaccaggttcaagaagaacaggaagaagagaggtcacgtcagcgccggacacggccgtatcggaaagcaccgcaagcatcccggaggtcgcggtaacgccggtggcatgcatcaccaccgtatcctcttcgacaagtaccatcctggtttcttcgggaaggtaggcatgcgctacttccacaaacttcgcaacaa

SEQ ID NO: 1093 - DNA, 247 bp, Glycine max
  Clone ID: 700953992H1
gctattgcaagactcgtgcttaaaaatgtccagcagggagcagcaacaacatgctatgtagcattgcacccacaagtgaagggaactagtggcaagtatttttcagccagtaatgtggccaaaacaacctcacaggggactgatgctgatttggcaaaaaacctatgggatttcagcatggatttgaccaagtaaaaaacccaattgttatttgtcagcagagatagcatcatgcactcttattaaa

SEQ ID NO: 1094 - DNA, 256 bp, Glycine max
  Clone ID: 700953996H1
cttgaaaggaccaatggccacccctattggaaaagggcatcgttcattaaatcttactctgagaaaagagctcaatttgtatgccaatgttcgaccttgctacagtcttccaggctacaaaactcggtatgataatgtcaatctaatcacaattcgtgaaaatacggaaggcgagtacagtggacttgaacatcaggttgtgagaggtgtagtagaaagtctcaaaatcattacacgtcaagcaagtttaagggta

SEQ ID NO: 1095 - DNA, 261 bp, Glycine max
  Clone ID: 700954006H1
tctctcattccccatttcctcacctccttcaaccgctgctaaattctagggttccgaaatggacgctggcggaaagatcaagaagggcgccggaggtagaaagggcggcggcccaaagaagaagccggtttcaaggtccgtcaaagccggtctccaattccccgtcggaagaattggccgttatttgaagaaaggaaggtacgctcagcgtgtcggtaccggtgctcccgtatacttggctgcagttctcgaatacctagc

SEQ ID NO: 1096 - DNA, 252 bp, Glycine max
  Clone ID: 700954013H1
gtcttatagagctcccaatctcctacatcgcttgttaagtttactcaagaacgtgcggccaggatcagatctcacacacttccaactgccagctgtgtttaacttcccaaaatctcaacttcaatgctatggtgaatcagtgtactgcacatcttcaaacttgctgagcaaatgcaacaatgggcagagtccactggacaggttcacatcagtagtagcatggagcatatctaccacacgccccacatcttt

SEQ ID NO: 1097 - DNA, 254 bp, Glycine max
  Clone ID: 700954031H1
cttctatattacttcagggtctttgagcgacagataggttccaataaatactcagtctttatcgtgttctccatattaacttcactactgcttgaggtccttgctgtagcacttttaaaagatcctacagcaaacctagtcactcctggaccatatggccttatatttgcttcatttgtaccctttttctttgacattccagtttcaacacggtttcgtgtgtttagcttcctcttctcagacaagtcattcat

SEQ ID NO: 1098 - DNA, 263 bp, Glycine max
  Clone ID: 700954066H1
ctcaggtcctggaattgttgatggattaaaattgaagggtttacctcgtggtaggggtctattactgcttgctgaaatgagctcagctggtaaccttgccaagggagattatacaacttctgcagtaaaaattgctgaggatcattctgactttgtaattggcttcatctcagtcaatcctgcatcatggccaggggcaccaataaatccttctttcattcaggcaacccctggagttcaaatggtaactggtggcgatgctt

SEQ ID NO: 1099 - DNA, 252 bp, Glycine max
  Clone ID: 700954096H1
gcttggaggcattgacaagcgtgttattgagagatttgagaaggaagctgctgagatgaacaagaggtctttcaagtatgcctgggtgcttgataagcttaaggctgagcgtgaaagaggaatcacaattgatattgccttgtggaagtttgaaaccaccaagtactattgcacagtcattgatgcccctggacacagggatttcatcaagaacatgatcactgggacatcccaagctgactgtgctgttct

SEQ ID NO: 1100 - DNA, 272 bp, Glycine max
  Clone ID: 700954107H1
gaaagaatgaaggcattgcaggaattagttcccagcatcaataagacggacagagcggcgatgcttgatgaaattgttgactatgtgaagttcctaaggctccaggttaaggtcctgagcatgagtagactgggaggagctggtgcagttgctcagcttgttgctgatgttcccctttctgcagtggagggggatcaggacatagaaggtgtatccaatgagcaagcctgggacaagtggtccaatgatggcacagaacaacaggtggctaa

SEQ ID NO: 1101 - DNA, 263 bp, Glycine max
  Clone ID: 700954111H1
gtccctttctctctctcaaactaaaaactaaaacccattttcttctccaaaaccttcgactttcttttctctaaccgaaacgcgcttcgcagcacttcttctccactctctcacatctctgacccattgcgctatatttacgcactgtgtcaaattcccccataaaaccggtattgattctccctcagatcaaaatagagttctgagaggtagcagtgttactggcaatgaaaaatcttctgtagcttctattccgcactcaa

SEQ ID NO: 1102 - DNA, 271 bp, Glycine max
  Clone ID: 700954121H1
cttcagcagcaaagggaaaagcaaacagagtgtctaatcgaagatagaagaagagatggctaaatctccagaaactgaacttcccgtcgaagctttcggttgggctgcttcagacacttctggcacccttgcaccttttcatttctccagaagagaaaatggcgttgatgacgtcactctcaagattctcttctgcggggtttgccactcggatctccacactctcaaaaacgactggggtttcaccacttaccctgtcgttcctgggcat

SEQ ID NO: 1103 - DNA, 263 bp, Glycine max
  Clone ID: 700954127H1
gaggaacttcagcaccatcttcgtgggtctcatggcgtgttttgaggcctatggctttgcttcggggagaatgtttagcggcggttatgttgttattgtgtccaccgccgcggtcattctcttcctcgtggcaacgctcacgtgggacgtctcgcgtaaggccacgtgtgcctttcacagagaccacgctgacagccaagaggatgtgtgcaagggaggtatctgttggcacggcgtcgcgccgcgatccccagcctctcagg

SEQ ID NO: 1104 - DNA, 264 bp, Glycine max
  Clone ID: 700954128H1
caaggctctaggtgattatacgaggatgatcaatgatttttcgacccttcctttggaggcgagggagggcaaggttggatcatattggtaccatgaggatacaaatgcattttttgatgatgtggaccattacaggatgatcaaggctatgtgcaggctttcgtgcaatgtatgtgacaagattgaggatcaaccacaggatgctgcttcaaggcggcgagcaaagtttaggaatatagggcagttgaagggtcatttattcca

SEQ ID NO: 1105 - DNA, 269 bp, Glycine max
  Clone ID: 700954130H1
gagcattcaccattttcttgtggtttggtttcctagagacactaagtactcccatggaacaaaacaacaaaagccttgtttcttctaaattcttatgtttatgtttgttgatcaccttgatcagcattattgttgctccacaagcggaagcagcacgagcatttttcgtgtttggcgattcgcttgtagacaacgggaacaacaatttcttggccaccacggcgcgtgccgattcatatccttatggcattgattctgcatctcataga

SEQ ID NO: 1106 - DNA, 275 bp, Glycine max
  unsure (1)..(275): unsure at all n locations
  Clone ID: 700954134H1
gaaactctttatatatttattattgttactgacccaaacaaactcaacaaaaccatgatcccaaacgntgaaatccctcactgggacgccgacggaggaggaccactctctccgttcatctcttcttcttccaangctgacaagtgctcattattattctccctccgaccatttccgaatgttccagtncaaggtccggatctgtccacgtggcaggtcccangattggacggagtgtccctacgcccaccctgccgagaaggctcgcngccgtg

SEQ ID NO: 1107 - DNA, 271 bp, Glycine max
  Clone ID: 700954135H1
aaggaacaggagggttcattgagccgaaatggctagcatatggtgagataatcaatggtcgttatgcaatgttgggtgcagttggtgcaatagcacctgaaattctaggcaaggctggtctgatccctcaggagacagcactcccatggttcagaacgggtgtgttcccacctgcaggaacctacaactactgggcagactcctacacattgttcgtgtttgagatggcactgatgggatttgcagagcacagaagattccaagactgggc

SEQ ID NO: 1108 - DNA, 268 bp, Glycine max
  Clone ID: 700954139H1
gtttaacctcaccaagaacatcatctaccgcgccgcgttcgggtcgagttcccaagaaggccaggacgagttcattaaaatactgcaggagttctccaagctctttggcgcgtttaatattgcggattttataccctatctcgggtgcgtggatccacaaggtttgaactcgagactcgctagggcacgtggcgcgctcgatagcttcattgataagatcatcgacgagcacgtgcataagatgaagaatgataagagcagtgaaatt

SEQ ID NO: 1109 - DNA, 268 bp, Glycine max
  Clone ID: 700954140H1
tgaccggagtggtcatggttaccaagggaggtggatgcggcggcggcaagcgggcgagggcggcgcgaaccgccgaggaggaagaagagcagcagaaccagctgtcgctggtggcgcttctgttggcggccatcagaaaatcgatggtgtcgtgcagggtggacccacccgacgatgtaatctccaccgtccatcacatggagatcggatggccaaccaacgtccagcacatcactcatgtcaccttcgaccgcttcaacggcttcct

SEQ ID NO: 1110 - DNA, 276 bp, Glycine max
  Clone ID: 700954147H1
gtggggcaggcctcagacatcgaaacctgagtcagatggctctgatcaagcaaggcagcaggcttctgtggctcatagtggattgttgcctcgggcagtgatatcacagcagcagaaccaggaccaaacacaaggaatggtttactataacaatccaccaggaccaccacctcttcagcaggaaagaagctactacccatcaatggatcctcaaagaatgggtgctcttgttgcatctcaagatggtcctcctggtgggccttctgggtcagggga

SEQ ID NO: 1111 - DNA, 267 bp, Glycine max
  Clone ID: 700954152H1
ctctttcttcttttttagctatccctctcttgaaaaatctagatctcgttcttccttgatctacgttacgcttttagtgaccggatctgtatggatctgaaccagatctacacgccgatggtggttttggcctggtctttcatagatctgatgcatggaggctcagatctactgtacagagatactgtagataatcgatgagaagaacgcagatccagccgcttccgcttgttcgatcgctacagacgcttgtatcggattattcat

SEQ ID NO: 1112 - DNA, 266 bp, Glycine max
  Clone ID: 700954153H1
cgaaatagttgagcgggaaataagagggttcaatacggtggaagaggccataaaacagaagaaactgttcatcctggactaccacgatttgttgttgccattagtaaaggatgtgagagaacttgaaggcacaacgctatatggatcaagggcattgttcttcctaacccgcgaaggcacattgagacctctggctattgagctgactcggccaccaatggacggaaaaccgcaatggaaggaagtcttcacgccttgctggcact

SEQ ID NO: 1113 - DNA, 266 bp, Glycine max
  Clone ID: 700954154H1
catcaaactctctttccagaacttgttccataactgacaacctgatcttcatgaatttgagaagtattgccacacccactgtttcctgtaaagcgggaagcaacaacaatttccttttctggattttggtttgcttcttgctaccaagttttctgggagctcctgaagtatatgctcatttccaattgataaagctcatttggggtgtgatcttttggcaaggcacacccatttgtggtgtcattttctgaagtttccttgttttt

SEQ ID NO: 1114 - DNA, 265 bp, Glycine max
  Clone ID: 700954155H1
cgttcgacgaggattttgaagaccgttgggttgtgtctcagaaagatgagtacagtggtgtctggaaacatgccaagagtgagggacatgatgattatgggcttcttgtcagtgagaaagcaaggaaatatgctatagtaaaagaacttgatgaggccgtgagtctcaaggatgaaacagttgttcttcagtttgaaactcggcttcagaatggccttgagtgtggtggtgcatatctaaaatatctccgaccacaggaggctgg

SEQ ID NO: 1115 - DNA, 272 bp, Glycine max
  Clone ID: 700954160H1
agtaactccaactccaagtcacattggtgacaaagttagaaacaaggagaaagaaagaagatggcaggaaagaaaatcccagatgtgttgctgaattcaggacacaaaatgccagttataggcatgggaacttcagtggagaatcgtccatcaaatgagacccttgcttctatctatgttgaagccattgaggtgggttaccgtcattttgacactgctgcagtgtatggaacagaggaagccataggcctagccgtggccaaagccataga

SEQ ID NO: 1116 - DNA, 273 bp, Glycine max
  Clone ID: 700954161H1
ctgagcttccctaagaatgggatgagtaatatgaaattctggagtgttttaggctcccacatgatatcccaaagccagtctggcgctacccaatgtcatacatcagtttccacttctgggcactacagggtcagtaccagaacgatttgcgcggtttgatattcgacaaccagacaccagaccttccaaagatagcgggtgaatacatcttggaaaaagtgttccaaattgatgtcaacagatcaaagtggataaacttgagtgtgatcttca

SEQ ID NO: 1117 - DNA, 276 bp, Glycine max
  Clone ID: 700954164H1
cgttaaactaaacgttgtttccactttattggtgtgaagcacttgggacaaagcggttagcttcagaagagttggtttatgattgggacaacaagagattgaatataggaactacaaatgatcagcatcaaatatatacaagtttagagcaagtggtagggacaggtgcagatccaaaacctggactcttcccctcttatcccagcatgaactcaactacagctccaagtttgccattggccacatggcttccacctcaagcttctgcacctgccc

SEQ ID NO: 1118 - DNA, 266 bp, Glycine max
  Clone ID: 700954168H1
aaataattattttaattttgtaatctcattgtttggttctggttctcaggaatggtagatttgaggtgaagacgttccacattggtcaggtcccgatctcacgatggggaagtcaccaggaaaatggatcaaaactgtactgttcgggaaagtcatctaaatcaaatatttcaaaaggcagagagaagcttgttaatcaaaaaggagtagtagttacctccaaggtgccagaaactggtttggctttagaaccaacctccgatact

SEQ ID NO: 1119 - DNA, 267 bp, Glycine max
  Clone ID: 700954176H1
ctaatttctccaacatttccccctttttctaattaatcagatctgcaaaaccctaatttccctaaccctaacgaaacccccaaatccaatggcttcgattcaacgcccggcgagttcgggatcgtcggagggaggagatccggtgatgtacgagaggaagaggaagcgtatggagtcgaaccgcgagtccgcccggcgatcgcggatgaagaagcagaagcagctcgaagacctaaccgacgaagtgagccgattggaaggcgagaa

SEQ ID NO: 1120 - DNA, 272 bp, Glycine max
  Clone ID: 700954178H1
gcttcatcaacgacatcttcgagaagcttgcccaggaatcttctagacttgcccgctacaacaagaaacccaccatcacttcgagggaaattcagaccgcggtcaggcttgtgctgcccggtgaattggctaagcacgccgtctctgagggtaccaaggccgtcaccaagtttactagctcttaaactgttgtttatgggcttgttgcacgcccaagtctgttctatgtatctggacacctatgttcagattttaatcaattgtaggggtgg

SEQ ID NO: 1121 - DNA, 272 bp, Glycine max
  Clone ID: 700954179H1
aaaattgttctctcaccgtgaaagagagagagaggttaggctatggctgatgagagcgttgttgagtccccagtgaagaggcagagagatgatggtgaagaaaatggtgtctctgtttccatggacgcggagggtggcaaagaccctcttagtaacggtttatcatctgtgattcctgggtggttctctgaaatcagtgcaatgtggcctggagaggctcactccttgaaggtggaaaagattttgtttcaaggaaagtcagaataccaaaa

SEQ ID NO: 1122 - DNA, 263 bp, Glycine max
  Clone ID: 700954184H1
gagcaaagaaaccagtcctcctctccatggcatattgatatgtatatatgttggtagttatgtatgcatgtatatattgggtgagcaatagctagctagcattatattaaaaatgaaactggctacccctaaaataattagaaagatcccaagccctctgaagttggtatccagaagctcaagttcagcagcaaagaagccactattggtgtcaggatcaggacaaccgtcgtcgtcgtcggatggaagtagcaagcaacagg

SEQ ID NO: 1123 - DNA, 263 bp, Glycine max
  Clone ID: 700954185H1
gaaaggcgatggacctcggaacctatgaagtgccagaaggagtggacattctaggaagatacgatgcagagtttgcaaaaatcctcacaaaagacgctttgaaattcgttgctgagctgcaacgtgagttcaggagcgatatcaagcatgcattagagagcagaagagaggcaaagaagaagtacaatgaagggactcttccggggtttgatcctgccaccagtcacattagagaccaggagtggctgtgtgcacctgttcca

SEQ ID NO: 1124 - DNA, 266 bp, Glycine max
  Clone ID: 700954191H1
tttcaaggagagagagaaaatatagcacgccgaaaaacacgctcccacttgtaacttagtataacgacctccaacaactgatacatacaatctcctttccttcgtgttggacaacaacaatggcggcgaaatctagttcgagttcgacaacaaacgtggtgactctgaaggcggcgtgggttctcccgcagcgcacgcagaacatccgtgaggtgtacgaggtggggcggaagttggggcagggtcaattcgggactaccttcgag

SEQ ID NO: 1125 - DNA, 271 bp, Glycine max
  unsure (1)..(271): unsure at all n locations
  Clone ID: 700954194H1
caactacaaaggttgctgtaggagataagatattgaagtagtgctaagtgcctaacacctgcagtgaacaatggcctctgcatcagcatctcttctcaagtcttcacttgtncttgacaagtctgagtgggtgaagggacaaacacttcgccaaccttctgctgcatcagttgtgagatgcaaccccaccaccccatcaggcctcaccatcagagctggttcctatgctgatgagctcgttaagaccgcgaaaacagtggcttcaccaggg

SEQ ID NO: 1126 - DNA, 271 bp, Glycine max
  Clone ID: 700954195H1
taattttcctacaggagcatatcctcactggtggtcatggactcatggtgcaaggatatgatcctgttgtaaaagctcttgcaaatgatcttgatatacgcttgaaccacaggtttgcctgtataatttattgcacgacttagctacatgatttgatgcataatcatttttcataatttattgtggaattaattattatcatttttcgtcacttttatcaacaagaacgcataccaattttttctgttacctcctcctctcataggggtag

SEQ ID NO: 1127 - DNA, 271 bp, Glycine max
  Clone ID: 700954196H1
tctcatcactacctctgcatttttctctcgctctctgccttccatcaccctcgccatttcccttcccaagatagtagaagatggcagacgctgaggatattcaacctcttgtttgtgacaatggaacaggaatggttaaggctggttttgctggagatgatgccccacgtgctgtgtttcccagcattgtaggtcgtcctcgtcacactggtgtgatggttggcatgggccaaaaagatgcatatgttggtgatgaggcacagtctaagag

SEQ ID NO: 1128 - DNA, 254 bp, Glycine max
  Clone ID: 700954211H1
ggttcttccatttgactcttgttctgaacgacttttcaagagaatcaaaccatggcagtgaaagtatacggtccccactgtgcttccaccaagcgggtgctggtttgtctggttgagaaggaagtcgaatttgaggttgtccctgttgatgtcactaagggggagcagaaggatcctgagtacctcaaactacagccatttggagttgttcctgtcatcaaagatggagattataccttatatggttacacttt

SEQ ID NO: 1129 - DNA, 254 bp, Glycine max
  Clone ID: 700954212H1
ctgcacatgatgtatcagatattctggtcacaagagcaactacagtggttgatattattcaaaatgtaatagacaatcttcatgcgactaaggacatacaagtagctagtttctatcttccagacgatatcaagggagccattgaaaaggctgaaaaattttccactcaaactgattatattaagaaccaatcagaggaaacagcaagaatctcaatggaattcctgggcgctataagtgaaagtcttatcatt

SEQ ID NO: 1130 - DNA, 256 bp, Glycine max
  Clone ID: 700954219H1
gagagtcgagagaggagaggagagaaatttgaagaaacagcaaaggaaaatttccaattttgatgtcttctcttttactgtatgtaatgtgagtcatgtcacttcccaacacctaccactgataattccatgccttcttcttattaaccccaccacttgcctctcagaatttcatgtgcctcatcttgtgttctccacttccctccaactgcaccacaacagggcctggttagtgccattgctgtgacctcctcct

SEQ ID NO: 1131 - DNA, 233 bp, Glycine max
  Clone ID: 700954220H1
ggacaatataagggacgttattccttttcctcgaacacctggctcggctgagttttagaccttgcagatataagcacttcacttcacattcatttgtacgattcaaactgtattttaggcaataaagtatcttgagtctttccttttcttctttttgttttgaaaaagaaaactgcttgcttctaaatgaagtatttatacattatgaatttagtagaatggaattttgaggc

SEQ ID NO: 1132 - DNA, 252 bp, Glycine max
  Clone ID: 700954222H1
tggatacttaaatgatattttggccgaaaatgcaattgtggatgatactgatctgaatcctttggagtttttagcctccctgttccctggttttgcagcagaaagccttgcagaagcttactttgctaatagatgtgatttacatctgaccactgagatgctcaatcagttagagcttcaagttgatggtggtttcaatcagaatctgaattcaaagactttgtctgctcccaatctcagtgcaatggacta

SEQ ID NO: 1133 - DNA, 253 bp, Glycine max
  Clone ID: 700954223H1
catcaacttgtcatcttataattgaattgtgtatgtaacaaaaaaaataaaattcagaagagaagagggttgtgagtgtgactccgctgagggatatgacgccagagagggttttcgggaagatgggacatttgcagaagttgttggatcggtttttggcttgtaggcctactgggttggctaagaatagcaggatggttttgattgcgctgtatcctgtggttaaggagagttttcagttgtatgctgatat

SEQ ID NO: 1134 - DNA, 256 bp, Glycine max
  Clone ID: 700954234H1
tagggtttcttcctccttcaaacaccatcgcagattcttcgctcctttccattgattcaaaacatggctaccaccaccactcctgctagatcttttctccaagtcgccgctacagaggaggccgcgccgcctctcagagtcgttcagattgaaggactggttattctgaagataattaagcattgtaaggaccactcgccttctttagtcactggacaacttcttgggttggatgttggcagtgttcttgaagtta

SEQ ID NO: 1135 - DNA, 254 bp, Glycine max
  Clone ID: 700954235H1
tatttttttggatatttcctgtatctgctgtgtctgtctgtcccatttcatttcacctctctttcctaacccccaacgccacgccactgtcactttctccaccaatgtgcaccaatagcaataataagaatcatctctcacttctccattaaaattaaaatccaatctaatctgggtttccctttctcccatcagaggacaaagcttccaactttgcgggattcgtatttgttgtttcagtgctgtgatgggga

SEQ ID NO: 1136 - DNA, 251 bp, Glycine max
  Clone ID: 700954252H1
gtcatcgttgggatctccatacgccggatctgctaaaatacgcttgatccatatgggcctcctcgaccacttgtgggacgacaccgtcgccggcccaaggccggaaaacggtctcggcaagctccgaaaacaccacaccttcactttccgacctagctccggcaaggaaacggagggcgggagcgtgagatcgtacggagacgaatcgtcggaggaagcgacgagagtgacgcgtagtatcatgatcgtga

SEQ ID NO: 1137 - DNA, 249 bp, Glycine max
  Clone ID: 700954255H1
gcttctggtgatctcgttttcttacagtgctctcttccccctttctctctcctctttatctctctcttccattgctcctccacaagcaacgccgcgcgaggtcaattttcgcaatcgccatgactgtgatgactcctgctcccattgaccagcagcaggaggacgaggagatgcttgtcccgcacacggatttggctgagaataatcaccaacctatggaagttgtggctcaacctgatgctgccaaca

SEQ ID NO: 1138 - DNA, 248 bp, Glycine max
  Clone ID: 700954258H1
cacattccatcaccaaagcagtgtagttttccgttgtcactgccatggctttcaaaaaagtactattccaatatttcactctggctttgtgtcttgtcttcgcattttgtgcttttgagggcaatgctcgcactctcgaagatgctccaatgcgtgagaggcatgagcagtggatggctatacatggaaaagtctacacgcactcttatgagaaagagcagaaataccagacattcaaagaaaacgtg

SEQ ID NO: 1139 - DNA, 248 bp, Glycine max
  Clone ID: 700954261H1
gtttttgccttcccataggaaaagcaaagattgagagggaaggaaaagatgtgactattacagcctattcgaaaatggttggctttgctctcaaggctgctgagacactggcaaaggaaggaatcagtgctgaggtcattaatttgcgttcaatccggccacttgatcgatccacaatcaatacttctgtcaggaaaaccaacaggctggtgacagttgaagaagggtttcctcagcatggcgttggc

SEQ ID NO: 1140 - DNA, 248 bp, Glycine max
  Clone ID: 700954263H1
ctctccctctcccacgcgccaccgccagaaagaggattttccatttctgccctccgattgcatgccgctcatccatggatcagtcttctggcctgaatctggaagatctgaaatgggaccattccttcgtcagagaattgcccggcgatccccgccgcgactcctttccccgtgaggttctgcatgcttgttacacccaagtctctccttctgttcaagtacacaatccccaacttgtagccttctcc

SEQ ID NO: 1141 - DNA, 252 bp, Glycine max
  Clone ID: 700954265H1
cagacattgtatgagaggatacaatcagcaaagataaactcatcatctgctgataggaaatggaaggcttcaagtgatacaagctccactgatcaatatgacaggttcatgaatgccctttacagtttgctggatggttcttctgataatacaaaatttgaggatgattgtcgagctataattggaattcaatcatatgtcttattcacattagacaagctgatatataaacttgttaaacagcttcaagct

SEQ ID NO: 1142 - DNA, 245 bp, Glycine max
  Clone ID: 700954271H1
cgcggcttcaaccttgtagttattctctttcttcttttttagctatccctctcttgaaaaatctagatctcgttcttccttgatctacgttacgcttttagtgaccggatctgtatggatctgaaccagatctacacgccgatggtggttttggcctggtctttcatagatctgatgcatggaggctcagatctactgtacagaggtgtgcgattcatgttcgtctctcttttggaatctgtttc

SEQ ID NO: 1143 - DNA, 246 bp, Glycine max
  Clone ID: 700954272H1
gcgtgattgagaccatttaccttgccgtatttatcacttactgccccaagaaagctaggatgtcgacattgaggatgattgttttgttaaattttgggggattttgcacgattgttctcttaacccacctactagcagaaggagagggccgtgtcaagcttctaggatggatttgcgtagtatttgctactagtgtttttgcagcacctttaagcattattagggtggttattcggaccaaaagcg

SEQ ID NO: 1144 - DNA, 244 bp, Glycine max
  Clone ID: 700954276H1
gcaaaaagaaagaatcccaggcgaggagaaagatggaggggaaggagcaggatgtgtcgttgggagcgaacaagttccccgagagacagccgattgggacggcggcgcagagccaagacgacggcaaggactaccaggagccggcgccggcgccgctggttgacccgacggagtttacgtcatggtcgttttacagagcagggatagcagagtttgtggccacttttctgtttctctacatcac

SEQ ID NO: 1145 - DNA, 246 bp, Glycine max
  Clone ID: 700954277H1
ctttctcatcatcgaagcccgtcgcgagaagaagctgcttcgtcgcggttcccaaaatcgcgtttcccaagctccgtttcaaacccgtcgctatggctacgctcggcgctcgcatggtggccgccgcacccaccgtcactccgccggcctcgctcgacttcgaaacctccgttttcaagaaggagaagattaacctcgctggacacgacgagtacatcgtgaaaggagggagggatttgttccctc

SEQ ID NO: 1146 - DNA, 243 bp, Glycine max
  Clone ID: 700954278H1
ccaaggcaagggtgccaatgccaatgctcttagggatgttgtctccatgggaactgggaagtacaccatgggcaatgatttgtggtatggaccagacagagtgaaatacttgggacccttctcagctcagaccccttcatacttgaaaggagaattccctggggattatggatgggacactgctggcttatctgctgacccagaagcatttgccaagaacagggctcttgaggtgatccatgg

SEQ ID NO: 1147 - DNA, 245 bp, Glycine max
  Clone ID: 700954279H1
gccggacttggagatgttcggcgagttctccgtggatgtcagcaccggcgaggaatcgtcggagatgaactcgtcggctaaaagcagcaaacttgagaacgatcagaatgtcatcgccactacttcaaagaaagaagaggaagaagataaaacttcttgcaatgcttctggtcaagacttggggtcaaaccgtggagaggagattgtgagcgagagagatgaatccgtggtggtgaatccagcac

SEQ ID NO: 1148 - DNA, 245 bp, Glycine max
  Clone ID: 700954283H1
gataaattcaaaggcttgtttctctaaacattcgcagtggccggccaagagctttcgccttcgccaggcttgagagctaatgctgctattatccttccttggatgtctgagagttggttcattgtgctgtgaattgattattttgttttgtatttcatttaatttttataagttttgtatacaagtttttctcaccaattttttattttggcattttgtcacattgatccacgccaatgatgata

SEQ ID NO: 1149 - DNA, 245 bp, Glycine max
  Clone ID: 700954285H1
tgaagctggaatttcaaaggatggacagactcgtgaacatgctctgctttcattcacccttggtgtgaaacagatgatttgttgctgtaacaagatggatgctactacaccaaagtactccaaggccaggtatgatgaaattgtgaaggaagtttcttcctatttgaagaaagtaggatacaaccctgacaagattccttttgttcctatatctggttttgagggagacaacatgattgagaggt

SEQ ID NO: 1150 - DNA, 245 bp, Glycine max
  Clone ID: 700954286H1
gattcttcccacaattaggcttacaatgaaccttgtaagaaaaagctttgctggtggttgtctcacaacaagtgatcataacatggaaatgtttttgatgaaataataaaaataataggtgagataatgacagatattaaatgaaaaataaattaatattcaaaataattaaatatcttctataagggattttcaaaggtgtctcactttctagctgctaagcaaaactaaaactagtttctact

SEQ ID NO: 1151 - DNA, 242 bp, Glycine max
  Clone ID: 700954292H1
cgctctgtttctgtctctgtgtttgcggctgaggattccgaacgagcgaccttcttcgtttctcgcaaagtttaagtcatcatgggtaaggaaaagactcacatcaacattgtcgtcattggacatgtcgactctgggaagtcaactaccactggtcatttgatctacaagcttggaggtattgacaagcgtgtgattgagaggttcgagaaggaggctgctgagatgaacaagaggtcatt

SEQ ID NO: 1152 - DNA, 243 bp, Glycine max
  Clone ID: 700954293H1
ctgggcctcaagaccaatttaaaaacagtcattgcagagactcctcagagaatgcttctaacaatgatctagctgatgctggagatcaggtgcttgaagcctctcaatgaagaaaaaggttccccagaaattggagatatgcaaatgttctctgttattgtcagctgtctggatcataatcaaggcaaccgttaaagtctatcatcatataatcctgaacagctgtttcgcatgtgcatgtta

SEQ ID NO: 1153 - DNA, 268 bp, Glycine max
  Clone ID: 700954309H1
ggggcacaaatacatatggtatgcgctacccgggtatgccattggcctggtaactgctttggctgctggtgtcttgactcactcacctcaacctgcacttctttatctggtgccttctactttgggacctgtagttgtgatctcttggatgaaaagggaactacttgagttgtgggaaggaaacaccccaaatctcaatgataaagatcgcgaaatagaagtttagtctagtgacaggtggtttatagccaaacagaaagctgtaaat

SEQ ID NO: 1154 - DNA, 266 bp, Glycine max
  Clone ID: 700954337H1
caaataaagcacagaacagttgaagtgaatggcataaaaatgcatgttgcagagaaaggagagggtccagtggtgttgttcctccacggcttccctgagctctggtactcatggcgccatcagattctctctctcagctccctcggctaccgcgccgtcgctcccgatctccgtggctacggtgacaccgaagcaccaccttcaatcagcagctacaactgcttccacatagtgggtgatctcgttgcgcttattgactctctggg

SEQ ID NO: 1155 - DNA, 263 bp, Glycine max
  Clone ID: 700954354H1
agcatctgtggcttggggaaaataaactctctggcaacatccctgatttgagtggactgaaggagttagaaactttgcatttggagaagaacaactttgaaggaccacttcctccgtcaataaagaaacttccaaaattacgtgatattgattcagattttgagaataagcctccaaacactaatcaaaatgaatagaagtgaaagtagtacaagtggttctagagattcatcagtgataaagagcacaaggccattacaaat

SEQ ID NO: 1156 - DNA, 249 bp, Glycine max
  Clone ID: 700954429H1
ctcaaaatcaaaatttaaaatacaaacaacctccatctccaccgttaaaatattccatcaaacggcccagcgccttctgaggacaaagcgagggaacaaacgtgaaccgtggagtctcactataaaaatctcgctcactaactcttgttcttccaaaaccaattctctgcactcttcatcaagctccgctccaacacaggggaaaatgagggagatccttcacgtgcagggagggcaatgcgggaacca

SEQ ID NO: 1157 - DNA, 244 bp, Glycine max
  Clone ID: 700954444H1
tgcaggctcgaaaatgctcgcctgagagaagagattgataggatatctgccattgctgcaaagtatgttgggaagcctgtggtgagctatccacttgtttctccttcatctgttcctcctcgtccactagaacttggggttagtggtggttttggtggccaacctggaggcattggaggggacatgtatggtggagctgcaggagatctctaaggtcaataagtggacctatgaagctgataag

SEQ ID NO: 1158 - DNA, 244 bp, Glycine max
  Clone ID: 700954458H1
cggcgtaaaagaaaccgtctgaaacgctcctcctctttccgttctctctctctgtggcacttgatttcgtcaaaaggcaaagggatgtgttcccgagtgaatgatgttggtttgtatttgctgatgcaattggtggttatgttggtttaagaagctaagaactgttgctactacttcacaatgggtgctgcttgttgtgttgctgccagagacaaaactatacaaagtggatcaaccagtgaca

SEQ ID NO: 1159 - DNA, 245 bp, Glycine max
  Clone ID: 700954461H1
tccaattgaaattttaaaaatgactgggataaacttaagaattcaattattgaaattgaataagtaaacaatttaattggattggtcgaatggtatcaaaaaaatggagtactaactcccatttcttatttattattgaattaaccgatcaacttgctttgttatcgaacatttctttttgatttcaaaaattttccggaaaaaatttgaatctatttttatatgcgaatcaatcctactacttc

SEQ ID NO: 1160 - DNA, 244 bp, Glycine max
  Clone ID: 700954488H1
gtcaattcctgaatgccagaaaaagcttccaggtgcttttactggtggggagcctttacctgaggctgtactgtggcttctattgacaggaaagataccaagcaaagcgcaagttgactcattatccaaggaattgcgaagtcgtgcaactatcccagattatgcttataaggcaattgatgcattgcctgtttctgctcatccaatgactcaattcacaactggtgtcatggcccttcaggtg

SEQ ID NO: 1161 - DNA, 241 bp, Glycine max
  Clone ID: 700954490H1
atcggagcgaagttctgggaggtggtgtgcgcggagacgggatcgattccacggggaggtaccagggggacaacgagttgcaactcgagcgagtcaacgtctattacaatgaagcgagttgcggaaggttcgtgccgagggcggtgctcatggatctagagccagggaccatggacagcgtcagatctggtccctacggtcagattttccgacctgataacttcgtcttcggccagtccgg

SEQ ID NO: 1162 - DNA, 243 bp, Glycine max
  Clone ID: 700954493H1
gcgttggtactgaattccttaatcgagtccagtattcataatctttgagttgatatgggcaactggagcagtgaacgtcatcaaaccactcaacaaagtgatctcggtgcagttttgcgtgatggaaaagaagtacttcttcaagcattcaactgggagtccaacaaatacaactggtggaataatttagaaggcaaagtttctgacatagctaaagcaggatttacttcagtctggttgcca

SEQ ID NO: 1163 - DNA, 313 bp, Glycine max
  Clone ID: 700954511H1
agaaactacaattctcactgaaagaaagttgctaactcttggcaccagttatcagcttaacatagttgataacaccaaaggcacaacaacattgagggaatgaggcttgtcatatcagctgtatgtgttattgtgctattttcttatgctgctgcgtatgatcctttggatccaaatggaaacataacgatcaaatgggatgttgtgtcatggacaccagatggctatgtagccgtggtaacaatgagcaatttccaaatgtttcggcacatcatgaatcctggatggaccttgggatggacagggcaaagaa

SEQ ID NO: 1164 - DNA, 318 bp, Glycine max
  Clone ID: 700954530H1
tgtgtatccaattccaaattcacccgtaaaataccttcctttgtctcaccagccatatgtgtatgatggaaggagatgagaatattcaagcatcaacaaagggaaaaaatgtggaaagcttcaccagcttggaggcaccaaggaagaaaagcaagaagatagaaaacaagaggaggtttagtgatgaacagataagatcactagaatgcatatttgagtcagagtcaaagcttgagccaaggaagaagatgcaactggcaagagtcttgggccttcagcctcgccaagttgccatatggttccaaaacagaagggcaa

SEQ ID NO: 1165 - DNA, 258 bp, Glycine max
  Clone ID: 700954603H1
cgcactttgcgttttctgcgtcatctccgattccccgacaatggccacccaaatgagcaagaagagaaagttcgtagctgatggagtgttcttcgctgaactgaacgaggttctgacaagggagttagccgaggacggatactccggcgtggaagttagggttacgccgatgcgcaccgaaatcatcatcagagccaccagaacccaagccgttctcggtgagaagggaaggagaatcagggaacttacctcggtggt

SEQ ID NO: 1166 - DNA, 255 bp, Glycine max
  Clone ID: 700954604H1
gaaatggttatgcagaagtggctgaaacataggttcctcacacctattagactggcctttgcttacatcaaagtcttgtgtctctttgtttttttctcttgggttgatgaaaatggtgacaacccagcatggaaagccattggatatgaggtaccagctgatgaaaacttgaccaatgcctccaaaactaggccccttgaaaaggggattatagaaaccatgaatgaatctgactccgctcttcaacaatctctt

SEQ ID NO: 1167 - DNA, 204 bp, Glycine max
  Clone ID: 700954609H1
tgacatctggtagagatccaggaattatccccagaaatgctcacccacctgaattagatgaaccattagacataaacacaccatccatggaatgggtaaataatagggcccctaatcttaagctgcccagagtgaaagatgttctagtcaatggccacacagtgaaggtgaaattttgtgatacttgcttgttgtatcgtccac

SEQ ID NO: 1168 - DNA, 251 bp, Glycine max
  Clone ID: 700954610H1
aaaatcttctgtgcaaccagaaaaaaacggaccttgccctcagtctcttttttccatcatcacttcattaaacattattcactctctttctctgtctctagtttttacaacatggctactgcggtaactgctgcagtgtcctttccagccaccaagtccacttctctttcaagcagaacctctatcactgccccagatagaattgtcttcaagaaggtttcgttgcaatacagagatgtttcaaccagtgg

SEQ ID NO: 1169 - DNA, 216 bp, Glycine max
  Clone ID: 700954614H1
tttccattatactaaatgcaatcatgcatgttttaacttttaacaatgctgctgtgaagtgcaaactagaagaaaatatcatcttatctgagtcgcaatttcaattgcagcaagggttagtttttaaaattgcattggccatgtatccaagatatcatttttcctgccaagtcagggcagtataggaaattctagtccacaagctgttatatgacc

SEQ ID NO: 1170 - DNA, 203 bp, Glycine max
  Clone ID: 700954615H1
caaaatgtttcgtttcgagcaggaaaagatccgaaaacgaatttgattcgtaaagttaatttcttttcgacaatcaaatagtttccagcttgttgggtgttgccatggccgacgctctctcgttgattccggcagccgtgcttcgcaaccttgctgacaagctctacgagaagcgcaaaaatgctgctcttgatattgagggg

SEQ ID NO: 1171 - DNA, 259 bp, Glycine max
  Clone ID: 700954617H1
cagaatatggagactgttcttttcaatcactccccacctttggaattcaagggtttgagcaaggaggaggaagactcattgctagggcaagtggaaatatggaggtacatgacatgcttcacggactccgtggccttgaaagctgtcatagagcttcgtatagcggacatactagaccgttatggtaaaccactatccttgtcgcaaattgtggagaacatagaagacgcaccctccccagatgcctctcttctccaga

SEQ ID NO: 1172 - DNA, 256 bp, Glycine max
  Clone ID: 700954620H1
ggaatctcttattccctctttcctttcattacccaataaaatcgtagaaatccaatcccatctctcatgaacaatcaaccaagaaaacagtgagcacagttcagttgcacaccttctctgtgcttcttcttcgatgttcaattacaataacaccaactcgcttcatgaaacaccccactccaatttcgccctgtcacaatcgcatcactcatgcattggccactgtcacataaccgcgatcgctggatacgacacc

SEQ ID NO: 1173 - DNA, 253 bp, Glycine max
  Clone ID: 700954623H1
atgaacgacccttcattagttctagaaaggttttgatggacttggggccacctataagcaaggaagtccagcttatttcttttcactccgtgtcaaaaggttattatggtgaatgtggacagcgaggtggatattttgaaatgaccaacattcctccagagacagttgatgagatctacaaggttgcatcaatatcacttagtccaaatgttccagcacaaatatttatgggagttatgctccatccacctca

SEQ ID NO: 1174 - DNA, 250 bp, Glycine max
  Clone ID: 700954626H1
ctatgttacaaaaggttactttgatgaaccatgcaacattggattttccgcagactgtcataaccatcctcagttttcattaccttcaaactactttgggaactgtttgatccctctcctcacaaccctaaagaggggtgagttggtgggacaaaatgggattgttgcagctgcaaatgccattgaaaggaagattagagatttcaagagtgatgctttgagattggctgaaacaacgatgtcagatatt

SEQ ID NO: 1175 - DNA, 202 bp, Glycine max
  Clone ID: 700954628H1
ctgagtgcccgcaatttgctgcccatgaaggccagggaagggaggactactgatgcatactgtgtggccaagtatggcaacaaatgggttcgaaccagaactctgcttgatactctctcccctcgatggaatgagcaatatacctgggaggttcatgatccgtgcactgtcatcacagttggggtttttgacaaccaccaca

SEQ ID NO: 1176 - DNA, 254 bp, Glycine max
  Clone ID: 700954632H1
gcattacattacattagattggtggcaaagcaatggcatcgtcactacaagcagcagctactttcatgcaacccaccaagtttttgcagctaaagtctactcaggccatatctaaggcttttggtttggaacctgctggagttaataaggtcacatgctcccttcaggctgatcttaaggacttggctcacaagtgtgttgatgctaccaaaattgcaggctttgcccttgccacctctgctctcgttgtttct

SEQ ID NO: 1177 - DNA, 255 bp, Glycine max
  Clone ID: 700954635H1
ggcaatcagatgctaaaacaccaaaaggtttgcaagaccaggcaggactgcttttctttattgctgtgttttggggattctttcctgtcttcactgctatattcacatttcctcaagagagagctatgctgactaaggaacgaacaaccgatatgtacagactaagtgcatatttcgtggccagaactacaagtgaccttctactagacctggtgctaccagtgtttttcctccttgttgtttatttcatggcca

SEQ ID NO: 1178 - DNA, 143 bp, Glycine max
  Clone ID: 700954637H1
caaaacactcataacacaaagcacaaagcaaagctcatccttgagttaaaaaatggcagcagcttcttccatggctctctcatccccatccttggctggcaaggccgtgaagctgggcccatcagccccagaagtgggaaggg

SEQ ID NO: 1179 - DNA, 251 bp, Glycine max
  Clone ID: 700954640H1
cttgggtgatgttaaacctagaataagtgaagaatctaatgacaagtcaaagatatggaagctcactgaaatcaacgaacaatctcaatgtagatccttgaagctaccggagaatgtaagagtaaccaagatatcaaggttgatatatacaaattcaggtaatgctattctggcattagcatcaaatgccattcacctactctggaaatggcagcgaaatgagcgtaactcatctggcaaggccactgcta

SEQ ID NO: 1180 - DNA, 248 bp, Glycine max
  Clone ID: 700954645H1
agccaagttcaacttatccacaaagaaacatcgtggttccctcgcatcagcatctttcgtaattttcttcactgctatttaccattgccacactctcattctcgatggcggcgaagatttcattggcaattggtttgagaactctcttcactgttttgggacttctcatgcttgctgtctttctttacactgccttcaccgatggtctaggtgttcgctttctcaaagaacttgtcagaccgtggatg

SEQ ID NO: 1181 - DNA, 249 bp, Glycine max
  Clone ID: 700954646H1
cttctaaccagtacacttacatggagcccccagggcctccaccacctggcagaatgacttcttcagaatggcttcgttggtacagagaaaattacaaacctgaaaggactaacaataacatgcaacccactcatttgaatactcctggtcctggaaatcatgtcaacttcctctaccatgatacttacaggtttggtcaatttgatacatggaacaacaacccccctttgtcttctaaccagtacactt

SEQ ID NO: 1182 - DNA, 256 bp, Glycine max
  Clone ID: 700954649H1
ttttcggattagtcatcgaattaattaattattataattgctcatttatgcatttcattcataactcttacccaaacaaacatacacagagattcaacattcatagtttcatagtcctacctttttccttttttttttcttttttctcaacgttgttataataaattttattagtaattaccacaactcttgaaggtggtggttgatgttacgggcatgtttggggttgaattaccatggtagaatggaggagctg

SEQ ID NO: 1183 - DNA, 254 bp, Glycine max
  Clone ID: 700954651H1
cggatatctcaaaggtttatccttcagtgaagagaaatggcagctgaggcaaattttgatagcaaaagcagcaggtggtctttgcaggggatgacagctctcgttaccggtggttccaaaggaatcggatatgctatcgtggaggagttggcacaacttggagccactgtacacacttgcgctcgcaacgaagctgaactcaataaatccttaaatgaatggaacacaaaaggatacagagtaactggttcggt

SEQ ID NO: 1184 - DNA, 205 bp, Glycine max
  Clone ID: 700954652H1
ttgctttgcagagtataagatcttgctcccacgtctctgattacttgcaagcttcatctgcactcatggatcccaaccagcctgtgggtgaaaactacgccaatcccaggacttgcttctttcatgtcctcttcaaggctgcagccttggcattttacattctctcggccctctttattgataactttgtcatcattttcgtggt

SEQ ID NO: 1185 - DNA, 251 bp, Glycine max
  Clone ID: 700954668H1
ctgcgattcatcgacgaccacaactccgcggaggaccgaacctacaagctcggactgaaccggttcgctgatctcaccaacgaggaatacagggccaagtacttgggaaccaagatcgatcccaaccggaggctcggaaagaccccgagcaaccgctacgcgccacgtgtcggcgacaaattgcctgattccgttgattggaggaaggaaggtgcttttcctcctgtcaaagaccaaggaggctgtgggag

SEQ ID NO: 1186 - DNA, 199 bp, Glycine max
  Clone ID: 700954673H1
caagggtttaacctttctggctgtgttaatatgcgtttcagcactgtcactgagtccttctgttgcgggggaagggcaaaataatggccttgttatgaacttctacaaggaatcatgccctcaggctgaagacatcatcacagaacaagtcaagcttctctacaagcgccacaagaacactgctttctcctggctcagg

SEQ ID NO: 1187 - DNA, 245 bp, Glycine max
  Clone ID: 700954677H1
gagagagagagagaaatggcttgcaggcaattgtgggcttcaagagctgcctcttacctgaggatctctgtgtttcacagatgcttttctaatgttattaaagatttcaagtatgttgattctcatgagtgggtgaaagttgatggaaattacgcaaccatcggcataactgatcatgcccaagatcatttgggtgatgttgtatatgttgaattgccagaagtgggagcagctgtgacacaagg

SEQ ID NO: 1188 - DNA, 254 bp, Glycine max
  Clone ID: 700954681H1
gggtttcataggaagagttgggagatatttgggctatggccactgggaagacggttatgtgttcgctgagccagttgcgtccgctaacatgcgcatcgacgtcagcgtcacgattagtgccccagccacccgacctcatcaagtgggtaaccagagaaggtggcttcgtgcaccgcgccgtcaagataacacaactcgactcctccaacggactgggcctggtggccaaggaagaaattccacgtggcagtgat

SEQ ID NO: 1189 - DNA, 253 bp, Glycine max
  Clone ID: 700954682H1
attctttgagggaatttgacaaaaaagtagccactgccccaacgatcccatttcccttgacttctctacgtgaagctccttgttttgcataggagctagttgaaatgtccgagggaaatgcagggaaaggaaagaaaatcgccatcattggtgtctcaaccttattgttggtggctatggttgtggcggtcacaattggggtcaatctcaatgagaatggttccaacaatgatatagaggacaacaagaaaga

SEQ ID NO: 1190 - DNA, 248 bp, Glycine max
  Clone ID: 700954687H1
cttagccgaggtcacgaggagcactagctagtttcacaatttccaaatggctaggggattgaagaagcatctcaagaggctcaatgctcctaagcattggatgcttgacaaactgggtggtgcatttgcgcccaaaccctcatctggaccacacaaatctagggagtgccttcccctcatactcatcctacgaaaccggctaaagtatgctctgacttaccgtgaagtcatcgctattctgatgcaga

SEQ ID NO: 1191 - DNA, 246 bp, Glycine max
  Clone ID: 700954691H1
cttttctcctctctctcacttgcgttattagggttttagttagacagtggcggggcagtgatacagtgtgggcataaaattttcgaagttgaagcgagaacttgccatttcaagggttttagggttagggttttctcaaattgcaaggacatgggtttcaaccttcaaccatatgggattcaatccatgctcaaggaaggccataagcacctttctggcctcgacgaagcggttctcaagaacatc

SEQ ID NO: 1192 - DNA, 246 bp, Glycine max
  Clone ID: 700954693H1
cacaaagctagctatagctgctacctcttattggcttttttgtcttactgtttcaataacagtaagctctaagccaccgccaagtttcatttccttctttaatttcctccctttctaccttgttgttattcttcttcaccttggttaccctgccctacccaaaagttcaatatcttttttgcagcgtcaataccctccaaattccaataaagatatacacacacacatttatatgttcatatagta

SEQ ID NO: 1193 - DNA, 90 bp, Glycine max
  Clone ID: 700954695H1
atcaattttagagttatatagtattttatatgtatagttctctaataagctggttttataataactttaattagtggcacttcttgagtt

SEQ ID NO: 1194 - DNA, 250 bp, Glycine max
  Clone ID: 700954696H1
gttttccaatgcagaaagcagggtacggtggcgatggaatatacaggtctctaaggccttgtttggttctcccaaatgaccccaacctctccctcgtctcattcctcttccaaagcgtttcctctttcccatccaaaatcgccctcgtcgattcccactcttcccaaacacttaccttggcgcacctcaaatcacaggtcgccaaacttgcccacggtttcctcaaactaggcataaacaaaaacgacgt

SEQ ID NO: 1195 - DNA, 268 bp, Glycine max
  Clone ID: 700954701H1
ctctgggactttcagaccctgaaggaacaggagggttcattgagccgaaatggctagcatatggtgagataatcaatggtcgttatgcaatgttgggtgcagttggtgcaatagcacctgaaattctaggcaaggctggtctgatccctcaggagacagcactcccatggttcagaacgggtgtgttcccacctgcaggaacctacaactactgggcagactcctacacactgttcgtgtttgagatggcactgatgggatttgcaga

SEQ ID NO: 1196 - DNA, 268 bp, Glycine max
  Clone ID: 700954702H1
gtattctgatcgctccctgagagagctcgtcgcggcggttgcagaagaagattgcaagatgaagttcaacatcgcgaatcccaccactggatgccagaagaagctcgagatcgacgacgatctgaaactgcgagcattttgggacaagaggatctcacaggaggtcatcggagatgcactcggtgaggaatttaagggctatgtcttcaaaattaccggaggttgtgacaaacaaggatttccaatgaagcagggagtgctgactcct

SEQ ID NO: 1197 - DNA, 262 bp, Glycine max
  Clone ID: 700954704H1
tgagaaggttatgcgagctctaggtgattaccttggtgtcaaggttcatgcttgtgttggtgggaccagtgttcgtgaggatcagcgcattctccaagctggtgtccatactgttgttggcactcctgggcgtgtatttgacatgctacggagacagtctcttcgtccagatcacataaagatgtttgttttggatgaggctgatgaaatgctttctcgtggtttcaaggaccagatctatgacatcttccagcttctgccg

SEQ ID NO: 1198 - DNA, 259 bp, Glycine max
  Clone ID: 700954707H1
aggagtgatatctttggggagagaggaattttacttggtgctgttcatggagttgtggaatccttgtttaggagatacactgataatggaatgaacgaagatctggcctataagaatactgttgagtctataacagggattatatctaaaaccatctcaactaagggcatgctagctgtatacaatgctttatctgaagatgagaaaagggaatttgagaaggcttatagtgcttcttattatccttgcatggaaattc

SEQ ID NO: 1199 - DNA, 257 bp, Glycine max
  Clone ID: 700954711H1
cccaaagcctattttcccattttccccttttcatgataacaactctccatgtagggcaaacttcacttcaattgaactaacttgtctgtggctttttgtagattgattcaattcaatgggttcagtaatgctcagtggaactgaaaagctcactctcagaaccctaaccgggaacggcttaggtttcactggttcggatttgcacggtaagaacttcccaagagtgagtttcgctgctaccactagtgctaaagttc

SEQ ID NO: 1200 - DNA, 267 bp, Glycine max
  Clone ID: 700954717H1
cttgaagctgaactaactcgtttaggaaagcctgtagcagctgatgctgggggaaagttgtatgcaatcatggaaatatgccgctcatttgatcaaatatttaaagaccatcttgatggcgtgcggcctggaggtgataaaatttataatgtctttgacaatcagctccccgctgctttaaaaaggttgcagtttgataagcagctttcaatggaaaatataaggaaacttattactgaagctgatgggtatcagcctcatcttata

SEQ ID NO: 1201 - DNA, 261 bp, Glycine max
  Clone ID: 700954720H1
gtgaagatgatgtccggaaaatatacgtcgattgacgcgcacagcttcagggatctgttcctgccgttccagattcacgacccgccaccgtcaatttcgcagattcaaatcttcagacatttcctccatctggtcctctgggcaagattactgctgcttccgggcctcctcgtgacgctgatgattcattttcaaaacctgtatctggttctgatgaaccccagcagggtggttggtttcagacttttacaattgctgctt

SEQ ID NO: 1202 - DNA, 261 bp, Glycine max
  Clone ID: 700954723H1
gtcacatgcatcgttccctcacttgggtcaaccccagaatcctccaaggcctaccttaaaactcttccttcaaacatagactccatttttctccctccaattagcaaggaaaatgtaccccaaggagcatacgctggactcctaattcaactcactattaccctttctctgccatcaatatatgaggccctgaaatccttgtcctctaaatttcctttaacagcgttggttgcagatacttttgcatttccaaccttggaa

SEQ ID NO: 1203 - DNA, 255 bp, Glycine max
  Clone ID: 700954728H1
cccaaacaaaactcaagtacggtcagacgttgaggcttcggtttaaggtgagcgcgactttggttggggattcggtgtctgttaccatgctggcgccgccatttaacacgcactcgttctccatgaatcagaggctgttggtgctgaagccgcaccatttgagtggggttggagaatcaacgcacgaggttgaagttaccgcgccggcttccgctgttcttgcgccaccgggtttctatctgctgtttgtggtcc

SEQ ID NO: 1204 - DNA, 267 bp, Glycine max
  Clone ID: 700954733H1
atcgccattagtgactgctgtgaggagaggatcttctgattcaaaattggtgtcctcctcgtctaccctcactccagaaaccaaaactaccatggaagacaaaggccgtggtgctggtgaaagtcgaggtggagtgaatctgacaaagaagagagaattcaccatattcgtagactatagagatagataaacgttcgctaaacccaaagtagatagttgagatcccagcccaacccaatagcgcgaaagccccaaaccttcgccttt

SEQ ID NO: 1205 - DNA, 258 bp, Glycine max
  Clone ID: 700954738H1
cccgaaccctaaccctagaagaaagaaaaaaacccacaacacacaatcagtactaccaactagggtttttgtcatggctagtttgcaaactagggttttcttgatggcccttctgtgcctgctggctcttggtgcaaccattattccaatggcacaaggggaagtgtcatgtggccaagttgtgagtaacctgaccccatgcatctcctatgtgctatatggtggagccacggttcctgcacagtgctgcaatgggat

SEQ ID NO: 1206 - DNA, 254 bp, Glycine max
  Clone ID: 700954748H1
cacaaacaactcttgagaaagaaagaatggctgccaacacattgatgagttctgccatctcagccttcccatctctcctttcctcctcaaaatccagatttgccgcagcagttcctctttccagctttgttgtcaccaatgcctcttcttctcgcttttccatgagtgctgactggatgcctggccagcctagacccccctaccttgatggttcagcacctggtgactttggattcgaccctcttcgtcttggt

SEQ ID NO: 1207 - DNA, 264 bp, Glycine max
  Clone ID: 700954750H1
agaaagggctgcagacctgccattcagaatgttgaagaaggaaacaatgactgaagaacagataccaaatatacaaatgctgctttcctcacttattaacagtctccaattactaagatcccgtaagacactcgctttccgcaatagaaaaaaaatggcctatatggttttgtctaagcttggattgcctcagtggtttggttgtaaagaagtgtcatgtatgtacgtgtgttaatgtggttgtaccagcaaactgtaattaaa

SEQ ID NO: 1208 - DNA, 258 bp, Glycine max
  Clone ID: 700954754H1
gttttcagcccccttgttggagaggcactttcaaggttagatgctgtgataaggcatccaaatgcactacatgctgataacataatggcatatgacaatgccgtctcagctcttggaaaaatatgccaattccatcgtgatagcataaatgcagcacaggttgttcctgcctggctaagttgcttgcctataaaaggtgatttaattgaagctaaggttgtgcatgaccaactttgttcaatggttgaaagatctgat

SEQ ID NO: 1209 - DNA, 257 bp, Glycine max
  Clone ID: 700954757H1
aaaaaaggcaaagcttattcccccaagacttagctagcactagcaaacacctctatatctaaaatggtttcaatttctgatcatgaactggttttgatctttggtctcctaggtaacattgtgtcattcatggtgttcttagcacccttgccaaccttctatacaatttacaagaagaaatcatcagaaggatttcaatcaattccatatgcggttgcacttcttagcgcactgttgcttctatattatggcttcat

SEQ ID NO: 1210 - DNA, 255 bp, Glycine max
  Clone ID: 700954759H1
ggaacaaaggcattagctaagatgatggctgtttgtggaccctttcatcaaaatactgcaagtgcatatagtcttctagctgtggttctctaccacactggagattttaaccaggccaccatctatcagcaaaaggccttggatataaatgagagggagctagggcttgaccaccctgacactatgaaaagctatggggatctttccgtcttttattatcgtctgcaacacattgagttggctctgaactatgtt

SEQ ID NO: 1211 - DNA, 253 bp, Glycine max
  Clone ID: 700954762H1
gtttctatattctccggatttaagaaaaccacagcagctaggtggtggcctggaatcgtggtgcggcttctatcagagtataaggccaactcagatgggattgtcacttaatattgacatgtcatcaatggcgtttattgaaccacttcctgtaattgactttgttgctcaaattttgggaaaagatgtgctctcaaagccattgtcagatgcagatcgtgtcaagattaagaaggccttaagaggtgtgaaa

SEQ ID NO: 1212 - DNA, 263 bp, Glycine max
  Clone ID: 700954765H1
cgttaattccggtcgtcgtcgaccccgtcatcggaaaatcgaggttgttggttacccctaccgtgaaggagcatgccacggagatcgcggagacttggaagagcagcctggaggatcgtggcggcgtggaaaacctgaagacacctgacgtccacactttcttgcagcacgttgttaccttcgggattgtcaagaacgatgactccgatttgtaccggaagcttgttattgcttccgcttggaggaaacagatgccgaagctc

SEQ ID NO: 1213 - DNA, 255 bp, Glycine max
  Clone ID: 700954772H1
ttcacctttcagtgttttttttctctctctctcctctgtctccccgccggagcccactttcgtcgccggtgtttcctttctgaagctgctcttccgttgcgagccaccgcgacccttttgagagccctgttcaacaagctcgaaagtccggtttttttcccgattcgggaaaactggtttggtctttgacttggaaccgtgagtggagttgaagggattttttttgggttctgcgaagaggtgcggatccaggaa

SEQ ID NO: 1214 - DNA, 253 bp, Glycine max
  Clone ID: 700954775H1
ctcactcttgaacctaaaaatcatagaggtaaggaaaagcaagccatttactttttcttttttctcttcttcccaaaacaaaaacagtcacttttacacaatgccaccaaaatggtgtaaaattattctggggtccaacaagaccaagtgatgcaaattctgagacccactgagaggttgcaactgtgtgctgcactgtggctagaactacatgttctgtggttcccttcatgctttgcactgtggctggctc

SEQ ID NO: 1215 - DNA, 257 bp, Glycine max
  Clone ID: 700954784H1
cttgtgttacttctccttggttgcaccatgtcttgctatttgtatcatcttgtgtaccttcttaagctttgagcaattcccttttacttttatttcactccatgatcatcactcacacatcaaacactactactagctccttgtatgagtgtcattccttctagctaaatctctctcttttggggtatggaattcaacaagttcagaatcagaagctatgaggggcaatctgatagggctcaagtggaagatcttga

SEQ ID NO: 1216 - DNA, 257 bp, Glycine max
  Clone ID: 700954785H1
ctcatttcaatttgcatttgcatttcatttggcgttttgtttctttctggaagcttcacttcggcatccatggcgtcgttcgaagaagctcctcccggaaactccaagaacggcgagaagatcttcaagaccaagtgcgctcagtgccacaccgtggacaaaggtgccggtcacaaacaaggacccaatctgaatggtttgtttggaaggcaatctggcacaactcctggatattcctattctactgctaacaaaaa

SEQ ID NO: 1217 - DNA, 255 bp, Glycine max
  Clone ID: 700954786H1
cagaaattgtggcttgctggcttttcaaagggcatacaggaaatgcacagaaaggcatctttggttcttgaagatgcagttaggaatatttacactgttgttgcattttgtgctggtaataaggtgatggaactctaccagttgcagttaaataaaatatttaagcaaagctttcttcatggagtggccattggttttggatttggcttttcacagtttctgctctttgcttgtaatgcccttctactttggtac

SEQ ID NO: 1218 - DNA, 255 bp, Glycine max
  Clone ID: 700954789H1
acaggactttccgttcacgacactcccttttatcgtttcacttccgtcgtcgtcgtcttcaattttggatcttcgaatcgaatcgcatcctatgggtagcagcagaggacacacgctcatggaggttggacccgacggggttgccgtcatcaccatcgtcaaccctcccgttaattcactttcctttgatgtattgcgcagtttaaaggagagttttgatcaggcgatacagagagatgatgtcaaggcaattgt

SEQ ID NO: 1219 - DNA, 251 bp, Glycine max
  Clone ID: 700954795H1
cgctgaggaggaacatggtgcagaacatgctcagctcaacaagacttaaggagtttcgcagtgttcgggacaatgcgatggacaagctcatcaacagactcaaggacgaggccgagaagaataacggcgtggtttgggtgctcaaggatgccaggtttgctgttttttgcatacttgtggctatgtgttttggtcttgagatggatgaggagacagtggagagaatagatcaggttatgaagagtgttctc

SEQ ID NO: 1220 - DNA, 271 bp, Glycine max
  Clone ID: 700954809H1
gggaattaccagccatggcatcgtttggggcggaagagtggtactttttcagcccgagagaaaggaagtacccgaatggcgcaaggccaaacagggctgcaacttcagggtattggaaggccacaggtacagataagcctatatgtagtggaactcaaaaggttggggtgaagaaatctttggttttctatggagggaagccaccaaaaggggtcaaaactattggatcatgcatgagtaccgtgttgctgaaaacaagcctaacaatagg

SEQ ID NO: 1221 - DNA, 270 bp, Glycine max
  Clone ID: 700954812H1
aacttacagcttgatggggtcctttgttccatttggtgggttcttttctacacctgaaatcagaagtcccgtaagctgtacaaatgcaccttttacccgttgtgacacatgcaataaaaaatgtgaacaagaagttgcagatcttctgaaggtaggtccttcatctagtaactcaacgagctcaccctggttacaaaaggttgttaatgtggagacgcatgagggtcggatgcggcaaagactaatgaagaaaacacaagtttgaatgat

SEQ ID NO: 1222 - DNA, 272 bp, Glycine max
  Clone ID: 700954815H1
caaaatgactcaagcccagattcaaccagttaaacttggaacccaaggctttgaggtttcaaaattgggattcggatgtatgggccttactggagcgtacaatgaccctctccaagaacaggatggcatatctgttatcaagtatgcgttcagtaagggaatcacattttttgatactgcggatgtttatggagccaatgctaatgaacttttggttggaagctttgaagcagctgcccagagaaaagattcagatagccacaaaatttggt

SEQ ID NO: 1223 - DNA, 268 bp, Glycine max
  Clone ID: 700954828H1
cacacacaaacacaacaacatatggaggtgctaagggtgcaaaccatagcttccaaatccaaagatgctgccatcccagccatgtttgttagggcagagacagagcaaccaggcatcacaaccgttcaaggggtgaaccttgaggtgccaattattgattttagtgacccagatgaagggaaagtggtgcatgagattttggaggcaagtagggactgggcatgttccaaattgtgaaccatgacatacctagtgatgttataagaaa

SEQ ID NO: 1224 - DNA, 265 bp, Glycine max
  Clone ID: 700954840H1
tgttgaaattaagctaaaggagttagaacaaaagtcagctgaagtcagtaccgagtggagtattgtccctggacgtggagggcatcccactctggcttcccttcagccaggtggcactgttagttttgaacatcggaatctgcaagggctgaatagatctattaacggttctataacaacaagcaacttcttgaatcctcaggatgatcttgcattaagctagagtatgtgcatccatatctggatggtgtatactattcacgca

SEQ ID NO: 1225 - DNA, 265 bp, Glycine max
  Clone ID: 700954843H1
gccgttttggtaacatccattcggaacttccgttcaaacagaggacccgtttcggggattctgaaaggctttgtagggttgagcactgcgatattcactactctctgttccgctctcttcgccgacgatcctggctccttcctcatcatgctctctgtcattcccttcgcagtttgcctcaccggtgtgtttttcctccgggagattcctcccgtgcctccgccgacgccgacgccgaggaggtaaagtatttcggcgtcttcaa

SEQ ID NO: 1226 - DNA, 267 bp, Glycine max
  Clone ID: 700954845H1
cggattcgcatcgtgattctaacgttaacttccatttccattttctttgctgcgatgcgaatatgcttcctccaatccgtccttctacaaatgctatctgctgacagatactgagtaccgatctattttctctcctttttcacaatttctcaagttaccattagaaggaagccatggaatctgagagagaaagttttgacctctcaggacctttgctctaacttatgtcttatgggacaatgcatatcatcgaatgtcagttgctgc

SEQ ID NO: 1227 - DNA, 269 bp, Glycine max
  Clone ID: 700954848H1
attaggggacaatttgtcagacgaatagtgtctgaaggcaaagaagaaaaagataaacaaagtgacaacctggttcctggggataattctatcgacattcctcaatagcaccagacaaagtggtgatcattatttgactgattccgttccattaactgcctctagcttcttgctagcagaccagcttttcacacgttcacctaggaaggagcttggaggttgtgttagaggaatctgtgattaggtagtttaattttatctctattgtg

SEQ ID NO: 1228 - DNA, 262 bp, Glycine max
  Clone ID: 700954876H1
cttcctcagccacacttgtagaagcaaaggggaaaaaaactaaggaaaggaacatagcattgctcttaatatcctaactcctagattcccatctctggcttctcaccttgcataatggctacaaaagtgaaacgcaagactttttcaattgctgcagcaacatggatggtcttgtgtatcatcactatgatctgcaatgtcagtttagcagaagaattttgaaagaaaaagaattaggaaatgatgttccgaaagagagaca

SEQ ID NO: 1229 - DNA, 258 bp, Glycine max
  Clone ID: 700954890H1
aacaagaacataagggaaccacagcggcggtaacagaagaacaagcagagaatgggtcgagtgagaacgaagacggtgaagaaatcctctcggcaggtgatagagcgtcactactcgcgcatgaccctggacttccacacgaacaagaagcttctggaggaagtggcgataatcccgtcgaagaggctaaggaacaagatcgcggggtctcgacgcacctgatgaagcgcatccagaagggccctgtgcgcggcatct

SEQ ID NO: 1230 - DNA, 247 bp, Glycine max
  Clone ID: 700954986H1
gcctcgtccctgccatgagaacccttcactcagccctcctagccgagggcataaccgacattaaggtaaccactgctcactctctggcgataatgcggtcatcgataccaccaagtatgggcaggttcaggcccgggtacgcaaagcacgtgttgggcccaatgctgaagtttctgagggagacgagaacacccttgatggtgaacccgtacccgtacttcggttacaacgggaaaaacgtgaactt

SEQ ID NO: 1231 - DNA, 247 bp, Glycine max
  Clone ID: 700954990H1
catgatttgggtcctaggaatgtacttgtcaagggtggtgacctccctaattcgttagatgctattgatgtattctttgatggtgaggagttctacgagctgtgttcaccgcgtgtaaatactcgcaatagtcatggtactggttgtaccttggcatcatgcatagcagcagagctggcaaagggttcatcaatgctttctgcagttaagacagctaaacattttattgaggctgccttggattata

SEQ ID NO: 1232 - DNA, 266 bp, Glycine max
  Clone ID: 700955001H1
gcacagcaacacctgaaaaaggaagggttagtgagtgtgtgtgtggaaattgtcatcgctcgcaagagcaacaacaactagtacttaaagagacagagagtgtgcacatcaatgtctgctcaggtcggtgtcaggacacgagcccaagccgcattagccatggaagctgttagttctgctgaaccatcatccaagagaaagaagatcagcaacagtactaaccaagagccaaaactctccaagactccgagaacgagttcttcctc

SEQ ID NO: 1233 - DNA, 261 bp, Glycine max
  Clone ID: 700955003H1
ctaatttatcgaaaggtagggttttgcagagcctcctcctccgttaccagtttcttcttctttatcctctctcctttcttcttccattcctctaacctaagatgggcaagtcaagcaagaaatcagctatcaaggttgacgctgctccagctgtggttccgccatccaagtctgccaagaagggaggcaagcgacaagctcaagatgaaattgagaagcaagtgagtgccaaaaaacagaagatagaggaggttgctcaga

SEQ ID NO: 1234 - DNA, 257 bp, Glycine max
  Clone ID: 700955006H1
aaaagacacagactaggcgctgcccaaaattgctctgccactcttaacggcaaccacaagctcactgatgctgttcttcctcccacgaaagactggaggaaagaaggaatagtgagtgatgttaaagatcaaggcagctgcggatcatgctggacattcagcacaactggggctttagaagcagcctatgcacaagcatttgggaagagtatctctctttctgagcagcagctagtggattgtgctggccgtttcaa

SEQ ID NO: 1235 - DNA, 257 bp, Glycine max
  Clone ID: 700955008H1
cctctaccgcctctaagtcctacaagaacccatcccctccccagccgctcccaaaatctcactcttcttactcttcttcctccaagagaagtaaacaaccctcacattcaccacagcagcacacacagacaaagacaaccttgtttgtctccaatcaaaacctttcaagctggcgttcgaaaaccaagacaaccctgtccgagaaatcaagcccaagaataggagaatcatgggtgctggaggccctgatgatgagg

SEQ ID NO: 1236 - DNA, 254 bp, Glycine max
  Clone ID: 700955011H1
agcttgcataataatttcgtacacttcttctcttcttttctctaactttctttcttaaatcaaacaaaacataaatgaatagggtgaaaccaagtaacctaagacaatgagggagggaatggtcacgtggaaacaattgaagttactgtacgatagggctgctcctcagtcctcattattattcgtttccaactttcaactacctcatttacactagcaactcctttcttcactataaaattctcaacttggtt

SEQ ID NO: 1237 - DNA, 253 bp, Glycine max
  Clone ID: 700955012H1
ttctctattgctcccatccctttcgtttcatacacttttcaaagggcgcttcttcctcatagctggcaaaatggcaaatgcagcgtctggaatggctgtgcatgatgactgcaaactgaggttccaggagcttaaagcaaagcgagtctaccgcttcattacattcaaaattgagcaacaacaagttgtggtcgacaaaataggggaatctacggaaagctatgatgattttcaggccagtttgccagctgat

SEQ ID NO: 1238 - DNA, 255 bp, Glycine max
  Clone ID: 700955022H1
ctggacccagacccagttcctttgttcaacacgttacaataatggcccatttttctctctcccctctctcctgtgcaccttctcctctaccaccacgccgccgaatctttctctctcctcctcgagccgccgcatcttccgccaccgacgtcgtttccacttccacttccacttcatcttctgcttcgaatttcgcgcccaaagtcgttgtcaccagagagcgcggcaagaacgccaagcttatcgctgctctgg

SEQ ID NO: 1239 - DNA, 254 bp, Glycine max
  Clone ID: 700955024H1
ttttgcgatcgcctttccttttatggattaccgttattttattttttatttttatattcctacaaaatttacctttccgccgtgggaaagaatcatgagttgtttcagctgttgcgaagaggatgacctccataaggctgctgaaagtggaggaccctatgttgtaaaaaatccagcagggaatgatggaaattatcatgcttctcaaactgcaaagcagggcactcagcctgttaaacctcagcccattgaag

SEQ ID NO: 1240 - DNA, 253 bp, Glycine max
  Clone ID: 700955025H1
attttataagttgccaaaatggaaacaaaacaaactcaaaatggcagttcagttgttctgagttaaattacacttcaccttctgtctcctccgtgcattttaagttgcagttagagggaactttggttatcgtcaaagtttacatattttttccttgacattgttatctgtgttttatatctcagggagcttgctatctgttttgcagtaagaaactgaacatatggaagtgaaaggggacagcatgagcgtt

SEQ ID NO: 1241 - DNA, 252 bp, Glycine max
  Clone ID: 700955026H1
acgacatgcttcctctttcccttctcaagactgcccaaggccaccctatgttggtggaactgaaaaatggggagacatataacgggcatttggttaattgcgacacatggatgaacatccatctgcgagaagtcatttgtacatctaaagacggagatagattttggaggatgcctgaatgctacatacgaggcaatacaatcaagtaccttcgagtacctgatgaggttattgataaagttcaagaagaaa

SEQ ID NO: 1242 - DNA, 252 bp, Glycine max
  Clone ID: 700955030H1
gctgctaataactatggcatcaacgacgaatacgctcaggcactccccgcccgctgcaatgtcagcgtcccttacaagatcagccgatccaccaactgcgactccatcaagttctaaaggagcgggtagctttgccaatttcttccgcgggataatgaggcaacgtatgctgtaacacttgttatcgttatcattaaaataaaagaaagcgagtgtgactcgggttccactcatgtgagcctgttattgtat

SEQ ID NO: 1243 - DNA, 261 bp, Glycine max
  Clone ID: 700955033H1
gctatgggaaagtcttacccaactgtgagtgctgattaccagaaggccgttgagaaggcgaagaagaagctcagaggcttcatcgctgagaagagatgcgctcctctaatgctccgtttggcatggcactctgctggaacctttgacaagggcacgaagaccggtggacccttcggaaccatcaagcaccctgccgaactggctcacagcgctaacaacggtcttgacatcgctgttaggcttttggagccactcaaggcg

SEQ ID NO: 1244 - DNA, 254 bp, Glycine max
  Clone ID: 700955037H1
tgagaaaatgccatacctacacgctgtggtgaaggagcttctaagaaagcaccctccaacacactttgtgctaacacatgctgtgactgagcccaccactttgggagggtatgacataccaattgatgcaaatgttgaggtgtacacaccagccattgctgaggaccccaaaaattggttaaaccctgagaagtttgaccctgagagattcatctctgggggtgaggaagcagacataactggggtcacagggg

SEQ ID NO: 1245 - DNA, 132 bp, Glycine max
  Clone ID: 700955042H1
agggaacaaaggctttgaatttgattgcagttgagttagctttcactttcagtgtgagatcttcgtctcttctcttgcttccttcttcaattcatctccgaaccgcgtttctatttttgactctctctctct

SEQ ID NO: 1246 - DNA, 248 bp, Glycine max
  Clone ID: 700955044H1
caagatcggaatcaacggatttggaagaattggccgtttggtagccagagtggctctgcagagagacgatgttgaactcgttgccgttaacgaccctttcatcaccaccgattacatgacatacatgtttaaatacgacagtgttcatggacactggaagcatcacgatgtcaccgttaaggacgagaagacccttctcttcggtgacaagccagtcactatttttggacacagaaaccctgaagaga

SEQ ID NO: 1247 - DNA, 251 bp, Glycine max
  Clone ID: 700955045H1
attaaatccaataaaaattctaaaagaaaagaaaaaaggaaaaacagccggcgacaaggcattgggggtctccactctgcagcttccactctctaaagtctaaagtcttccaaatcccaaaaccctagggaagatgatggcgtcttccaattcacgaaaatcagaaacttccccttctcccgccccgcaattcaccaccaccaacttcatccccatccccgccgccgcagcccctaaaaccgtcgatgacg

SEQ ID NO: 1248 - DNA, 253 bp, Glycine max
  Clone ID: 700955047H1
cagaatcaccggcagcaaaaactacgtcgatggcatcaaaacttacaacaccgctaccttcggtgtgaacgctgctaacttcatggcgatgaacatcgggttcgagaacacagcaggagctgagaagcaccaagccgttgccctgagggtaacagcagacaaggctgtattctacaactgcaacatggatgggttccaggacaccctctacacacaatcccagcgtcagttctaccgcgactgcaccgtcacg

SEQ ID NO: 1249 - DNA, 256 bp, Glycine max
  Clone ID: 700955049H1
gctagtctcagttcagttagcacaccaacaccacatccataggttcatttcaatatggcaatcttgtcaagttttgctcctttgaccattcttagtttagtcttgttagtggttggaatcattgtgtctggggttgaagctaggccaagagcattctttgtgtttggagattcacttgttgacaatggaaataacaattacttggccaccacggcacgtgccgatgctcctccttatgggattgattaccctccaa

SEQ ID NO: 1250 - DNA, 248 bp, Glycine max
  Clone ID: 700955059H1
attttagaagaataccccctcttttgctgcatcagaggagttgtaaattaagagcatggctgcacaagctcttgtatcatcatcttctcttaccttctcagcggaggctgcaagacaaagtcttggaccaagatcactccaatctccatttggcttctccagaaaagcctcctttcttgttaaggcagctgctaccccccctgtcaagcaaggatcagacagacctttgtggtttgcatcaaagcaaa

SEQ ID NO: 1251 - DNA, 248 bp, Glycine max
  Clone ID: 700955062H1
ttcgccagttaatagaaactcaactttgagtagataatactgctggatgtctcgtctctaattattgtatttggaaaatagttttgagttgaggatctaatcattaccagatttaatatacttggcaaatggggtctgaaggtcctacgacaccgacaacaacaattcatgtgacaggatttaagaaattccatggagtttcagagaatccaacagaaacaattgccaataatttgacggagtacatg

SEQ ID NO: 1252 - DNA, 248 bp, Glycine max
  Clone ID: 700955070H1
cactgctttctttaagtgccatggacatgagcaatttgagatgacgggtttggatcctgagtataataggttgttcaatgagggcatggtgtgcactgctagggttgtgtccaaggctgtgatcactggctacaaagatgggttcaaccagattaagtccttggttgatgttggaggtggcattggagggtctctttcggagattgttagggcttatcctcatatcaatgccatcaactttgacttgc

SEQ ID NO: 1253 - DNA, 244 bp, Glycine max
  Clone ID: 700955076H1
atcaaatacctcaatggtggttctgagattcagcttcatcttgataaatacacaggtactggcttccaatcaaaagggtcctacttgtttggtcacttcagcatgtacataaaattggttgctggtgattcagctggcacagtcactgctttctatttatcatccacaaactcagaacatgatgaaatagactttgagttcttgggaaacagaaccgggcaaccttatattttgcaaacaaatg

SEQ ID NO: 1254 - DNA, 246 bp, Glycine max
  Clone ID: 700955077H1
gcaaaagctaggtgttgcatcagaaatattccatctttggttccatttgcttcaacaagttaagaagagtggaatgcgtactaattttaaaagggaacatgaaaagaaagtatgctgccttggtttaacatcattactggcactcccagctgatcaattgccagcggaggctttaggtcgggtgttccgggccaatcttgatcttctagttgcctacaaggaacaagttgcagaggctgcaaaaga

SEQ ID NO: 1255 - DNA, 246 bp, Glycine max
  Clone ID: 700955087H1
cactctgaaccaaataccatagtcttctctttgtctgagaaaatagttccccccaaaaataaaatgaacaagggtctctcctttgtgctgctgattcttctgatccactacaacaacgttgtcaacgccaacaacaaaaactgtgtcacagaggattgcctcatcggcaacaatgatttggaatcagaattctacttcggttcccatgtggccagaatgctctacgatgtgagccaatctgtgtct

SEQ ID NO: 1256 - DNA, 243 bp, Glycine max
  unsure (1)..(243): unsure at all n locations
  Clone ID: 700955092H1
cgtgtcaatttctaaatccaccaccacaccctctcttctattctctattattattatctccacacccttcactctctctcactcttctctcgaatcttccaccgcaatggccaccgctgccgagaaactctccgctctcaaatccgccgtcgccggattgaacgaaatcagtgagaatgagaagaacggattcatcagcctcgtcggccgctatctcagtggcgaangcagcatgtggaatgg

SEQ ID NO: 1257 - DNA, 260 bp, Glycine max
  unsure (1)..(260): unsure at all n locations
  Clone ID: 700955121H1
cttgagcnttatgttgtcccaactcccgcaactgctgcaaattcagcacatgtatatgccgctaacatgacagagaatccaaggtcactaatttgtgggtctggcagcagttcatatcccatcaaggagatgcaggttattgtgcctgatccatctaagatttttcanagttctggaatggttgantccaagtcagttggaacnttttcacctctgcaaaagcaagagagtcagaggggactttttgttgatagaggtgt

SEQ ID NO: 1258 - DNA, 244 bp, Glycine max
  Clone ID: 700955186H1
tgaagaaagacacagccattgtttgtttactttccattgattgagcgaaagtttgttttttctgcgatcattttccattgggtggaagaaagtctcaacctttagtcgaaagagcaaggatctgagtgagtgagcgatcatgtgtggtggtgcgattatctccgacttcattccagcgggtcccgccggcggggcgcacgcgtgaccgccgacatcctgtggccgaatttgaggaagcggttct

SEQ ID NO: 1259 - DNA, 246 bp, Glycine max
  Clone ID: 700955187H1
tagaagcaataagatgaaaatgaaagtgcttgttttgtttgttgctacagttttggtagcatatgaatgccatggctcagactaccagaagttccctctccaaatgaaaactgggtttggtgggcaatacagcaatgaggtggcatgtgccagttggaggcttggcgtggaagcaaacaacgtagtcaagtggcaaactgttcctgcagcttgcggagagtacatagctgactacgttctaggaga

SEQ ID NO: 1260 - DNA, 245 bp, Glycine max
  Clone ID: 700955212H1
gctttgtgacaaagcttgaaatgagaattgcttttgatatggatgttagttagcaaagatgattcaagatctgtgattctaaccaacatttgtgtaaagttgactattcatttttcagttgatggacttgatcagtgatcattgattttgttgctggttacaagtgggtctctcgaggaaaattatagtagaaaacaatgcatatgaaggaagctcagtttcatatattgagaaacatttggttt

SEQ ID NO: 1261 - DNA, 260 bp, Glycine max
  Clone ID: 700955236H1
ccatccaacatattcttcagttagctcccccaacctatacacttcaccaccacaccacaaccctaccctctctctctgtcatggtcattggaggagccttccctcgtttcgacccaatcaccaaatgtagcacccaagaccgctccaaccagactatcgcctcggacctcgatggcaccctccttgtctcccggagtgccttcccctactacttcctcgtcgccctcgaagccggcagcgtcttccgagccctccttctc

SEQ ID NO: 1262 - DNA, 255 bp, Glycine max
  Clone ID: 700955241H1
caaaacttgtacaacatgggaatgaagaacacctcaacaacgtttgcatcggccaccgttaatgtcatgccagccattacttttataatggcactgatttgcaggttagagacagtgaacttgagaaaaatacccagcgtagccaaggtagttggaacagcagtaacagtctcaggagctatggttatgactttgtacaaaggcccggctcttcagttcataaagggacaagcagcaacccaccatgaaagtggc

SEQ ID NO: 1263 - DNA, 255 bp, Glycine max
  Clone ID: 700955243H1
gaaatcaacacacacaaacacaacaacatatggaggtgctaagggtgcaaaccatagcttccaaatccaaagatgctgccatcccagccatgtttgttagggcagagacagagcaaccaggcatcacaaccgttcaaggggtgaaccttgaggtgccaattattgattttagtgacccagatgaagggaaagtggtgcatgagattttggaggcaagtagggactggggcatgttccaaattgtgaaccatgaca

SEQ ID NO: 1264 - DNA, 255 bp, Glycine max
  Clone ID: 700955254H1
gtaccattatcccagtatcttttggacccacaaactcaagcacagcaggcaaggttgttggcaactttggctcttggggatctgtttcagaatgaggctcttgctcgaacaagtgatgcagtttcagcttgtcgtgctttagtgaatgtgcttgaagagcaaccaacagaagaaatgaaagtcgtagccatatgtgctttgcagaatcttgtgatgtacagtcgatcaaataggagagcagttgcagaggctggt

SEQ ID NO: 1265 - DNA, 253 bp, Glycine max
  Clone ID: 700955257H1
ggttgagaacagcatgtgagcgggcaaagaggactctctcttccactgctcaaaccaccatagagattgattccttgtacgagggtattgacttctacacaaccattacccgtgcccgttttgaagagctaaacatggatttattcaggaagtgcatggagcccgtggagaagtgtttgcgggatgccaagatggataagagtaccgtccatgatgttgttcttgttggtggttctactaggattcccaaggt

SEQ ID NO: 1266 - DNA, 254 bp, Glycine max
  Clone ID: 700955277H1
caggaattgatcatatgatggcaatgaagatgatcaaccaagcacatgtgaggaaggggaaaataaagtctttcacttcttattgtggtggacttccatctcctgaagctgctaacaatccattagcatataaattcagttggaatcctgcaggagccatccgagctgggcgcaatcctgccacctacaaatggggtggtgaaactgtacatattgatggggacgatctttatgattcggctacaagactaagg

SEQ ID NO: 1267 - DNA, 259 bp, Glycine max
  Clone ID: 700955280H1
gcaagaatatcaaattggtctcttgtcttcctcctcatctctacactactccacatagagcccagcctctcaagcccaagcccaagcccaagcccaagcccgttcataaaatcctcctgcagcagcacccagtacccagccctctgcgtctcatccctctccgtctacgcctccagcatccaacaggaccctcaccaactggttcagacagcactctccctctccctgaaccgcacccaagccaccaaaaccttcgtgg

SEQ ID NO: 1268 - DNA, 273 bp, Glycine max
  Clone ID: 700955336H1
aagaattgcaatataacttcaaggagtatagaacaatcacttgacaattccaattcacgtctcatgttaaattataaggatgatgattccagagttgcacgcaaatcttttgatgatgttgaattcttatgcaaagatttctgtccatcttctctggatgacattgccgacatgagttggccactatgtcaagaatcagctcccacttctcactcgatgagattcactagaagtttgagtgggctttcggtcaggaggtctttagttggttca

SEQ ID NO: 1269 - DNA, 270 bp, Glycine max
  Clone ID: 700955401H1
atttcctcctctatttaacttcaaacaggaattatctgaagcatctccagtgcttgttaacaaattgatacctgaccacgtgaagcggcaaatagggctgcaatttgttcctccagcaggatcatgatgatgagctttagggggctttagtgtatactagttgataagttaaacaaaagtgacaccgttatttttgtctaaattagcatgttctgtggcctgaccagtgtagtttcaagctgaacctagactgagacttggggtgctgga

SEQ ID NO: 1270 - DNA, 266 bp, Glycine max
  Clone ID: 700955405H1
ctcctcaatcttcattgtcctgttcttcccctaggtgacacacacacgcagagatcatagcttgtgttagtgaggttagaagataaagaaagaatggcatttgcaggaacaacccagaagtgtatggcctgcgacaaaacggtttatctggttgataagttgaccgcggataaccgagtgttccacaaagcttgcttcagatgccatcactgcaaaggaaccctcaagctgagcaactacaactcttttgagggagttctttactg

SEQ ID NO: 1271 - DNA, 263 bp, Glycine max
  Clone ID: 700955421H1
gcacaatttctctctttctttttgtgtccaaaatggctcctagttctactcacaatactgggttctatgtgcttatgctagttgggatagtgattagcactatggttgctacctgtgctggtagcttctaccaagactttgatctaacatggggtggtgaccgtgctaagatattcaatggtggccagcttctatctctttcccttgacaaagtctctggctctggcttcaaatcaaagaaagaatacctatttgggaggatt

SEQ ID NO: 1272 - DNA, 259 bp, Glycine max
  Clone ID: 700955474H1
tgatagttccaaaggcattattctttctggtttccatccaaaggcatattatgtgtacaatactgtgaccaagcaaaagtatgaactcccagaacctcagcaattctataaagttctgtgcatggcattgatgttgaggaatatctggatagtgacatatgctacaaggtgatccgtgcaagatgtgaatgcaaactaaaggaacgcaacactgtctcaattgagacttactcatcaaaaagtagacaatggaagcaat

SEQ ID NO: 1273 - DNA, 259 bp, Glycine max
  Clone ID: 700955487H1
ggcccttcaagctgccctttcaacaggagttttgcagctggtaggaactgatcattgtgcctttaattccacccagaaagctcttggaattgatgacttccggaaaattcctaatggtgtcaatggtattgagaaaggatgcatttggtatgggatatcatggtggaatctggccaaatatctgtcactgactatgtccggttgacaagcactgaatgtgctagaatcttcaatatatatccaaggaaaggagctattc

SEQ ID NO: 1274 - DNA, 260 bp, Glycine max
  Clone ID: 700955489H1
gtcggtctggcctgattctgagtggcgatcattaaaggtgcaatgggatgaaccatcctcaattttgcgtcctgacagagtttcatcatgggaattggagccacttgtgtctaccactcttgcaaactcgcgccaacccaaagaaacaagagggcacggcctctcattctaccttctacaatgcccgattcttctttgcaaggcatatggaaatcatcagttgaatctacctctttctcttattgtgacccccaacaagg

SEQ ID NO: 1275 - DNA, 259 bp, Glycine max
  unsure (1)..(259): unsure at all n locations
  Clone ID: 700955490H1
ggttgcttggcggggataagattaaagattcaacaatgggcctctgcttctgctactcttctcaagtcatctcctgttcttgncaagtgcgagtgggtcaaaggccagacccttcgccaacctctcgtgagtgtaacccttcctcagcatcagctctcaccatcaaagctgcttcctatgctgacgagctcgtcaaaaccgccaaaacagtggcctcaccggggcgtggtattttggcgatggatgagtcaaatgcaac

SEQ ID NO: 1276 - DNA, 257 bp, Glycine max
  Clone ID: 700955506H1
aaattagggtttgtagtgtagcaggaacaagcagcaatggcgccgaaggtaacacgcaaggttagcagaaaccccgaattgataaggggaattggaaagtactcgaggtcgcagatgtaccacaagaggggcatttgggctatcaaggccaaaaatggtggcgttttacctcgccacgaccctaaacccaaacctgaaacacccgctgaaaaaccacccaaattttaccctgctgatgatatcaagaagccccttgt

SEQ ID NO: 1277 - DNA, 252 bp, Glycine max
  Clone ID: 700955509H1
cagtcattgacagctacagattgttgaaagaaggacaggcattaaatgatgacgaaattttccttgctagtgctcttggttggtgtattgaatggcttcaggcatattttcttgttcttgatgacattatggataactctcacacacgccgcggccagccatgctggtttagagtgcccaaggttggaatgattgcagccaatgatggagttctactaagaaaccatattccacggatccttaggaagcact

SEQ ID NO: 1278 - DNA, 133 bp, Glycine max
  Clone ID: 700955518H1
gcaggttcgtgctttcccgccgccgctatactgccaccgtctccgccagcgatggcagaagatgattcaaagcctctgaactacatctccgaagtcatactcaagaagaggaaaagcaccgaagcatgggcgt

SEQ ID NO: 1279 - DNA, 256 bp, Glycine max
  Clone ID: 700955521H1
gttgaagtccttgactacttcagcaactgctgatggaattgaggaatgccgcaaactatgtggtggccatggttacctttgcagcagtggtctccctgagttatttgcagtctacattcctacctgcacatatgaaggagacaacactgtgctgcttttacaggtggctaggcatctcatcaagactatttctcagttgggctccagaaacaagcctgttggtacaacatcttacattggacgagtggaacagctt

SEQ ID NO: 1280 - DNA, 254 bp, Glycine max
  Clone ID: 700955523H1
ctcatcctggtggttggagtggccataggtgtggtggtggccgtcaacaagaagggcgaggatcccacacttcaatctcaacaaaaatcagtaggggttatctgccaaaacactgatgaccagaagctctgccacgaaaccctaagctccgtgaagggcatggacaccgctgatccaaaggcttacatcgccaaggcggtgaaagccaccatggacagcgtgaccagggccttcaacatgagtgataggctcag

SEQ ID NO: 1281 - DNA, 249 bp, Glycine max
  Clone ID: 700955530H1
tcaaatcttcttattgacaatgaaggaacacttaagattgctgactttggactggcttctattttcgatccaaacaataagcatcccatgactagtcgtgtagtaaccctttggtatcgacctcctgagttgcttcttggtgccacagattatggtgtgggtgtagacctctggagtgccggatgtattttaggagagttattggctgggaagccaatcatgcctggtcgtacagaggtggaacaattg

SEQ ID NO: 1282 - DNA, 123 bp, Glycine max
  Clone ID: 700955531H1
gggaatttgacaaaaaagtagccactgccccaacgatcccatttcccttgacttctctacgtgaagctccttgttttgcataggagctagttgaaatgtccgagggaaatgcagggaaaggaa

SEQ ID NO: 1283 - DNA, 254 bp, Glycine max
  Clone ID: 700955538H1
gcaatgggtgtgaactcttactccaacagcatgaagatccaagccgagatacaaatgccacccttagaaatccacaaggttcgtttgccaccagaacgcaccaccttgcagaaactcagacacagactctctgagatcttcttcccagatgatccactccacagggaatcagctatgctaagcttgcaaacttgccacctattcttggattatattccagttttgtgcccccgttgatatattccctgcttgga

SEQ ID NO: 1284 - DNA, 254 bp, Glycine max
  Clone ID: 700955539H1
atctcagaattctctaaaagagatctttttctgctctttgaagaaagaagggtctttgcttgattttggagatgtctctgctctcagatctcatcaaccttaacctctccgataccaccgagaaggtgatcgcagagtacatatggatcggtggatcaggaatggacctgaggagcaaagcaaggactctcccaggaccagttagcgacccttcagagcttcccaagtggaactatgatggttccagcacaggt

SEQ ID NO: 1285 - DNA, 249 bp, Glycine max
  Clone ID: 700955546H1
gtctcgtttacacatctctccaacctttcactttcgtttctcagttttattcgaatccctctctcaatctcctttccaaatggccagcgttgaggttgcacagcaaacaccaacaacagttccagaaaatgaaacaaccgaggtaagcaagacccaggaaacaaccccagtcactgaggctcctgcaacagaacaaccagcagctgaggttcctgcaacagaacaaccagccgctgaggctcctgcccc

SEQ ID NO: 1286 - DNA, 247 bp, Glycine max
  Clone ID: 700955561H1
ctcaaatgcagttctttttggctttggcattgttgaacaatgctctaagcatgatgaaattttaaaggtgctaatgtctgagactgctgaagcagggatagatggagggaatttatccttgttatcagacttgatgaaattgcagttgtcaggcattgatgaaacccagcaaccatcatcatctcttatctacccaactggaaaattcaacatcccaaagcattttctgtattttgttcaagattcg

SEQ ID NO: 1287 - DNA, 251 bp, Glycine max
  Clone ID: 700955570H1
gtgggacactcctattcatgttgatgcagcaagtggtggcttcattgccccatttctttacccagagcttgagtgggacttccggttaccactagtgaagagcatcaatgttagtggccacaagtatggtttggtctatgctggaatcggttgggttatctggagaagcaaggaggacttgcctgaggaactcatctttcacatcaactatcttggtgctgatcaacccaccttcacccttaacttctcca

SEQ ID NO: 1288 - DNA, 252 bp, Glycine max
  Clone ID: 700955571H1
gcacgcataagggtgccgatgaccgcagcttcaggtgtgtgtaccaagaggaagatgagcaaaaactaaagggactaaagatcagcaaagacttaattgaaattggtggtgatgctctaaaaaccaacatcaccacactaggacccttggtgctacccttttctgagcagcttctcttctttagcacccttgtgtggaggcacttatttggcagcaaaaatgatgggaattcaccctcaatgaagaagccat

SEQ ID NO: 1289 - DNA, 245 bp, Glycine max
  Clone ID: 700955576H1
gccggggagcggaggtgcggcgtcggcgcagaacgaagccatagaccggcgagagcgtctccggcgattggctctggagaccatagacctggcgaaggatccctatttcatgcgcaaccacctcggaagctacgaatgcaaactctgtctcactctccacaacaacgagggcaactacttggctcacactcagggaaagcgccaccaaaccaacttggccaaacgtgcagctcgcgaggccaagg

SEQ ID NO: 1290 - DNA, 245 bp, Glycine max
  Clone ID: 700955577H1
ttcttctcctttccttaccacagaagaatagtagcaatcagagactgaagacgagcttccccttgcgccgaagggccaccgatggttgaaaccgagatggatgcagaaactgttgcaaatgtggttccaccaaaggagactccaaatagtgtttccatttctcatcattcctcacaccctccccttaatgagaggattatttcatccatgaccaggagatctgttgctgcacacccatggcatga

SEQ ID NO: 1291 - DNA, 253 bp, Glycine max
  Clone ID: 700955585H1
gagaacacaacacaacaaactaaaacacacaccctctaagttcattaacctcttcaacatcaaaacttgtaatattttaatggcaacacgcgtgatccctccaagaatcctcaagaatcttcgttacaacacaacaaccaagcccctcaacgccgcccaaccctccatctctccggccatcgcctcaccgtcgctcttcgagaggtcgccgtcccctcctgccgcggacgtcattccggcatctgcggctggg

SEQ ID NO: 1292 - DNA, 251 bp, Glycine max
  Clone ID: 700955586H1
caaagagattgggtggatttacggctcggtcacagaagatattttgactggattcaagatgcactgcagagggtggaaatcagtatattgcatgccaaagcgaccagcattcaagggatctgccccaataaatctatcagatagattgcaccaagttctgaggtgggctcttggctctgttgaaatttttcttagtcgtcattgcccgttgtggtatggctatggaggaaaacttaagtacctacagagga

SEQ ID NO: 1293 - DNA, 250 bp, Glycine max
  Clone ID: 700955587H1
tattaacaagaaaatactatcattgggttatggggaactcagtgcagagatcgtatcagtggatgcacaagaatcttatgacgggggagtcattgtcttggtcactgggtttatgataggaaaggatgacattaagcagaaatttactcaatgttttttccttgctcctcaagagaaaggctactttgttttgaatgatgtttttagatatgttgatgaaaatggaatccaagggtctgctcatgatatt

SEQ ID NO: 1294 - DNA, 245 bp, Glycine max
  Clone ID: 700955592H1
ggtttttataaaatttcagttcatgatgatgcacagcagtggagttcctcaagtggttcttctggtccaatacacaaggtaccaagtttatcaggatttcttagatccatggaatccgtctctaagttgaagtggcctaggaatggttatagaaagctgaaagcagaggatcatcataaagaaactgatggtgaactacttccaacagctggattgaataggggcaacaatgcacgctgtgaaag

SEQ ID NO: 1295 - DNA, 261 bp, Glycine max
  Clone ID: 700955601H1
gaaggatgccacaatcgagcaacttctgcctattttcctttctcttttgaaagacgagtttcctgatgtcaggctaaatattatcagcaagcttgatcaagtgaaccaggttattggtattgatttgttatctcagtctctgttgccagccatagtagaactagctgaggatcggcactggagagttcgacttgcaatcatagaatatatacccttattggcaagccagttgggtgttagtttttttgatgataagcttgg

SEQ ID NO: 1296 - DNA, 253 bp, Glycine max
  Clone ID: 700955605H1
gtgaagagacactcagaaagatgaggttatcgttgaggcatgctttggtgtttgtgttaatcggggcgttgtggaacttgcaaagggcagagggtatccgatttgtgatagacagagacgagtgtttctcccatgatgtgaagtacgagggtgacactgttcatgtctctttcgttgttattaaggctgattctccctggcattacggcgacgaaggtgtcgatctcgtggtaaagggaccttctggcgagca

SEQ ID NO: 1297 - DNA, 254 bp, Glycine max
  Clone ID: 700955607H1
gctagctttcaaatgagaatgtttgcagaaagggctcaaaagcaacacacttcttccaatcattcccttgttgatactctgccagtgacattatcaggtccatctgaacagagaaatgactcgggcaatgcttcagcaacagctgcccatgcatggatgtctgttggggctggagggtttaaacaaggacccgataattctagttcacccaaaaataagatatctgtagaatctttgtacaactcaacaagaga

SEQ ID NO: 1298 - DNA, 257 bp, Glycine max
  Clone ID: 700955618H1
cttgaacttgaactatcgtgtcttcttggctttctctgttcaggatcaacatggatattgtatcacgagctttgctatttccgttggctatacttgtgctcatattaagcacaccttgctcaggtgcttttgggaagagtggaactaatgtgaaaacagctatttttctgtcccccaagtttgaacttggaccaggatcggtagccaataaatatgattatgacgctgattttccaagaggtcatatagcacttaag

SEQ ID NO: 1299 - DNA, 253 bp, Glycine max
  Clone ID: 700955622H1
ctatggtatgtttcaaatatctgctagcgatggcgaaactttcatatcagctgatgatttacgaataaatctttggaacctggaaattagcaatcaaagttttaatattgttgatgtaaagcctgcaaatatggaggatctgaccgaggttataacatcagcagaatttcaccctacacattgtaatacattggcatatagcagttcaaagggttcaattcgtcttgttgacttgcggcagtcagcattatgt

SEQ ID NO: 1300 - DNA, 250 bp, Glycine max
  Clone ID: 700955627H1
ccgagtttgggcgtttagatcagaaccaaatcgtgttctcttccattggcaaacatggcaactcaaatgagcaagaagagaaagtttgttgcggacggagtgttctttgccgaactgaacgaggttctgacacgtgaattggcggaggacggttactccggcgtcgaagttagggttacgccgatgcgcaccgagatcatcatcagagccaccagaacccaagccgttctaggtgagaagggaaggagaa

SEQ ID NO: 1301 - DNA, 257 bp, Glycine max
  Clone ID: 700955634H1
gaaataaatgttctttaaggatggtgaattggtgactatcgtccaagtaacaccattttcacttatccgcattggattcgaatagctttttttatccttttttttaggcctggcttattaaggtgtatgtagtatgtaccttggtccatctgagacacagtgcatgtaagaccatcactattgtgttaccccacaattctgtaatgtgggtgtgtcctacttgtaggtagcttctcaacattttccttaatcaacat

SEQ ID NO: 1302 - DNA, 143 bp, Glycine max
  Clone ID: 700955636H1
gtaccatgttatcttatcaaggatacagatgggttgtttgaccttgatctgattagagattgtatcatcatctttctttagcttgtggatgcttaagctttagttgttatggatcttggaaattatgtcaagtttagtttctt

SEQ ID NO: 1303 - DNA, 252 bp, Glycine max
  Clone ID: 700955638H1
cacaaagcacaaagcaaagctcatccttgagttaaaaaatggcagcagcttcttccatggctctctcatccccatccttggctggcaaggccgtgaagctgggcccatcagccccagaagtgggaagggtgagcatgaggaagaccgtcaccaagcaggtctcctcaggaagcccatggtacggcccagaccgagtcaagtacttgggcccattctctggcgagcccccgtcctacctaaccggtgagttcc

SEQ ID NO: 1304 - DNA, 251 bp, Glycine max
  Clone ID: 700955639H1
ttcagcttttccctcgttgaaatgaaaatgggttcttctttgtggactttgtgtctaattttggcttcactagcctcttctgcattctgtgcctttccacggaggccagtggatgttccattcggcagaaactacgttcccacttgggcttttgatcacatcaaatacttcaatggaggttctgagattcaacttcatcttgacaagtacactggtactggcttccagtccaaagggtcatacttgtttgg

SEQ ID NO: 1305 - DNA, 249 bp, Glycine max
  Clone ID: 700955642H1
ctgatatcattgttctgatgaaagacaaaagatggcagacaatgaggatggaagggataagactactcgtgggaatgaatgggaggttgtatctctgacagcatcgacatatgcagctgctcctggtcctgatgaagttgagatgaaggatgatgggaacgaagatgtatatggacaagatgaaggagaaacgtcacatgctttatttatgtctcgtcactttgtctttcctcccagtcagcatgaaaa

SEQ ID NO: 1306 - DNA, 248 bp, Glycine max
  Clone ID: 700955644H1
ctaggtttgtacagcgtttgctttgggggcgaaaaattcagccttttccgatttgcaccaaattcaacagagaacaacaccatttggtcagtcttctatgcttctgcctccaatctagggtttccttttcctgaattgttattctcttcaattgatgcggttcgatttgaaaggattgagggggttgtttgttggaattggactcaaaattagggtttgtgttttaggatcgtctcgtgtgaatcgat

SEQ ID NO: 1307 - DNA, 249 bp, Glycine max
  Clone ID: 700955645H1
aatgttatctgtgaggtcattcttgtgtggtgatgaattcaattcagtccttgcagagaatgattcagcttcagttaagagctctgaagtcacggtttcacagtccgtacatgagggcttgttaaacgatgaaggagacactgaaagtgaagaaactgtggagaatgtagcacagaacaggccaagttcaaactccaaaaagtcattgaatgaggaagaagcagctgttcttattcaatcagcatttag

SEQ ID NO: 1308 - DNA, 248 bp, Glycine max
  Clone ID: 700955646H1
caagattcgatttgagagtcttacagacaagagcaagcttgatgctcagccagagttgttcattcacattattcctgacaagaccaacaacacattgtctatcattgacagtggtattggcatgactaaggctgatttggtgaataacctcggtactattgcaaggtctgggaccaaggaattcatggaagccctggctgctggtgctgacgtgagcatgattgggcagttcggtgttggtttctact

SEQ ID NO: 1309 - DNA, 256 bp, Glycine max
  Clone ID: 700955650H1
gaggaaatgaaataattattttaattttgtaattcattgtttggttctgcttcacaggaatggtagatttgaggtgaaaaggttccacattggtcaggttccgatctcacaatggggaagtcaccaggaaaatggatcaaaactgtattgtttgggaaaaagtcatccaaatcaaatatttcaaaaggcagagagaagcttgttaatcaagaagaaggagttgtagttacctccaaggtgctagaaactggtttgg

SEQ ID NO: 1310 - DNA, 252 bp, Glycine max
  Clone ID: 700955654H1
atttatcaactcactcatcaatctcgtttgttctcactaactattacttcatcatgtcgtcgagcacagttggtcaagtcatcaaatgcaaagctgcggtttcatgggaggcagggaagccacttgtgattgaagaagtagaggtggcaccaccacaagctggtgaagtgcgtttgaagatcctctacacctctctttgccacactgatgtttacttctgggaagccaagggccaaactccattgtttcctc

SEQ ID NO: 1311 - DNA, 249 bp, Glycine max
  Clone ID: 700955655H1
gttgattcatgtcttcacgaactgctacattggccgttccgagatgtatgcttaagagagtgtcagggtctttatgatcttatggctgcagatacaagtgatgcagagtttgcaaccttgctagagttgaatggctctgatatgcattcaaaatctctggcatttgttccgctccgtgccagacatattctaaatgccatgattgattgtaagatgcctcaatctatttatacaaaggatgaaggaagt

SEQ ID NO: 1312 - DNA, 249 bp, Glycine max
  Clone ID: 700955662H1
cgccggagccacattgggcgttctgctacacaatgctccacaaggtttctcgaagtttcgccctcgtcattcagcaactcggcaccgagcttcgcaacgccgtttgcatattttatttggttctgcgagctctcgacaccgttgaggatgatactagcatagaaacagatgtcaaggtgccaatactgatagcctttcaccgtcatatttatgatcgtgattggcacttttcatgtggcacaaaggagt

SEQ ID NO: 1313 - DNA, 251 bp, Glycine max
  Clone ID: 700955668H1
taattttgacatattaactcgtgggatggaatctatcatctgttcttcactgattgagtgcactggtcaagctaagaagtcaacagatgaagagcctccaggataaaggatgctgcaggagttagtatttatgttatgctcactctggttgcattcagattaagttgcccctgttttgaattctgtttgcttttcacctattctttgatctgcaattctcggaattgtcgtcggttgaagttaaagtgcta

SEQ ID NO: 1314 - DNA, 250 bp, Glycine max
  unsure (1)..(250): unsure at all n locations
  Clone ID: 700955669H1
caactactactactataggtacttactactttgcctagctcctctttctctctcttcccttttgcactgaacttcactctctcttctatatcaagggttgatcacataacctcaatatatttctaataataattgatatagtntgagtnattgtttcgnnnnnnnnnnnnnnnnnnnnnnnnnnnnnatgggtagagggagagttgagttgaagaggatagagaacaaaatcaaccgccaagtaactttc

SEQ ID NO: 1315 - DNA, 250 bp, Glycine max
  Clone ID: 700955670H1
aagaaaaggtcaagtggggtatatgcatcactatccgagagagagagaggagagtattattcccagagaccgccaactccgctactagacaccgtcaactatcctattcatatgaaaaatctctctaccaatgtacgctgctcactctaactcaaacccatctacattataatattatataatggttatgtcaaaggattgattgatgcaggagctgaaacaactcgcagatgaactgcgttctgatgtt

SEQ ID NO: 1316 - DNA, 248 bp, Glycine max
  Clone ID: 700955671H1
cggattttgagagggatttgaagaagggtgaggctctttcgttgccgaggatcaagctctcaaggattgaccttgagtgggtccatgtcctcagcgaaggatgggccacacccctgaaaggcttcatgagagaagccgagttcctccaaacgcttcatttcaactcgctccgactcgatgatgggtcggtcgtgaacatgtcagtgcccatcgtgctggctattgatgatgcgcagaagcatcggatc

SEQ ID NO: 1317 - DNA, 247 bp, Glycine max
  Clone ID: 700955674H1
tattgcctcatgcactcatccaaataatcatgtcaatgaattggtccccatcaagaaattgtaccaagatatggaaagccgaatagaaaatgcagctaaggtgggtcaagtacccgaagaagtacgcccaaagtataaaggattttctcagtgggattcatatacttctcgacgtgaccatgacacaattcttcaaatattacttcatggaaaggactcgagtgccaaagatgtagatggaaatgtt

SEQ ID NO: 1318 - DNA, 246 bp, Glycine max
  Clone ID: 700955676H1
ctgagttgactgagtcttcgtaactcgctctctactgtctcagctactcatcgcattctctgcatttatcctccgatcacattttctctctcttcgttcgggatgtcggagaaagctcttagggatctcaatacaattcttggaactgaaaggaagaatgaggactccagtaaggcatgtttatccaagccttctgttgacaatgctgttgaaaatattgaagaatggcaaaagaaaaataatagt

SEQ ID NO: 1319 - DNA, 247 bp, Glycine max
  Clone ID: 700955690H1
ctctctcccaaactaaaaactaaaacccattttcttctccaaaaccttcgacttttctctaaccgaaacgcgcttcggaacatttcttcttcgctctctcacatcttccattgctccaactttcacgcactatcaaattccgacactactggtattggttctctccctcagatcaaaatagagttcggagaggtagcattgttactggcaatgaaaaatcttctgtaacttctattccacacttgaa

SEQ ID NO: 1320 - DNA, 250 bp, Glycine max
  Clone ID: 700955696H1
cgaactcaaaccgtttaagcttctccgagttttgacctacaacactctcgaatcccctcttgtgtgttgtagccgccccgtgaccatcaatggcggaaactgctgtcgacaaatcccaatctctcgctgaggaatattatgtgaaggataagcaaacagctgtagttgaaaaacctgttgaggtcaaagaagttgaaaacccagaggaggctgcttctgaggaacccgttgctgagaaaactgtggaaga

SEQ ID NO: 1321 - DNA, 243 bp, Glycine max
  Clone ID: 700955707H1
accgttttctccgccaccgatgccaaacgtaacgccagagactctcacgtccccattttggcacctttgcctattgggttcgcggtgttcttggttcacttggcaaccatccctatcaccggcactggtatcaaccctgctcgtagtcttggtgctgctatcatcttcaacaaggaccttggttgggatgatcactggatcttctgggtgggacctttcattggtgctgcacttgcagcactc

SEQ ID NO: 1322 - DNA, 242 bp, Glycine max
  Clone ID: 700955710H1
ccttcttccaaatttccaacttccctctgcctcttctaatggtatcgtatctttcgatggaagggtttgtaagggtttaagctcaaccaaaccctaaaccctaaatttcccaatttcttctttcgatcttccactctctccctttccatctcataaatttcgaatccatacactctcacctcatgccctcagatccaatccgcacccttttatcactgaagtgagtggcgttgttgaggtgt

SEQ ID NO: 1323 - DNA, 240 bp, Glycine max
  Clone ID: 700955714H1
caaatccaaatggccctttacattacactaataattggcctcctagtaaacaccctagtactctataaatagcatttgcatgcaccttagtcttcaccaaaatactcctcttggcatcttgtgttgtgtccctcttttaagctatttccttctcttaacacaattggttgtgccaattgccatagtcaccaaccaattaacaaaggtatatatatcatcatatcatcaccaaatgaaaaa

SEQ ID NO: 1324 - DNA, 249 bp, Glycine max
  Clone ID: 700955718H1
caactttctcacaaaacaaaactcgatttgtaactctcacaccatttccactcatatcccataagcaccaccatgactccacctaaagaaattgtgaccatcatttaccacaatggtcacattgtagatgatccagttcaaggatagatgtacacgtctatgaccccaatatttttttacgccagttgttctattacgtttatacaattcattcgaaaaattaacaatcgcctccctactcaagcaact

SEQ ID NO: 1325 - DNA, 243 bp, Glycine max
  Clone ID: 700955722H1
gcaaagatgctgctggacaagttcgtggttctccaaatgaatttgctggaataggctccacatcagcccttctttggctggctagaaggtttgcaattctatctgggcctaccattcctattattggcgagggtgatgaagaggcaaatgataggtatgtagaacaattagttgcaagtgcagaggctgctgtggaggaagttatccagcgtggggtggctgatccgaagaaaatagctgttg

SEQ ID NO: 1326 - DNA, 243 bp, Glycine max
  Clone ID: 700955724H1
ctccacttgattcagatgttgattttgatgtagagacagagaaaaaacaacaccggtttaacatgtggaagcattcatacttgaagacttgtgctgccattgatcgcgaactagagcagaatcgcaagatagattcattttacagtggaacaactgccttgtcaattgttagacagggtgaactcattatcattgcaaacgttggtgactctcgtgctgtgttagctacaacatcagatgatg

SEQ ID NO: 1327 - DNA, 242 bp, Glycine max
  Clone ID: 700955740H1
cccttctcctctcacactaattaacacactcatcaaaaaacccttctttctttcaggttcattacttgatcagtgtcaaaagggtagttgcaaattgcaatggctaagcatgatgttgagggtggttccttctcagcaaaggactaccatgatcctcctccagcacctttgattgatgctgaggaactcacacagtggtccttctacagggctttgattgctgaattcattgccacattact

SEQ ID NO: 1328 - DNA, 241 bp, Glycine max
  Clone ID: 700955741H1
taaaatcatggccaccacagccaccgaacctctcccttcctccgctgaaatgcctcctgccccgcctcctccgaagcaaccgccgcaaccggtggcggcggcgtcagcagtgaagcctgaggctccattgtccgattcgaaagcttcggcggaggcgaacgtaatagtggtcccgagctactctcgttggttctcgtgggattcgattgacgaatgcgaggtgcgtcacctccccgagttc

SEQ ID NO: 1329 - DNA, 239 bp, Glycine max
  Clone ID: 700955742H1
cttccggcgccatatcgcgtatctttctctgttctattcctacgatggagttttggggtgccgaggttaaggttggtgagtctgttaaggtagatccagccgaattcgaggcatgcatacacctttctcaggctgctcttggtgaggcaaagaaagacaaatcaaatgaaccagttgttctctacttgaaagttggtcaacagaaatttgtcttgggaaccctttccagggagaaaatt

SEQ ID NO: 1330 - DNA, 239 bp, Glycine max
  Clone ID: 700955746H1
cacttcaccaccacaccacaaccctaccctctctctctgtcatggtcattggaggagccttccctcgtttcgacccaatcaccaaatgtagcacccaagaccgctccaaccagaccatcgcctcggacctcgatggcaccctccttgtctcccggagtgccttcccctactacttcctcgtcgccctcgaagccggcagcgtcttccgagccctccttctcttaaccttcgtccccttc

SEQ ID NO: 1331 - DNA, 240 bp, Glycine max
  Clone ID: 700955747H1
atttgaatatgttgagggcccttctgtcaaagatgtgtttcttgaattcaggtcacatgttgtcaataaagagtggctggatgatattgcatcccaaattggtgatgcaattggaaagctacatgatggtggtcttattcatggtgatttaacaacatcaaatatgttactgaagagtgatacaaagcagttggttcttatcgattttggtttgagcttcacttcaactctaccagaaga

SEQ ID NO: 1332 - DNA, 242 bp, Glycine max
  Clone ID: 700955748H1
caatgcagcaagctccaaccacactcaccggattgctccatcgcgtcgccggaatattcccctcccgccgcgccgtctccgtctccggcaagttcgacctcacgcactcccgtctccaccacctcgtcgaactcgccgcctcgcgcctcctctccgccggcatcaaacccggcgatgtcgtcgccctcaccttccccaacaccgtcgagtttataataacgttcttggccgttattcgagcg

SEQ ID NO: 1333 - DNA, 242 bp, Glycine max
  Clone ID: 700955753H1
tgagatttccttgcagaagtacaaatgatggtttgggcgagaagacccaccacttcacattacttgatggtgagatggttattgatacattgccagattcacagaagcaggagagaagataccttatatatgatatgatggcaatcaaccaagtatcaataatagagcgtcccttctatgaacggtggaagatgcttgagaaagaagtgattgaacctaggaatcacgagcgacataatata

SEQ ID NO: 1334 - DNA, 242 bp, Glycine max
  Clone ID: 700955754H1
gtctcagaccctttctcaccaccatcttctttctcacactcacagtgctcaaggtttcagcatcatcctcagtgattttctacaacaagtgccagcacccagtgtggcccgggatccagcccagcgtaggaaagcccgttctggcccgcggaggcttcaagctcgccccaaaccgggcctactccctccagctccccgctctatggtccgggcgcttctggggccgccacggctgttccttc

SEQ ID NO: 1335 - DNA, 235 bp, Glycine max
  Clone ID: 700955775H1
agaaaaccctaattaatagataatagaaagagattgcatgatcgatggaaaaaccctagaagaatcatcggagcaggcaggcaagggggcacaatcgacgacgccgtagatgcttgttgcggttggagcgtcgtgggatctgaattggttcctgcaactgttgctctccgtcatcgtcgtggccgttggggttcactatttcgtcaaggccaccgcttccaagtacttcttagtc

SEQ ID NO: 1336 - DNA, 236 bp, Glycine max
  Clone ID: 700955777H1
gtatatactcactaattggacaacccttctcctacctccatggctaatttcataactttcttcattcccctagccctaaccctccttttctcctccctcgtcactgccagttaccatcaaagcatctctccaagccttctacgttctcgtgagaagctcacgcaccttcgcttctatttccatgaaatttttactagcgacaaaccctctaatctcgtgatcgacccccccaaggt

SEQ ID NO: 1337 - DNA, 241 bp, Glycine max
  Clone ID: 700955784H1
cgtttccaactaccaaaaagacgacgctgcagactctcctcgtcccgtcggaggttgtggtcggaattgcctcaaagcttgttgccttccagatgcaaagctgcctttgtatgctttcaagaaggctaatggaaaggatttggccctgcatgcatgcgccggggagcctcccctcacattcctcgactcacttcttcttggagagtgggaagatcgcatgcagagaggactttttcgctat

SEQ ID NO: 1338 - DNA, 235 bp, Glycine max
  Clone ID: 700955793H1
ctaaaaacaaagagtgtgatagtaagagtagtagaagagcggtctggtccaagtgctgcaatatgcaaggcaaagaaatggaagggttgtcgtcttcgtcggcgatcgcgcagaaaacatgggaactcgagaacaacatcatcccgatggacactccgggcggcgccgccatctcctccacaaccaccacgacaagcgccgacgactcgatcttctactacgacgaggcgggcca

SEQ ID NO: 1339 - DNA, 245 bp, Glycine max
  Clone ID: 700955808H1
cataacttcaacaacttctttcttctcgatctcacgatggctcatttggccctgtctcagatggctgtaactgttcctgttggcaacgatttgtctctcagaagatctgcagttaaggcccctaacttgaacttttgggataaatcatgggcaccagtatttactttggacttgaagccaaacaacccaagtttaagaagtcgtcatgtggtatgcatgtccgtgcaacaagcaagtgtatccaa

SEQ ID NO: 1340 - DNA, 251 bp, Glycine max
  Clone ID: 700955818H1
tgaattctccagagagaagaagaaacttaatcgatcatcacttcacttcactaatacatcatggcagacgagacccagaacaagtatgagagctctgaggttgaggtccaggatcgtggtgtttttgactttctcggtaagaaaaaggatgaagaagacaagcctcatcctcaggaggaggtcatcgccaccgagtttcaaaaagtcactgtctcagaccaaggagagaacaagcacagcctcttagaaaa

SEQ ID NO: 1341 - DNA, 248 bp, Glycine max
  Clone ID: 700955819H1
ataacacaaagcacaaagcaaagctcatccttgagttaaaaaatggcagcagcttcttccatggctctctcatccccatccttggctggcaaggccgtgaagctgggcccatcagccccagaagtgggaagggtgagcatgaggaagaccgtcaccaagcaggtctcctcaggaagcccatggtacggcccagaccgagtcaagtacttgggcccattctctggcgagcccccgtcctacctaaccgg

SEQ ID NO: 1342 - DNA, 249 bp, Glycine max
  Clone ID: 700955820H1
taaaaactcaatatcaaattctttgtcccacaaaagatggggttcactcccacaagtactgcaacatgctttctcataatagcacctctggttgtgctatggtgttggaagctactaaagtgggtgtggctgaggccaaagagattggagagagcattaagggcacagggccttcaggggaatccctacagcctcttgattggggacactaaggaaatgtacacagtgctcatgcaagctgccagatct

SEQ ID NO: 1343 - DNA, 246 bp, Glycine max
  Clone ID: 700955824H1
aaaaaaaatctcaaaataaaacaaccaaaccacacacttcacaccctcttcaacatcctcagcaagtacaagaacaagaagaaacaatgtcttgctccaatctcacaatgttggtgtcctcaaaaccttccctttccgatccctccaatctctccttccgctctgtcctcaacccttttcagctcccttcacaaaacccaacttcatgcactccttcacgctcctcaaccacccaaattcagtgtg

SEQ ID NO: 1344 - DNA, 247 bp, Glycine max
  Clone ID: 700955825H1
gccgaagctgggaaaacaagccgcaacgaaagcgattaaggagtggggtcaaccaaagtcaaagatcacacaccttgtgttctgcaccacttcaggcgtggacatgcccggagcagattaccagctcacgaagcttctcggcctgaggccctccgtgaagcgcctcatgatgtatcagcagggctgcttcgccggcggcaccgtactccgcctcgcgaaggacctcgccgagaacaacaagggtgcg

SEQ ID NO: 1345 - DNA, 80 bp, Glycine max
  Clone ID: 700955836H1
ggttctttgtttagaccaaagaaacgcatgattcactagaaacattgagtacaagctcaataattattttttttttttct

SEQ ID NO: 1346 - DNA, 242 bp, Glycine max
  Clone ID: 700955843H1
ggagttaataaggtcacatgctcccttcaggctgatcttaaggacttggctcacaagtgtgttgatgctaccaaaattgcaggctttgcccttgccacctctgctctcgttgtttctggggcaagtgctgaaggagtaccaaagcggctaacctttgacgaaatccagagcaagacctacttggaagtgaaggggacaggaacagcaaaccagtgtccaacaattgatggtggattggagtc

SEQ ID NO: 1347 - DNA, 244 bp, Glycine max
  Clone ID: 700955846H1
gttccaggacaaggttttaatcagaatgcagtgagttttaattctttgcattcttcaagctgccaagcagttggacaaagtcaagtagcagttcccattctaccttcaaagggtggaattgttgatggtatgctgaaacaggaagtctccactgagaaaaagtacactgctgaaccaaatatcatggatgctggcttatcacaagttagttcaagaaatcctcctccaaccgcgaacgtggtag

SEQ ID NO: 1348 - DNA, 243 bp, Glycine max
  Clone ID: 700955855H1
agagtgttgtgttgctagtgcaagaggcaccaacatagatagatacatacgtgcgtgcgtacgtaggaagggtacgtacgcggtagtacacaacacaccaacacaccgttttgcactctgttctgatcatgagggcgcacaagatgggtgttatcgtggggatcactgttgctactgcttctgcttcttaagccttttcttttcttctgtgggttccccctctttcgatattctgcactttag

SEQ ID NO: 1349 - DNA, 244 bp, Glycine max
  Clone ID: 700955857H1
caaaaggccttctttcctcatttcggacgcacgctccccatccatgtctacttgtgtaaaatcccgaggtgtgaaaataatggaccacctttggtgaagtggacacatatataattgataagaatacttaatctctctctctatgtgttttttgggtacagatgtttgtattgttggtgttgcacggacgccaataggtggtttacttggcaccctatcatctctttctgccacagagttaggc

SEQ ID NO: 1350 - DNA, 244 bp, Glycine max
  Clone ID: 700955859H1
ctctccttgaaaacagaggagaagaggaagaagcagaggaagagagaagaacaaacgaagcatggtttcgacgagacgcagtggatctctctctgccaaaagatcttcctcctcggaagataaatctccttcgccgaagcgccaaaaggtcgacaatggcggttcgtcggagaaatcggtgccgacgccggcggagaattccaaggatttatcttccccggagcccgtgcctgatcccggagaa

SEQ ID NO: 1351 - DNA, 244 bp, Glycine max
  Clone ID: 700955861H1
gcatcttctcctgaaatcattgactttaactaagttcttgcatagaacctttatgtgtgtgaagcatgaactaatgagaaacgaattagcaaacagtcaaacactaatatccagacatagcttttcattattaaagatagcgtggtatctttggcggcctgagcagaatgattattgttccaattggggcttagcattttttttcttttcaggcttctaaccccacctgggactccccttttcc

SEQ ID NO: 1352 - DNA, 248 bp, Glycine max
  Clone ID: 700955864H1
ctctgggaagtccactaccactggccacctgatctacaagcttggaggcattgacaagcgtgttattgagagatttgagaaggaagctgctgagatgaacaagaggtctttcaagtatgcctgggtgcttgataagcttaaggctgagcgtgaaagaggaatcacaattgatattgccttgtggaagtttgaaaccaccaagtactattgcacagtcattgatgcccctggacacagggatttcatca

SEQ ID NO: 1353 - DNA, 245 bp, Glycine max
  Clone ID: 700955867H1
tggttgtacagcaatattgaagccatctgaattggcatctgtgacctgtttggagctggctgaaatatgcagagaagttggccttcctccaggggtattaaacattgttactggattaggcaatgaagctggtgctcctttgtcatctcatcctgacgtagacaagatttcctttactggaagctctgcaactggaagcaggattatgacagctgcagcacagctaacgaagcctgtttctctag

SEQ ID NO: 1354 - DNA, 245 bp, Glycine max
  Clone ID: 700955869H1
aacacggtcccgctccctctccatcccatcacaaagaaaacagagattcgcattattagcagatcggactcaaccgatgaagttgaagccgcagtgaaacaaaccagaataattgacgcatcatcaattagatcgagctgctagaaatgaaggatgaggacgggcttccgacgaccgccgccacgaagaaggaaagcatggattcgagtctgtttgggaaagggaggtacaaattctgggcgtta

SEQ ID NO: 1355 - DNA, 242 bp, Glycine max
  Clone ID: 700955876H1
ttcggttccgaagggacaaccaacgaccaccctctcttctgactcacttctcgaaccttccaaacatggaacgcatcgttggcggcaagtacaagctcggccgcaagatcggaagtggatccttcggcgaaatctacctcgcgacgcatattaataccttcgagatcgtcgccgtcaagatcgagaatagtaaaacaaaacatccacaactgctttacgaggcaaagctatacaatattctt

SEQ ID NO: 1356 - DNA, 243 bp, Glycine max
  Clone ID: 700955891H1
acgaaacagatagctgcttctttctctcacgcaaccgtcgtcgttcatcaatggctacactcaacctctcttcgttgcaagctctcgccttccatcgtttatcctcttcttttccccaaagtacccctaccctttccttcaatttccaaccaaaacccttcgctaacccgcgcccaatttctctgaaaccctacgtttccgagaaacctcgcgcgcgcgtggtggcgctggccgtgaagagcc

SEQ ID NO: 1357 - DNA, 243 bp, Glycine max
  Clone ID: 700955893H1
ggaactccttaagcagcttcagagtctgagaagtgagaagcggaagaagaagcgatgcgtttttgcccgtgttttggatccgaggaggccaagggggtggcggatcgcgacccggtcctgctggtttcgggcatgggcggctccattgtcaattccaagcccaagaaattcgggttcaccactcgggtttgggtcagactcctcctcgctgacgtcgagttccgaaacaagatttggtccctt

SEQ ID NO: 1358 - DNA, 243 bp, Glycine max
  Clone ID: 700955894H1
tggggtttcacacgtgcgcaatttgaaggtattattggaggagagagtgtaaatgaagaaaccaacaaccgacgcaattagtatggggaaaaggagcctggagggtggagaagatgaccagcctgaacgaaagaggcctgctcttgccagtgtaattgtggaagctctgaaggtggacagtttgcagaagctttgctcatctttagaacccattcttcgtagagttgtcagtgaagaagtgga

SEQ ID NO: 1359 - DNA, 245 bp, Glycine max
  Clone ID: 700955895H1
ctccaatccaaccaaattcaactacctgtacagtttggtacaagtagaggttgaaactaaaacggctaagtcatcatccagttgtaccaatggacttctttggcttacaaggtaaagaacaccaagcaactaccatttaacatgtaattcatactgttatggcattccaaaatttgttattttagagaactatttccttaatttgtaatgttccaagcccagagtctgttgtccatgagtaaaca

SEQ ID NO: 1360 - DNA, 260 bp, Glycine max
  Clone ID: 700955910H1
agccccgagaggagcttaccagaatgctttatcgggtaagtttgttccagcgttggaaacgtgcgctcggattaaaataaccgacccgaacccgaaatgggatatggaaacaatgcccggtgctagagtcatgagtgacatggttttactcccgaacggcgacgttttgattgttaatggagcagccgtagggactgcgggctgggaattgggccgtaacccgctactgagtccgtttctttataaaccaaataatcggg

SEQ ID NO: 1361 - DNA, 255 bp, Glycine max
  Clone ID: 700955929H1
gaagagcgtcgcagttgtaaccctaatcagaagaagcgcagttcaagcgagtgacagccaccagccatgggtcgtatgcacagccgcggtaagggtatatcctcttctgctttgccctacaaaaggacacctcctagctggctcaagatctcttcgcaagatgtcgaagaaaatatctgcaagtttgcgaagaaaggtttgaccccgtctcagattggtgtcattctcagagattctcacggtattgctcaggtc

SEQ ID NO: 1362 - DNA, 254 bp, Glycine max
  Clone ID: 700955930H1
gccaaattttaggtacacttacaagttggggcatatgctgtctaacggttcttatgtatggagtaagaagtattcattcaaggcatccccatatcctggacagaactctttgcaacgtgttatcatatttggtgacatgggaaaggctgagcgtgatggttcaaatgaatatgctgattatcaaccgggttctctaaacaccacagaccaactcgtcaaggatttagaaaattatgacattgttttccacatag

SEQ ID NO: 1363 - DNA, 257 bp, Glycine max
  Clone ID: 700955931H1
ctttgcgcagttccctacctctcctttcaagatgcagatcttcgtcaagaccctcaccggaaagaccatcacccttgaggtggaaagctctgacaccatcgacaacgtcaaggccaagatccaggacaaggaaggaattcccccggatcagcaacgtctcatcttcgccggaaagcagctcgaggacggccgtaccctcgccgactacaacatccagaaggagtcaacccttcaccttgtccttcgtctccgtggtg

SEQ ID NO: 1364 - DNA, 266 bp, Glycine max
  Clone ID: 700955934H1
cttttggagtgtgtgtgcacccattgatgacaagcaaccccattgcatggaagcctaagaggaggagaagacgaagaggacaagggtaactgaatcgccgcttctgcagcttcgttctttcgtttttgtttcatctttttagcttcagagggtaaataaaaaatggaggttttggtgggtcccgctttcaccatcgacgttccctcgtctccgccgcagcatgccggttccgatgatcggatctttcttaacgtgtcacccgaaga

SEQ ID NO: 1365 - DNA, 260 bp, Glycine max
  Clone ID: 700955940H1
gaaagaatcccaggcgaggagaaagatggaggggaaggagcaggatgtgtcgttgggagcgaacaagttccccgagagacagccgattgggacggcggcgcagagccaagacgacggcaaggactaccaggagccggcgccggcgccgctggttgacccgacggagtttacgtcatggtcgttttacagagcagggatagcagagtttgtggccacttttctgtttctctacatcaccgtcttaaccgttatgggagtcg

SEQ ID NO: 1366 - DNA, 256 bp, Glycine max
  Clone ID: 700955943H1
aaaatatattcaattttgcgtttctctgcctaaaaggattgaaagatgggtcaagcattcggttgctaccaagtcgatcagtcaaatgtggctatcaaggagcattttggaaaatttgatgatgtcctagagcctggatgtcactgcctgccttggtgtcttgggtaccagattgctggtagtctgtcgctgcgagtgcagcaacttgatgttcgatgtgagacgaaaaccaaggacaatgtctttgtcaatgtgg

SEQ ID NO: 1367 - DNA, 253 bp, Glycine max
  Clone ID: 700955946H1
gaagaaaggtattggagcgaatgaattgctgtcccatctttcagcacatcctgcacctgctcaagaaaagatgagtgctctggttgaagctctattcgagggaactgagaaaggttttgctaaagaagctgataagaagaagaactactttgctgctgctgttgccgaagagggatcccagctgttattgcttcatgctattgaagaattttcttgcaagtctacttccaatgctttgaaggaggttgccctg

SEQ ID NO: 1368 - DNA, 164 bp, Glycine max
  Clone ID: 700955954H1
caaatgacacatttatgtttttcttactgccatatttatgttttgtttttcaatagttgactcttgatatctgctctcttattttcatgaacatatagaacaattgcctgcccataattgtatatagttgcaaataaaaatataacaccttgttagtttgacat

SEQ ID NO: 1369 - DNA, 257 bp, Glycine max
  Clone ID: 700955958H1
ggcaattttctgcatcaagtatggaagcaatttatgaggcattaatttatagtaacatataacaatcaactttggttcatcaagctctatccaaattcaatcaccaaatttaatcctctccctattatgtaagtactttatataccaaattgaatttggtttgttcaaatttgtcaacaagttaggatcaaggtgaacttctgcatccttttgctactatgtttgaaaagttgataccaaattgaatttcgtttgtt

SEQ ID NO: 1370 - DNA, 254 bp, Glycine max
  Clone ID: 700955960H1
ttttatttacaacaacaatggcttctgtgcctcaaccaaaaatctcccttctaaccttattcttcttctcgtccttcaccatcattgcgcatgcaattgttcctcaaaacgaaaccttcaaatttgagaactcaggtgaacttggaccctacatcgttgagtacggtgcagattacagaatgataagcatcttcaactctccattccaagttggtttctacaacaccaccccaaatgccttcactctagctttg

SEQ ID NO: 1371 - DNA, 252 bp, Glycine max
  Clone ID: 700955961H1
gatctatgggatgatgagaagaagaaggcgcagtttcattggacattcatattctcaaaccttattgtgcaatgggctcagtggttagcaaatttggtattaggatctggatctattcttgggcgtcttttatcttttccttctgctgcactaaatatgcaaaacaataggatgtttcctccatctctaagccctctgcaggaagaaagactaagaaatctacgacaacggcttgaagttccctttgatggt

SEQ ID NO: 1372 - DNA, 251 bp, Glycine max
  Clone ID: 700955962H1
cggcaaccttcccgatgccttccatattgccgagactaccaaaatcttcctcccagctcttcgagactgcaacaggttaaccatttcggagccatttcctgagtgggagagcgagttgatgccttcagggagaacaatgggagaccttttggtcctccccaatggggacctcttgctcatcaatggtgcaaccatgggtacggctgcatggtgggatgctgacttgcctaactacacgcccgtgttgtaca

SEQ ID NO: 1373 - DNA, 254 bp, Glycine max
  Clone ID: 700955963H1
gcagaaagcaagctcatcctagagttttaaaaatggcagcagcctcctccatggctctctcttccccatccttggctggcaaggccgtgaagctgggcccatcagcccccgaagtcgggagggtcagcatgaggaagaccgtcaccaagcaggcctcctccggaagcccatggtacggcccagaccgcgtcaagtacttgggcccattctctggcgagcccccgtcctacctcactggcgagttcccaggtgac

SEQ ID NO: 1374 - DNA, 255 bp, Glycine max
  Clone ID: 700955973H1
taatgaataatgttggtctatagtgcgcacacatgctgatgctgtagattgacgaagaagcagttggccaaccgcgataatctctacatattaatataatctttctcgtcacctgagagaaatagaaaatgtggagtcgcgcaagaacccttttccttcgcgtcctggtaatcttctattctcctttctccctctctctccatctctgactttggatattgtttcttctcgactccaggaacctcctaatcacaa

SEQ ID NO: 1375 - DNA, 252 bp, Glycine max
  Clone ID: 700955979H1
tgccaaggcaatgacattccagaacactgccggtgctgagggacaccaagccgttgcattcaggaaccaaggagacatgtccgctctcgttggttgccacatcttgggttaccaagacaccttgtacgtccagaccaacaggcaattctaccgcaactgcgtcatctccggcacagtcgacttcatcttcggcacctcctccaccgtgatccagcactccgttatcatcgtgaggaagcccctggacaacca

SEQ ID NO: 1376 - DNA, 255 bp, Glycine max
  Clone ID: 700955987H1
tgatgaacttgatccatggaccgcatgggcatacaagcctcgcaccatcacattgttacttattggtgcttgctttcttatatgggcaagtggagcacttgatccagaaagagatgcatctggggatcttgttacttctgttaaaaggggtgtatgggcaatgattgctgtttttcttgcttattgcctactgcaagctccttctacggttcttattaggccacatcctgcaatttggcgcttggttcatggaat

SEQ ID NO: 1377 - DNA, 252 bp, Glycine max
  Clone ID: 700955991H1
attttatccaattgaaattttaaaaatgactgggataaacttaagaattcaattattgaaattgaataagtaaacaatttaattggattggtcgaatggtatcaaaaaaatggagtactaactcccatttcttatttattattgaattaaccgatcaacttgctttgttatcgaacatttctttttgatttcaaaaattttccggaaaaaatttgaatctatttttatatgcgaatcaatcctactacttct

SEQ ID NO: 1378 - DNA, 251 bp, Glycine max
  Clone ID: 700955992H1
ctaatgaggtctgatacggataatcactgtctgaaaaaggtgaagttggaggttcaagatgaaatcccccctcttcacactcacaagcgacccaaattggaatctccccttaagtgtggtgcaagcgatgaatccatttcaatcccaccagcttcatacaatcccttggatgagccaagccctttgggtttgcgtctcaggaagagtccctcccttttggatttgattcagatgaggctctcgcaacaaga

SEQ ID NO: 1379 - DNA, 249 bp, Glycine max
  Clone ID: 700955994H1
caacagctaacgtgcaagttccaaggcagagaaaacaataatggccaccacctcggagagggatatggagaacaagagtgatcaagaagaactgaagcatcttgggtttgtgaagattgcggcaattaaagcctttgtgtgtgtgtcgaatctctacgacttcgcaaagcaaaactcgggacctttgagatctgctgttggaaccgtggaagacactgtaaccaccgttctgggtcccgtctaccacca

SEQ ID NO: 1380 - DNA, 254 bp, Glycine max
  Clone ID: 700956008H1
atttttctcagttctcgctatcccgcaccccccaacccccgcgtatggcttcctctgcaacagacgataacccaagatctgtaaaaagagtagctgttgttggtgctggggtaagtgggcttgctgcggcttacaaattgaaatcacatggtctggatgtcactgtatttgaagctgagggaagagctggagggaggttgagaagtgtttctcaggatggtctaatttgggatgagggagctaatacaatgact

SEQ ID NO: 1381 - DNA, 253 bp, Glycine max
  Clone ID: 700956011H1
tcttcttctcttaaaagagcctttgctttttctttaggcctttccgaattaagtacttgtttcattttctctcgaagcaagaaaaatgttcatcgagagtttcaaggttgagagtcctaacgtgaagtacacagagactgagattcagtccgtgtacaactatgaaaccactgaacttgttcacgagaacaagaatggcacttatcagtgggttgtcaagcccaaaactgtcaaatatgaatttaaaaccaac

SEQ ID NO: 1382 - DNA, 158 bp, Glycine max
  Clone ID: 700956012H1
aatttctgccagcctcaaaaaagacttgctctgcctctgccactctctgagtaggactacactgccatggctgcctcagtctccactgttggagctgtcaacggagctccactgagcttgaacagctctggagctggagcttcagttcccagttcagc

SEQ ID NO: 1383 - DNA, 259 bp, Glycine max
  Clone ID: 700956018H1
caaaatcaaatcgaattggattggatacaatacaatacaaccctatataagccttcaaaacctgcgctgcgtgctgtcgtttcatttgctttactcaccgaaagtaacggagggatttccttaacccacaaactctcaaataccctctctctctcaccgaccactatgttgcagagacctagacgccgctgcgagggcactgccatgggcgccatcgttctcgatctccgtcccggtctcggaattggacccttctccc

SEQ ID NO: 1384 - DNA, 159 bp, Glycine max
  Clone ID: 700956026H1
tctcaactgcgcggtgagtgagtgagagacggaaagtgcaaagccaccgtcttctcttctcagagcttggctttgcttatcgattctctctcctctcatctttctcattcaaggtttgtaaaagatggccgatgctgaggatattcaaccccttgtttg

SEQ ID NO: 1385 - DNA, 253 bp, Glycine max
  Clone ID: 700956045H1
gtttgaaaagaaagtctccagagagtggagacaatttactcttcaacagattttctctggatgaccttaatgaagatctcttggagagggtactttcatggctaccaacttcctcattttttcgcctcacttcggtgtgcaagaggtggaaatcagctgctgcttctgtgagtttcaagcttgcctgctcacacgttccttcacgtgacccttggtttttgatggttgctccaaacctcaaccaatctattgt

SEQ ID NO: 1386 - DNA, 261 bp, Glycine max
  Clone ID: 700956048H1
caactactaaagcgatcgaagaagggaactaaaaaccaagccagtgtctcactctcaccccagaaactcattgttgtgtggcacaacaaacttcaccaatgatgaaagccctcacaagctcttgttctaaggccatggtcgagactctaggacccttctctcccagagttcccctttgtgtttctgatagacccgaattctgcttcacccttcgttccaaaaatgagaaaaagggatggaatttattgctcctgaaactgg

SEQ ID NO: 1387 - DNA, 252 bp, Glycine max
  Clone ID: 700956052H1
cttcatctattttttcttcgcccccttttgtgtttcttttttaggttgtttgttctttcttctcgttcgtcgctttgtgatctctctctgcaaccatgtccgccgagaaagagagagagacccaggtttacttggccaagcttgccgagcaggccgagagatacgaagaaatggttgagtgtatgaagaaagtagcaaaacttgatcttgatctaactgtggaagaaaggaacctcctctcagtgggataca

SEQ ID NO: 1388 - DNA, 250 bp, Glycine max
  Clone ID: 700956058H1
gttggtcaatccagtactagtagtgttataccatctgaacatttgttctgtgcatttgctgctgccaactgcccccttgaagataaatgttctcgcattcatggaaatcagtgcttatactgtagaaaattttgcttacatcctactgatcgaaaggaaaaagaaaaccatttgagaacttgtgagaaaaaggaaaaataccttcaggctttgaaagatagtcaagaagtagagtgcaatgtttgtttgg

SEQ ID NO: 1389 - DNA, 247 bp, Glycine max
  Clone ID: 700956059H1
aaagaagaaagaaacaaagatataaggaaaaagggaaaatattttgaataaggaagatataaggcaatatataaaaatattagtatttgataataattaggtgtagaaatattatggggaggggaagagtggaactcaaaaggatagagaacaagataaacaggcaggtaacgtttgcaaagaggagaaatgggctctcaagaaagcctatgagcttctgttctctgtgatgctgaggttgccctca

SEQ ID NO: 1390 - DNA, 261 bp, Glycine max
  Clone ID: 700956064H1
atttaacctagaaataaagaaaagaaaaacaaaagcaaaacggcatgtcgtgtaatgtaatgaaacgaatgaaatgataggtaggtggaggattgagagagtgcggtgttggttcaccatgaggaagtttggtgcttgaacttgaacccgaacattgcgattcagacatagagaatggccatggcccgaagagtccctcgttatgttttaggatcggtccaaaggaacatgtccttcaaatctttggatcccccttcctcc

SEQ ID NO: 1391 - DNA, 256 bp, Glycine max
  Clone ID: 700956066H1
cagcagagtgtgctcgtaatgctttgttggagaaggttgtggacaataaagcagattctgagaaattcaggtcagacttattgaacattgcatgactactttgagctccaagattctctcacaggacaaggagcattttgcaaaattagctgtggatgctgtaatgagactaaagggaagcaccaatttagaatctatccagattataaagaaacctggaggctcattaatggattcattcttagatgaaggattc

SEQ ID NO: 1392 - DNA, 250 bp, Glycine max
  Clone ID: 700956068H1
gaaacttgcagagcagcttctagacttgctatgcgagaatctgggcctggagaaagggtacctgaagaaggtgttctacggatccaagggtccaaattttgggacaaaagtgagcaactaccctccttgtcccacccctgatctgatcaagggactaagagctcacactgatgctggtggcataattctactcttccaagatgacaaggtgagtggcttgcagctcctcaaggatgaccagtggatcgat

SEQ ID NO: 1393 - DNA, 250 bp, Glycine max
  Clone ID: 700956074H1
gcaacctacaagggccaacaaattactggtgatacccctgtgccacccttttatcaaggccaagaagagagtaatctcataacagcttctttggtgggaaatgctttacccgtggctccgtctcttggctatgaacttggtcgtgatcaaattgttggaagactagtcttgaatctcaaagccaatggaaagcttcgttggaaagtgggaacatgggtctctggacgttacaggttcaatgttaattgtg

SEQ ID NO: 1394 - DNA, 258 bp, Glycine max
  Clone ID: 700956080H1
gcggaatcggagtctccaagatcctcatcatagcaggagcaggttacaccggcaccgtcctcatcaaaaacggaaaactctcggatttaatcggcgagcttcagttgctggtgaagggattggaaaaatctggggagcatgctgaaggtgaaggtgaatatgctgatgccatagctgctcaggtgcgtcgcctggcgaatgaagttcggcagctagcatcaaacaggccaatcacagtactgaatgggggttctgaac

SEQ ID NO: 1395 - DNA, 250 bp, Glycine max
  Clone ID: 700956093H1
gttctgttgcaaatgacaatcatctccctgctagtggatgtattgggtcagcatccacatcatgtctatcaggatcagtgccttctctgggcacagtaaatcctactggtccaaatgatcaagctgttaatgatgatattttaccaatgcttcatatttttaatgatgacaaatggtttgaggagatttataatcctggtcaggaaaatattgttgaaggtgcaccaccttcagatgatttttttgcggg

SEQ ID NO: 1396 - DNA, 270 bp, Glycine max
  Clone ID: 700956108H1
gtggactttatattcaacaagttttctgtcaaacccgggtcagaggaggctcagatcatgaagaatactattagtgagtgtgaagagggtggaatcaaaggagaggaaaagtactgtgccacttcgcttgaatccatggttgatttcagcacttccaagcttggaaataatgttgaggttgtgtccacagaagtggacaaggaaacgggattgcagaaatacaccgtagcaccgggagtgaagaagttatcaggggacaaggctgttgtg

SEQ ID NO: 1397 - DNA, 265 bp, Glycine max
  Clone ID: 700956127H1
cagaaacctagcaaggcaaagtattatttggaagacacaagtgagattttgagaatgttgcaaggccttgccaatgcttctgagcactctactagaacttctttgcaaccagcttctcattaagctttttttggtcagttttcttcatatgtgcacaaatttcagtgagtggttcttttctttctttagcaacaattgctcgtacaattaattgggggccgaaagctgtggacttgtggtcatataaatgttttaccgaggtggt

SEQ ID NO: 1398 - DNA, 264 bp, Glycine max
  Clone ID: 700956135H1
cagaaacctagcaaggcaaagtattatttggaagacacaagtgagattttgagaatgttgcaaggccttgccaatgcttctgagcactctactagaacttctttgcaaccagcttctcattaagctttttttggtcagttttcttcatatgtgcacaaatttcagtgagtggttcttttctttctttagcaacaattgctcgtacaattaattgggggccgaaagctgtggacttgtggtcatataaatgttttaccgaggtgg

SEQ ID NO: 1399 - DNA, 263 bp, Glycine max
  Clone ID: 700956143H1
tgccaataatatatgagcgtggattattcggtatttatcatgattggtgtgaatcattgaatacttaccctagatcatatgatcttctgcatgccgactctatattctcaacacttaaggaaaagtgcaacatactggcagtgattgcagaagttgataggatcctgagaccagaaggatatttggtcataagagacaatgttgaaactattggcgagatagagagcatggctaaatctctacactgggatattcagttgaca

SEQ ID NO: 1400 - DNA, 262 bp, Glycine max
  Clone ID: 700956151H1
ttgtgttgtgtccctcttttaagctatttccttctcttaacacaattggttgtgccaattgccatagtcaccaaccaattaacaaaggtatatatatcatcatatcatcaccaaatgaaaaatattgggttgttttttcttgtggtggtggctacttttgtggtggcagccacagctggtagcttttaccaagactttgaaataacgtggggtggtgagcgtgccaaaatctatgagaatggaaaccttctcacactctccc

SEQ ID NO: 1401 - DNA, 262 bp, Glycine max
  Clone ID: 700956152H1
gtccatatggaaaacacttggtgggaaaagaagggattttactgattcagattggttagaatctgcgtttctcttctacgatgagaacaagaaccttgtgcgtgtgaaggtcaaggattctcttgacactagaaaactagggtatgtttaccaagatgttgacattccatggttaaattctaagcccacgccgcgtaggtcaagggttcagaaggtagcattagcacaaaattttggtgttggtgcagcacatgctgctgag

SEQ ID NO: 1402 - DNA, 258 bp, Glycine max
  Clone ID: 700956161H1
ctaaacactcaactgatactcgggttgaggatcttgttagcaggatgactcttgaggagaaaattggccaaatgttgcaggttgagcgcaagtatgtatctgctgatttacttaagaagtattttattggggctgtattgagtgagggagggagtattccagctccacaggcttctgctgaaacctggattgacatggtgaatgaatttcagaagggtgccttatcaacccggctcggaattccaatgttttatggga

SEQ ID NO: 1403 - DNA, 261 bp, Glycine max
  Clone ID: 700956166H1
gtcgaaaagttcctctctctctcacacacacacatcccagccatgagcctcttcggtataggcagaaaccagagaacattccgcccgaaaaaaagtactccttctggaagtaagggagctcaacttcgaaaacatattgatgccacgttaggtagtggaaatctgagggaagcagtaaagctacctcctggggaggatttaaatgagtggctagctgtcaacactgttgatttcttcaatcaggtgaatctgctttatggt

SEQ ID NO: 1404 - DNA, 258 bp, Glycine max
  Clone ID: 700956176H1
aagcagcgttgcaacgctgtttcctttctgtttcttttcttcttccttccgacgagatctacaacgttgttgttgtttagatcttgaatagtgttttggtgttcggtgagatggaagaaaggaagcaatcacgttatgtgaagttgactaaagatcagacacctctcgaagacattacccctggcgaactcaaccagccaattcaggttcctcagttggacgttcgcaagtgccctgaatgtagacagccgctacctg

SEQ ID NO: 1405 - DNA, 256 bp, Glycine max
  Clone ID: 700956179H1
gtcgacattgaggatgattgttttgttaaattttgggggattttgcacaattgtcctcttaacccacctactagcaaaaggagaagaagcccgtgtcaagcttctaggatggatttgcgtagtctttgccactagtgtttttgcagcacctttaagcattattagggtggtaattcggacgaaaagcgtagagttccttcctttccctctttcacttctccttctgataagcgcaattatgtggctcttatacggt

SEQ ID NO: 1406 - DNA, 252 bp, Glycine max
  Clone ID: 700956227H1
gagttttatggaaaggtcaacaccaaacatgcagtacaaagcttggcgtcacgatcctgagacaggtcctactgtttactgtagtagaactgtcttcgatgatgcaactccagagttggtgagggatttcttctgggatgatgactttcgtcctaaatgggatgctatgcttgcatactgcaaagtattggaggaatgccctcgtaatgggacaatgatttctcactggattaaaaagttcccctttttttg

SEQ ID NO: 1407 - DNA, 251 bp, Glycine max
  Clone ID: 700956229H1
gttgtccgtgctcttcgagctgcctacaacaaccctgagagagctgttgaatatttgtatacaggtatccctgagcaagctgaagctccacttgtagcccgggcgcctgtaagtgctcaacctacaaatcctcctgctgatgctccacaaacagcacaacctgctgcagttacctcagctggacctaacgctaatcctttagacctttttccccagggtctccctaatgtgggttctggtgctgctggtgc

SEQ ID NO: 1408 - DNA, 250 bp, Glycine max
  Clone ID: 700956235H1
gttcccgaacatttatacatccatggcaaatccaaaccaatttcctggagtgctcttagcatgttttggtatttgtaccttattgtatgctggggctgctgtaatgggatacacaatgtttggagaagctatactgtctcagttcactctcaacatgcctaaagaattggtagccacaaatattgctgtctggactacggtggttaatccatttaccaagtatgcattgactatatctccagtggcaatg

SEQ ID NO: 1409 - DNA, 246 bp, Glycine max
  Clone ID: 700956276H1
gattgtgcagtggtgtactgcacatggagttcctcttgagccaccagaggtcacggatgcgatgggtgaagctttcccatcggcctgtccctccaaagctgcccttgaagccaacagagccacagcaacacttctcattcaacagctcgctggtgggtctcaagctgggaagactgtggctgctagggagattcggttgctcgcaaaaactggaaaggaaaatcgtgccttcattgcagaagctgg

SEQ ID NO: 1410 - DNA, 240 bp, Glycine max
  unsure (1)..(240): unsure at all n locations
  Clone ID: 700956305H1
cctcgcctagctagctccagaaaattaggatctgcttcanatctagtgtttccctgtcccaaatcacgagtccattgagtttgattttgtggatgaaaagcatagatagggcttttgcaaaactctccaatgtttcttgaaattatatgaccatgcgtcgaattcgtatgctgcactccttctccgtcgtgttcctctactggttctacgttttctcatgaactccctcttaaatccgtg

SEQ ID NO: 1411 - DNA, 238 bp, Glycine max
  unsure (1)..(238): unsure at all n locations
  Clone ID: 700956307H1
acagccaacacatgtatggtagggagttccaatcgatgttggacggactcgacgaggaagggtgtgttgaagaaccggggtatcaatctgagaagaagcgtcgtctaagtgtggatcaagtgaaggctttggagaagaactttgaggttgaaaacaagcttgaacctgagaggaaggtgaagcttgcccaagaacttgggttncaacctagacaggtagccgtatggttccaaaaccg

SEQ ID NO: 1412 - DNA, 235 bp, Glycine max
  Clone ID: 700956312H1
caaagggacaccggagtatgtgcggtcgtgttgtgaagcaagcttgaaacgccttgatgttgaatacattgatctctattatcagcacaggattgaccaaacagtacctatagaggaaacagtgggtgaacttaagaaacttgtggaagagggtaaagtgaagtatatagggttatctgaagcgagtccagatacaataagaagagcacatgcagttcatcccatcactgcttta

SEQ ID NO: 1413 - DNA, 234 bp, Glycine max
  Clone ID: 700956325H1
tatcattaaccaataaccaataaatacattaatcaccatggggaagtactttgctgttgttgctctctttgtctcagctttgtgcttctcctctatcttggctcgtaagacacctgcccttgataaattcttcgttgagggcaagatttactgtgacccttgccacttcgcatttgagtccaggctcagtttccccttggaaggtgttaaggtaagcctgcaatgtctgaggag

SEQ ID NO: 1414 - DNA, 235 bp, Glycine max
  Clone ID: 700956327H1
atttctatctatctcttgtttcaatttcaacaacggttactcctttttcgttttgagtttcaatcaagccatcatcatgtctaccgcatcgcaacccaaggccaagaaaacggcgtcgtccaagaagcccctctcccaccctcccttcgccgtgatgatagcagaggcgattgcgagtctgaaagagagaaccggttcgagccaatacgcgataaccaaatacatcgaagggaag

SEQ ID NO: 1415 - DNA, 233 bp, Glycine max
  Clone ID: 700956352H1
cgatttcatcgtgttgatgatagggtcgctctttctgttcaaagctttcgattttactttctgtgtctccttcttctgcttcttttgattcccccaaatcttcagttttaaaaaccctaatctgctgccatgaggaagaagctcgatacccgtttccctgctgctcggataaagaagataatgcaggcagatgaggatgttggaaagatagcactggctgtgcctgttttagt

SEQ ID NO: 1416 - DNA, 231 bp, Glycine max
  Clone ID: 700956359H1
ctgttttccagttgaagtctttccctagccaatggccactgatcgtttgacccgggttcacagtctccgtgagaggcttgatgaaaccctcactgccaacaggaacgaaattttggcccttctgtcaaggatcgaagctaagggcaaggggatcctgcaacaccaccaggtcattgctgagtttgaggaaatccctgaggagaacaggcagaagcttactgatggtgcctt

SEQ ID NO: 1417 - DNA, 231 bp, Glycine max
  Clone ID: 700956373H1
ggtcgattgacataacacccgaatccaagtgaaacgaaaaacactcatcatcatggattcagttgcattaaatggcaaaagcaatgataagcctcttcacgttgccatgctcccatggctggccatgggtcacatatacccttacttcgaagtcgccaagattcttgctcaaaagggtcactttgttaccttcataaacagccccaaaaacattgaccgcatgcccaaaac

SEQ ID NO: 1418 - DNA, 230 bp, Glycine max
  Clone ID: 700956375H1
atctccatttccatttcctctctctcagtttccaagaatcttaagctatgggaaagtcttacccaaccgtgagcgctgattaccagaaggccgttgagaaggcgaagaagaagctcagaggcttcatcgctgagaagagatgcgctcctctaatgctccgtttggcatggcactctgctggaacttacgacgtgagctcgaagaccggtggtcccttcggaaccataaag

SEQ ID NO: 1419 - DNA, 233 bp, Glycine max
  Clone ID: 700956378H1
cgtggctgttcatgattcaaaacctggagccactgagggtctggtgattgtgtctggagcaccagatcaaactcacgctgctcaatgcctaattcaaggtttcattttgtgtgggcagactgtagcttgagactgcaagaacaagaggcaatctaaaaattaaaatccacgcagcaaatcttgtaatagatattccattcgtgatggattaaggatttatgtcaaggttgtcg

SEQ ID NO: 1420 - DNA, 255 bp, Glycine max
  Clone ID: 700956406H1
ctcttggcatggggggaatcccctgggttataatgtctgagatatttcccattaatgtgaagggctctgctggaagtcttgtgactttggttagctggttgtgttcttggattgtatcatatgcttttaacttcctcatgagttggagttccgcgggaacctttttcatattctctagcatatgtggcttcaccattctattcgtggcaaaactagtaccagagacgaaggggcgaactctagaagaagttcaag

SEQ ID NO: 1421 - DNA, 253 bp, Glycine max
  Clone ID: 700956426H1
ctcccaagtgtgctcaccacaacaatcatcatgaaggtttcatgaatttcattcacagggatgaggaggttaattacttcccttcaaggtatgatcctgttcgtcatgcagaaacgttccccatacctcctgctatctgcagtggaaggcgtgaaaagtgtggaattgagaaggagaacaactttaagcagcccggagagagataccgatcttgggcacctgacaggcaagatagatttaatcgccgatgggt

SEQ ID NO: 1422 - DNA, 251 bp, Glycine max
  Clone ID: 700956461H1
caaggactaaaaaccaccaatcaaaaaccatgaatgctaagagagaaaagggagagtgctttgaaaatgggaaagtttagttcaagttacagtacttctgattttgttcactttggagttctacttccctttcttctgttatcacagttgttctttcaacttgcatggtgtggctccatagtaaagttccttcctggattagagggaccccttccttttgttcttgaatccgggtatgtgggagtgggtga

SEQ ID NO: 1423 - DNA, 250 bp, Glycine max
  Clone ID: 700956476H1
gagagatagagagatagaggagaagatgaacggtggtgaatcttacggtgctattgagacacaatacataaggaggcatcacaaacatgaaccaagggaaaaccagtgcacctctgcacttgttaaacacataagagctcctgttcaccttgtgtggtcactggtgagaagatttgatcaacctcagaaatataaaccatttgttagcaggtgtatcatgcaaggggatcttggcatcggaagtgttcga

SEQ ID NO: 1424 - DNA, 254 bp, Glycine max
  Clone ID: 700956479H1
gttccagtttccaaagaaccagcaggagaaaataccaagatggaaactgatgaagctcctgccaatgttgctgcacctcctagcaccaatgacaatgatgttaacatgcaagatgctaattccaaggcaactgctgatgcccctgggtccgaaaatgggacccctgaggcaggagataagcctgtgcaaatggatactgataccaaggttgaggctccaaagaaaaaagttaagaaaataaacattcctgtggt

SEQ ID NO: 1425 - DNA, 200 bp, Glycine max
  unsure (1)..(200): unsure at all n locations
  Clone ID: 700956487H1
ctctctctcaaaacaagttatggtagtatttgtcattcatttcacaaaaccggttcacntttggacccnnggcttctaaaacccctaccttattccactctcgtttcttccaccttcggcttctattgctgggactgggaatttctcaccgctctcctcctctttagttcttcttcctaattaattaaattacatacacc

SEQ ID NO: 1426 - DNA, 302 bp, Glycine max
  unsure (1)..(302): unsure at all n locations
  Clone ID: 700956492H1
aaattttgtgagtgtggacatactctgagcgtgaganagagaaggggaagaaagagagagagtgatgggaaggggaagagtggagttgaagagaattgagaacaagatcaacaggcaagtgcacctttgcaaaacgacaggcaaacggggctttcngaagaaagcttatgnagactantnccgtatgcttntgtggattgaccgaaggtntagactactacatncatactttacttcccaaatnagganggnannaggccagttgancgnagnttntttggccagacgggttttccaaagnc

SEQ ID NO: 1427 - DNA, 257 bp, Glycine max
  Clone ID: 700956557H1
tcgagctctgcgagatcttcattcgccgattttaaaagatgagtaagcttctgagtgatgctttgcgtgaagccatttcaggaatcatggccgattccaaggagaagaatcgcaaatttgtggagaccatcgaactccaaatcgggttgaaaaactacgatccacagaaggacaagcgtttcagtggctctgtcaagctgccccacatccctcgccccaagatgaaaatttgcatgcttggtgatgctcagcatgtt

SEQ ID NO: 1428 - DNA, 84 bp, Glycine max
  unsure (1)..(84): unsure at all n locations
  Clone ID: 700956561H1
gggttcggggtnanagtgcancctctaaggcaangacnaccagtacgcacgggtggcgacantggattcacacggcaaggcaag

SEQ ID NO: 1429 - DNA, 273 bp, Glycine max
  Clone ID: 700956604H1
tggccacctctgctattcagcaatcagcattcgcaggtcaaactgctctgaagcagctcaatgagttggtccgcaagaccggtggcgccggcaaaggtcgcaccaacatgcgccgtaccgtcaagagtgctcctcagagcatttggtatggccctgatcgtcccaagtacctgggtccattctcagagcagattccgtcatacctgaccggagaattccccggtgactacggatgggacactgctggactatcagctgacccggaaaccttcg

SEQ ID NO: 1430 - DNA, 270 bp, Glycine max
  Clone ID: 700956620H1
caaccctcgttgttccgtgttcaggtgaaacgacaccgttttacccttcctcttctcggcacagcatctagcaggttgtagaaaatatggccaagcatcatcctgatttgattatgtgccggaagcagccagggattgccattggacgactgtgcgagaaatgtgacggcaagtgtgtgatctgtgactcttatgtgcgtccttgtacgcttgtccgagtttgtgatgaatgcaactatggatcatttcagggtcgatgtgtcatatgcg

SEQ ID NO: 1431 - DNA, 267 bp, Glycine max
  unsure (1)..(267): unsure at all n locations
  Clone ID: 700956625H1
ctgcttttgtctcctgcctcccacatttcaccaccccctttatccntatctcctnctcttcattgttctgctcttccccttaacaaacaataactctatttaaagcacacacaaagggatcatatatcttggttgcaccttggtaaggtgagaaaatatggcatttgcaggaacaactcagaagtgcatggcttgtgacaaaacagtttatctggttgataagtcgaccgcagataaccgagtgtaccataaggcttgcttcagatg

SEQ ID NO: 1432 - DNA, 261 bp, Glycine max
  Clone ID: 700956643H1
ggcctccccatactcttcattcttcactcttcactcttcactcccaaccctagccaaacgcaaaccattcattcattcagttcagtaactcacctcaccatggccgcatccattacattgtccaggctcgtctcttccaccctcaccactgcctctttcttcccacccataaccctgccttccaaactctcctctctccgactccccacccgccgccaccccaagccactcagattctcctcctccaccatcaccgccacc

SEQ ID NO: 1433 - DNA, 271 bp, Glycine max
  Clone ID: 700956649H1
ggcttgctgcaggtgcagccttgcttgcactcttggctatcaccttctccttgttgagccctcaaaccctgttttctccgcctgagattccgggctcgaaggaccaccttcacgctgctcggttactccatgtcaccggagccgtcgggccggagagtcttgtcttcgacgctgacggcggagggccctacaccggcgtcgccgatggccggattctcaagtgggaaggggaagagcgaggttggactgaatttgctgtcaccagttccaa

SEQ ID NO: 1434 - DNA, 258 bp, Glycine max
  Clone ID: 700956658H1
caacttcaacctcaccaaaggaactaagaatttcattgaggctagagaaagtggtgatcaatatgtcaaagaatccaaaagttttctttgatattctaattggaaagatgaaagctggacgagtagtgatggagttgtttgccgatgcaaccccaaaaacagctgaaaacttcagggctctctgcactggggaaaaggggattggacgatctgggaaacctttacactacaaaggttctgtatttcatcgtattattc

SEQ ID NO: 1435 - DNA, 258 bp, Glycine max
  Clone ID: 700956688H1
ctcgtgcctctagggttatcatatctccatttccatttcctctctctcagtttccaagaatcttaagctatgggaaagtcttacccaaccgtgagcgctgattaccagaaggccgttgagaaggcgaagaagaagctcagaggcttcatcgctgagaagagatgcgctcctctaatgctccgtttggcatggcactctgctggaacttacgacgtgagctcgaagaccggtggtcccttcggaaccataaagcacccc

SEQ ID NO: 1436 - DNA, 251 bp, Glycine max
  unsure (1)..(251): unsure at all n locations
  Clone ID: 700956693H1
tttttgcaaaatcagttactatttagggtccgacttactgagatcagattctcttgttggtgacatgatgctgaaacaactgtngcatcaccaggatgccattctatgctgttcactgaagtcattgccagtgttcatatttgcaaatcaagctggccttgacatgttggaaacaaccctagttgccttacaagatatcacattggataaaatatttgatgaggctggacgcaaggcattgtgtacagact

SEQ ID NO: 1437 - DNA, 253 bp, Glycine max
  Clone ID: 700956710H1
aggaaatccaagttgggatgggaccagcaggtgagttgcgttacccttcgtacccagagcaaaatgggacatggaaattcccaggaattggtgctttccaatgctatgacaagtatatgttgagtagcttaaaagctgctgctgaagctcacggtaagcctgaatggggaagcacaggccctactgatgctggccactataacaactggccagaagacactcaatttttccgcaaagaaggtggtggatggga

SEQ ID NO: 1438 - DNA, 254 bp, Glycine max
  Clone ID: 700956713H1
atcttttatctgaattgtcaaatgcagcagcaaaagctactagtggagaaacaattgtgacgtctttgccacaatctattatgggtcgaaatgctaaagattctttggagaaggatgctttagtgaggcagatgggtgtgaatccctcgagtcagaatcctaacttgttcagtgacttgcttggctaatcttttttctaagccaattctagatcatgatgcttgaagatagattgcctagcgactttgctgctt

SEQ ID NO: 1439 - DNA, 261 bp, Glycine max
  Clone ID: 700956716H1
cacacacagaggtattttcacttctctcgctttcattttgcgatgcgtcgattaaaaattgaacaaccttcactgactcgttcagcgttgggttattgactttgatggttccaaattgtgttctgtttagagacaacaccgctaaccaaacgtctttctctcaacttcaacgtctttgctatttaaatttaaatcactgcacaacctattgcagtgtacctcattcttcgtttggttttggtttcaatttgcgtcgcacaa

SEQ ID NO: 1440 - DNA, 249 bp, Glycine max
  Clone ID: 700956722H1
ggaacaagtgacaaacctttgcatcaatgcactattttcataccgtaaattttgtgctactgtatcctcatctggacaacttattcttccggaggcattaaagcttttgcccctgtacacacttgcattaactaagagtacagggttgcgaacagaaggaaagatagatgaacggtcattttggataaactatgtatcctctatctctgctccattagcaataccacttgtgtatcctaggatgatggc

SEQ ID NO: 1441 - DNA, 256 bp, Glycine max
  Clone ID: 700956748H1
ttgcaacctagcaatggaggcgattaggaagagtaggattcttatatttggaggaactggttacatagggaagtatatggtgaaggcaagcgtcacgttaggccatccaacttttgtctacactcgccctcttgatgcacaaactccttcctctaaggcacagctttgcaaggagttcaactctatgggggtcacacttgtccatggagaacttgagcatgaccagattctggcagtgattaaacaagtagacatt

SEQ ID NO: 1442 - DNA, 244 bp, Glycine max
  Clone ID: 700956753H1
aaaatggccaaatcaatcaaattctttgagttgaacacaggggccaagattccttctcttgggttagggacttggcaagctgaacctggtgttgtagctgaagctctcaccacagccattcaggttggatacaggcatattgactgtgctagtgcgtataagaatcaagcagagattggttctgctcttaagaagctttttgatgatggtgtggtgaagcgtgaggacttatggatcacttcca

SEQ ID NO: 1443 - DNA, 245 bp, Glycine max
  Clone ID: 700956754H1
ggcttattttgccttcttggaggttttgttcaacagccacatcacttttgtattaaacttggacacaaacacctttatgcatatggttggctcccttgaatctggacttaaagggttggatacaagtatctcatcacagtgtgcatctgctgttgataatttggctgctttctatttcaacaatatcactatgggagaggctccaaatttacctgcatctgtcaatcttgctcgacatattgcag

SEQ ID NO: 1444 - DNA, 248 bp, Glycine max
  Clone ID: 700956757H1
cacaactccactcttagctgccattggtttttcttcttccatttctcttcctttctaagcttttttcgattacccatttggagattctgtcctaatggctcttgctccttccaaagtttcctccttttccgggttttctcccaaacccagtgttggggatgctctgaaaaacccaacttgctctgtttctctgagctttgcgaatgtgaaacttggaagcagaaaccttagggtttgtgcctcaactg

SEQ ID NO: 1445 - DNA, 254 bp, Glycine max
  Clone ID: 700956769H1
ctgccattattttacttgattgtttctcatactggcagacattgcttatgcgccagtttcaaagtcaactatattatataattaagttatgcttgtggctcaatcatcacatgtatctgactgataattactcaatactagtagaaattttacatttggttgtgttaaaaatgctccattggaattacaaaatgtagaaggtattgtcctggctctgagcatgatctcaatctaattctcactgcgggttttac

SEQ ID NO: 1446 - DNA, 121 bp, Glycine max
  Clone ID: 700956779H1
ctgcaattcactctgtacaattcttcgttcgttctctgcagttatatcctttttgagcttcaatggcggacgctgaaaccttcgctttccaggctgagatcaaccagcttctaagtctcat

SEQ ID NO: 1447 - DNA, 244 bp, Glycine max
  Clone ID: 700956789H1
ggagtacgctcacctatcccctggctagatgccccactattttcagatgggcagccaaggcctgtaagtagcacaaccatcacttcttcgatatcaggtggcaacaacactgcctcaaggaacccaactttccgccctaattctcagtttatgggcttgcaccacccaagaccaatgcctgccatgggagccacccatagcttcataaataggatgtacccaagcaaactatatggtcaatatg

SEQ ID NO: 1448 - DNA, 243 bp, Glycine max
  Clone ID: 700956790H1
ggaaaggataaacgaaggaagttgggccaatgaaaatggtttggcactttcctacctaaagagagagatgggtggggacgtatcgtatggccttatgaggagctacctcacctcacacaccaatagcatatgaagagagagaagaagtgaagataagcacagagagtgtcatctactcacctctactaccataaaaaaagaaaaacaaaaagccttcagagtcgactattcatcctttcttat

SEQ ID NO: 1449 - DNA, 262 bp, Glycine max
  Clone ID: 700956819H1
tacaaattctctgtgttgtgttgtgtacttgtgttaattgtgttgttgttgtaggaaatttaagtgaagagagaatgatgatgaagtctgctatgtgtgcattggtgcttgtggcactggttgtggttgaagtggggcccatggctgaggctgcggtgacttgcaacccaacacagttgactccttgtcttccggcaattaattcaggttctgcaccttcgagtgcttgttgccagaagctgaaggagcaaaagccatgctt

SEQ ID NO: 1450 - DNA, 259 bp, Glycine max
  Clone ID: 700956827H1
ctacaatcagaaccagccaagtgagtgggctttagtactctggaaccagatgcttaaacctgaagtaatggaggagtttgtggctgaatttgtggcagttttacctcttcagccttcaatgctgtttgatttagctagattctatagagctgaagttgctgccagaggggaccaatcccatttttctgtctggctcacagggggaggattgccagctgaatgggctaaatatttagggagatcattcaggtgcttactg

SEQ ID NO: 1451 - DNA, 260 bp, Glycine max
  Clone ID: 700956843H1
caaaaaaagaaagtaaaaaagaaaaccctagaggagaagaagccaaaaaaaagaagccaaaaaaaaggctccaaagatgggtttcaaaagctcttctcttctatgcctagctcttttgcttgcatgctcttcggctattcatgcctttgacatcacacaactgctaggccaatatccagagttttccacattcaacaaatacctaacggaaaccaagctcgcagacgaaatcaacagccgcaacaccatcactgtcctcg

SEQ ID NO: 1452 - DNA, 260 bp, Glycine max
  Clone ID: 700956845H1
cgctcgccttgcttcgccacacaacagcaactgcagcaatggctcccaaacgaggtggaaaggctccggctcttgccgctaagaagaagcctgagaaggtttcgaatccgttgttcgagaagcgtccaaagcagttcggaatcggaggggcgttgcctccgaagagagacttgactcggttcgtgaagtggccaaagaatgttcaaattcagaggaagaagaggattctgaagcagaggttgaaggttcctccagctttg

SEQ ID NO: 1453 - DNA, 261 bp, Glycine max
  Clone ID: 700956847H1
aaaagacaatatagggtgtggagcaattacgtttgatcacaagggaaaaggtgcaacggtttgcaagatagcatagaagattttgaagaatcttaattgcaacatagtagtgcagttgcaatgggggctcctttatcagcatggccttgggataactttggaacatacaagtatctattatatggaccgtttgtggggaaagtcctttatgaatggttctatggtgaagagcagtcctactacaacctcagctggtgcctt

SEQ ID NO: 1454 - DNA, 255 bp, Glycine max
  Clone ID: 700956853H1
attaaagcagctgcacgcagtgatacagaggtagtttctgaaaccacaaaggctggtggcctacgtggaaaattgaataaggtggtgttggcttacagtggtggcttagacacatcagtcattgttccatggctgagagagaattatggttgtgaagttgtttgcttcactgctgatgttggccaaggtataaaggaattggaaggtttagaacagaaagccaaagccagtggagcctgtcaattagtggtaaaa

SEQ ID NO: 1455 - DNA, 252 bp, Glycine max
  Clone ID: 700956885H1
tggaaagcaagtctatctgttaccacagtgttatgcagagaaacaagctcttggagaagtggatgctgagcttcttgacacccaagtgaatcctgctgtgtgggaaattagtgggcacatggttctaaagaggaagaaggattatgatgaggcatctgaaggcaatgcttggaggcttcttgcagaggtgtccctctctcaagagaggtttcaagaagtcaatgatcttatttttgaagccattggctgtgg

SEQ ID NO: 1456 - DNA, 270 bp, Glycine max
  Clone ID: 700956967H1
gctgctgaggagttcaagtcagggtggctttatgatgtctcagacttctctgctcttccaggaaggggcatccagtgctttatagacgggaggcgtattttggttggtaaccggaagctgctggaggaaaatggcataaatatttctacagaagtggaaagttttgttgtagagattgaagaaagtgcaaagacagggatactagtagcatatgatgatatattaattggagtcttagggattgcagacccactaaagagagaagctgct

SEQ ID NO: 1457 - DNA, 267 bp, Glycine max
  unsure (1)..(267): unsure at all n locations
  Clone ID: 700956972H1
gtgcatattgttgggatgtggaaactggtaaagtganaatggtattcaaggggcacatggactatttgcattgtatagttgctcgcaactcatcaaatcagatcataacaggttcggaggatgggacaacacgaatttgggattgcnaaagtggaaagtgtacgcaagtnattgatccagcaagagatttgaaattaaagggatctgcttcatgggttggttgtgttgctttagatgcaagtnagagctggttggctgcagtagtgg

SEQ ID NO: 1458 - DNA, 272 bp, Glycine max
  Clone ID: 700956981H1
caaaactataaatcaaaagctcagagaacccatcccgccgccgccgtgtgctccgaccgccacctccattcgccgtgtactctcactcccttaataattattgatttcttctcttactttttgctctcgctggagttgagtgtgatggtataggttaataggaaagaaaaactaagtgaggaaaggtgaaaaaagaattaattagagtggaagagtgtggttattttctgatttgagaagcaaataccaaagagtgaagaacaaaagaaaaa

SEQ ID NO: 1459 - DNA, 268 bp, Glycine max
  Clone ID: 700956983H1
cttgttcctctcgcccagaatccgagatcaaccctgacccctaaggccaggggtttttctcggcttcttcagattcctgaaatggcgtctgtttcagctttagccaagtacaagctcgtcttcttgggtgaccaatccgtgggcaaaaccagcatcatcactcgcttcatgtacgataaattcgataacacctatcaggctacaattggtattgattttctatcaaaaactatgtatctcgaagatcgaactgttcgactgcagttgt

SEQ ID NO: 1460 - DNA, 269 bp, Glycine max
  Clone ID: 700956987H1
tcaagattcagccaaagcttagcacttgctccaaaacaggtctcggtgcaaatactgagcctccaagccttgacaaactcaaccctctcaagcaaagcagtgaaggtgagccatgccaattgtgacgactcattggagacggaattccacgttgacgtgaaaaacgaaggctcaatggatgggacccacacccttctcatattctcgaaaccacccccgggaaaatggtcacaaattaaacagttggtgaccttccacaagacccatgt

SEQ ID NO: 1461 - DNA, 266 bp, Glycine max
  unsure (1)..(266): unsure at all n locations
  Clone ID: 700957024H1
ccgagtcgccatggcgtcgcaggagagtatcganaagatgcaggcacggcagaattaccggaatttatggcacaccgatctcatgagatccattcaggccgatactccttattgttgcctcgcgttgtggtgtgcaccatgtgtgtcnaccttcttcgcaaacgagctctctatgatgatatgtcaaggtacacatgttgtgctggctacatgccttgcagtggtaggtgtggagaaagtaaatgtcctgaatttgcctttgcact

SEQ ID NO: 1462 - DNA, 261 bp, Glycine max
  Clone ID: 700957057H1
ctgagcagttgaggaaatgggaacccttgggagagcgatctacagcgttggtaactggattcgagaaactggacaggccattgatcgtctcggttcccgtcttcagggcggttactacttccaagagcagctctctaggcatcgaactctgatgaacatatttgataaggctcctgttgttgataaggatgtatttgttgcgccaagcgcctccgtcattggagacgttcaacttggaagaggatcatccatttggtatgg

SEQ ID NO: 1463 - DNA, 260 bp, Glycine max
  Clone ID: 700957073H1
catagttggtgttgctgggtggggaactggtctcaaactcggaagtgactcggttggtattaagtataacacccatagagcactcgggatcaccctcttctgccttggaacccttcaggtttttgctctgctcttgaggcccaacaaagaccacaaaatcagaatctactggaacatttaccactacgccgttggatactccaccataatcatcagcatcatcaacgtctttaaagggtttgatgcattggagacttctg

SEQ ID NO: 1464 - DNA, 258 bp, Glycine max
  Clone ID: 700957091H1
gaagatgttgcgaacgacaatactgcaattcgctgcgttgcaggttttgtttattctgttgggtgttggtgccgattacataccgccttcgagatttgatggcttcgtctacgggaaggggaacttgaatttgttggatacggttttgatagaagcgttttatgacccagtgtgcccagatagcagggattcctggcctccactcaaacaagctcttcatcactacgcttctcgggtttcgctccttcttcacctcct

SEQ ID NO: 1465 - DNA, 250 bp, Glycine max
  Clone ID: 700957109H1
gtgagattctgaaccaagacaaagaaagggttaagtacattaactcaaggatctcaaagaacttgggccaagatagtagtgtgagtgaattggactcagttacactaccagccaagtctggtagccttattgggtctgggaattactttgtggttgttggtcttggaacacccaagagggacttgtcactcatctttgacactggcagtgatctcacttggactcagtgtgaaccatgtgctcgttcttg

SEQ ID NO: 1466 - DNA, 149 bp, Glycine max
  unsure (1)..(149): unsure at all n locations
  Clone ID: 700957110H1
cgaatatcgcattcgcgaaatcatgcaggagtcggtaaaatgcatgcgccattcaaagagaacttntcttactacagaggatgtggatactgcacttgcattgagaaatttggagccaatatatgggttcacatctaatgatcctccac

SEQ ID NO: 1467 - DNA, 237 bp, Glycine max
  Clone ID: 700957193H1
caaaaaacccttctttctttcaggttcattacttgatcagtgtcaaaagggtagttgcaaattgcaatggctaagcatgatgttgagggtggttccttctcagcaaaggactaccatgatcctcctccagcacctttgattgatgctgaggaactcacacagtggtccttctacagggctttgattgctgaattcattgccacattacttttcctttacatcacagtgctcactgtg

SEQ ID NO: 1468 - DNA, 248 bp, Glycine max
  Clone ID: 700957204H1
aagattaaagattcaacaatggcctctgcttctgctactcttctcaagtcatctcctgttcttgacaagtgcgagtgggtcaaaggccagacccttcgccaacctctcgtgagatgtaacccttcctagcatcagctctcaccatcaaagctgcttcctatgctgacgagctcgtcaaaaccgccaaaacagtggcctcaccggggcgtggtattttggcgatggatgagtcaaatgcaacctgcggg

SEQ ID NO: 1469 - DNA, 262 bp, Glycine max
  Clone ID: 700957304H1
gtgatgttgcatatgtagagaagcgtcacaaatcaatggaggaagcgttgctacagggattcccatcaagcaatttgaaacaattgttgattgtatgtgccaaagccttgtctgaaaacaacatgaaaggttttgatcagttaatagagaaggctagaagtgctgtgtctataactggggagccaatccagcgcctgggtgcttatttggtagaagggcttgttgcaaggaaggaggcatcaggaaataacatctaccatgc

SEQ ID NO: 1470 - DNA, 196 bp, Glycine max
  unsure (1)..(196): unsure at all n locations
  Clone ID: 700957305H1
cccttacttcaatttcatcaacacaaccatcaatttcatcaaccatcgcataataatagtattatcatgatagccgtggcccgaaaggacatggaccggatcaagggcccgtggngcccggaggaggacgaggcccttcagaagcttgtggagcggcacgggcccagaaactggtcgctcatcagcaggtccattc

SEQ ID NO: 1471 - DNA, 260 bp, Glycine max
  Clone ID: 700957316H1
gtaggcatagaagacatgtttctcaaggctattgtcccaacagacatcccagaagatgaaatacctcgatacaactttgacttgttcaatactttatgggaggcatgtggctcatcctccagcactggccgggagacatttcagttgaaaggaggcaaagggattgctgccatcagtggaactcaatcagtcaagcttcttgatgtccctgcaacctctttaatccaggcaactgagcgccatttggcacattttgtcgt

SEQ ID NO: 1472 - DNA, 259 bp, Glycine max
  Clone ID: 700957319H1
cggggagtggaaggaacgattacgggttcaaagcggagatagagacggtggggaagataaggcacaggaacataatgaggcttttgggttacgtgtcgaacaaggagacgaacttgcttctgtatgagtacatgccgaatgggagcttaggggagtggctgcatggtgccaagggaggtcatttaaagtgggaaatgaggtacaagattgcggtggaagctgcaaagggactatgctatttgcaccatgattgttcccc

SEQ ID NO: 1473 - DNA, 253 bp, Glycine max
  unsure (1)..(253): unsure at all n locations
  Clone ID: 700957362H1
caattgaccattctaacatggtcgntctttcaactcaaacttctggngccttgaccagggattggagcccaatgagtatatgtcctcctcatggaagggtgtcatcatcagangcaaatgcttttaatcacgaggcaagtcatttccttattggaagcagttctagtaatgctcctgtagatgttggaggttttcataatgaatttggaactagtagaaatcctactgctcctcaaagttttcataataatct

SEQ ID NO: 1474 - DNA, 257 bp, Glycine max
  Clone ID: 700957372H1
ggagcgtcaccctctcacatggcggcagcaaccacaatttgctacggtccctcctcttatattcttcttggctcaaatttacttagacagggacacttgaaaaacacttcatttgctcatcgtttttctccttcaagatcattcctttgtaacggatttgttcccaggaaacctgttttgggaagaaactcgttctgggtatcaaaaaccatggatgaatccgcgagaacttctgctttcagagatggaaaaggcga

SEQ ID NO: 1475 - DNA, 255 bp, Glycine max
  Clone ID: 700957373H1
ctctcttcattccaattttggcaccacaccatgccaaccctcaaccatgtcctcacattcacattcttccttctcctctcttgccattgccacctcctcaatggccaagaggacacctcatttggccgtgccatagacagaaaattgttaggcctaaagagaaaagaaaagctcagccacttcaaattttattggcatgacatagtgagtggccgcaaccccacttcggtggcggttgttccgccaccgccgaag

SEQ ID NO: 1476 - DNA, 253 bp, Glycine max
  Clone ID: 700957380H1
tatcatttcatttcgataatcatccatagttactgaagaaaatggcaaccatctccgctgctatcacaaccccatcgatcacccgcgcatgtctagtgcaaaaacgttctcttgggttctcatctcccgttcttggtttgccagcaatgggtaaggtgggaagagtgagttgctccatggaggaaaagccttcttctgtgaaggaaagcagctcaagcatgttggggatgggggcatctttgatggcagcggc

SEQ ID NO: 1477 - DNA, 253 bp, Glycine max
  Clone ID: 700957383H1
ccttgttctcctgctgtgctacattgttattggggcatgcttcttcgtacaaagaacaccctttaataaccaagctgatgttactaacatcacacttaaaccagccactaatgcagttttaagcgcttaattagtaggctttggcctatttcttgtcctttcctgagatgaagaatggtggtatcgatccaaacccaaaatcagattcaaattcaatggattggttattgtttcattctgatcacattgtcat

SEQ ID NO: 1478 - DNA, 250 bp, Glycine max
  Clone ID: 700957394H1
gtgccacacacgtatgtttgtcaaagccaaaatttttatagaaatttattcacctgttcatatcttaattgtatgtagaaaacaatgtttatgaggaatgatcatgaagctcagatcaaagcattgaggtgtgaacttgaagatgagtgtcggaagctggaagaggagttgcatcttcaaaaaatccaaagaagacaggcaaagggctttgttgcagttgcagtggaaagtgatgagtgacaagcctaaa

SEQ ID NO: 1479 - DNA, 251 bp, Glycine max
  Clone ID: 700957395H1
caacaataaaagaccatgtcggtgaaggagtgcgagcaccacaaggggaagaagaggaagatcttccggcaagtgttctggtgcttagtggtgttccttttcatcgtgctggtcacaattcttttgatatgggcaatccttagacccaccaaacccaccttcacgctccaagacgtcaccgtctacgccttcaacgccaccgtggcgaacttcctcacttcgaattttcaggtcacgctcatctcgcgtaa

SEQ ID NO: 1480 - DNA, 252 bp, Glycine max
  Clone ID: 700957396H1
ctgagtttagctattgatgttacatacatgccatttggactctttgaaatatgtaatctatgacttcaaggaaatggttagaagttattcatactttcattaagctaaaattaaaaatatccttttactagctgttttctttaatctttataataagattatcctcccaaacgaatctgcaatcagtttcgtggaggttttccacatggatttccttaataccatgatgttgagaaaccgagaaacctattt

SEQ ID NO: 1481 - DNA, 147 bp, Glycine max
  Clone ID: 700957401H1
gttgattgcacatcctttttgctttcagggttggaagaatttttgcgataaaatattttttcacccaaaaaaatggtgttggatccaagactggtgctggtgctgttcatcggcactgcattttggccatcaatggtgacacagatc

SEQ ID NO: 1482 - DNA, 252 bp, Glycine max
  Clone ID: 700957441H1
gtaagtatggtggttatcttagcagcttgagaaaggaatttctaaagaaaaggaaaaaaggtaagctaccaaaggatgcaaggatgatactcatggactggtggaacaacactataggtggccttatcctacggtaattgaaattaatatcatgaagtatatatatagcaatatagcttacgttatattgtgtattgctcattaacagtagtatgtgatctgatttgatgaaatatgccaaattgccatata

SEQ ID NO: 1483 - DNA, 251 bp, Glycine max
  Clone ID: 700957463H1
gttgcttacccttgtttatggtttcatattgttcatgtatcattctaggtggagagaaaggttacctgcaaggcctgcatactacaagtatgttactattatgctctcttgaatgcaattgcactgtttgcttgtggtattacaggaaacggcactgcttttggtttctggttatatcatttcacggttgtatgttaccatgccgcttatcttcccctgctgtatataaccttcctggctgacttttttca

SEQ ID NO: 1484 - DNA, 114 bp, Glycine max
  Clone ID: 700957467H1
cgtgggcccaggcctaagtatgcacctgcttttgccgataccgatatggagtacaataatgttgcacctgatgggtcatatgttggtaatggtcgattaggcagaagccattga

SEQ ID NO: 1485 - DNA, 122 bp, Glycine max
  Clone ID: 700957553H1
ctgcaaatggagttgggaggaaaagatgcctgcattgtacttgaagatgctgacctggatttggttgctgcaaacattataaagggaggtttttcatacagtggtcagagatgcactgctgt

SEQ ID NO: 1486 - DNA, 236 bp, Glycine max
  Clone ID: 700957580H1
taaagacaaccattttagcaaagaaaattggtgtaattaaattctcaatcttctttacattttcactgtcagaactgtagcacgtgactctttagtgaaaccttcactccatggtttcctcattgccctttgaagcttgaactcggataaagatcgtgactttggctgattctggaaatgggttctcggattcagcttctgcctatttgcttttggctgcacttgacatgcttcag

SEQ ID NO: 1487 - DNA, 257 bp, Glycine max
  Clone ID: 700957609H1
cggggttcaacatcattcacgcgataaacgcgtgggaggaggacgagggaagaacggtggtgctggtggcgccgaatattctttcgatggagcacgcgctggagagaatggagctagttcacgcgatggtggagaaggttcggatcgagctggacacagggataatcacgcggcaaccggtgtcggcgcggaatctcgatttcgcagttataaaccctgcgttcgtggggaagaagaacaggttcgtttacgcggcg

SEQ ID NO: 1488 - DNA, 251 bp, Glycine max
  Clone ID: 700957614H1
ttctttcgttgtttctcatgctgatgggaatttgtacgtatatgaaaagaacaaagatggcgctggtgattcttctttcccagttgtaaaggatcaaactcagttttcggttgcccatgcacgttacagtaagagtaatcctatagcgagatggcatatatgccagggttcaattaatagtatttctttctcgatggatggggcattcttagcaactgttgggcgagatggttatttacgagtgtttgatt

SEQ ID NO: 1489 - DNA, 255 bp, Glycine max
  Clone ID: 700957624H1
ctggaggccaaattcatgtaccaatatatgtcactggcattatcaaagtcagcaatgcggaaattgctgttcttgacagtgatcttggaagtgttgaaacccaaaaaacgctagatttggctggaaatgatgttgtttcactctcagctaaccacttgcaaaagttgcgcttttctttccaattgacaacacctcatgatcatgcttttaagcctcttcaggcatttttcaagttgaagcatgagacaaagcatg

SEQ ID NO: 1490 - DNA, 260 bp, Glycine max
  Clone ID: 700957633H1
ccctcatagcatcgaatttgttcttgaagttcttggtattcttcctagcttcttctcatcttagagaaagagtgagagatggaacgaatgttccctcctaagaagccttcaactatgaattcccatgacaggtccatgtgtgtgcaaggggactcagggcttgtcctcaccactgacccaaagccacgcctccgttggactgttgaactacatgaacgctttgttgatgctgttgctcagcttggaggacctgataaggc

SEQ ID NO: 1491 - DNA, 250 bp, Glycine max
  Clone ID: 700957650H1
aagaaaggttagagagccaaaggaagaaaacgtgactctgggcccagctgttagagatggcgaacatgtctttggcgtcgctcgcatctttgcctccttcaatgataccttcattcatgtcactgatctgtccgggagggaaacacttgtccgcatcacaggtggaatgaaggttaaggctgacagagatgaatcgtctccctatgctgctatgcttgctgcacaggacgttgctgccagatgcaaggaa

SEQ ID NO: 1492 - DNA, 237 bp, Glycine max
  unsure (1)..(237): unsure at all n locations
  Clone ID: 700957658H1
ctcccctcttccccacccaaccttctctcnatcacacacacaagtcaatggataaaaaacaacagtgtaagacgtctcaagatcctgaagtgagaaaagggccttggacaatggaagaagacttgatcttgatgaactatattgcaaatcatggggaaggtgtttggaactctttggccaaagctgctggtcccaaacgtaacggaaagagttgccggctaaggtggctaaattacc

SEQ ID NO: 1493 - DNA, 229 bp, Glycine max
  Clone ID: 700957675H1
ggaggtgccgaagatgaagtcgactgtgccggagatgacgcagttgcggtagaacatggctacaggaatcgtgatccagggttgcaacatcgtcccagaagccgaacttttccctacaaggttccaagtgaagtcataccttggaaggccatggaagcaattctcaaggacggttgtgatggaatccaccgtgggtgacttccttcaccccgaaggatggtgcccatgg

SEQ ID NO: 1494 - DNA, 238 bp, Glycine max
  Clone ID: 700957682H1
caagaacattagtttcactgtctgggatgttggtggccaggacaagattcgtcccttgtggaggcactacttccaaaatacacagggtctcatttttgttgttgacagcaatgacagggacagagttgttgaggccagagatgagttgcacaggatgttgaatgaggatgaactgagagatgcagtattgcttgtatttgctaacaaacaagatcttcccaatgcaatgaatgctgct

SEQ ID NO: 1495 - DNA, 57 bp, Glycine max
  unsure (1)..(57): unsure at all n locations
  Clone ID: 700957685H1
acaaacttggtttnaattggtanaggcttgccaaggtcttgttnantgagcgttaag

SEQ ID NO: 1496 - DNA, 272 bp, Glycine max
  Clone ID: 700957703H1
attctgcaggaaagttataagattctgtttcaggggtgtaaagaaactggctttcgatcattatctccaggttcggtgaaaatgagttcaggaggaaagcaggggggcttcgtttcgtaccaaaacgtcttcgtaatgaggcacggggagcgtttggacaacttcgagccgtcgtgggtgatgacggcggcgcggccgtgggacccgccgctggcagaggcaggtagaaaacgggcgttcgaaacgggtcggaggctccgggagagtgtcgg

SEQ ID NO: 1497 - DNA, 268 bp, Glycine max
  Clone ID: 700957710H1
ctcaatttcatgaagcgcaaagaacagcttcagaggcatatgaggaaatgtgatcttaagcatccccctggtgatgagatatacagaagtggtacactgtcaatgtttgaggtcgatggcaaaaagaacaaggtttatgggcagaacctttgttatttggccaagttatttcttgatcacaagaccctctattatgatgtagacctgtttctgttctatgttttgtgtgaatgtgatgatcgaggatgtcacatggttggctatttct

SEQ ID NO: 1498 - DNA, 272 bp, Glycine max
  unsure (1)..(272): unsure at all n locations
  Clone ID: 700957717H1
tttctgctgagatttctttgtctccccggtattctgatccagcagccggttctgtgttttcccctactcacaaatcagctgttctcaatcagtttcaacagctccaaagtatgttatcacctataaatactaatttgctgtctcctaagaatgttgagcatcctctttttcaggcttcttntgggtgtctctccttctgganggatgtcaccaagaagtgttgaaccaatctctccaatgagtgctcgtttatctgcattgctcagcgagag

SEQ ID NO: 1499 - DNA, 264 bp, Glycine max
  Clone ID: 700957753H1
gcataggcatagactagagagagagttgcaatggccgtttctttggcagtgaaccgtcctctgcttggtcttcacgagaatgtaccattagctgttgctcatccccaattcctcccgttcaaatggccacccaagtccaaactcccctccgtcgtcggaattcgatgctcctcctcccctttcaacgacaaaaccctcatttccatcacacctaacacttcccacctcaatcccaaccctctcgcttgtcgctttcacgcttcc

SEQ ID NO: 1500 - DNA, 261 bp, Glycine max
  Clone ID: 700957757H1
gccattatttcctggagaaaaccaagtggaccaacttgtggaaattatcaaggttcttggtactccaacacgcgaggaaatccgttgtatgaacccaaattatacagagtttagattccctcagattaaagctcatccttggcacaaggttttccacaagcgaatgcctcctgaagcaattgaccttgcatcaaggcttctccaatattcacctagtctccgctgcactgcgctggaagcatgtgcacatcctttctttga

SEQ ID NO: 1501 - DNA, 49 bp, Glycine max
  unsure (1)..(49): unsure at all n locations
  Clone ID: 700957785H1
tctctctctttctctttctctctcatccagatcttgcaaaanaaaaaaa

SEQ ID NO: 1502 - DNA, 256 bp, Glycine max
  Clone ID: 700957789H1
cagttagtacaaaaaagggttacttcagcttccacatatcttgaagaattgatcaatgggcaagtctgtagttgagaagctactttggatggcaattgtgtgcttggtgctgggtgtaatttccattactcccaaggcccaagcagcagtgacatgcaaccaggtggtgagcaacctcaccccatgcatttcttatgtgctcaatggtggcaaaaccgtgcctggcccttgctgcaatgggatcaagaccctcttt

SEQ ID NO: 1503 - DNA, 255 bp, Glycine max
  Clone ID: 700957790H1
gacacttttgtcccaaaccctggttatgaggttcccattcccggcagtggtggaagtgttccagcaccagctgcaccatgagttaactcatgcatgattaatgtgatgcatggtagttaataaggtggttatgcttaagtttgtctttttctttctgttttctagccataataataacttatcataaataagtatgctccatgtgcacattggtgtatatggtgaacaccatggattgccaagtcattctgtttg

SEQ ID NO: 1504 - DNA, 256 bp, Glycine max
  Clone ID: 700957804H1
ctgaaacgacacacacaaaaaaaagctttagtttaggatgacccaagtgaggaacaagcaagtggttctaagagattatgtcaccggattccctaaagaatccgacatgaacattgttgaaggcaccataatattgaaggttccagaaggttccaatgatgtccttctaaaaaatctctacttgtcatgtgatccatacatgcgactcctcatggccaaggaccgttctttcggagatggctccttcacccttgcc

SEQ ID NO: 1505 - DNA, 257 bp, Glycine max
  Clone ID: 700957809H1
ggcagaaagcaagctcatcctagagttttaaaaatggcagcagcctcctccatggctctctcttccccatccttggctggcaaggccgtgaagctgggcccatcagcccccgaagtcgggagggtcagcatgaggaagaccgtcaccaagcaggcctcctccggaagcccatggtacggcccagaccgcgtcaagtacttgggcccattctctggcgagcccccgtcctacctcactggcgagttcccaggtgacta

SEQ ID NO: 1506 - DNA, 257 bp, Glycine max
  Clone ID: 700957814H1
aattggctgaattaataatagtcacaccggagccatcaagttgagtgggagatgcttgccatgactgagattcttgaagaataaaatatcaaatcttgacagattcagcgtgtgtgaccaagttagtggaaattgtactttggaactgtaatcacaaattccctatcactaattttaggtggtggttgtacttttaataagtttatgtgaaaaagaaaaaaacagtgcttttgtatattattcctagatgaattgta

SEQ ID NO: 1507 - DNA, 254 bp, Glycine max
  Clone ID: 700957821H1
agccattgaatcgtttcgtttcggaggtggcggatatggacgattacgcgagcagcgacgaggattaccattacgactccgatcaggaggactccgtcgaggcctacgaaaacgacgagaattacgccttgctttcttccaagggccccactactaaggtgattacaaaggaatcactgctggctgcacagaaggaggatttgcgcagagtgatggacatgctatcggtgagagagcaacatgctcgtactctg

SEQ ID NO: 1508 - DNA, 255 bp, Glycine max
  Clone ID: 700957822H1
ctgcgtctcttctcaaaaaccctacaaacaaaacactctctgcttcgcaaattcgaacctttgaatctgaatcatgccgcgcaagaagaaagctcacgacccattcttcaccaacgattcccgaaagcgccaaaaaccgaataaaaaactcgacgaagatgaggaagacgccgagatagaaagcgactttgatgaagacggcttcttcgccggcggcggtggcggcggctcgggtgaagagcaggaggaggaaga

SEQ ID NO: 1509 - DNA, 253 bp, Glycine max
  Clone ID: 700957839H1
aaatcttttatttcattcttcagaccaaaaaaagaaaaagagaacattgttcaacgaagcaagatgcttagcaaccgcatatggcagaggagagctttgatctccgcccggaccttattttctggctctgcttctcactcttcatcatcttcccatgcgatctcgcttcgcttcgccaaagctaatgctccttcttcttcacatgtcattttcaattttgcacgtgtggacagatattggttttctactcaac

SEQ ID NO: 1510 - DNA, 246 bp, Glycine max
  Clone ID: 700957890H1
cacactagctatagctagaatcccctccaatccctctttgtctttgtgcttttctttagttctttccaaaacagcaacaatgatgagttgccaagcatggcctgaacccatagttcgagtccaatccttagctgacagtggcctaagctcaatcccttcacgctatattaggccacactcccaaagaccctccaacaccacttcttttaaactttcacaaaccgaacatgatcatggtcacggtcg

SEQ ID NO: 1511 - DNA, 253 bp, Glycine max
  Clone ID: 700957896H1
gactatatatatatatgccatcagaacgtggagttctttgtgtggtgatctttttttatatggaatagtagagaagaagaataataacgtagggccttggggcatccagtttgttgaccggattgtggtcaactcgtttagaaatataagcaatttgttcttgtttcttgtttgtgggtgcatgaatcctacaattttacatttaaaaaaattgtactacttttttcttaaactgttgttgatttttcataaa

SEQ ID NO: 1512 - DNA, 267 bp, Glycine max
  Clone ID: 700957904H1
tgctttgagacccttaatcccatccacaaaagcactgtctctgatgatgaagatgacattgaatttgtggggggttcaggcacaaccaatccaaccacaaaaaaagatgctagcagctttcaaatctttgacatcattggccattttgctcaacccaatccccacacagttttgccaaagacaccaattatttgcaaaccatcagaaaatgccattgagttggccctcaagatagccaaccttaatccacaaagaactttgttcttt

SEQ ID NO: 1513 - DNA, 265 bp, Glycine max
  Clone ID: 700957905H1
tctgaggtgactttaattatgaatggaaaacaatactaaaaatacctaaagaaccacatcaaagttttgtcctttgttttatattataattttgcaatgactatttttccctagtgaacagaatttctggcagaataaattgtgccattgttttgcatttgtagaatctggactattataaccttttatctcctcttactgtctaatgttcttactgctctgcgatagatttgttcattctttgttcactatgtttgtagtggaa

SEQ ID NO: 1514 - DNA, 264 bp, Glycine max
  Clone ID: 700957949H1
gcttatagtagcaattgacatttattagcactgagtaacacgcccgaatatggcaccctcaatctccgacgaaatgccaagcaccaccacctctctcctccgccgcaaccggtggctcccctccagcatcaaactgaaaacaacccttttctcagaactctccggcgcggtgggtgacctaggcacctacatccccatagttctagccttatccttagtgaacaacttggacctcaccaccacactggtcttcactgctctcta

SEQ ID NO: 1515 - DNA, 130 bp, Glycine max
  Clone ID: 700957965H1
accaattctaaggcaccaacaatcgtgtgggacgcacgtgacctctgcgactttcatctcgtcctcaaacacggcacgtgctacatgacacttcatgtcttacatgcggagggtgatataggagaatata

SEQ ID NO: 1516 - DNA, 261 bp, Glycine max
  Clone ID: 700957966H1
caacaagttgatggccaaagctgataaacaaacaagactcagtctcacgaggtggagtgcggattggaaaagtgctactgttctatatgagcaggcagctaatgggtttagagttgccaaggactatgagaatgccaaaatagcatatgagaaagcttcgaaaggacaagagatgctttcttcaccttgggatgcagctaagcacatggaatctgctgctgctctagcgaaggatctaagacactggcaagaagttgtgga

SEQ ID NO: 1517 - DNA, 247 bp, Glycine max
  unsure (1)..(247): unsure at all n locations
  Clone ID: 700957994H1
gtttttatttctctcttctctctgcatcgcttcaggttcttctgaaaagatgtctcgcgtgtcntgttggtaacttggattcacgagtcaccgagagagatctcgaagacgaattccgtgttttcggagttattcggagtgtttgngttgcacgtagaccacctggtnatgcttttattgactttgatgaccgcagagatgcacaggatgctatccgtgaattggatggtatgtttagaagaattat

SEQ ID NO: 1518 - DNA, 247 bp, Glycine max
  Clone ID: 700957996H1
aaagctattaagcccaaacaaggcaacaactctgaatccaaatgcagcagagtttgttccttttgccctcagatcatcgtcattatctggaactaccagctcggtagatgcaacagcaaagctttctgctgctggagctcttgggaaagcagtttttgatagatcagaatcatccatttcaaataattctgatgatgaggtacaccaatactggcgatgtcagctccctgatgatatcacccctgat

SEQ ID NO: 1519 - DNA, 113 bp, Glycine max
  unsure (1)..(113): unsure at all n locations
  Clone ID: 700958066H1
ctgtcttcnntggngatngccttttgcnttttgcgttaggccttgccgaattaantnctngtntcatggttctctcgangtcaagaanaatgtgcatgcgagagtttcnaggt

SEQ ID NO: 1520 - DNA, 271 bp, Glycine max
  Clone ID: 700958105H1
cttttgtctgaggtgtgtgcattcttgtttaactcctctttgttcctcagacatcccagaagggaaccaaaaataaaaaataaaaaaataaacacaatcaataaaggggagaaaacaaacatgtcattcacaggaactcttgataaatgcacagcatgtgacaagactgtctatgtggttgacttgttaactcttgaaggaattccttaccataaaaactgcttcaagtgcagtcactgcaagggatgtcttacgatgtgcacatactcct

SEQ ID NO: 1521 - DNA, 269 bp, Glycine max
  Clone ID: 700958109H1
ctagtttagttatctactcttttctgcatgtttgttctctcaacgactcctccgcgaaagagtattattcaatattttggttgggttgaatcccggggttgaagcgttgcagacatcacggctattctaagagtgtctcgctccctcattcatgtccgatctgtacgacggaggacgggtagttgcgtaactgccgttaacccttcgccgcacggtgggcgtggtgctttgccttctgaaggtggtagcccttcagacttgctcttcct

SEQ ID NO: 1522 - DNA, 269 bp, Glycine max
  Clone ID: 700958116H1
ctctgcttcatccagggggactcctactcctagggcctcaagacagtttttggataattctctggattgtttacctctttccagtactgttacagatgaggcctatgagtcactgaaacggcaaaaggtttatttttcagatacagagcttaaagtgggtgatgaatctgacagtccccttttgaatttgagctactcaaaatctgccaaccgtgagaagaaaggtcaagctggaaatggaggcaattacaactcaaacaacactatgc

SEQ ID NO: 1523 - DNA, 256 bp, Glycine max
  Clone ID: 700958195H1
gttacttgcgatacggtatgctagcagctcgtgcagaggctttaaaggttcgtgattctgaaaatccttgtattttggctggctttgatgggtattacgtatatggaggagtgcagtataaggccaaagctcccccttctggctcaagcttcagccaatgccaaaatgttgttgttgaagcactccatgttaatgcaacatgctcttacaaggattgcactttcggagggatatggaatggtggtgggggagctgg

SEQ ID NO: 1524 - DNA, 259 bp, Glycine max
  Clone ID: 700958210H1
attagcagcagcatatgttgttgtttgtggtcatcccttacagcagtgttgatcagaagaagactatataatagcctttgctccaatcacttcctcttgttcatgccataaactaaaccctttctacagttacaaatctatgctactccacaaagactctttttgcatgagacatcctctctcttaaaaaaccccttcttcagtcaaacctccccaatcatacttttaccatttcaccactcacacttttctctccctc

SEQ ID NO: 1525 - DNA, 261 bp, Glycine max
  Clone ID: 700958215H1
aaaatatctcacgcaataacaaaccctaataacaatgctgaagcatttcaacatgaacattttcttcacgttgcttatagttgtcaccttagctagtttctatgttccccatttgaagcctagtctttcaattacaatacccttctgcatggttgcaaccctagcataccaatttataatgagaacacccaacaaaatttacttggtggattttgcatgcttcaagccaagccttgaatgcctgtgctccaaggaaatgtt

SEQ ID NO: 1526 - DNA, 260 bp, Glycine max
  Clone ID: 700958220H1
gtcatttccaaaagagaaaaagacattttcaataccattttttaagcctgtaccaaagtttcttccgattgttaaacctataccaatgccttttccaaagcctctacctctacctatcccagttttccagaagcctataccaaagtggattccagatgttaagcctataccaaagccaattcctatcccggtgttcaggcctgtcccagttccagtgaagccaataccaaagccatctccaacaattgagaagccaaagc

SEQ ID NO: 1527 - DNA, 257 bp, Glycine max
  Clone ID: 700958221H1
gtgagatacactaagttatcctcataaatacactctaattaggtggcaagataagtgtctaaccttagtaacattgccacatattgtgttcattttggaattgtgccactaaaattctattcaattcatctatggctgcctcttcttatgctatgcaatcaatcctggcaaaccctttgatccgcatttccagcgggtctagggtgaaccaatttggcgttcctgctttgcacatgagaaggaatgttggcctgaga

SEQ ID NO: 1528 - DNA, 257 bp, Glycine max
  Clone ID: 700958224H1
atgtcacagttgggtttatgtgcttttcgggttggactgatttctgaagcccatggctgcctgtctgaactgtactctggtgggagggtgaaagagttacttgcacaaggtgtgtcacaaagtcgctatcatgagaagactccagaacaggaaaggttggaaagaagacggcaaatgccttatcatatgcacatcaatcttgagctcctggagacagtacatcttgtatctgctatgctgctggaagttcctaatat

SEQ ID NO: 1529 - DNA, 255 bp, Glycine max
  Clone ID: 700958240H1
ggaccgttgaaaaaagctgaagctcatcatgatggtcccatacaattatcagcatctgcgtgtgagttgttagagacaagaaaaacgagacctttagatggtcggaagatcaaaaggagaaagccaaacagcacctcctcagcaaattaacataaaaaacctctctttctctatttcttttattattgggtatgtcttgaagttcttctgaatttgaagcatatatttgtccttgaatggaaacacgtgctggaa

SEQ ID NO: 1530 - DNA, 257 bp, Glycine max
  Clone ID: 700958250H1
ctcggaagcgtgcattaaatttcccgaaaggctaaaatatccaatgcacctttctcttcctccgatggctaatctctcactcttgttcttcggtctcctcctattctccgctgccgtagccaccgtcgaacgaatcgacgatgaagacaaccttctgatccgtcaagtggtgccggacgcggaggaccaccacctgctcaacgcggagcaccacttctccgccttcaagacaaagttcgccaagacctacgccacgc

SEQ ID NO: 1531 - DNA, 256 bp, Glycine max
  Clone ID: 700958251H1
tattaaagcaggtcacaatttgtaattgtaattgtaattgtagtagaatgaggatgcgttcagctaaataactttaagtgttgtgttaataagtgttcttatcttataagagcttatgtcaaaattttgatcatgaaacttactaatgtggtctggtgatgggtgttagaattcaattgcaaggtgtgagacttgagtctcaaattggaagtatgaaattctagtgtggggtgtataaggctctacaactacaaca

SEQ ID NO: 1532 - DNA, 253 bp, Glycine max
  Clone ID: 700958255H1
atatagcccaagccctatacaaccaaaccctaacacacacccatttgattcagtttccatggctagcctcaaggttgcatttttggctgcagtgctctgcatggttgtggtgagtgcacccatggcacatgcagctatcacgtgcgggcaggtgacgaatagcctgatcaattgcatcggttacctccagaacggaggaacgccgccgtcgggatgctgcaacggagtgaagagcctcaatgccgccgccaag

SEQ ID NO: 1533 - DNA, 253 bp, Glycine max
  Clone ID: 700958256H1
gaaaaagcaactaagcatagtgtgtaagaaagggagaaaaacaagtgctgtgtagagagaaaaatggctaggtggtgcatgatcttggtggttcttgctcttgccgtggttgcaagtgccagaaacatgcccaatgacgctggtttggaggaccagaagaacttccttgggtatgggttttcgggagttggcaacaatggccttccctttggtggagtgggttctgggtttgatggtaatatgggtgggcctt

SEQ ID NO: 1534 - DNA, 253 bp, Glycine max
  Clone ID: 700958260H1
ctcactcatcatgagtggctgcctcaacttgacatcagtgcattgtgcctgtgctgtccatgcgcaccgtgcattcaccactttcccttatcctgcccattaagaagctcatgcttttgatgttgaacacacttcgaggatgtgccccttgaaagggctcagagaagtgaaagaagtgaaatccaccccccttgtagatgtatgcctgcataagagagacttgaatctagctgattatgtacatcttttcttc

SEQ ID NO: 1535 - DNA, 255 bp, Glycine max
  Clone ID: 700958267H1
caaaaatgcgacgcctgaacatatttggaaatcaagttttggtccctccttgagtactgaagagcgcgagaaacggatgagacaagctgctgggagatctggttttgtgcaggaactgtttctttcaactttgttaggtgaataatggaagctgtaaggtgctttcagaagaataatcaacacgagatccatcgttaaggatcttgaatgaaggatacctctagtgggattcgttggttatctgacaatccatgt

SEQ ID NO: 1536 - DNA, 251 bp, Glycine max
  Clone ID: 700958273H1
ttgagtctggaagattggcttcactcttctgctcctgctgatatctatgttcttgggtttcaagaaattgtacctctcaatgcgggtaatattttgggcacagaagacaatggccctgccagaaagtggctagctcttattaggaagaccctgaatagtcttcctggaacaagcggggaatgccacactacttcaccgcttcctgaccctattgtagagttagatgctgattttgagggatcaatgaggca

SEQ ID NO: 1537 - DNA, 251 bp, Glycine max
  Clone ID: 700958284H1
gtgtgaagaacgacgtcgctttctcgtttgggggaaatctaaaatttccctaatctgaagcgcaggcagagaccttcccactcctcagagtgtcgccgcagcagcctccgtcgccggcagaaattgcaatcttctgctgccttattggaattcagatcttataatcctcagtttggtcctatgaaggacagacacatgaagaaaaaagtcaaaagattgaaagacatggttgagccagataaaaattgcga

SEQ ID NO: 1538 - DNA, 251 bp, Glycine max
  Clone ID: 700958288H1
gttaccttcaacataaaatggaagaatccaagggttttgttagtggtgagactcaaaaacctcacccaaaaatgccttctagttccttcccaattcctttgccagggaggaatcgccatggccagcagtgtccatcaagatatgccccacaatggaggcaaagggcaatactagggcacaccgtgggaaaccctagcggggcaagtgagaatacaactttgaaggtgtaagtcactcgaggagtaataata

SEQ ID NO: 1539 - DNA, 249 bp, Glycine max
  Clone ID: 700958291H1
aatatattttacagtttcttgtgaataagaccagagaaaatacaccaaattaacataatagaaatgctgacatacaaacaatacttgtgttttctcccaaatagcatagtaaattttgtttaatatgtgaactgtgaagcatttaaaatttgatgtgaatgtgatgatatcctaaacgggttttgttgcgtgaataggtatacccactcttcgcttcagttggtgtggctgttggaatctgcggtatgc

SEQ ID NO: 1540 - DNA, 249 bp, Glycine max
  Clone ID: 700958292H1
gattgctctgcatcaagttcctgatatttctgtacctcgatatgttcgtgtgaatacacttaaactggatgttgattctgccttgcttgaacttcagaaaaaatactcggttcaaaaggataatttactgcctgatttgctgatactcccaccaggaacagatttacatgatcatcctcttgtcaagaatggcagtatctttctgcaaggtaaggcaagttccatggcagcaccagcccttagccctga

SEQ ID NO: 1541 - DNA, 248 bp, Glycine max
  Clone ID: 700958293H1
tgcctctggctggtcaaatggtagtgcagagagtagcccaagaagcagcagcggacctggtgatgactggagatctgcctttgatgcagctgccaatggccctgttagtcgaagtggttcatcaagatcgggatccaatggtcacagtcgacattctagtgatgctgcccaaaatggtgatgtgaactctgggtcaaactccagcagccgtcgaacgcctaatcggttgcctcctgctcctccgggtt

SEQ ID NO: 1542 - DNA, 252 bp, Glycine max
  Clone ID: 700958296H1
tggacagaaaaattcgggtttagcaagatgaaacccaaccagcttaccaactacagaatgaactgccatcaaatcatggcattcaaagggacaaatatgcttcataaaacggtgcctcaatgtcgggtcatcaatactcaattgtgagaaatttgtatacaaaaaagtgaatcgtgaaaggggaaaaccctagctttcttgtcgccatcttttttttcattcaacctagtctgtacatgtatcgactttagg

SEQ ID NO: 1543 - DNA, 245 bp, Glycine max
  Clone ID: 700958323H1
cgaggatgtgctactctgtgtgttgcctatgtttcatatctatgcgctcaattccattttgctctgcgggattcgttccggtgcggccgtgcttattttgcagaagtttgagatcactactctgttggagctcatcgagaagtacaaggtgacggttgcgtcgtttgtgccgcccatcgttttggcgttggttaagagcggagagactcatcgctacgacctgtcgtctattcgcgctgtggtca

SEQ ID NO: 1544 - DNA, 241 bp, Glycine max
  Clone ID: 700958326H1
aaatatcatctgggtattccctggaatttagtggggtgcctttgttttcttcatcggaaatcgttgttgttggattccaagcatgggaggctgttgcagccacgatgtttcggttcgagggaaggtggagagcgagatggatgatagagaatatgagtatgattatgaaaatgatgtgtcttatcaacaaggtggagcattggtcaggttaagaggttcctctaggtttgcatcaatgtac

SEQ ID NO: 1545 - DNA, 247 bp, Glycine max
  Clone ID: 700958330H1
ttttcggggcacccacataaaaatattttgcatgtgtttgcctgagggagagagaggcatggcactagaagcagtagtgtatccccaaccacaggacccgtttggccatggaatcaaagacccttcttacaactacaacaacttgttagaaggtggtggaggcaattggggctatgcagatttcaaccttgaaaaagaagaccgaacttgtgtcccttttcttgcgaaccaaacagagaattatcct

SEQ ID NO: 1546 - DNA, 240 bp, Glycine max
  Clone ID: 700958345H1
ccagttcttattaatcgatttacggacacataggggtttcacttttctctacgcagattaattgagatggaagtctctgggcagaatattgtgaaatgtgatgaagagaaagcattgaagtgcttgcttgatgcctttggctcagttttttctcttgaagagattgcttctgcctattgcaaggcgagccgcaatgcggacttggctggggaaatgttgtatgaaatgaagggaagttcc

SEQ ID NO: 1547 - DNA, 239 bp, Glycine max
  Clone ID: 700958357H1
gagagagagaaatagagagagaacttcaagtgagggtgagagtgacacaaatctagagagagcactagtactctaaaagtctattatattcttcaaaatatgaccatgcatcgcgagtcttgggcttttgtcttcggcgttatgggcaacatcatctcctttggagtgttccttgctccattgccaaccttttaccaaatctacaagaagaaatccactgaaggtttccagtcacttcc

SEQ ID NO: 1548 - DNA, 246 bp, Glycine max
  unsure (1)..(246): unsure at all n locations
  Clone ID: 700958366H1
gcatacaactacaaaggttgctgtaggagataagatattgaagtagtgctaagtgcctaacacctgcacngaacaatggcctctgcatcagcatctcttctcaagtcttcacttgttcttgacaagtctgagtgggtgaagggacaaacacttcgccaaccttctgctgcatcagttgtgagatgcaaccccaccaccccatcaggcctcaccatcagagctggttcctatgctgatgagctcgtt

SEQ ID NO: 1549 - DNA, 241 bp, Glycine max
  Clone ID: 700958368H1
tttcaatacaatattgctctctaagctttgattcttcttaattcatacccttcccacactcattcattgttgtgcgtctggttttctgcctgaaatggagtacatgaaccagagaccaaaatatgattgccttctttttgatttagatgatactttgtatccactaagcactggtcttgcaaaagcatgtggccaaaacattaaagactatatggccgaaaagcttggcatagagaaaagc

SEQ ID NO: 1550 - DNA, 238 bp, Glycine max
  Clone ID: 700958372H1
cgcagagagagagagatccatcgatcaattaatttccaatggccgatcagctcaccgacgaacagatctctgagttcaaggaagcctttagcctcttcgacaaggacggcgatggttgtattaccaccaaggaacttgggactgtgatgcggtcgcttgggcagaacccaactgaggctgagctgcaggacatgataaatgaggttgatgctgatgggaatggtaccattgatttccc

SEQ ID NO: 1551 - DNA, 238 bp, Glycine max
  Clone ID: 700958373H1
attctctctgtgtatttccctacctctcccttcaagatgcagatcttcgtcaagaccctcaccggcaagaccatcacccttgaggtggaaagctctgacaccatcgacaacgtcaaggccaagatccaggacaaggaaggaatccccccggaccagcaacgtctcattttcgccggaaagcaacttgaggacggccgtacccttgctgactacaacattcagaaggagagtactcttc

SEQ ID NO: 1552 - DNA, 245 bp, Glycine max
  Clone ID: 700958380H1
ctgtgccaattgacatagatctgaccatgagtcatgctagcgtatcagggaaattcaatactcatgcaacaaatggcaaagagattgaagtaattgatttagaaaatgatgattccattcaagaagagaagtcaatcgacaatatggatagaaagacagagactatgtttcctggccttgaaggtttttctagccatgctcaaaatgctgctgacatgcatgatgttcaggatggatatgggctt

SEQ ID NO: 1553 - DNA, 117 bp, Glycine max
  Clone ID: 700958387H1
ctcagtctctgtgtttgcggctgaggattccgaacgagtgaccttcttcgtttctcgcaaagtttaagtaatcatgggtaaggaaaaggttcacatcaacattgtcgtcattggaca

SEQ ID NO: 1554 - DNA, 240 bp, Glycine max
  Clone ID: 700958394H1
cattagcagcgttaaagaagagagaagaaaaatgcgaaagttcgatccatggcccgttttcttcaagcgcgagtggaaacgcaactggcccttcctcgttggattcgcagtcaccggagctctaatcaccaaactttcccttggccttaccgaggaagatgctaagaattccaaattcgttaaggcgcacaaaaggtgatttctgaatcgtgacatctgcctggctttgcactttatgtt

SEQ ID NO: 1555 - DNA, 259 bp, Glycine max
  Clone ID: 700958421H1
tcgtgttgtagctagctcctcgaaaatgctggcacgcctcgccgcgagtcgcttcaacgagatccgtcagattttccgtcagccttctagggctttctcgaccgctctgaactaccaccttgacacaccggacaacaaccctaaacttccatgggaattcaccgaggccaatcaagcaaaggttaaggagattttgtctcactatccatccaactataagcaatctgctacaattcctcttttggatcttgcccagcag

SEQ ID NO: 1556 - DNA, 261 bp, Glycine max
  Clone ID: 700958423H1
aaaagcataaacaaaaaaaaattgaaaatcaaagcaataagaacacgcattctttacttccaattcccaattcttcttctgccctagattttaccccctttattattgcactccaccaccactgtgcatcgatcgatcgttggttcttgaatttcccttgtggttaggtttcctcgatggagtcggaggatgatatgcccgacgccaacgacatcgagtccctcgacgacgatttctacagtggcgagaccgaggacgctc

SEQ ID NO: 1557 - DNA, 253 bp, Glycine max
  unsure (1)..(253): unsure at all n locations
  Clone ID: 700958434H1
ggtttttctttttctcttctcactgcatcgcttcnggttcttctgaaaagatgtctcgcgtgtatgttggtaacttggattcacgagtcactgagagagatctcgaagacgaagtccgcgttttcggagttattcggagtgtttgggttgcacgtagaccacctggttatgcttttattgactttgatgaccgcagagacgcacaggntgctatccgtgaatggatggtatgttcagaagaattatgttgttg

SEQ ID NO: 1558 - DNA, 248 bp, Glycine max
  Clone ID: 700958501H1
ctccgcactccgtcttcatcaatcagcatcaccaccgctccaacacaggggaaaatgagggagatccttcacgttcagggagggcaatgcgggaaccagatcggttcgaagttctgggaagtggtgtgcgacgagcacggcatagatccgacggggaagtacgtcggaaactcagatctacaactcgagcgcgtgaacgtgtactacaacgaagcttcctgcgggcggtttgtcccacgcgcagtgct

SEQ ID NO: 1559 - DNA, 241 bp, Glycine max
  Clone ID: 700958507H1
acgaaatgaaacttgcttctttgatttctggtttcactgattacactcacctcctctctattaaggacaatgtgatgagggaagagaagacaattcctacaaggaagaatgaagtgaagtttttcaagagcttggctcctcctcttgtggctgcttttctagtcttatctccaatttgcagcactccagtttcaagtgctcaaaccgtagatattcagagaggaaccacattgtttcgtca

SEQ ID NO: 1560 - DNA, 242 bp, Glycine max
  Clone ID: 700958508H1
agacacgcgaatggaggaaactcatgaacctgttaggaacaatccccttcccattgctcggcgctaccaagatcagatggttccaagcatcacttcttccttgttgagagtggaagaggaagaaacgtcttctgatcttcgaaactcagcagaagagagcagcagagctgaagtgccagtaactgcaaatgcacaacaaaatgcaggagttgcattgaacgaacggatgttgcagaccacta

SEQ ID NO: 1561 - DNA, 239 bp, Glycine max
  Clone ID: 700958510H1
caaacacaaaccgaaaaggcgaaaggggttttccgagtgagatctagggtttccatcgattcggagagaggatattgatagaacgacctcaacgagcaaggtcaggaggtggagtactagaacatggattcggtgccttcgaattcgcatggaaacctcgatgagcagatttctcagctcatgtagtgcaaacccttgtccgagcaagaggtaagggtcttgtgtgataaggcaaaaga

SEQ ID NO: 1562 - DNA, 238 bp, Glycine max
  Clone ID: 700958512H1
aaacggatctcttcttcagtggtggaagctactagaacactagtttgttgagcactgcgatgaggaagtggacggttgcttccgctctccttcttctctctctcctctttctctttgcagatcaaggtcgaaagtttcaggcgaatgccgagggagattccgacgagcttgtagatcctccgaaggtggaggacaagatcggtgctgtgcctcatggcctttccaccgattcagatgt

SEQ ID NO: 1563 - DNA, 239 bp, Glycine max
  Clone ID: 700958513H1
ctagggttttaggaaaagacactgtctcgcgagtgaacacaggttacagcaatggctttctttggtagaattgggaatttattaagacagacagcaagcaggcaggttagttcagaattgcgatcatccccttcgttttttcaggctatacgcagtatgtcatctgctccaagcacaaagctgtttatcggaggtgtttcatattctactgacgagcaaagtttgagggaagctttttc

SEQ ID NO: 1564 - DNA, 247 bp, Glycine max
  Clone ID: 700958516H1
cagagacagaaaaagaaccccttccgttgtttctaacccgctactttcccgagaaaattccccgagaaaggggaagaaaaacaccaagagaaaccctagaaagcaccaaaatccaaaacaaactcaatcccgatcccgatccgatccaacgaaatggatcattacaaggttctcggcctgcaccgaaccgcgaccaaggaagagatcaaagcggcgttcaagaagctagcgttccagttccacccgg

SEQ ID NO: 1565 - DNA, 239 bp, Glycine max
  Clone ID: 700958523H1
ctcgcaagcaaaaagaaagaatcccaggcgaggagaaagatggaggggaaggagcaggatgtgtcgttgggagcgaacaagttccccgagagacagccgattgggacggcggcgcagagccaagacgacggcaaggactaccaggagccggcgccggcgccgctggttgacccgacggagtttacgtcatggtcgttttacagagcagggatagcagagtttgtggccacttttctgtt

SEQ ID NO: 1566 - DNA, 241 bp, Glycine max
  Clone ID: 700958524H1
gtcccaaagagctaacaagagattcaagaccggcatggctaatgaagaggaacagaaaaaccacctcttcggcatcaaagatctcggtcacaagactctccttcagagtgatgcactctatcagtatatacttgaaaccagtgtctatccaagagagcacgagtgcttgaaagagatacgcaagatgactgcaaaacacccactgaacatcatggcaacaccagcagacgaaggacaactt

SEQ ID NO: 1567 - DNA, 233 bp, Glycine max
  Clone ID: 700958543H1
ctttgaggaaactctcattgtgcaattataggattcgtagtgccttgaaaccatctggacttggacttgtgctcttgtagtttgatactattcagttttggtttcactatgtaattggtaaaaccattcatttgttttgttttattagcttgttgtttcaacattatttcttgttcctttcaaatattggcaattaacatattaggttttcagggtatgtgagagcccatctt

SEQ ID NO: 1568 - DNA, 235 bp, Glycine max
  Clone ID: 700958556H1
ataaccctaagcttcaaacgggtaagtgtcgctgggacttcaatggcagtgaccgaagctcaaaatcctcttcttggagaaaacacatgtggttccttgttaaaaaagcttcaggaaatatgggatgaggttggtgagagcgatgagcaacgagacaagatgcttcttcagttagaacaggagtgcttggatgtgtacaagagaaaggttgagcaggctgcaaagtcaagggcgc

SEQ ID NO: 1569 - DNA, 231 bp, Glycine max
  Clone ID: 700958560H1
agtcaggccatgaatgagaatagagatattgcaaagacccttcttctgtactcaaggtggacgcattacactgggcagaaacaaaaggaagatgtaataagtctttatactagggtgagggaactgcaacccaaatgggagaaagggttcttttatattgctaagtattgtgatgaagtgcttggtgatgccaggaaacgccaggaggaactgcttggtgatgccaggaaa

SEQ ID NO: 1570 - DNA, 234 bp, Glycine max
  Clone ID: 700958566H1
aatgggtccaattccttcctatggtgcaggttcccacgttcttcttttcccgttcatgtccaaaggtcacaccgtaccccttatccacttggcccaaatcctcctccgtcgttccatatcggtcaccgtcgtcacaacccctgccaaccactcattcatggccgaatctctaaacggcaccgtcgcctccatcgtcacgcttccattccccaccgccacgaatatccccgccgg

SEQ ID NO: 1571 - DNA, 232 bp, Glycine max
  unsure (1)..(232): unsure at all n locations
  Clone ID: 700958582H1
ctttattctctcacacaaaataatggntggagaagcttggcaacacgtctcatgatcctgaagtgagaaaggggccatggacaatggaagaagacttaatcttgatcacctatattgccaatcacggggaaggggtttggaactctttggccaaggctgctggacttaaacgtaccggaaagagttgccggctccggtggctaaactacctccgtcctgatgttagaagagg

SEQ ID NO: 1572 - DNA, 230 bp, Glycine max
  Clone ID: 700958586H1
gatcgatcgaacaagtgaattagctagaagcattgaaggacgtagctgctatggctcgaggaaagatccagatcaagaggatagagaacaccaccaaccgccaggtcacttattctaaacgacggaatggccttttcaagaaggccaacgagctcaccgttctatgcgatgccaaggtttctattattatgttctccagcactgggaaactccacgagtacatcagcccc

SEQ ID NO: 1573 - DNA, 227 bp, Glycine max
  unsure (1)..(227): unsure at all n locations
  Clone ID: 700958592H1
cagcaataagttcaggtggaaggagaagcatgttgaagctggcacagcgcatgacgaacaacttctgtgctggtgtgtgtgcctcaacagtgcacaagtggaacaagctgaacgcgggaaacgtnggggaggacgtganggtgatgacgaggaagagcgtggatgaccccggtgaaccgccggggatcgtcctcagtgccgccacctcggtgtggcttcccgtctcg

SEQ ID NO: 1574 - DNA, 232 bp, Glycine max
  Clone ID: 700958595H1
cagcaataagttcaggtggaaggagaagcatgttgaagctggcacagcgcatgacgaacaacttctgtgctggtgtgtgtgcctcaacagtgcacaagtggaacaagctgaacgcgggaaacgtgggggaggacgtgagggtgatgacgaggaagagcgtggatgaccccggtgaaccgccggggatcgtcctcagtgccgccacctcggtgtggcttcccgtctcgccaca

SEQ ID NO: 1575 - DNA, 260 bp, Glycine max
  Clone ID: 700958607H1
gcttgatcagttcatgacccattatgttctgttgctctgtgcctttaaagaacaactgcagcagctcgtccgtgttcatgccatggaggcagtgatggcttgttgggatctggagcagtctctgcaaagcttgacaggtgatctcctggtgaaggaacgggtgcaacaatgtcagacgatgaagatgaccaggcagagagcaatgccaacttatacgaaggaagccttgatgggggtgaaatcttggatttggtcctctt

SEQ ID NO: 1576 - DNA, 266 bp, Glycine max
  Clone ID: 700958618H1
gcaggaacaggcttgaactgttgaactcctacagggtttggaaattttgctaacccaactggatatgccatgattactcctggtgtggttgggggtgcaacggctttagaagattcatctcgagtcaagtacaaagataatcttatgtcccaaatcctcaggctgagacatcagaaatttggttacagaatccaagggaccatcctggcatgcaatctactccatactataacatgccagggcaaacacctcatgcggcttacatg

SEQ ID NO: 1577 - DNA, 265 bp, Glycine max
  Clone ID: 700958619H1
gagaattggggaactcacataatgggcacccctgctgttccaagcagccacccagataacaaaaaagcagctttacaaagtggacaacctcaaccagttcaatactaccatgaccaacatcaacatccctacgtgcaacatacccagttgacaaaccaagcaacagtcccatggagtcaatccttaacatgttcgattcatggagcaaaaaagctgaagccaccgcacacaacgtctggcacaaccttaaaactggtccatcagt

SEQ ID NO: 1578 - DNA, 259 bp, Glycine max
  Clone ID: 700958623H1
caaaaggtcttgaatatctatacaaggacatgccaagcctaattgcaccccatggaaatctcaagtcctctaatgttctcttgactgaatcattcgagccactcctcacagactatggcttagtcccagtgataaaccagatctggctcaggacatcatggtgatatacaagtctcctgagtacttgcaacaaggaagaattacaaagaagactgatgtgtggtgccttggaatactaattcttgagattctaactggg

SEQ ID NO: 1579 - DNA, 263 bp, Glycine max
  Clone ID: 700958632H1
cgagccacttattgtgagagacgggaacagaaggctaatgcaagacatagattgtggtgggttgtgcaagacgaggtgcagtgcacattcgagacccaacttgtgcactagggcgtgtggcacgtgctgtgtgaggtgtaatgtgtcccacctggcacatctggaaatagggaactatgtggaacttgctacactgatatgactacccatggcaacaagaccaagtgcccttagagaaaaaacccattgggaaatttgtgctt

SEQ ID NO: 1580 - DNA, 259 bp, Glycine max
  Clone ID: 700958648H1
cgccttcattgtttgcttgttgatgaagaaaagaaagagcgttagggttcttcgtagtcttgtctattctatgtaatctcattgaattttaaatgtgaagaactttcttaggttttattgtttgacagatccgtattctctttccttcaaaatttcgaagaaattaataatttacgggatgtatatctgttcttcgagatctttagattgaattgtgcaaatatagtaccaacatcccaccggtagttgcacgagtagg

SEQ ID NO: 1581 - DNA, 201 bp, Glycine max
  Clone ID: 700958682H1
gtttcatttatcttcttctgctataggctagagcgattcaccgtagaatattacctacaagaacatgacccggtacccatatttattattacgtggtgtcattgctttgtagaagtggtccgcgggttatttaacgcggtacgatgcgtgtacatctgtaaatcatgagtagaagacgattttttatatttgtgcagaatt

SEQ ID NO: 1582 - DNA, 244 bp, Glycine max
  Clone ID: 700958701H1
gggaaggagagcagatatgaagcaaggaatttacccacaaaattgaatcctcagccagaagaagtatgcccaagtgccgaatggaagtggtctagaactactgtagtttatgatgcttcatctgatcatctcattcctttttatcccctctctttttggaaacattggttcaaccactgggagttacttgcaacttagagctgcaaatattcacaatagaccaatttctggtttaagaggagag

SEQ ID NO: 1583 - DNA, 249 bp, Glycine max
  unsure (1)..(249): unsure at all n locations
  Clone ID: 700958710H1
gcaataactcagccacagccacaacacacaaacacaaacccttcgttcctctctcgttcccttcttcaattcgatcaaacacagaatagtacttttttattatgatggccgtggcccgaaaggaaatggaccggatcagggcccgtggngcccggaggaggacgaggctcttcagaagctcgtggagcggcatgggcccagaaactggtccctcatcagcaggtccattccgggccggtctgggaaatt

SEQ ID NO: 1584 - DNA, 242 bp, Glycine max
  Clone ID: 700958718H1
acaaaattgagatattgcaagtgaaatgaaggccaggcacatctcattcttctcttgatatttctgatggcactcgctgcaaacaaagtttctagcagtcctattgtgactaaaagaacagctctttgcagtcacatgaaaaacactatttttcctcgtcaacaaggatcaatagaatacagttgtcaagacatagactggaacatggacatctgaactatagatgtctccacacacagaga

SEQ ID NO: 1585 - DNA, 244 bp, Glycine max
  Clone ID: 700958722H1
ctttttgattcctaaattctctaaaattcgaaattctaatttcgttaggggaaagagattgtttgtgtgtgagtgagtatggctggaaaaggcgagggtcctgctatcggaatcgatttgggaacgacgtactttgcgtcggcgtgtggcaacacgatcgtgttgaaatcatagccaacgatcagggtaacagaactaccccatcctacgtggctttcaccgacacagaacggttgatcggcga

SEQ ID NO: 1586 - DNA, 247 bp, Glycine max
  Clone ID: 700958731H1
gcagatcttcgttaagacactcaccggcaagaccataaccctagaggttgaaagctccgacaccatcgataacgtcaaggccaagatccaggacaaggagggtatccccccggaccagcaacgtctcatcttcgcggaaagcagctcgaggacggccgcaccctcgccgactacaacatccagaaggaatcaacccttcacctcgtcctccgtctccgtggtggcatgcagatcttcgttaagaccc

SEQ ID NO: 1587 - DNA, 248 bp, Glycine max
  Clone ID: 700958732H1
gaaagaatcccaggcgaggagaaagatggaggggaaggagcaggatgtgtcgttgggagcgaacaagttccccgagagacagccgattgggacggcggcgcagagccaagacgacggcaaggactaccaggagccgcgccggcgccgctggttgacccgacggagtttacgtcatggtcgttttacagagcagggatagcagagtttgtggccacttttctgtttctctacatcaccgtcttaaccgt

SEQ ID NO: 1588 - DNA, 246 bp, Glycine max
  Clone ID: 700958741H1
ggtacagcacgggtgttggattgggtgctgagatcattggaacctttgttttggtctacactgtgttctctgcaactgaccccaagaggaatgctagagattctcatgtgccggttttggctccacttccaattgctttgctgtgttcatggttcacttggcaaccatcccagtaacaggcactggcattaaccctgctaggagtctaggagctgctgtcatgtacaaccaacagaaggcctggga

SEQ ID NO: 1589 - DNA, 245 bp, Glycine max
  Clone ID: 700958757H1
gcaaataaagcacagaacagttgaagtgaatggcataaaaatgcatgttgcagagaaaggagagggtccagtggtgttgttcctccacggcttccctgagctctggtactcatggcgccatcagattctctcttcagctccctcggctaccgcgccgtcgctcccgatctccgtggctacggtgacaccgaagcaccaccttcaatcagcagctacaactgcttccacatagtgggtgatctcgt

SEQ ID NO: 1590 - DNA, 244 bp, Glycine max
  unsure (1)..(244): unsure at all n locations
  Clone ID: 700958780H1
cgtgcacacaaaataatggacaaaaaaccatgcgactcatctcatgatccagaagtgaganagggaccatggatcatggaagangacttgatcttgataaactatatngcaaatcacggtgaaggtgtttggattctttagccaaagcttctggtcttaaacgaacgggaaagagttgtcgactccgttggctaaactaccttcgtcctgatgttagaagaggaaacattacacccgaagaaca

SEQ ID NO: 1591 - DNA, 253 bp, Glycine max
  Clone ID: 700958815H1
cagtttcgggggaagagatccagcagcaatggtgtacgtcaaggctcagaaatcaaaagcctacttcaagagatatcaagtcaagttcaagagaagaagagagggaaaaaccgattaccgtgccaggattcggttgattaatcaggacaagaacaaatataacactccgaaataccgatttgtggttcgctttagcaacaaggacattgttgcacaaataatatctgctagcattgccggcgatttagttctt

SEQ ID NO: 1592 - DNA, 113 bp, Glycine max
  Clone ID: 700958821H1
ggaagtagtcctaatgcagctgatgttcctactttacttggatatggttcattttcgcttcttaatgttgatagaaaaacagctgacaaactggtgaagccccctccacacaa

SEQ ID NO: 1593 - DNA, 254 bp, Glycine max
  Clone ID: 700958834H1
cttgctcagggtcttatagcggaaggtgtcaaggttgttgcagctggggccaaccctgtgctcatcacacgtggcattgagaagacagcgaaagctcttgtatctgagcttaaacagatgtcaaaagaggttgaagatagtgagttggcagatgtggcagcagtcagtgcagggaacaattatgaagtaggaaatatgattgctgaagcattgagcagagttggtagaaagggtgtcgtgacccttgaggaggg

SEQ ID NO: 1594 - DNA, 247 bp, Glycine max
  Clone ID: 700958840H1
cccagaaatagagagtaagcctgagatcatggaaaaagttggtgtggctgtaaatagcaaaaatcaagaatccaaagcaacttccaccattaccattaagggtttcatgagccttctaatgaaaagtgtagatgagaatggtgatggtagcaagagagttatttctctgggtatgggtgacccaactctcaccacttattttcccatctcaaatgtagctgaaaaagctgttgctgaagcacttcag

SEQ ID NO: 1595 - DNA, 248 bp, Glycine max
  Clone ID: 700958847H1
ctccgagctctacaccgaagaacggagccatggggaagacacatggaatgggagctgctcgcaagctcaagtctcaccgcaggaggcaaaggtgggctgataagtcatacaagaaatcccatcttgggaatgaatggaagaaaccttttgccggttcatcccatgccaagggaattgtccttgaaaagataggtattgaagctaagcagcccaactctgctattcgtaagtgtgccagagttcaactt

SEQ ID NO: 1596 - DNA, 248 bp, Glycine max
  Clone ID: 700958848H1
tgatgttgaagttggctgtgaagaggattctccttatgtgcctgagccacaggcaagtgagaaacaattagaagatgcttcctttcctgatactcagctgcatgaatatgtgcagggagaagagcatggtcatgacaaagagagtgggcaaagaaaaggtcgtagccggggccggggtaagggacgtggccgagtacattgtcatcaaaataatcgtgtgggaacaccctcttcaaataatacaattt

SEQ ID NO: 1597 - DNA, 249 bp, Glycine max
  Clone ID: 700958851H1
tattgctaccctggctttcccttcattcacattttgcagggcgcttctttctcattgctggcaaaatggcaaatgcagcgtccggaatggctgtgcacgatgattgcaaactgaggtttcaagagcttaaatcaaagaggagctacaggttcattgtgttcaaaattgaagaacagcaagtggtggttgagaaattaggggatcccacggaaagttatgaggactttatggccagttttccagctaatg

SEQ ID NO: 1598 - DNA, 248 bp, Glycine max
  Clone ID: 700958867H1
ccgcaacaatgcaaatgaacagaatgaacagagaagaacatctttatactgccttccaatactttgataaagataacagtgggtttattaccactgaagaactagaacaagccctccgtgagtataacatgcatgatggcagggacatcaaggaaatccttcaagaagttgatggagataatgatggacgcattaactatgatgagtttgcggcaatgatgagaaaaggaaatccagaagttatgaca

SEQ ID NO: 1599 - DNA, 163 bp, Glycine max
  unsure (1)..(163): unsure at all n locations
  Clone ID: 700958885H1
cactctcactctttccgcgagaggtttgatgnaactctcactggtcacaggaatgaaattttggcccttttgtgcaaggcttgaagccaagggcangggaatcctncaacaccaccaggtggttgcagagtttgaagaaatccctgaggagagcagaaanana

SEQ ID NO: 1600 - DNA, 239 bp, Glycine max
  Clone ID: 700958887H1
cacgatgatgaggtcaaggatagtgttgtttggagactccatcacggagcaatcgatccgagagaatggatggggtgttcctcttgccaatgcctattctcgcagggctgatgtacttgttcgtggttatggtggatacaacactaggtgggctatgttcttactgggccatctcttccctctggactcaactaaaccacctactgctaccacaattttctttggcgctaatgatgcag

SEQ ID NO: 1601 - DNA, 240 bp, Glycine max
  Clone ID: 700958906H1
attggttgctgttgattccctctctatatgcatgaatatcaatgggtgggaagccatgctcttcattggagtaaatgcagctgtcagtgtcagagtttccaatgaacttgggcttggacatccaagagctgccaagtactctgtctatgtgacagtctttcagtcgcttttcttgggaatctttttcatggctattattttggcgactagagattattatgccatcatttttacaaacag

SEQ ID NO: 1602 - DNA, 184 bp, Glycine max
  Clone ID: 700958908H1
ggatttgcaaagcaagtgacaaattctgtattagtggaccctggtatgggaggatgcactgtcgagaactgggtattattggacccattaattgagtgctttcggattaattccagtttgggtttctgttgattacatttgcagaacggtcgatcattttaaataaattaaaataatttatagt

SEQ ID NO: 1603 - DNA, 248 bp, Glycine max
  Clone ID: 700958914H1
tttgacagccgcgttttcttgttctctcgccgctgcttctctctccgccgccgccggtttccgccggaataaatgcttcccctccaagttttttcattcctcttccacgtgcatgccctcttccttgcatgatcaccactaccactctttcttattgcgagttgccaatgatgctgataggagtgaaatgtcatctgataccgcaaccgaggcatcgtattcagaagctgataagatggttgatggta

SEQ ID NO: 1604 - DNA, 253 bp, Glycine max
  Clone ID: 700958916H1
cctattcacaaactagaaagaggagaaaaggcataacaagagagagatggattctctgaagatgttgaaaggttatggtaaagtagaacaccacctcgaagatcatcgtaaccccaaacccaaacctaaattctcaaaacccttcatcgccgcaatttccgtcttcgcaatcctcttccttactctcaccttcgcattcgccctagcatccatgctccaccacagtcaccacaccgagtcacaacaacaactt

SEQ ID NO: 1605 - DNA, 240 bp, Glycine max
  Clone ID: 700958920H1
cgaataggaaattgagaattgctgctgctaatagacaagcttccattaagatgggggagttcaccgggagtggtgagtatgtgactcacggtgaattaccttcctccaggccaaatcattcaaggaaagttacagttcttcctcttgtgtttctcatcttctatgaggtttcaggggggcctttcggggtggaggatactgtgcacgcagcaggtcctctgttagccctcattggattct

SEQ ID NO: 1606 - DNA, 240 bp, Glycine max
  Clone ID: 700958922H1
gcagaacctcatctggataaaggagccatttctcaaccacaggctgaggttgatctattttcttcacaaccagccattcctgcagttacacctacagttgacttgttttccattcctgaactggcagtgcagccaaacaacaagtcggagaagtctgttcctatgaataacagctctatcgatccctttgctgctgttcctcttaataattttgatggatctgatatttttggtgatttt

SEQ ID NO: 1607 - DNA, 241 bp, Glycine max
  Clone ID: 700958923H1
cacattttcttagctctctccaacaatccctctcgttcacactttcagattgtgtgaagatgggggctggtggccgaactgctgttcctcctgccaacaggaagtcagaggctgaccctttgaagcgggtaccatttgaaaaacctcagtttagtctcagccagattaagaaggccattccacctcactgtttccagcgctctgttctccgctcattctcctatgttgtttatgacctcac

SEQ ID NO: 1608 - DNA, 243 bp, Glycine max
  Clone ID: 700958941H1
ctttgaaagactgcaagtttcctgagtacctcatgcttgaccctgggggaactgagtctgagggagtttcacttatgaaggtttgcccatatacatattgttctcttaatggccatggtcatggtcattctcctttgcctccattgaagagcttcatgtcagcaaggaggcatcttttggagactcagaagaatataaaggcggaagttgcgagccctcaaagatggaaggtgcccccctgtg

SEQ ID NO: 1609 - DNA, 240 bp, Glycine max
  Clone ID: 700958950H1
ggtatggagggcaaatatacctcatacccatcttgcaactgagaaatctgaccagagatggatggttgtaaaaggtgaaaagataggttttcctggtggaggaacccacttccattatggcgctggcaagtatattgcatcaattgccaatgtaagctagttactcctatccggtatggcactaaaataatcaccaaaacatgaaactcttatatgactggaaaaagttataagtttgta

SEQ ID NO: 1610 - DNA, 241 bp, Glycine max
  Clone ID: 700958956H1
gaaaaaaagcgtttgtgagtgtgagagagtcataacaatggttgtggaagatgcccaaaaatcagccatcacggaggaccaaaaccctagcagggtcgccaacgacaacaacgacgacgaagatctcgaagagggggagatccccgacgacggtgacgacggcgcctccgccacatcaaagcctccgtccgccctcgtccgcaacccccaccctctcgagaattcctggaccttctggttc

SEQ ID NO: 1611 - DNA, 243 bp, Glycine max
  Clone ID: 700958965H1
agaatgaagcggagggtgaagaggaaagtgcctgaagctaactccaacactatgataatcattcggatacaggggtgagtgaagaaaaaagacatgcatcctaggactaggaaggtgttgtacagcttggggttgaggagaaggttcagtgctgtgtttgtgaagccaagtgagggaataatggccaagctgcagagggtggaaccatatgtcacctatggatatcctaatcttaaaagcata

SEQ ID NO: 1612 - DNA, 236 bp, Glycine max
  Clone ID: 700958971H1
ttctttttattttgtcaggtggcggccttatgatgatccaaccatcaagtctaaaatcgacttgtctgacaaagacattagcaagaaaaatcaagcccggtttcagatcactgaagcactgaaggcaaagcggtcagaacgagccgagttgatttctcaggtcaagtctctaagaggcgacagtaggcaatttcagagtattgtggatgagaaattgaaagagattggacctctgc

SEQ ID NO: 1613 - DNA, 240 bp, Glycine max
  Clone ID: 700958973H1
gaagaaggtgggagatggagaagccacaaaacggagaagaaaaggaagaaaccacggcctctttctgcggttacgattctcttcaccgtcttctcaaggataatcttaacccccatcacttccaggaagtcagccgtttgcttactgggcttaattgtggaaaagcacttgaagcagtttctctcccagaatctgcaacttccctctctgcggaacatggttttgacatccaggcctttt

SEQ ID NO: 1614 - DNA, 118 bp, Glycine max
  Clone ID: 700958976H1
gcttcaggggtgtagatcttctcctgtttttggagacttgagtgtttgagctagtagttgaagttgtacaattattttttgtctttatttttctattaatggatcctgtttttaacgc

SEQ ID NO: 1615 - DNA, 247 bp, Glycine max
  Clone ID: 700958980H1
cttcttcttttacgttcattctgttttcatagtgaggatcttctgaagaaatggcaaatcaccctttgacacactctcactctttccgcgagaggtttgatgaaactctcactggtcacaggaatgaaattttggcccttttgtcaaggcttgaagccaagggcaagggaatcctgcaacaccaccaggtggttgcagagtttgaagaaatccctgaggagagcagaaagaaactccaaggtggtgt

SEQ ID NO: 1616 - DNA, 238 bp, Glycine max
  Clone ID: 700958982H1
aaacaaaacaaaatgtaagagagagaaaagaaaagaagaaggaagccccaacccgataatcatactcgtacttgagatgatattggataatctcaacctcaattttcctcaataaacaatcactttcactttttttctctcctcttcatttctgaactcatccccatggatccctttgatttgatacgcgaagggtttggttgaggctgactggacatgtgctgttactacttttaaa

SEQ ID NO: 1617 - DNA, 235 bp, Glycine max
  Clone ID: 700958985H1
gatttgcagagggcgtttcgtgatgatgcgtggaggaacattgtgcctggccttcctgctgttattctcaggtgtacgtgtaggctcgccaacgctgtctctgctggcaccattctcgcttctagacaggtgagaaggaagcttgtagaagattggttgccggttttggttgtatgcaaagataatgtttcaccaatatcacccagcaacaaatcgttgtatctggaactggaag

SEQ ID NO: 1618 - DNA, 240 bp, Glycine max
  Clone ID: 700958992H1
gagaagtgcaaaaacagtgtaaaaaaaaggaaaagaaaaccaatatgaagttcactataatcacaatatttttctctttatttctacttgactttggttttgcacaacagggggatcttgacatatcaagatttggaggaaaaccaaatacaaatataggccaggctttcttaagtgcctggactcaagcatgtgcatcaccaactgctgtcaaaattgtgattccagctggcacatacc

SEQ ID NO: 1619 - DNA, 241 bp, Glycine max
  Clone ID: 700958993H1
gagataactagaaacagtgtgatgaaaatgaaggtccttgttttcttcgttgctacaattttggtagcatggcaatgccatgcgtacgatatgttccctctccgaatgaacactggctatggtgcccgtactccggaggtgaaatgcgcaagttggaggcttgctgtggaagcacacaacatctttggctttgagaccattcctgaagagtgcgttgaagcaacaaaggaatacatccatg

SEQ ID NO: 1620 - DNA, 244 bp, Glycine max
  Clone ID: 700958995H1
ggcaaatctgcattgcgatggcgcctccgaagctcttcgtctttgcgctttctgtaaccctaattttcgccatcgttggggccgaagccgatatttccatcgaaggaagcactccagagcctgatacctccgccatcaggatccaattagatcaactcaattccaagatccaaattctcgagtctcaaatcagcgaaaagttggaagaagtgaagaagaaggacgaaattatagcagaaaaaga

SEQ ID NO: 1621 - DNA, 261 bp, Glycine max
  Clone ID: 700959005H1
cttggaggggtcattcagaaacttcaagacactagggagcagcgcatagaagaacctattctttacattaagatgcaaatagcaatattcaagcttgagcaaggtgatcaaaaggaatgcaagaaacttctagaagatgggaagagtacactcgacagcatgacagatattgatccatctgtatatgctagctattactgggtatcatctcagtttcataagacatgccaagaatttgctgagttctacaaaagtgccctt

SEQ ID NO: 1622 - DNA, 260 bp, Glycine max
  Clone ID: 700959007H1
cttgaatttttcaacaacatcctccgtgagaagctccactcctttctccttagccgtctgatatgctgaccatgatcttatgtaggtcaagaaatcatccaaatccatcattgtttccgtcacaaactcaaagggtcctgtgtgatcagctccatccacgggctcaaatggaaaatcaatgcttctataattgtcatcaacccatttacgagctgggtcccaataagggcttacattagtggaatagaattggtcaaaga

SEQ ID NO: 1623 - DNA, 262 bp, Glycine max
  Clone ID: 700959018H1
gttttctatttgtccaccggattacaattgggcaaaaaagaattttgaaatacaaggtgcagcaatgatgaaaaatattctaaatgaggctcgaaccacaatgaataaaccaaattgggtcaaagacgatgtttgggagagattatgtgagcattggaaatctgaagaattaaaaaagaagagcacccaagctaatatgagtaaagagactggcacccttcctactccattggacttgtttcgtctcaagcatcaactttca

SEQ ID NO: 1624 - DNA, 265 bp, Glycine max
  Clone ID: 700959046H1
gtacttccttaatttgccaccctaacctactgcattattattctcttccccttaatttctatctccaatccctcagcaaaacgcagcaaatgggtcggcttaatctcctacttgtgtggtcactctcattaacactgtccctttattatctacacccaatctctgctcagctcagtccaaaccactatgctaaaacatgccccaatcttgaaagcatcgttagacaggccgttaccaagaagttccaacaaacctttgtcaccgt

SEQ ID NO: 1625 - DNA, 258 bp, Glycine max
  Clone ID: 700959050H1
tctagagctaacttgcctgatcgcagtattctggataaaaaggatgaaaaagatacatcaaaaactgctgctatgattttacaatatgaatatgaagatgagtatgacgactcttttgatgacttgggtctaagtgtagcagactctggagtagaagaaaatgagacattgagcgaccaaataacgcaaagtcagggaattcgtgggcaacagggggtaactctgtcaaaaatgcccctgattcaaaatggggctcca

SEQ ID NO: 1626 - DNA, 264 bp, Glycine max
  Clone ID: 700959063H1
ggaagaagacaattcaactacgagttttaccccaagacacaagccaagaatacttacagtttaccttttcttgctcaaaccaacgacgctaacgctgaaaacaatctctacccgtttgtttttctaaacgtcgatggcaacctttttatctttgccaacaaccgcgctatcttgttcgattacaataagaacagtgtcgtgagaacctaccctcaaatacccggtggagatccacggtgttatcctagcaccggttccgcagtt

SEQ ID NO: 1627 - DNA, 253 bp, Glycine max
  Clone ID: 700959072H1
ataggatggagggggttgagagcaaagaaagagaagtgatggtggcaaaaccagttgcagtgggtgtcagtgatttgcttctgaggctgttggccttcacagtcactcttgtcgctgctatagtcattgcggtcgataagcagaccaaggttgttcccattcagctttcagattccttaccacctttggatgttcctctcactgctaagtggcatcaaatgtctgccattgtgtactttctggtgaccaatgc

SEQ ID NO: 1628 - DNA, 256 bp, Glycine max
  Clone ID: 700959082H1
ctgaaatttccgattcgggatggagaaatacgagctcgtgaaggatataggatctgggaatttcggtgtggccaggctcatgcgacacaaagacaccaaggagcttgttgccatgaaatacattgaacggggtcacaagattgatgagaatgttgcgagggaaatcataaaccatagaagtcttcggcaccccaatattattcggttcaaggaggtggttctgactccaacccatctgggtattgttatggagtat

SEQ ID NO: 1629 - DNA, 256 bp, Glycine max
  Clone ID: 700959083H1
atggatgagtgggtgcagaaccctactgcacatacagccttggatgaaattcttccttgtgtggataatgcaactgcgcaggaaaccttgtttcgaaccagggatgtgacacaccaacttgctaacttacttggcaacattgtttccaatgtcacaaatagaaatctcccacctgctgctggacccttgtattacaatcaatcaggccccttgatgcctcctctgtgcaatccatttaacaatgatctcacaaatc

SEQ ID NO: 1630 - DNA, 257 bp, Glycine max
  Clone ID: 700959088H1
ctcacagatacagaacctgtctcccttctctagtgtaatggcttatacaaattctttgcccagtgcactgttggcttcaactgttcaaacagcaagggaggatatcccatactcacccttccctgcaacacaatcaatgcctgcaaaatatagcaatattgcttcttcaattggtggtcccactataaacatgtcagaggctctaagggcaaataacatttcaacacctcaacctaatccacaagccctgcctggtg

SEQ ID NO: 1631 - DNA, 261 bp, Glycine max
  Clone ID: 700959094H1
caatgacaagggtagattgtcaaaggaagatattgagaagatggttcaagaggctgagaagtacaagtctgaggatgaagagcacaagaagaaggttgaggccaaaaacgctttggaaaactatgcatacaacatgaggaacaccgtgaaggatgacaagattggtgagaaacttgacccggctgacaagaagaagattgaggatgcaattgagcaagcaatccagtggttagacagcaaccagcttgcagaagcagatga

SEQ ID NO: 1632 - DNA, 243 bp, Glycine max
  Clone ID: 700959106H1
ctctagcgtgcacacaaaataatggacaaaaaaccatgcgactcatctcatgatccagaagtgagaaagggaccatggatcatggaagaagacttgatcttgataaactatattgcaaatcacggtgaaggtgtttggaattctttagccaaagcttctggtcttaaacgaacgggaaagagttgtcgactccgttggctaaactaccttcgtcctgatgttagaagaggaaacattacaccc

SEQ ID NO: 1633 - DNA, 127 bp, Glycine max
  Clone ID: 700959129H1
attacaataattatcaaacctaaccagtaaaaatggtgaccgtggaggaaatccgcaacgctcagcgttcccatggacccgccaccatcttggccttcggcaccgccacgccgtccaactgcgtctc

SEQ ID NO: 1634 - DNA, 153 bp, Glycine max
  Clone ID: 700959153H1
caggagagaaaaattttcccattttatcccttcagcttgcttcatttgcattcgacttgggttaacagtgacctagagagagaaaaaaaagaaaagaaaaagatgtgatccggtgcgtccctccaaaattgaggcagaaagaggatagaagtg

SEQ ID NO: 1635 - DNA, 120 bp, Glycine max
  Clone ID: 700959159H1
gagatggcaaagaatgtggggattctcgctatcgacatctacttccctcccacctgtattcagcaggaattgctggaggctcatgatggtgccagtaaagggaaatatactattggactt

SEQ ID NO: 1636 - DNA, 121 bp, Glycine max
  Clone ID: 700959161H1
ctgattctgaggaggagctgaaagaggcattccgggttttcgacaaggatcagaatgggttcatctctgctgctgagctccgtcatgtgatgaccaacctcggggagaaactcaccgatga

SEQ ID NO: 1637 - DNA, 235 bp, Glycine max
  Clone ID: 700959180H1
gtgactatccggagagtatgaaatcttcagtaggttctaggctcccaaaattcacaaaagctgaatctgaaggtctaaaaaattccatagattttcttggtgtgaattactacaccacttattatgcggaacatgctgaacctgtcagtgccaaccgaaccttctacacagacatactagccagtctcagtacggaaaggaatggtctacatgttggaaccccgactgatttgaa

SEQ ID NO: 1638 - DNA, 233 bp, Glycine max
  Clone ID: 700959188H1
caaaaaagaaaatgatgctcggagagcaccatcgcgcgaatccaacggttcacgtgccaccgtggccaacccacgacgatccaacggccgagatgtactccgcgtttttaacaaacgacgtcaatgctggtgagtactctccgtactatcttcaagaagcactaacggctctgcagcgttttctgccgtctaacgaaacggacgctgactcggacacggaggctcaacccgac

SEQ ID NO: 1639 - DNA, 118 bp, Glycine max
  Clone ID: 700959196H1
gacaaacccaacattgtcactggagccaacgttcaggtttgctgggagaaatttgcaaggtactttgaggtggagttaaaggaggtgaagctccgtgatgattattatgtaatggacc

SEQ ID NO: 1640 - DNA, 268 bp, Glycine max
  Clone ID: 700959201H1
ccccggttcagctcggcgagatcacggcggaggagctcaaggcctacgacggcaccgatcccgagaagcccttgctcatggccatcaaggcccagatctatgatgtctcccagagcaggatgttttatggacctggtggaccttatgccctatttgctggcaaggatgctagcagagccttagcgaagatgtcttttgaagagaaagatctgactggggatatttctggtctcggcccattcgagattgatgccttacaagactggga

SEQ ID NO: 1641 - DNA, 264 bp, Glycine max
  Clone ID: 700959203H1
cacctccttaatatccatcactgcctagctagctagctcgcacatttaattatattacacatattttgctagccaagaaatactatcattgaatatatggggagtgtagattatgagtaccctttaggcatgaacaacgttgagagagtgcaccaagtggaggttccaccacctcaaccgtttttcaagtctcttaagtactctttgaaggagactttcttcccagatgaccctttgaggcagttcaagaacaagccagcttcc

SEQ ID NO: 1642 - DNA, 262 bp, Glycine max
  Clone ID: 700959206H1
gtgcagtatagaatgcacccccagattcgggatttcccttctaggtacttctatcagggacgccttactgatagtgaaagtgtggctaaattgcctgatgagccatactacaaggaccctttacttagaccatatatattctatgacatcagacatgggcgcgagtctcacagaggtggatcagtgtcttatcaaaacatacatgaagcacaattttgtctccgactgtatgagcatgttcagaaaacagtgaagtctttgg

SEQ ID NO: 1643 - DNA, 258 bp, Glycine max
  Clone ID: 700959210H1
agcgaggtagggttttcgttgttcccccgtctttgaattcagttcgcgacgatggggtccatccccgatccaggcgagttgagcgagttgactcagccgagcttcgacgagttccagcgccaaacttccctcatgaccagctgcaccctcctctggaaggagctctccgaccacttctcctccctcgagcaagacctcaaccacaaatccgaagccctcaaacgcaagattcgcaccctcgacaacactacttccgac

SEQ ID NO: 1644 - DNA, 255 bp, Glycine max
  Clone ID: 700959212H1
atgacaaggagtttattgtatgctctcttgatttgctttctggactagcagagggtcttggcagtgggatagagagtttggttgcacaatgttctttgagggacctacttctgcattgttgtgtggatgatgctcctgatgtaagacaaagtgcctttgccttacttggagaccttgcgcgagtgtgctcggttcatttggactctcgtttgtctgagtttcttgaggctgcagccaaacaactggagatttcta

SEQ ID NO: 1645 - DNA, 264 bp, Glycine max
  Clone ID: 700959218H1
tgaagttgagcaacccgtttttcagtctcaggagaaggatgaaggaactgcaaattttcaaggacatggatctgaagaagatctgtctgatcatgagggagagcttcagaaggatgaagtagaagcagaaaatgcaggtgaagtggtgtcagctcaacatgaacaggcgaaccaacaagcagatgtagagtataatgagcgagatgtagaggcaaaggaccagcagtcataccccaggaggggttatcagaaccatagaggtgg

SEQ ID NO: 1646 - DNA, 262 bp, Glycine max
  Clone ID: 700959219H1
tggaaaactccacagaatctttttctcctgtagcacttaaagaatttggagagaagagacaagggactgcaaatggctgtagactctttaggattcagttacatgacaattctaattctaatgaagaaagtctaccaatggtcactttgtcaggaaggatgggtgatgatggcccccttccatctttggatgctgagtctgaccagcattctgaaccatcaaatgttaatcgatctgatatcccttcggtaagctgtgatgc

SEQ ID NO: 1647 - DNA, 257 bp, Glycine max
  Clone ID: 700959224H1
cttttacaatggagatatggaatagttggtgggttttgcaaattatgcaatttctgggtttttttagtttttggatttcatttgcaaagtttaggactttattctcaagagcttttggttatggccacaaggttgtgaagggtgactgcagtacttggatctttgtttccttcaatgggttggtcacagttggttctttcatattcttcctcttggtcctttcctgggcttatttatacgcatttcccagttctcaa

SEQ ID NO: 1648 - DNA, 215 bp, Glycine max
  Clone ID: 700959226H1
atttcaacttggtaatggagccttgctaggagcaagttatattcagagtgtgacacagcatttatcattgggtggggaggtattttgggctggtcagcatcggaagtctggtattggttatgctgctcgctacaacactgataagtcggttgctacagggcaagttgctagcactggaatggttcttctaagctatgttcagaaggtatctgaga

SEQ ID NO: 1649 - DNA, 255 bp, Glycine max
  Clone ID: 700959227H1
aaaaaaagttgtgctgtgccgcctcttccgtaggcagcagcaatggcctcaaatcccaaaactttgacctttgaggaggtagctaagcacaacaacaaaaaggattgctggattattatcaatggaaaggtgtatgatatcacaccatttttggatgagcatccaggaggtgatgaagttttgctgacgtcaacagggaaggatgccaccattgattttgaagatgtgggccacagtgattctgctatagaaatg

SEQ ID NO: 1650 - DNA, 264 bp, Glycine max
  Clone ID: 700959232H1
ggaaatcttcattctttgttccatcaacagatggctatgccaaagcaggtgtgaaatggataggctatgagcctcgttgcacaccatactggccgcatactcttctttgggctgtggcattctcattgcccgagtttgttgttgatgcttggcgcctgtggttttgcttgggtattcgaaagaggggacagcgcaaagagtccatgaagaaggaataaaaggatgcttggttctgatgtgtaggccaatagacgctactcatct

SEQ ID NO: 1651 - DNA, 255 bp, Glycine max
  Clone ID: 700959242H1
gctatagtaagctacacttatttgaggttggagaaatatggctaaagatgttgaggttcaagagcaaggaggagagtactctgcaaaagactaccatgaccctcctccagcacccttgttcgacccagaggagctcacacagtggtccttttatagagccctaatcgctgagttcatagcaacccttctcttcctttatgtcaccgtgctcaccattattggctacaaaaggcagactgatgccacgctaggtgg

SEQ ID NO: 1652 - DNA, 263 bp, Glycine max
  Clone ID: 700959249H1
gagaaagggagaaagggtgtgagaatggagagcaaagaggaagatgtaagggttggagcaactaagttctcagaaaggcaaccaattggtacagcagctcagggtgacaaggactacaaagaaccacccccagcacctttgtttgagcctggtgagctaaagtcatggtccttctacagagctggaattgctgagtttgtggccactttcttgttcctctacattaccatcttaactgtcatgggtgtcaacaggtcaccctc

SEQ ID NO: 1653 - DNA, 251 bp, Glycine max
  Clone ID: 700959259H1
gtctgcttcaaatcttccggatggtgctgggcgttcttttgctacgtcattctctggttctattcagggattgcacaacattcatgggaactttaatgtacccaatatgcccagtacactcacatcaagaaactcaacaataaatagtgttccaactgggggaggagttcagcaaccttcggcaagcctttctagtggaagatttgcatcaaataatctacctgttgctctgtcacagctatctcatggaa

SEQ ID NO: 1654 - DNA, 259 bp, Glycine max
  Clone ID: 700959263H1
taaagacaaatgtgattggcacactgaacatgcttgggcttgcaaagcgagtaggagcaaggattttgcttacatcaacttcagaggtatatggggatcctcttgtgcatccccaacctgaaagttattggggcaatgttaaccctattggagttcgtagttgctatgatgaggggaaacgggtggccgagacattgatgtttgattaccataggcagcatgggattgaaatacgcattgcaagaatctttaacacata

SEQ ID NO: 1655 - DNA, 262 bp, Glycine max
  Clone ID: 700959264H1
gtagaatgtaaggaagttgtttctgaatatggagaattgttatgggatctcttggtatcaggggtacgacctgatgatgtatgctcacaggttggtttatgtttcaaaagggctaaatcagagaggttaggatttggtcttttaaatttgtaagaagcattttttatatatcaatgttttgtatgctctttttgtcatatttgattcagtatacttcgattgagtaatgatttaaagatgtttgatggatgcttaataattc

SEQ ID NO: 1656 - DNA, 254 bp, Glycine max
  Clone ID: 700959283H1
ctacactgtgggagagtaccttctcttggctgctgttagtgcactgcaagtcatatacatcaggcgcctcttcagcaagtcagtggcctacaatcgtgtttgagtccccttcatgattaacgttatggtttccttcattagcaacaggattaggtttattacatatgcgttctctattcaacagtacgattacaatcccttggtgaacactttttttcttttcaagagagactccacttgtatgttgataccca

SEQ ID NO: 1657 - DNA, 247 bp, Glycine max
  Clone ID: 700959291H1
gccgaaccttggctgattacaacatccaaaaagaatctaccctccacttggtgctccgtctgcgcggtggtatgcaaatctttgtgaagacccttactgggaagaccattactttggaggtagagagctcagacacaattgacaatgtgaaggcaaagatccaagacaaggagggtatcccaccagaccaacagaggctcatttttgctggcaaacagcttgaagatggccgaaccttggctgatta

SEQ ID NO: 1658 - DNA, 247 bp, Glycine max
  Clone ID: 700959292H1
atcagaaagggctttctcataaacgagttagaaaggccaaggagaagaagtcatcagatgttgatagggtccctgaaaagaatatcaaatgcttatcttgtggtgcaaatgtcttgattactcttggtgataagggttggagagaatccggggcccatgttgtactagagctgtttgaccacaatgagtggagactttctgtgaaacttctaggaattactaggtattcatacaaagcacatcagtt

SEQ ID NO: 1659 - DNA, 254 bp, Glycine max
  Clone ID: 700959295H1
cagtgcttcccttgaagcttttcgagattgtgctctccaggatctttacttgggagagtatgatggtgttaatgataattggatgggtgtcatctcatcccagggttcatctttgctttctgtagatctttctgggtctgatgtcactgattttgggctgacataccttaaagattgtgaaagtctcatttccttaaatctaaattactgtgaccaaatttcagatcgtggactagagtgtatcagtggtctgt

SEQ ID NO: 1660 - DNA, 259 bp, Glycine max
  Clone ID: 700959296H1
aaaaccggtttctcttgtcacaccaaatggaccgacccgccgccatattttccgacaccgtcaacctcaacggcacggtgacgcagctgtctctgctcgccgacgggaggctgtggtggccggagggcggtcaacgcaatttgagcatcgagaaagaggttctcgggttcaccggcgacggtcccgatataaggctcaaaacaatcgtggaaaccgaagatggatgctgtggcggtgcaagcagagcaaaactagtccg

SEQ ID NO: 1661 - DNA, 262 bp, Glycine max
  Clone ID: 700959309H1
gacttgatgaaattgcagttgtcaggcattgatgaaacccagcaaccatcatcatctcttatctacccaactggaaaattcaacatcccaaagcattttctgtattttgttcaagattcggccctttcttcaaagatcacggttcatccagatggtcaaatgacatttatgggtaccgcaattgagttgaaagatcttctctctgtagttgctgagtcatgcttatcaaaatggtcacgaagggatgaaaagcaatctatgc

SEQ ID NO: 1662 - DNA, 256 bp, Glycine max
  Clone ID: 700959312H1
ggtgattataggtcctgatggtaaaacaataaccgtacacgggaggagtttgataaacttgtaccaagagaatgcgtaccctttcaccaaggccaaagtggaggagctggagaaacagctggaggaagaggccaagggtcttccagcattggtgtatcaccaagggcatcgacatgatctgaatttggtgtctgatggaaatggtggagggccctttatctgctgcgtgtgtgatgaacaagggtctagctgggcc

SEQ ID NO: 1663 - DNA, 259 bp, Glycine max
  Clone ID: 700959318H1
aagaagaggagatgaatgggtcatagttaagcctgtcccaaatgcattcgtcatcaacattggtgaccaaattcaggtgctgagcaatgcaatatacaagagtgtagagcacagggtgattgtgaactcaaacaaagatcgtgtgtccttggcattgttctataatccgagaagtgatttactcattcaacctgccaaggagcttgtgacagaggagaggccagccttgtactcaccaatgacctatgatgaatacaga

SEQ ID NO: 1664 - DNA, 253 bp, Glycine max
  Clone ID: 700959329H1
cacttttctactttgagtcttcttgatccttctttttctccttgaactcaaacatggcagatgaggtggttctgctagatttctggccaagtccatttgggatgagggtcaggattgcacttgctgaaaagggtatcaaatatgagtacaaagaagaggacttgaggaacaagagtcctcttctcctccaaatgaacccggttcacaagaagattccggttctcatccacaatggcaaacccatttgtgaatc

SEQ ID NO: 1665 - DNA, 262 bp, Glycine max
  Clone ID: 700959333H1
atccctggcaaaagcttttgttgtaattgcaaaagaaagtaataatctccaatttgcttgggaattaagtgcccagatccacaattcgcagatgctcctctcgaatgcagccactaggcgtcttcctttaacaaccagggaaacagaaagggctatccatgatatggcattattgttataccaggcccagcagctccattatgatagtgcaaccatgatcatgagattcaaagcaaaaattcaagctcttgaggaacagatg

SEQ ID NO: 1666 - DNA, 258 bp, Glycine max
  Clone ID: 700959334H1
ggaaagtcttacccaaccgtgagcgctgattaccagaaggccgttgagaaggcgaagaagaagctcagaggcttcatcgctgagaagagatgcgctcctctaatgctccgtttggcatggcactctgctggaacttacgacgtgagctcgaagaccggtggtcccttcggaaccataaagcacccctccgaactcgctcacggcgctaacaacggtcttgacatcgctgttaggcttttggagccactcaaagcggag

SEQ ID NO: 1667 - DNA, 257 bp, Glycine max
  unsure (1)..(257): unsure at all n locations
  Clone ID: 700959339H1
aactaactccctctcaatcccctaccctaattcctccaatttccccattttttttctaattaatcagatttgcaaaatcctaatttctctatcctaacaaaaaccccaaattcaaacaaatccaatggcttcgattccgcgtccggcgagttngngatcttcggagggaggaggagatccggctgcgatggacgagagaaagaggaagcggatggagtcgaaccgcgagtccgcacggcgatcgcggatgaagaagc

SEQ ID NO: 1668 - DNA, 253 bp, Glycine max
  Clone ID: 700959342H1
ctcataacaggagcagcaggcttcattgcatcccatgtatgcaacaggatagtgcgaaactaccctgactacaaaatcatagtccttgacaagctcgattactgctcaaatctgaagaatctcattccctcgcgttcatctccgaatttcaagttcatcaagggagacattggaagtgctgatttagtaaactacatcctcctcacagagtccattgacaccatcatgcactttgcagcacaaacccatgtag

SEQ ID NO: 1669 - DNA, 254 bp, Glycine max
  Clone ID: 700959350H1
ttctcaaatactcaactcattagcccttatcttgcccttattcctcttcatgattctgatcctaaaactagggagaaaactcaagagaactgaattgtctctaaacataccccgaggaccatggaaactgcctattataggaaatttacaccagcttgttacatcgacaccacaccgaaaattaagagacctggccaaaatatacggacccatgatgcatctccaacttggggagatcttcacaatcgttgttt

SEQ ID NO: 1670 - DNA, 256 bp, Glycine max
  Clone ID: 700959356H1
caatgcagagatccttttccgtgaggatgctacagtggatgatctcatagatgtcattgaaggaaaccgaaaatacatgaagtgtgtatatgtctacaacaagatagatgttattggtattgatgatgtggacagattagcccgtcaaccaaattctgttgtcattagctgcaatttgaagctgaacttagacagactgcttgcaaggatgtgggatgaaatgggtctggttagagtttacacaaaaccacaaggc

SEQ ID NO: 1671 - DNA, 251 bp, Glycine max
  Clone ID: 700959357H1
cttcccttcccttctcttccctctcacactagggtttacctctcttcacacttcacacttcacccttcacacttcacacattgccatttgaacactatttgggaatagtgggtcagggagtttaaaggagtggtcttttcgttttcctttgtatcctttacgacttgggagattataatatgcagacaccaaaagcaagagttggtgcttcagaagtgccccaaaagaaatctcctgcaactcctcgaact

SEQ ID NO: 1672 - DNA, 255 bp, Glycine max
  Clone ID: 700959365H1
gaagagtggtagctccaagacaacaagatgcagatgcgatttatttggactaaattgcctattcactcgatttatttgtgagaagagtggtaaaactagttgttgtaactctctctatatattccttctaatcttgtaagattttcgcacatatgaattatgcaaaacttgtataagattttcagaaaactattactctgcgatgttgctaaagatggactatatcaattcatctcttgaggctcttgaagatga

SEQ ID NO: 1673 - DNA, 251 bp, Glycine max
  Clone ID: 700959366H1
ctacgattcgttttgccccttttgttgccctaatttcaaccatgcctcgccgtagctccggtggaagatctgcccgtcctgctcctcgggcagctcctcgtcctgctccagttcaccatgctcctcctccagcccctgctcagagtggtggtggatctatgcttggtggcattggttcaaccatagctcaaggtatggcttttggcaccggaagtgcagtggcacacagggctgtggatgcagtcatgggt

SEQ ID NO: 1674 - DNA, 244 bp, Glycine max
  Clone ID: 700959378H1
ccggaattgaatagaaatagaatcgtcgattttctctttctctgactctagggtttcattattttcttctgtagatccatctatctagcttcggagctgcaaatggacgtcgcagtcactgccttccggtcaccgctgatcatcctccgaagaccggtcaacgagtctgcctcagctcggttcggttccacttttgggttttccagaaagcaacggttcagttcagtatgtatccccaaacaca

SEQ ID NO: 1675 - DNA, 249 bp, Glycine max
  Clone ID: 700959380H1
gagaaaggccaagagaaggaaatgagttcacttcatcatatttttctgactcaggcaccttgcagtcattctcatctgttgacgaaacagcttttgattctcaaaaaagttttggatcgatagaggaaatgatattttccatgtctgggtctcgtaattcatcaatattggacccaatgttatatactaaggctatgcatgctagagtttcctttggagtagatggtccccttggcaaggtaaaatatt

SEQ ID NO: 1676 - DNA, 247 bp, Glycine max
  Clone ID: 700959383H1
gtcctcagatcacattgctctcttagctgagtttcgctgctgcaagaataaatctaggcgttgacagttaaggtcactttcagtgatacataaagaaaaagtctgaaagaagcatttggttggtaagttttttgtaaaaatggtagatcatgcctgtctttttcaggtatctccatgtggagtcattgcaatgatctgctatgtatcatgtcacctttatctcagagaaaaaaaatatgattttctg

SEQ ID NO: 1677 - DNA, 250 bp, Glycine max
  Clone ID: 700959387H1
gagtcattgtttttaagaccaagtagaagtcactttatgggtcaagacttagcactaaagccaagagaccaaaaagactaaaacaatgatggagtcattcaagtgttatgtttgagtgagagtcttttctaagcttacgaagtttcagggcagaagacatgcacagcttctgattcctctccaattcattcaacttccaaggtaggtggattattgttctaagaggtaggccttgagccagagtggaaaa

SEQ ID NO: 1678 - DNA, 244 bp, Glycine max
  Clone ID: 700959390H1
gttttcttcatgtgtcgcgaaaatggtcaaaagaatattactgtaagcagggcagtaactgcatggaaattagttcttgctgggaggttttcactgcttcatccatggtgtgactttgttgagaagaatcaacggtacaacatctctgaggatacctggcaacaggttctagctttcagctggtgtacccgtgatagtctggaagcatatgatcctgaaggtgcttggcctgttttaatagatg

SEQ ID NO: 1679 - DNA, 243 bp, Glycine max
  Clone ID: 700959394H1
tgaaaaggggatgcctactgcgcccattgtctccttcaacgacgccaaataaatacctcaaaacgataccttgacagagttgggtattgatatttgcattaaagttcataatctggtgaattactgctaggggcaaggctctgccgtcatttgaggggtgccctgtgaaagttcctgggatgatgcgacgtggttctggtttaggttctgctgcttctcaccgttctcgggagtcccttcctc

SEQ ID NO: 1680 - DNA, 261 bp, Glycine max
  Clone ID: 700959405H1
tatcaactctttcaaaagggagaagaaaaggaaaggaaacaaaacgcacaaaggattattatagcaatggcagaacaaaaccaaaaccagacaactgaagctggaaggcaccaagaggttggccacaagagccttctccaggtgatgctctttaccagtatattctggagaccagtgtctacccaagagaacctgaatccatgaaagaactgagagagttgacagcaaaacacccatggaacatcatgacaacctctgcag

SEQ ID NO: 1681 - DNA, 271 bp, Glycine max
  Clone ID: 700959416H1
catcaatttcaccatgccaatgttcctcgtttgttctcgtcagagctgactatacctgtatttctgggaaggatgctattgggaatacctacaattctaattgtgaagttctgcagtaagactctcgcaaaatggaccattcctgtgtagcgaacaccttgggcatcccaataaaatcaaccggctatatacctacactgaatggatctgtgacaggtaaaatgtctgataagcttaaacaaggttacttgcaaaagctcctttcccagca

SEQ ID NO: 1682 - DNA, 263 bp, Glycine max
  Clone ID: 700959433H1
aatttctgcattgagggtaacgtgaaggaagcagttgaagttttggaattgctggaaaaactagatattcctgtggatttgccccgatatttgcaattaatgcaccaatgtggggagaataagtctcttgaagaggcaaaaatgtacacaggcatgctttacaacatctgtcacctctccaagtcagcacatataatagaattttggagatgtatttagaatgtggttctgtagatgatgctctcaacattttcaacaatatg

SEQ ID NO: 1683 - DNA, 258 bp, Glycine max
  Clone ID: 700959450H1
ccctaaaaagcgcaagaaaacaaaatccccaaaatatctctcgctctgaaaccgccatggatttgcagcagagcgagttcgatcgcctcctgttcttcgagcacgctcgtaaggccgcagaagccgaatacgagaaaaccctctcgacgctgataacttaacaagatggggtggagctttattagagttgtctcagtttcagagttttcctgaatcgaagaaaatgacccaagaggctgtttcaaagctagaggaggc

SEQ ID NO: 1684 - DNA, 259 bp, Glycine max
  Clone ID: 700959458H1
atccccccctagctacagagcagccaaaggggaggaataataataagcctatattctaaggccggaaaaataaaaaaggaataacaaaaatgtctggaaaggtaattatctcggctgtttctctcatcctggtggttgagtggccataggtgtggtggtggccgtcaacaagaagggcgaggatcccacacttcaatctcaacaaaaatcagtaggggttatctgccaaaacactgatgaccagaagctctgccacgaa

SEQ ID NO: 1685 - DNA, 253 bp, Glycine max
  Clone ID: 700959471H1
cgccaatttcggcgacttcgaggaggacccggaggcgtacaagcagcccgaggtggacgagaaggacgtcgtcattttgaaggagaagaacttcaccgacaccgtcaagagcaaccgcttcgtaatggtcgagtctacgcgccctggtgcggccactgccaggccctcgcccccgaatacgccgccgccgcaacggagctcaagggcgaagacgtaattttggcgaaagtggatgccacggaagagaatgaat

SEQ ID NO: 1686 - DNA, 251 bp, Glycine max
  Clone ID: 700959486H1
agggtttttgtgatctgcaagctacgatgggtaagggaacggggagtttcggtaagagaaggaacaagacccacaccctctgtgtgaggtgtggccgccgcagtttccacctccagaagagtcgttgcgcccgtgcgctttccccgctgcgcgcaccaggaaatataactggagcgtgaaggccattaggagaaagaccaccggaactggaaggatgaggtacttgcgtaacgtgccccgtagatttaaga

SEQ ID NO: 1687 - DNA, 254 bp, Glycine max
  Clone ID: 700959489H1
gtcgacaaatttgactttgtcgtgtgcatgagtgcatacgttggcgtggtctttggcagtgttgaaattggcttagtcatagctattgcgatatctgtacttcgggtacttctatttattgcaaggccaaggcatttgttttgggaaacattccaaattctgtgatatacagaaatgttgagcactatccaaatgcaaaacatgttcctggaatgctaattctagagattgatgcaccaatttactttgccaat

SEQ ID NO: 1688 - DNA, 256 bp, Glycine max
  Clone ID: 700959493H1
ggaccttcagttgatgaagtcaccactgaatcctcattgttttctctgcatgccaggagcagtgtgccatctcaaccgcttgtttctggacttagggtgagtactgctgagccagtcaacttctcttggcttcctccagtggcaacacctattctgctgtcacaatatcttcaattatgcctgatagaggggatcatcccttttcaattgttgccccaaatgggccacaaaggttgttgactcctgctgctggtgg

SEQ ID NO: 1689 - DNA, 257 bp, Glycine max
  Clone ID: 700959506H1
gttgttcccatcttctctctcgtaccaatcaaatcacacttttgtgttgtgttgggaaaccctaaaccccgttttcggtgagatcgagatcgatcgaacatggatgaggagtacgatgtgatcgtgttgggcacgggtctcaaggagtgcattctcagcggtcttctctccgtcgatggcctcaaggttctgcatatggataggaacgactattacggaggagaatccacttcgctcaatcttattcagctttggaa

SEQ ID NO: 1690 - DNA, 252 bp, Glycine max
  Clone ID: 700959512H1
gcgcactattcaatttgttgactggtgccccaccgggttcaagtgtggaatcaattaccagcctccgactgttgttccaggtggtgatcttgccaaggttcagagggccgtgtgcatgatctccaattccaccagtgttgttgaggtcttctctcgcatcgaccacaaatttgacctcatgtatgccaagagggcgttcgttcattggtatgttggtgagggtatggaagagggggagttctctgaggcccg

SEQ ID NO: 1691 - DNA, 254 bp, Glycine max
  Clone ID: 700959514H1
gtgcgtgggagggtccgaagttggagatagtgattctggttctgttctgttcttctttctactcacaacaacatcagaatcagaaacaacaatggccaacactaacttggaagatgttccctctctggatctcatgactgagctccttcgtcgtctcaagtgctcttccaaacctgacaagcgtcttattctcattggcccacctggatctggaaaaggcacccagtcaccaatcataaaagatgagtactgct

SEQ ID NO: 1692 - DNA, 253 bp, Glycine max
  Clone ID: 700959526H1
gcattccaatcgctcccaaaatcttttctaatttgttcataactcaataattctcatcatgggctccttgattgttccaggtgaacatgatcacaaactaaagcttgtttctcttccctttgtatcaaccagtcacctcattcccgtagtagacatagctaggctctttgccattcatggtgttgatgtcaccataatcaccaccacagccactgccgccattttccaaagctctatcgatcgcgaccgtgac

SEQ ID NO: 1693 - DNA, 257 bp, Glycine max
  Clone ID: 700959532H1
cttttagcaagttaacaacacttttgtcttcgttccattatctagttctcaattctcttcaccctttgcctctgaaagaaatgggtagtcttgaagcggaaagaacaacagtaggattggcagcaagagacccttcagggattctctccccatacacctacaatctaagaaacacaggccctgatgatgtttacattaaagttcactactgtggaatttgccattctgatctccaccagattaaaaatgatcttggc

SEQ ID NO: 1694 - DNA, 253 bp, Glycine max
  Clone ID: 700959551H1
gttagtatctctccaactatgcttaatggctcccagaatacaatagatcctgatcagagcagggatattgtcaacaaaacggctgagaggcaacctgatttagtaagcaagggaatacctcttccccttgctatgcatgcaaacatgtctgttcctgtcagaagtgatggcgtacttgcacatcctcttcagggaactgtttctaatgcacaatcaactgaatgcccaacaactagtgaaccacagaatcaac

SEQ ID NO: 1695 - DNA, 51 bp, Glycine max
  unsure (1)..(51): unsure at all n locations
  Clone ID: 700959559H1
tgaacttacattatttaatngtcgtcatccactttaaatattatcntccnc

SEQ ID NO: 1696 - DNA, 245 bp, Glycine max
  Clone ID: 700959579H1
ccacattcaatgttgtcaagagaaagtggtgtatgtgctgagcacaccgatgccggtatatatggaagacgaaactctggatcaaacaaggaagcgttcgaaatgggagaacgacgattacatttgtcgtggacacattctgaacggtatgtctgactctctctttgatatttatcaaaatattgagtctgctaaggaattatgggactctcttgaatccaagtatatggcagaagatgcctcaa

SEQ ID NO: 1697 - DNA, 50 bp, Glycine max
  Clone ID: 700959591H1
gcttggctagtgggtaaaacaattggactctacttctcagcggaatggtg

SEQ ID NO: 1698 - DNA, 225 bp, Glycine max
  Clone ID: 700959604H1
aaaggttgttatctctgttaagtttccgtgtgtgagattttcagaatttgaatatggcgttagggtttgagggttatagttatacaacaacacttggaaggaaaagggttgtgttattacacagtgaagcttcttctctcaactccaattcaccggtgaattcattgaagagaatgtgtagcaagaaattcacatttgactctgaaaggtctcgccttgaggccc

SEQ ID NO: 1699 - DNA, 233 bp, Glycine max
  Clone ID: 700959610H1
ctagggttatcatttctccatttccattttctctctcacttttcaagaatcgtaagctatgggaaagtcttacccaactgtgagtgctgattaccagaaggccgttgagaaggcgaagaagaagctcagaggcttcatcgctgagaagagatgcgctcctctaatgctccgtttggcatggcactctgctggaacctttgacaagggcacgaagaccggtggacccttcggaa

SEQ ID NO: 1700 - DNA, 233 bp, Glycine max
  Clone ID: 700959614H1
gagagaaaaagctattactatgtggttgactatgcgtaaaaaagaatcagaattcagaaaaaaaaagtgtacttgaactgggattcatctgattccttaacttgtctctctgctgattcataatctcttttaaggaagaggttttgccaaccccaacctgcagcaaataatattgcatgggttggtttactaagttgcttaagggatccaaccgtaaatcgtcaggaggaaga

SEQ ID NO: 1701 - DNA, 227 bp, Glycine max
  Clone ID: 700959619H1
taaaggaccacctcaccctccccctccattactcccactgcatcttcttcaaattcctgtcctgaagatgacagcaaagtggtatctcattgtgtgtgttgtagcgatctgggccgttgatctgggttcatcatcacaccatgcccgtgccccagcaccagcaccgtcagtggagtgttcaaacctggtattgaccttatcggattgcctcaccttcgttagcaacg

SEQ ID NO: 1702 - DNA, 231 bp, Glycine max
  Clone ID: 700959625H1
attgaattcaaaaacttaagttcattccttgtgttttgctttcttcctcaaaaccaaacatgtcgaacacatgcggcaactgcgactgcgctgacaagactagctgcaccaagggaaacagctatggtgttattgtagagactgagaagagttacatcgagactgttgtcatggatgttccagcagctgagcatgatgggaagtgcaagtgtggcactaactgcacttgca

SEQ ID NO: 1703 - DNA, 227 bp, Glycine max
  Clone ID: 700959655H1
atagaggtgtaactttgcacaagtgtggaagatgggaggctcgaatgggccaatttttgggcaaaaagtatgtttatctgggtctgtttgacaccgaaattgaagctgcaagggcatatgataaagcagcaataaaatgtaatggcaaggaggctgtcaccaattttgatcctagcatctacgatagtgagcttaattctgaatcctcaggaggtgtagctgcagat

SEQ ID NO: 1704 - DNA, 228 bp, Glycine max
  Clone ID: 700959683H1
ctgtaagtcagtggagaagattaaatatgtccactcaaagtgtggtgaaggaaatggagcagtttggagtgctttattttagattgtttttaaaagggagatggttttttctggttgggagaggatataattgcagctgggacaaagacaaagacagttttcagatttgagattgagcaaataggtataacatggaagatctcgtaaactattcaaagctgtggaagc

SEQ ID NO: 1705 - DNA, 164 bp, Glycine max
  Clone ID: 700959688H1
ggcagaaagcaagctcatcctagagttttaaaaatggcagcagcctcctccatggctctctcttccccatccttggctggcaaggccgtgaagctgggcccatcagcccccgaagtcgggagggtcagcatgaggaagaccgtcaccaagcaggcctcctccgg

SEQ ID NO: 1706 - DNA, 285 bp, Glycine max
  Clone ID: 700959702H1
agaaatttaagtgaggagctagagaatgatgatgaagtctgctatgtgtgcagtggtggttgtagcacttcttcttctggcggaggtggggcccatggctgaggctgtgacatgcaccccaacagagttgagtccgtgtcttccagcaatcacttccggtgctaaaccttccaatgcttgttgcacgaagctgaagcagcaaaaaccatgcttatgtggctacctcaaaaacgctagcttgaagcagtatgttaactctcctaatgcccgaaaaaccgttgcttc

SEQ ID NO: 1707 - DNA, 260 bp, Glycine max
  Clone ID: 700959745H1
gtcatagggtacaagcaccagactgacctcaaggaaaatggtgaaatctgtggtggggttggcattcttggcattgcatgggcctttggtggcatgatcttcatccttgtctactgcactgctgggatctcagggggtcacattaacccagcggtgacatttgggctgtttttggctcgcaaggtgtctttgatccgagccatcatgtacatggtggctcagtgcttaggtgctatctgtggagttggtttggttaaggc

SEQ ID NO: 1708 - DNA, 255 bp, Glycine max
  Clone ID: 700959804H1
attttctatccgctcatccccctcacaaattagggtttttgcgaatcttttatcgtctgaaatcgaatccaacgtttcagccatggtttccgattcaatcgccgccgtaccgattccctccgccgcaaacaccaagaacccggggaagaagaagaggactaacaggtccgcgaaattgaagcagtacaaaatcgatgcgcgccgcgagcaatggttatctcaaggtgcggtgaagagcaaggggtgcaaggacgg

SEQ ID NO: 1709 - DNA, 251 bp, Glycine max
  Clone ID: 700959810H1
gtgaagttgtaaatgaagatgaatacctgagggttttccctaggggcataggtccaacactcttgggcgcaagaaccgaatcttctaggcaaacagccatagttatcatgcatcatatgaaactcgttgagatgcttatggatgtcaatcaatggtcaaacatgttttgcggcatcgtttcaagggcggtaacacacgaagtgctgtcaactggagaaactataagatacgatggtgcctgccaagtgatg

SEQ ID NO: 1710 - DNA, 250 bp, Glycine max
  Clone ID: 700959821H1
cttgattccaaaccacaatgattccatgtcctcagtgctgtctcgttttcaagccattggcattgacgttgaagccacagtcgctcttttaggagctcactcagtgggaagagttcactgcaagaatctggtgcacagattataccccaccatagattcaacactggaccctgcacatgctgagtacctaagacgtcggtgcccaacacccaatcccgatccaaaagctgttctgtattcaaggaatgac

SEQ ID NO: 1711 - DNA, 250 bp, Glycine max
  Clone ID: 700959823H1
cttttctaggtaactccctctgtggccgaccactctctctctgtcccggagatgtcgccgatcccctctcggtcgacaacaacgccaagggcaacaacaacgacaacaagaagaacaagctgtccgggggcgccatagcggggattgttgtcggatcggtggtgtttcttctcttgcttgtgttcctcttgattttcctgtgcaggaacaagagtgccaagaataccagcgcggtcgacattgccactgt

SEQ ID NO: 1712 - DNA, 248 bp, Glycine max
  Clone ID: 700959828H1
ctgtggagttctgtgtgcatatagtacatgcattcatggtaagcttgggggataggagccaacgagcaaagacagcattgtgtaccatgggggcttctgtattcagtggaatcacacttacaaaattagtcggagtcctcgtcctttgcttctcaacatcagaaatttttgtggtgtattacttccagatgtatctggccttggttatcattggcttcttacacggtcttgtgtttctacctgtggta

SEQ ID NO: 1713 - DNA, 205 bp, Glycine max
  Clone ID: 700959835H1
tccaggtgctgctgctgcagatcaaggtggtggtgctgctgctgtagaccaaggtggttctcctatggacatctgataatttaaaattaagcactagaggtgttgaataccaatatctaaagacgagtaggtttcatgtgccatgggacaagatatttctttgatggattttttttcttcttaatcctgtttgtttttgcaattc

SEQ ID NO: 1714 - DNA, 244 bp, Glycine max
  Clone ID: 700959859H1
gtgatttgatcagaaaggaatatgacatgaagtgcaaattcttacggaatctggaatcaaaaggagaaaagacttctagaattgataaaatgcgtgctgtagtcaaggatctgcattcaagaattagaattgcaattcttaggatagactctatatctaagaggattgaggaattgcgggacaaagagcttacgcctcaacttgaggagttgattgacgggttaagtcggatgtgggaagtgat

SEQ ID NO: 1715 - DNA, 241 bp, Glycine max
  Clone ID: 700959870H1
ggcgacacagctactaaacttgaacgacaaggaatataccgtgcttcggaaatatcacaatcacagtctgctgttattggccctttcactgtcataggatctggcaccaaaattgggcataacactaaaattttaaattctgttattggtgaaggatgtaaaattgggtcaaatgttatcatagagggatgctatatatgggataacatcagcatagaagatggctgtaaactccagcatg

SEQ ID NO: 1716 - DNA, 244 bp, Glycine max
  Clone ID: 700959872H1
acaaatcaaagccatggccacctccaacttctctattgttctctccgtctccctagccttctttttggtgctacttaccaaggcacactcgaccgataccgtttctttcaccttcaacaagttcaacccagtccaaccaaacattatgctccaaaaagatgctagtatttcatcctctggggtgttacaactcaccaaagttggcagcaacggcgtgcccacctcgggatctctcggtcgtgcc

SEQ ID NO: 1717 - DNA, 242 bp, Glycine max
  Clone ID: 700959877H1
gagcaagctgacgagatgattagacgggagcttctaagtttactggagcatgacaatgctaagtatccacttgatgagaaagtgattaaggagaagaagaaaggagccaagcgtgctgtaaatgggtctgctgtccctgtgatagaagattttgaggaagatgaaatgaaagaggctgataagttgataaaggaagaggccctgtatctttgtgcagcaatgggtcatgaagatgaacccct

SEQ ID NO: 1718 - DNA, 241 bp, Glycine max
  Clone ID: 700959887H1
cggcggcgcagagccaagacgacggcaaggactaccaggagccggcgccggcgccgctggttgacccgacggagtttacgtcatggtcgttttacagagcagggatagcagagtttgtggccacttttctgtttctctacatcaccgtcttaaccgttatgggagtcgccggggctaagtctaagtgtagtaccgttgggattcaaggaatcgcttgggccttcggtggcatgatcttcgc

SEQ ID NO: 1719 - DNA, 166 bp, Glycine max
  Clone ID: 700959889H1
tcctccaccagcaacatcaccaccagcaacaacaccaacgccaacaccaacagctgcacctacacctgcttcttctcctgcaacctcaccagtcccttccgctagttctccaccagcaccaggcacagccggaacccgctcccggacccgcaggtggcgccgagcc

SEQ ID NO: 1720 - DNA, 244 bp, Glycine max
  unsure (1)..(244): unsure at all n locations
  Clone ID: 700959894H1
aagagatgcaagaagcaggcttggngaatgatgggtgaggtctccggcgatcagcaccgtcagctgaaggcggagatagcgactcatccgctgtacgagcagcttctggcagcacacgtggcatgcctccgtgtggcgactcccatcgatcagcttccactcattgatgctcaattatctcagtctcaccatcttctacgctcttatgtctcacacaacactctttctctctcccctcatcacc

SEQ ID NO: 1721 - DNA, 245 bp, Glycine max
  Clone ID: 700959896H1
gtacctgagactctatgcttcaagatacggtagggacgagagtattgcgcttttggagagaacaggagtgtacttcggtcctgagcgttacacatttgagcacatgccaattgatgccatgagaggacaaatatttaatgcctgccgttcatgaattggtatgttacagaatatggatgctgcttggtcgagtggttcatttgtcaacagcttaaaaattcaggtttcagcatctaagtttcaaa

SEQ ID NO: 1722 - DNA, 246 bp, Glycine max
  Clone ID: 700959910H1
acacggtttacttaagatcaaggagttgtgctgttgtattgactccatacaggtggtttcctgcacttgcagtggttaaattctgtaagacttggtatttaatcgtggggcttctcaacaagatgcttttactgagatatcacagttggtacaaagtgcgcttgatgggtacaaggcttatgctctaggatacccatcaaccgatgtgaagtggtttactcacaaaattagacttcaatttgatga

SEQ ID NO: 1723 - DNA, 261 bp, Glycine max
  unsure (1)..(261): unsure at all n locations
  Clone ID: 700959914H1
tggggtgacaacgcagagcgtgttcttgagtcaattcaacttctcttggatcttcttgnggcccctgacccttgcacccttgagactttccttggaagaattcctatggtcttcaatgttgtcattctttctccccatggttactttgcccaagataatgtcttgggataccctgacactggtggccaggttgtttacatcttggatcaagttcgtgctttggagaacgagatgctccatcgcattaagcaacaaggatgg

SEQ ID NO: 1724 - DNA, 252 bp, Glycine max
  Clone ID: 700959929H1
cgtcatcgtttcgttcaactttcaacgccagttcacactctctgcttcgcgtgtaccaacaagtgcaagttcgaatcaatggccagcgctcagctcacagcaatagcgtcatcgatctctacggcgtcgtttgaagggcttcgaccttccgctgttcagtttgcttccacgggcagaattagaattggcaatctctcccaaaggtccttccggggcttggttgtcaaagccgccaccgttgttgcccccaaa

SEQ ID NO: 1725 - DNA, 260 bp, Glycine max
  Clone ID: 700959943H1
ctcttaagcaagtgaggtcaacaaagactcagttcatgctggaccagttagctgatcttcagaataaggagcatatgttggtggaagcaaacagatctttgaccatgaagctggaagaaatcaattcaagaaaccagtataggcaaacatgggaagctggtgagcaaagtatgccatatggaacccaaaatgctcactctcaaggcttcttccagcctttggagtgcaaccccacattgcagataggttctgactacagg

SEQ ID NO: 1726 - DNA, 254 bp, Glycine max
  Clone ID: 700959975H1
ctcgtcttcaatcctttcgttattctcttattcatccttctcttctgaataatccagatctctttctgcccttttctccgtcacgcttttcgtgaccggatctgtatggatttgatccagatctacacgccgatggtggttttggccgggtctttcatagatctggtgcgtagaggctcagatctacggtaccgaggtacaacagagaatcgatgacaagaacgcagatccgacggtagatccagccgattccg

SEQ ID NO: 1727 - DNA, 256 bp, Glycine max
  Clone ID: 700959976H1
ggttcatcaatggtgtcacaaccgctttctttgcctccttggaacgttgctgcatccgaattgccaccgaagaagacgtcgaagatggcaacgacgacgtgcccttgatcctcaacgacggaaatctccgccaccgcaccgtggacaccaccacccgccaaaggaagaaagtgaaaggaaagaaaagttaattgttcttggtagttgaccaacgctaatatatagtgaaagtcaacgatctctcttttcttggtga

SEQ ID NO: 1728 - DNA, 261 bp, Glycine max
  Clone ID: 700959980H1
gcgttttcaagaggaaagagggagaaaaactgttgttgactctgaaggacacgtgtaagccgctccttatcccttgctttgacctcaagagctctgcgccgttcgtgttctcccgagccgacgcgtccgagtcaccgagcttcaacttcgagctttggaaggcgtgccgcgccacgtcggcgacccctggcctcttcactcccttccacttctcctccgtcgacggaaaaacctcgtgcgccgccgtcgacggcggcctgg

SEQ ID NO: 1729 - DNA, 258 bp, Glycine max
  Clone ID: 700959995H1
gaggacaccaaaccaacaccaccatcgatccaaatccaatccaatgggttcggttcccgcagaactgagcttggatttaagacccactttcatccccaaaaccatcaccgatttcctccgccacctctccgacaacaacaacccccccgccaccctccacgatttcctcgcccgcctcgaagacgagctccgcaagatccacgccttcaaacgcgaactccccctctccatgctcctcttaaacgacgcaatttcagt

SEQ ID NO: 1730 - DNA, 155 bp, Glycine max
  Clone ID: 700960008H1
gtttcatgtagtttctttttcatcatccattgaactgaaccttaaattaattatagaaccatgtttgcaactaccaattcctccactttgtcacctttattctctttcagtagaacaacagcaacctctctgccttccaaacccacattctggaa

SEQ ID NO: 1731 - DNA, 255 bp, Glycine max
  Clone ID: 700960015H1
ctcgatattttgatttgttttcttttattgtttttccttgcatttctttgattcccttcacttcaccaatatatattacaccacgcgttagttactcacgtattctgcttctttctttctctcacccttggttgtttatgctttactacttgtccgtccattcattcaacttttcatattataatgaatactcgggaattcgcacacacactcactcactttgtttcttgttcttggtgtagttgaaatctgggt

SEQ ID NO: 1732 - DNA, 123 bp, Glycine max
  Clone ID: 700960022H1
gcttacttggacttacaccacttgctgaacgtgtgagcttcattacagaacaagttgccttttacactggtcccacagttggaggacttctgaatgctacatgtgggaatgttactgagctca

SEQ ID NO: 1733 - DNA, 129 bp, Glycine max
  Clone ID: 700960052H1
atttggagtttggagcgactgaactaatcattaatttgcactcgctgtttcagcttcatcacccttcttttgcatcatttatatctcttgagaaatggcacaagaaacctttctattcacatctgaatc

SEQ ID NO: 1734 - DNA, 245 bp, Glycine max
  Clone ID: 700960059H1
gttgatttggatttgggaaattacgagcgcttcctcgatgtcacgcttaccaaagataacaacatcaccactggaaaaatttaccagtctgttcttgagaaggaacgtaaaggcgattatctcgggaaaactgttcaggtggtcccgcacatcactgatgctattaaagattggattgagtcggttgctgtgattcccgtggatggaaaggagggccctgcagatgtttgtgtgattgagctggg

SEQ ID NO: 1735 - DNA, 242 bp, Glycine max
  Clone ID: 700960070H1
gtatgaaattaaaaatgagcagcatgcagaggcattctggagccaaaaatcacttgcaggggaggactcacttcctatgggagacagagttgcagctctcaaagataaccaacaaccttctcgtgttccaaatggtgttaaacagggtccaggaggatcacgagaaatcactttctccacaagaagctcagctaagtacaaggaagacgaggaagataaagaagtgccacacaggaaaaaga

SEQ ID NO: 1736 - DNA, 116 bp, Glycine max
  Clone ID: 700960073H1
cgctggtggtggtttcttctagtttcttcactcttttcattacttttagcctgcatagttttaaataagaaaaaaaaaacagcgactttgtgactagttaagatcaccgtttcttc

SEQ ID NO: 1737 - DNA, 247 bp, Glycine max
  Clone ID: 700960095H1
gaaaaagcaatggaagctcaatcacaccaccgactcaatgtcctttttcttccatatccgacacctggccatttacttcctatggtagacacagcaagactatttgccaagcatggtgttagtgttactattctcactacccctgctattgcttcaacattccaaaatgccatagacagtgacttcaattgtggatatcacatcagaactcaagtggttccattcccttcagcccaagttggtctca

SEQ ID NO: 1738 - DNA, 272 bp, Glycine max
  Clone ID: 700960103H1
cttcttctttttcatcaatcatcaccagtggttcttttccttctgagaagatcgaattgtgttttgcaaaaatgggagttccagagaaagaccctctttcccaattgagtttgcctcctggttttcggttttaccccaccgacgaggagcttctcgttcagtatctgtgccgcaaggtcgctggccaccatttctctcttccaatcattgccgaaattgacttgtacaagttcgacccatgggttcttccaagtaaagcgattttcggtgaa

SEQ ID NO: 1739 - DNA, 272 bp, Glycine max
  Clone ID: 700960104H1
aaaaatatctcacgcaataacataccctaacacaaacaccttcctcccttaaaaatgctgaagcatttcaatttcaacatgaacattttcttcacgttgcttatagttgtcacattagctagtttctatgttccccagttgaagcctcgtccttcaattacaatagctttttgcatggttgcaaccctagtataccaatttataatgagaacacccaacaaaatttacttggtggactttgcatgcttcaagccaagccttgcatgcctctg

SEQ ID NO: 1740 - DNA, 272 bp, Glycine max
  Clone ID: 700960105H1
agaaaaccgagaaagaagaaaccgacttcaaagttccggaaacgattacgctttgcgtcaacaactgcggcgtcaccggaaaccctgccacgaataacatgtgccagaagtgcttcactgcctctaccgccaccacttccggcgccggaggtgccggaatagcttctccggcgaccagatccggcgtctccgcgcgtcctcagaagagatcttttcctgaagagccctcgccggtggcggatcctccttcttcggaccagacgacgccgtcg

SEQ ID NO: 1741 - DNA, 271 bp, Glycine max
  Clone ID: 700960108H1
ggaagaggggatatgaatacaaggagctagttgtctatttgcaataacataacatcatcaagcaggatcatcgatccaaccttagtattcaacccagagagatttgtagtaataattactacaacaacttaaaacaatggcaggaggaggttatgtagattcgggaaatgcaaagcaatttgaagggaaggtcactgcattcgtattggttacatgctttgtggcagccatgggaggcttactcttcggttatgatcttggaataaccgga

SEQ ID NO: 1742 - DNA, 263 bp, Glycine max
  Clone ID: 700960113H1
caaaaacttcatagatggaacgaacacttatagaactgccactgtcgctattcaaggagatcactttgtggccatcaatatggggtttgagaattctgctggacctcataagcatcaagcggtggcattgagagtccaagcagacaagtccatcttttacaattgctcaatggatgggtatcaagacacactttatgcacacaccatgcgtcaattctatagagattgcaccatttcaggtaccatcgactttgtgttcggta

SEQ ID NO: 1743 - DNA, 267 bp, Glycine max
  Clone ID: 700960126H1
cagaatcccaccgccatggatttcatgaaggtcttcgatcaaaccgttcgagaaataaagagagaggtgaatctgaaggtgctcaaggttccggaaatcgaacagaaggtgctggatgcaactgataatgaaccttggggtcctcatggtactgtgctggcagagatttcacaggctaccaaaaaatttactgaatgccaaatgatcatgaatgtcctttggacaagactgggtgaaactggaaaagattggcgttatgtatacaag

SEQ ID NO: 1744 - DNA, 261 bp, Glycine max
  Clone ID: 700960128H1
atatagcgaaaggggtggagtccctactgcgtcactctgacccaaactccataactacggtaaacggcgtcgttcagcagctggaggccaaactagggttagacctctctcacaaggccagtttcatcagagaccagatcgatcatcttctccggtcacagccacagacatttgctcctcaccctcctccacttcacaaagactattttgcccctcacacccaactgcacttcccaaccacccactttgctccccattttg

SEQ ID NO: 1745 - DNA, 231 bp, Glycine max
  Clone ID: 700960143H1
tgagattaagaactactggaggacaaggatccagaagcacctcaagcaagcttccagcagcttccagcaacagagtagtaattctgagataatttatcatccccaagcttgcactagccaagtgtccaccatggcgcagccatagaaacctattctccacccagttatcaaggaatgttagatccattttcaattcagttcccaacaaatcctcatcattctagttgttgt

SEQ ID NO: 1746 - DNA, 261 bp, Glycine max
  Clone ID: 700960158H1
cactagcgtgtttcgtcttcttcgtctttactcttttcttcaccgaagcgaaaaagaaaaggcttgacttgagagaaatagagcttcgaatcgaaactcagaattagaaaaaaacacaaatcacaatcacaatggcaaggtacgaccgagcaatcaccgttttctcccccgacggccacctcttccaggtcgagtatgccctcgaagccgtccgcaagggcaacgccgccgtcggcgtccgcggcaccgacaacgtcgtcc

SEQ ID NO: 1747 - DNA, 260 bp, Glycine max
  Clone ID: 700960172H1
cgggtgcgtacgtcgttccaagtaaatcactttgtcgagccctaattttgaatttgtgcgccattcctaaaacagtgcagtgaaaatcacgtatttgcgatggagattctgtattcgaagctctacgacaagtacaccaaactcaagtctaaaaaactctccgatttggatcacataaacaaagaacaagaagttaaattcgtgaattacttgacggctgcggaagagttgatagagcacttgaagagcgaaaaggaagg

SEQ ID NO: 1748 - DNA, 258 bp, Glycine max
  Clone ID: 700960181H1
caagtcagcgttaagggtttagtttggtgcgtgccatgaagatcgaggaattggacgatggagagtgtagtagggacgaggaagagaagtgtgagaggcagattgtgagcgttgatgcgaagagagcgttggttggagctggtgctcggatcctgttctaccccacactcttgtataatgtgcttcgtaacaagattgaagctgagttcaggtggtgggatcaaattgacgagtttttgttactgggcgctgttccgt

SEQ ID NO: 1749 - DNA, 259 bp, Glycine max
  Clone ID: 700960182H1
cgtttcctgaaaagaatgagctgcagagcagatctttagatagagagagattctttcaccaaaagtttcagctgaggaatatgcaaatgaacggtattggtaccatggatgatgattctgttcatcggagaggtaatggatccgaaaagtatgtgtcttttgacattgaggataagtctgaaagaggaacaaaaggtgttgattcctacatttctgtgggaggtgatgggtcattgggaaaaagcttccagaatcctat

SEQ ID NO: 1750 - DNA, 286 bp, Glycine max
  Clone ID: 700960202H1
aagcgcttgaaggagatggaagatgaagctgctgctttgcgagagatgcaggccaaggtcgagaaggaaatgggatctgcgcaagatcctgcaaatgcttctgcaagtcaggccaataaagaggaaatagattctcgatcagtctttgtaggcaatgtggactattcatgcactcctgaagaagtgcaacagcattttcagtcttgtggaacagtaaacagagtcaccattcgaactgataagtttggccaacccaagggttatgcctatgttgagttccttgagg

SEQ ID NO: 1751 - DNA, 283 bp, Glycine max
  Clone ID: 700960204H1
gcaagtggaaccattgagtccaacacatcaagtgctgggactcaattggtgtttgataggtcaggagatgtgtatattttgagagacaacaaagaaaagtataacttgtcagatgggggttctatttccaccactcaattttaccttagagcaactcttgattttgatggggtgttcacactctatcaacatccaaagggttcttctgggagtgtaggttggaccccagtgtggtctcatccagataatatatgtaaggattatctttctgctgcaagtagtg

SEQ ID NO: 1752 - DNA, 278 bp, Glycine max
  Clone ID: 700960226H1
ctaatttgaaaatcaagtattttcagagagagctgaggcaatacttggtgtatttcattgtggcactgactatattcttctacatgattccaattacatttatatctgcattaactactttggataatttggtgaaatatctcccattcataaagccaattgttaatataaaggcattgaaaacagtgttggaagcttacctccctcaactcgcactgattattttcttggctttgttgcccaagttgcttctgtttttgtctaaatttgaaggcatt

SEQ ID NO: 1753 - DNA, 273 bp, Glycine max
  Clone ID: 700960242H1
gagcgattgcccttgctgcggcgactacctcaccaacaccaacctcttccctaacttgttgctcgacaagctactgaagaagacttctgcgcgtcaaatatcaaaaaccgcttcacctgtcgaacattttcggcaggtattgcaaaagggttctgatgtgtcaattaaggagctagacacccttttgtcacttcttgccgagaagaaaagaaaaatggaacaagaagaagctgagagaaatatgcaaatattgttagacttcttgcattgctt

SEQ ID NO: 1754 - DNA, 269 bp, Glycine max
  Clone ID: 700960257H1
gggcttcgtcggaggattgtcacgcctgaacgagcccttttccatttcagccttgagcggctcctgttcttgtcaagttggtgtgaattaggagctgcttaattcaaagaatggggggagatgcacagaagagaaacgtcatcattggcgtctctactttcttgttggtggccatggtggtagcagtcacagtcaatgtcaacttcaataacaagggatcaagcagtgattcaaaggaagaaagcaaatcccatgtagcttcctcgatg

SEQ ID NO: 1755 - DNA, 267 bp, Glycine max
  Clone ID: 700960269H1
cgatcataccatggtaaatatgagaaacttggaggattatgtttctcttattgtcgatgcaactgtgaggtctggagtttcaagacaagtggaagcttttaaatctggctttaaccaggttttctccattgatcatcttcggattttcaatgaagaagaacttgagcgaatgctttgtggagagtatgactcttgggctgtcaacgagtttggagatcacattaagtttgatcatgggtatactgctagcagtcctcccattgttaa

SEQ ID NO: 1756 - DNA, 266 bp, Glycine max
  Clone ID: 700960277H1
gtgtttgaatcgtgaaaatgttcagaaaccagtatgacacggacgtgacgacatggagcccggcggggaggctgttccaggtggagtacgcgatggaggcggtgaagcagggctcggctgcgatagggctccgatccaagacccacgtggtcctcgcatgcgtcaacaaggctaactccgaactttcatcgcaccagaagaagatcttcaaggtcgacaaccacatcggcgtcgccatcgccggcctcaccgccgacggccgcgtc

SEQ ID NO: 1757 - DNA, 263 bp, Glycine max
  Clone ID: 700960288H1
cggtggtgtatttggtgtgttgatgttttattaaacttttgtactcttgctttgaaactagttggttaggcaagttttagttttctattttatttcagacttttcaggtgctcatattcttatgatgatcatcaaactgcaaatatagtgagcccattaagctattactgaaatttgttgcagatttgaaattcttctaagatggatacttcttataggactggtggagtcaagtacgagtgcttgctttttgatatggatga

SEQ ID NO: 1758 - DNA, 263 bp, Glycine max
  Clone ID: 700960291H1
gcagaagcacaagcccagctcttcaagatggccaacgaaggaagaatgaagcctagaccatgatgaaatacagattaagtagtagtactcttaattagttaattagtatggtgtgccaatttattgagttaagaccattttatatttaagatttctgttagtttgtgtcatttaaggctctcacatgatatgttcattaatatgcattgagatggatatcatgttaatttcttcgaaatttaatgcaaaatttatggttttgg

SEQ ID NO: 1759 - DNA, 263 bp, Glycine max
  Clone ID: 700960293H1
gttagagtgtttctttccacaactcaagaagccactaatgtaaatccttttttatatataagtatttgttggttaagttagagcgtttcttccatatcttagaaacaaccagaatttaaatcttgtaccacttgtttaggaaacacaagtcgctatcacttttatcgatcgttgttgatcttataaatgcttatataacaaattattcaaacactttaaaatttcataaacatttatcaatgtgtcaactgaaatttaagaaa

SEQ ID NO: 1760 - DNA, 259 bp, Glycine max
  Clone ID: 700960311H1
gtctaaatgatgctgattttgaagagagaattattcaacatttagctgctgctgcagcaatgaggagagctaaccaacttggttggagggaagggcagcgagctcgttcatcagctcatggtcatccacaattctctgttctctaatcagcctattgcaccttcatcagttgctggaggagaaaatgacccaactgcaattcctaatagaagtccatctaccccaataacatccgttggaaatgaagcatcgcagcaga

SEQ ID NO: 1761 - DNA, 260 bp, Glycine max
  Clone ID: 700960315H1
aacatgcacacaaagtaatggacaaaaaaccatgcaactcatcatctcatgatcctgaagtgagaaagggaccatggaccatggaagaagacttgatcttgataaactatattgcaaatcacggtgaaggtgtttggaactccttagccaaagcttctggtctcaaacgaacgggaaagagttgtcgactccgttggctaaactaccttcgtcctgatgttagaagaggaaacattacacccgaggaacagcttttgatc

SEQ ID NO: 1762 - DNA, 112 bp, Glycine max
  Clone ID: 700960345H1
ctacagtcaaaataggttttattaggtcagagttccacacaattgtcatattgtagaacgtttcgattttacttaagaggctcttatatgtattttttaaaccaattattaa

SEQ ID NO: 1763 - DNA, 256 bp, Glycine max
  Clone ID: 700960365H1
gcaaaacttagggttgggcctttttttgaggttttcagcgcttctttctcacaatggttcttcagaatgatattgatttgctgaatcctccagctgagttggagaagagaaagcacaaactcaagcgtcttgttcagtcaccaaactctttcttcatggatgttaagtgccagggatgcttcaacataacaactgtgtttagccactctcaaactgttgtggtgtgcggaaactgccagactgttttgtgccaacc

SEQ ID NO: 1764 - DNA, 250 bp, Glycine max
  Clone ID: 700960374H1
attaaatcttctctcaaaatatttgtgattccatgcccaacgccctaccctgaaaatatggtagccgagagagaggttaacggtaacggcgtcggagagggaagaacaacgctaatattcacctacggaaccctgaagcgaggcttctccaaccacccccttctccaagacctcattcgctccggcgacgcctccttcgtcggaacctaccgcaccgccgccaaatatcctctggtctgtgggccctaca

SEQ ID NO: 1765 - DNA, 99 bp, Glycine max
  Clone ID: 700960378H1
caaaaaaaaagaacaagaaaatggaaaaaaaagcaacactcgtctctgctgtttctcttattctcgtagtgggcgttgccctaggcgttgttgcttatg

SEQ ID NO: 1766 - DNA, 253 bp, Glycine max
  Clone ID: 700960381H1
cgctgagggaaatcagaaagtatcagaagagcaccgagcttctcatcaggaagcttccgtttcagagactcgtgagggaaatcgcgcaggacttcaagaccgatttgcgttttcagagtagcgccgtttctgcgcttcaggaagctgctgaggcctacctcgttgggttgttcgaggacactaacctttgcgcgattcatgcaaagagggttaccattatgcctaaggatattcagcttgctcgcaggatcag

SEQ ID NO: 1767 - DNA, 250 bp, Glycine max
  Clone ID: 700960382H1
cacactcactctccttctctctcctattgcggctagggtttgggtttttcactttcagcctctccattccttcaaccttcttcttctctttgatctctgatggagacgttccgtgtttagtagcaagggttagttgaggccttgtgtttggaaacgtacggtgtcgttttggagttgggaaaacaaataattctgagagatggcaaccacgaacccttttgatttgttgggtgacgacgctgaggaccct

SEQ ID NO: 1768 - DNA, 248 bp, Glycine max
  Clone ID: 700960384H1
agcattcagtgaaacactagctagggtattgggagctctcgttgtttcggagttagggaccttacgcagccatggccactgctacgaatgccgccgccgccccaccacgccagctctcccagaaggaagctgacatccagatgatgttggccgccgacgtccacctcggcaccaagaactgcgacttccaaatggaacgttacatcttcaagcgccgcaacgacgggatttacattattaaccttggg

SEQ ID NO: 1769 - DNA, 100 bp, Glycine max
  Clone ID: 700960388H1
atttaaaaaccaaaaaaaactaatcctcgtggtcacagtgggtttgagtgaactaaaaggaacaaaggcaatacatagagggcaacgcgattttcattct

SEQ ID NO: 1770 - DNA, 247 bp, Glycine max
  Clone ID: 700960390H1
ggagagggtccagtggtgttgttcctccacggcttccctgagctctggtactcatggcgccatcagattctctctctcagctccctcggctaccgcgccgtcgctcccgatctccgtggctacggtgacaccgaagcaccaccttcaatcagcagctacaactgcttccacatagtgggtgatctcgttgcgcttattgactctctgggtgtccaacaagtgttccttgtggctcatgactggggag

SEQ ID NO: 1771 - DNA, 263 bp, Glycine max
  Clone ID: 700960413H1
gggttatcatttctccatttccattttctctctcacttttcaagaatcgtaagctatgggaaagtcttacccaactgtgagtgctgattaccagaaggccgttgagaaggcgaagaagaagctcagaggcttcatcgctgagaagagatgcgctcctctaatgctccgtttggcatggcactctgctggaacctttgacaagggcacgaagaccggtggacccttcggaaccatcaagcaccctgccgaactggctcacagcg

SEQ ID NO: 1772 - DNA, 266 bp, Glycine max
  Clone ID: 700960416H1
ttcggatctgagagatcgccacgcacgcacgcacgcttcctttgattttgtcttccgcttcgtcatttcctattctcagcttccaattctcctcctccttcttctaattctacttcttttcgagggttttcgttcctctgtgcctgattgatccctaattcgataccatgcggaagaagctcgatacccgtttccccgctgctcggataaagaagataatgcaagcagatgaggatgtcggaaagatagcgttggcagttcctgtt

SEQ ID NO: 1773 - DNA, 259 bp, Glycine max
  Clone ID: 700960430H1
gttaattcagactcccctcagaaacaagccattggtaatgcaaaccctagtcctactcctgcaatgaactatggtatggctaatcgacaaagatcaatgaagcagcgtggagggtcaaatggctataatgttgggtctggtcctgttcagaacaacttctccggtgctacccagaatcttcctccaccgccaccaccgcccccctttcctgtgcttccgatgcctccaagaacatttgcccatgggataccaggggttc

SEQ ID NO: 1774 - DNA, 265 bp, Glycine max
  Clone ID: 700960438H1
ggatgatgctggaaactgctctcaaactacttccatatatgggtctaagcttagttcatgggttgagaatagtagtaattttaaacgtgaaagcagtgtttcaactggatactccaagcgaccagatgaagtttgcaaatcaaatcgtaaaagacttaaaccaggagagaaccctaggcctaggcctaaagatcgccaaatgattcaagatcgtgtgaaagagttgcgggaaattgtgccaaatggagcaaaatgtagcatagat

SEQ ID NO: 1775 - DNA, 264 bp, Glycine max
  Clone ID: 700960439H1
ggtttttgatacgaatatcagccaatgagataggaggggcttcaacagccacaaccttgatcttgcattgagccatgaaactacttagccacttgggttcctcactagagacacttgtctattaactcttttttgttgttgtggtgtttcatttgtgaaactaacaacaacacaaggccatcatcatggcagctgcttccccaatggcaagccaactcaagtccaccttcactaggactcttgtagctcccaagggcctctctg

SEQ ID NO: 1776 - DNA, 263 bp, Glycine max
  Clone ID: 700960452H1
gcctctctcttcattttttgtttagcatgttttgccactgcagcacggtgaagagacttaccttggatttggtgggaagaacagaacaggttgatgtggcagagtttgggattactttgttggattgttttccaaacataacatatcttaatttaggtcctggagcttggcatgtgatggagaattctttcagctggggaggtttgaaagatgggattgggatgaagatgataaaagaacttatagcacatctagtggtccat

SEQ ID NO: 1777 - DNA, 261 bp, Glycine max
  Clone ID: 700960456H1
gggttcgaactatactagacataggttgtggctatggtagctttggagcacacctcttcgacagtcagcttttaactatgtgcattgcaaactatgaaccttctggcagtcaagttcagctcactctggaaaggggtcttcctgctatgattgcttctttcacttcaaagcagttgccatatccatctctatcctttgatatgttacattgtgcaagatgtggcattgattgggaccagaaagatggccttctcctgattg

SEQ ID NO: 1778 - DNA, 243 bp, Glycine max
  unsure (1)..(243): unsure at all n locations
  Clone ID: 700960504H1
agaacattnaccaagantnttgttgaagcttttnagccnanccgggancancgactggnactnnancttctgganccgcacatnccggtggtcccgcnatcctcgatnaagtcgagnagaagctccggatcaagcnggacaaactccagtcccacccggcatgtgntgagtgantacggaaacatgtcaanngcgtgtgtnttgttgattgtggatganatgagnaanangtctaaggacnaa

SEQ ID NO: 1779 - DNA, 230 bp, Glycine max
  unsure (1)..(230): unsure at all n locations
  Clone ID: 700960506H1
ttggagcatcgaggatatctggtcgtctatgcacttactccaatggagattaaacctagctatatgcatgccntatataaatgcatatatatgatgatatataaacctaagctcttgtagagtgtgttcaggcttaataacatcattaggtctgtttatatgagtagtctaagtttggtgtttgtaatgaatgatgtgagttaagaattaatttagttatggattgaaat

SEQ ID NO: 1780 - DNA, 259 bp, Glycine max
  unsure (1)..(259): unsure at all n locations
  Clone ID: 700960516H1
ggtgcagctgcctgattttgacgaggacgaattggaagcagaacttgaagaattggagggtgctgagttggaagaacagcttcttcagccagcaactacagctcctgcagccccagtgcaggtcncagctgggngccaacctactcgcgccagttcctgcaaagcgaactcgtgaagaanatgaattggcagctttgcaggctgagatggcatttgagcaggtgcctttcctcagctgtaacatancaanttgtatgcc

SEQ ID NO: 1781 - DNA, 252 bp, Glycine max
  unsure (1)..(252): unsure at all n locations
  Clone ID: 700960520H1
tcgagngattccggctnagatttganttcnttnnttccgaatcaaaattctatctggncnatctcnntctcaaaataaacagtgccttatttgngtagngtgaatgtgtgatggcgagtngttccttcttaaaaaattgnaaaatcnttgattttgcttcgtnactactgggagagtttacgagnagtatcaaaccgataaaagacgtttcttcaacatcattgactccgntgaanntaattgntcanaacg

SEQ ID NO: 1782 - DNA, 252 bp, Glycine max
  unsure (1)..(252): unsure at all n locations
  Clone ID: 700960523H1
cttttgctttntntctcccaaattgatnacaacttccngtccgganctgtgcagagaagtaaacatataggagtgagaggganggagagagaaggaaagcttggtagcgatggggaangagcaagttcaggtgctgantgnctggangtggcaaagacacaatggtatcatttcacagcaatcatccattggtggaatgggttnttcagtgatgcttatgatntgttntgnatatcatagtcacaaagctac

SEQ ID NO: 1783 - DNA, 251 bp, Glycine max
  unsure (1)..(251): unsure at all n locations
  Clone ID: 700960524H1
gtcggaatcgacggtnggagatttagtggcggcggnggtgcggcaatacgtgaaggaaggtcgncgaccaattttgccgtccaacgacccttccccacttcgaccttcattattgtcagttcagcttagaaagtttggatagggaggagaagctgagggatantggatctanaaantctttatgtgtccgangaagtgtggnggcggcnnggcgaggtagangaacgaagccgtttgttcatgntcaagac

SEQ ID NO: 1784 - DNA, 253 bp, Glycine max
  unsure (1)..(253): unsure at all n locations
  Clone ID: 700960530H1
taaatcangtcttanttaggnagttgtganctaattgtataattnacnancatntgatttcnaantnttntttccganantttctttctttntcntgaaaacacttcangnacaataattcaagcgggggcttgtggcantgtttgttctggctcgtatcatgttacagttactttaaccaaatananacatanagcagcaagtctgtcattactgtttnatntctactcttngnctctgcgtgccccttcac

SEQ ID NO: 1785 - DNA, 252 bp, Glycine max
  unsure (1)..(252): unsure at all n locations
  Clone ID: 700960535H1
agaaaantccgggtcanactgctttgaanaattntgagaaagtattntttcagggctctttggngtcatctccttcatccctcaatctgttgtncaggtcgttggcaacttaactgcagttcactcatactttnatttattctcaaggaaaattgaccaagatnatatgganttgaggaggtgagttgnagctanacanaattcagaangaacatgcantacaacncacnaatggangnttcnaaanattnc

SEQ ID NO: 1786 - DNA, 204 bp, Glycine max
  unsure (1)..(204): unsure at all n locations
  Clone ID: 700960536H1
actaatttcgtagttactttcgtntngaacgcgcacggtaaactaggttgttntgtncntcttctcttcatcgttcgncnaagtcaagntttgactgngcnctgcatctnncaatctctacgaagcaacgctnngaagtnnnnatgtnaagttccgncaaaggtattaccttgatacaaaaactntgaagtanatnttgtcnag

SEQ ID NO: 1787 - DNA, 196 bp, Glycine max
  unsure (1)..(196): unsure at all n locations
  Clone ID: 700960546H1
tttcctttcaacaccccttgtttatnttgtactgaatgccacccantgataacaatttntatcttggagttagcntttatggtaggtttcctctttataacncagtgtatnaaatgtgcatatttnatgtgataattgttgtganttatttnttgganngaaagtataaaaaaaatgaangattagttggatgttg

SEQ ID NO: 1788 - DNA, 252 bp, Glycine max
  unsure (1)..(252): unsure at all n locations
  Clone ID: 700960548H1
aanaaatgccacaccctctactatcgcgcanccntttnttcacttcttcatgnttcgactcttctgcgcctganctccnacngtngtctgagtngcgccgccgtttggnttcgcggatttctccnatgttcgnntaacgagacanagtgaatctgaatcgcattcgaacgtgntctcttcgacatcttcacttaagccttcganttgcataagatgcttncgagggtttatngnccaaatcacctcaaaccc

SEQ ID NO: 1789 - DNA, 83 bp, Glycine max
  unsure (1)..(83): unsure at all n locations
  Clone ID: 700960553H1
aggtaatttaagagagagaaacgagagagtgagagagggacnaccncatnccacttcttcccatttcncacnnctcccnaacc

SEQ ID NO: 1790 - DNA, 96 bp, Glycine max
  unsure (1)..(96): unsure at all n locations
  Clone ID: 700960554H1
gttcgtctccctcccatcgaaataatggnttcngtttcctacctcttcgtgtttcgttccnnttccttcttcctctcntctccaccaccaanatnc

SEQ ID NO: 1791 - DNA, 246 bp, Glycine max
  unsure (1)..(246): unsure at all n locations
  Clone ID: 700960557H1
tgcagttntgctccgcaattatcatgggcaaggtcaanatcggaatcaacggatttggaagaattggncgtttggtancanagtggctctgcagagagacgatgttgaactcgttgccgttaacgacctttcatcaccaccgattacatgacatacatgttnaaatacgacagtgttnatggacactggaancatcacgatgtcacgttaaggacgagaagacgcttctnttcggtgacaanccag

SEQ ID NO: 1792 - DNA, 250 bp, Glycine max
  unsure (1)..(250): unsure at all n locations
  Clone ID: 700960561H1
anganacacaccttcagcancagcagccatggttgtcaaaaccgaactatgccgattcagcggtgccaanatctaccccaggganaggcatcagatttgttcgtggtnattctcaggttttcctgtttgntaatcgaaatntaanaggtanttccacaanangttnaagccatnaaagctcactgnactgcaannnacaganagcaacacaagnaggacattgtcaanaagctgtnaagaaaagaanacg

SEQ ID NO: 1793 - DNA, 251 bp, Glycine max
  unsure (1)..(251): unsure at all n locations
  Clone ID: 700960562H1
atnacaacaacaanaactcccaccaancanctccaccaanaaatatgcntgagatccttncccaagccttcttgacttccnnttngcttgctctnagcgctgtnacancattgaatgatgacccttttgacaagtcntctgcttcantggggaantcatcanaggaggataaagncatagtgaaaagggctnctacttgcatcccctnccatgaccantccaagagantnagaacaagctcttncgntgcc

SEQ ID NO: 1794 - DNA, 255 bp, Glycine max
  unsure (1)..(255): unsure at all n locations
  Clone ID: 700960564H1
anttnaaacaaattttnagtcagggtttgcactcacttcagagcaccntaagctatctanntgataccatctncccanaagccggttgtganatacaattatncaaaagaagctaagnnattttatgctcgccannatgatganggaactgtagctgcgtttganttggntgtnccaaagnttggaacaataatatctggtagcnaaaacgaggaacgtcttaacatnataagctccaggattgatnagttangt

SEQ ID NO: 1795 - DNA, 110 bp, Glycine max
  unsure (1)..(110): unsure at all n locations
  Clone ID: 700960569H1
canccggcntccganccacacctaacccaaaccagcctatggcggngatgcagaggnccaccngcaannagaaccannncaatggccaaagctacgtgcgtgcttttnct

SEQ ID NO: 1796 - DNA, 246 bp, Glycine max
  unsure (1)..(246): unsure at all n locations
  Clone ID: 700960573H1
atggttgtacagcaatattgaagccatntgaattggcatctgtgacctcgtttgnagctggctgaaatatgcagagaagttggcnttnctccaggggtattaaacattgttactggattangcaatgaagctggtgntcgtttgtnatcatcctgacgtagacaagatttcntttactggaagctctgnaatggaagcaggattangacagctgcagcacagctaacgaagctgtttntctagagt

SEQ ID NO: 1797 - DNA, 253 bp, Glycine max
  unsure (1)..(253): unsure at all n locations
  Clone ID: 700960581H1
tctagcncaacnggatcttcacgactaggagatggcaaagtcgaacaaccacacccgctcacaacccantnctacaaggcccataanaatggcatcaaaaagccaaagagggatcgncacacttccaccaaagggatggatccaaagtttctgaggaaccanaggtacgcnaggnnncataacaagaanagcggtgaaacagccaccgaagnngagtaaagtgccactctnaaatgggctantaggattggtt

SEQ ID NO: 1798 - DNA, 83 bp, Glycine max
  unsure (1)..(83): unsure at all n locations
  Clone ID: 700960584H1
tgccanatcccaaatccaaatccnacnctgttcgatttcntcctttgaagatcctccatcgttnttccctcaaaacgncgagc

SEQ ID NO: 1799 - DNA, 245 bp, Glycine max
  unsure (1)..(245): unsure at all n locations
  Clone ID: 700960587H1
acatgttcacaanttggttnatgntcttcnanaaggcatgaatctaagagtgcnggaantgaaatggtnactgaaaaggagcaggnanagttnacggnaagagataatcctttgtgtncttcttgtcagatgcttnttctttggatccanaatcaactaaaacaaaaggcaacgaangacanannattcaactangtgaatcaatntgtgagagcctaaccaagtccattgganantcantgatc

SEQ ID NO: 1800 - DNA, 249 bp, Glycine max
  unsure (1)..(249): unsure at all n locations
  Clone ID: 700960588H1
attnaatctncanaattcncngacaagagatctttttctgctccnttgaanaaagaagggtntttgnttgattttggagangtctctgctctgagatctcatgaaccttaacccgtacgatanccaccgagaaggtgatcgnagagtacatatggatcggtggatcaggaatggacctgaggagcaaagcaaggatctcccaggaccanntagngaccntcagagttcccaantggaantangatngnc

SEQ ID NO: 1801 - DNA, 178 bp, Glycine max
  unsure (1)..(178): unsure at all n locations
  Clone ID: 700960590H1
agaaagatgagcgatgaggaaagaacnaagcaaatacgcggagtgagnaaaagcntgaaagaaggagagagaatcgtgggcccaacgagacggcccgacggaancctccgcaancccattcgaatccgcgctggttacacccctcaagacgaatcgcccatttaccaaccaaaggagc

SEQ ID NO: 1802 - DNA, 259 bp, Glycine max
  unsure (1)..(259): unsure at all n locations
  Clone ID: 700960601H1
tacaaangttgctgtaggagataagattgcagtagtgctaagtgctaacacctgcagtgaacaatggcctctgcatcagcatctctgctcaagtcttcacttgttcttgacaagtctgagtgggtgaagggacaaacccttcgccaaccttctgcatcagttgtgagatgcaaccccaccaccccatcaggcctcaccatcagagctggttcctatgctgatgagctcgttaagaccgcgaaaacagtggcttcaccag

SEQ ID NO: 1803 - DNA, 108 bp, Glycine max
  Clone ID: 700960603H1
gatctcactgagtctgatcaactaggagaaatgctaaagcaaattttttagttggactgaggcatagtctacaaaatgctatgagaacctgttcatggttttgatttg

SEQ ID NO: 1804 - DNA, 243 bp, Glycine max
  Clone ID: 700960607H1
cttccaaaaagtaagtcattagtcatataaggttaagatactatgtttgctttgagatttaattataagaacgagacttgattaacatgcatgtactaagcttgagaagtattaatatgaagaataacagcttttgaaataggattcgcacataagaaatagtcttaccaagaggatagttgctaattgattataagcatacaagattgaaaatgcatttagaatatcaaagtgcagtaacat

SEQ ID NO: 1805 - DNA, 255 bp, Glycine max
  Clone ID: 700960608H1
gttcattccatcactgccacccagaagactgttgatgggccatcagccaaagactggagaggtggaagagctgcttcatttaacatcattcctagcagcactggagctgccaaggctgttggaaaagtccttcctgctttgaacggaaaattgactggtatggcattccgtgttcccaccgtggatgtctctgttgttgacctcacagtgaggctggagaaggaagcctcctacgatgaaattaaaaatgctatc

SEQ ID NO: 1806 - DNA, 251 bp, Glycine max
  Clone ID: 700960610H1
atccccccctagctacagagcagccaaaggggaggaataataataagcctatattctaaggccggaaaaataaaaaaggaataacaaaaatgtctggaaaggtaattatctcggctgtttctctcatcctggtggttggagtggccataggtgtggtggtggccgtcaacaagaagggcgaggatcccacacttcaatctcaacaaaaatcagtaggggttatctgccaaaacactgatgaccagaagctc

SEQ ID NO: 1807 - DNA, 255 bp, Glycine max
  Clone ID: 700960633H1
tttatctcaaaactgggacttgcaaatttggattcaattgcaagttcaatcacccgcttaggaggaaaaacctggctaaaaacgagaatgcgggagaaagagaagagcaggaagaaagatcaggccagacggaatgcaagtattatttaaggtctggggggtgtaagttcggaaaggcttgcaagtttaatcacacaagaggaaagagttcatcagcatcctctactgcagagcttaacttccttggcctgccta

SEQ ID NO: 1808 - DNA, 250 bp, Glycine max
  Clone ID: 700960634H1
atttacaaagtgtcataaattgatgggattctctacagggccaagatcacgagctacacattggaaacaaacagtcctatacctagaagatgtcttgaccgtttgtgagggggaggcaattgtggggagcatgactgttgctccaaataaaaaaaatcctcgggatgttgatataatgctcaagtattcattgaatggaaggcgatgcaatgtttcaagggttcagtactacaagatgcgttgaacctgg

SEQ ID NO: 1809 - DNA, 248 bp, Glycine max
  Clone ID: 700960641H1
gcttcttctgtgtgccaccccctctttaattttttttttctttagcttttggagtttggagtctcttgaaccatggctaagaatagaggagagttgaggattcatgagagtgtggatgagctaaggactgatttggcagactatgttgctgagttatcagaggcatctgtgaaagagcgaggagtctttgccattgctttatctggtggttctctcattggcttaatgggaaaactctgtgaagctcc

SEQ ID NO: 1810 - DNA, 206 bp, Glycine max
  unsure (1)..(206): unsure at all n locations
  Clone ID: 700960664H1
gtaatggacaaaaaaccatgcacgntcatnatctcanngatcctgaagtgagaaagggaccatggaccatggaagaagacttgatcttgataaactatattgcaaatcacggtgaaggtgtttggaactccttagccaaagcttctggtctcaaacgaacgggaaagagttgtcgactccgttggctaaactaccttcgtcctgat

SEQ ID NO: 1811 - DNA, 245 bp, Glycine max
  unsure (1)..(245): unsure at all n locations
  Clone ID: 700960671H1
tgctgagatcattgagcatggtatatcaggattccacattgatccttatcntcctgatcaagcttcagagctattggttgaatttttccaaaagagcaaggaggacccagaccattggaagaaaatatctaatggtggtcttcaaagaatttatgaaaggtacacttggaagatttattctgaaaggcttatgacctttgcgggagtttatagtttctggaaatacgtttccaaattagagaggc

SEQ ID NO: 1812 - DNA, 244 bp, Glycine max
  Clone ID: 700960674H1
ctccaacttccaacgagactgcgtgtggtatccttatagattggctgcaatattaccctttttcatttttgaagtatcgtttgaaattgaagtacaatggcactttccttcagggaagaaagagatacctttggagccattcaagttccctccgagaaattatggggagcacaaactcaaagatcgttgcagaacttcgatatcggtgggccccgcgaacgcatgcccgaacccatcattcgcg

SEQ ID NO: 1813 - DNA, 243 bp, Glycine max
  Clone ID: 700960686H1
gtcagctgggaggatattggaggccttgagaatgtcaagcgtgagtgcaagagactgttcaatatcctgtggagcacctagaaaaatttgagaagtttggtatgtcaccattaaaaggggttctcttctatggtcctccaggatgtggaaaaactttgttggccaaagcaattgctaatgaatgtcaagctaacttcatcagtgtaaggggcccagaattgctcactatgtggtttggtgaaa

SEQ ID NO: 1814 - DNA, 205 bp, Glycine max
  unsure (1)..(205): unsure at all n locations
  Clone ID: 700960755H1
ttcctatgtttgatnggnnnggaggtagaacgtcagnnatgtctgcagttggcctgcttccagcagcccttccagggattganatnanagaaatgcttgccggtgcatcattgatggatgangctaanaggagtactgtgnnaaggaataaccctgcagctctgctggctttatgttggtattgggctacagatggtgnaggatc

SEQ ID NO: 1815 - DNA, 263 bp, Glycine max
  Clone ID: 700960849H1
cacactctctttcttctgctgcaccagcaacaacagagaatgaacagtactgaggaggggatgcaaggcataggcataggcataggctgcttccaaaacgacgtcgtagggcagctggagctgagtcccactatgagcaactcctcctcctcgctatccatggagctggacgagtccccggagagcagaatccaacggttgatatcggagcacccggtcatcatcttcacccgatcctcctgctgcatgtgccacgtcatgaa

SEQ ID NO: 1816 - DNA, 260 bp, Glycine max
  Clone ID: 700960881H1
cagcctcatacagaaacttcaatgccctaacctcttcctccactggccaatcactggacgccacggggctggccaagatccattgggtgcaaaagaattacatgatttacaactattgcactgatattagacgtttcccacaaggcctccctccagaatgttccattgcttgagaatgttcattattcaattcaatgttgcatattattatatatataaaaaaaatggtccccatatacgtgacacgtgtatgcctatta

SEQ ID NO: 1817 - DNA, 261 bp, Glycine max
  Clone ID: 700960909H1
cactatcattaaccaataaccaataaatacattaatcaccatggggaagtactttgctgttgttgctctctttgtctcagctttgtgcttctcctctatcttggctcgtaagacacctgcccttgataaattcttcgttgagggcaagatttactgtgacccttgccacttcgcatttgagtccaggctcagtttccccttggaaggtgttaaggtaagcctgcaatgtctgaggagtgagaatgataccgtgacatatgt

SEQ ID NO: 1818 - DNA, 259 bp, Glycine max
  Clone ID: 700960914H1
caggattcagaggttttaatgactaccctccatttttgaacctctctctttctctctctccgagtctgagcctcgttcttcagactcgctttctctgctcactcagagactgagacacttatcttttctgtcattggtctctgtgtttgcttccaaaagctctacacgataagccaaagattgaaagaccctctctagcctattctctgttttttttccctgtcccagttgctcagatctactaccacccctttctgca

SEQ ID NO: 1819 - DNA, 252 bp, Glycine max
  Clone ID: 700960936H1
ctcctgcaaagcttccaacactggtggacatgccagccaatgtctctggctgcggcgacggtgctgggaaccagagaaaatttgatttcaaattcattcgcatttccctctaaatttcagagattatcgtcccgttatcgctgaacattgaaagccctcatttcatgacctatctcatttctcatcatgacctagctccaggctttgctccacgaaagtgttgttgttcaggtgaggtttatgttgtatcaa

SEQ ID NO: 1820 - DNA, 254 bp, Glycine max
  Clone ID: 700960942H1
gttctcttttttttatcttcttctttctgcctccgaattaccactctcttgctttgctatcttacaggaagaggatcaaaataccccaccataagacaaatccaaaggaacagcaacatcaattatgggaggttcaatggagaagaaggtgttgtgagagaaaaagaagaagaaaacaagtggccttcatggctgcagccacttctcaagacacgtttctttgttcaatgcaaagtccacgcagattcccacaa

SEQ ID NO: 1821 - DNA, 250 bp, Glycine max
  Clone ID: 700960957H1
gtgaaactggggcaggaaagcacgtgccccgtgcgatttttgtagatcttgagcccactgtgattgatgaggttaggactgggacataccgccaactattccatcctgagcagctcattagtggaaaggagatgcagcaaacaactttgcccgtggccactataccattggaaaggagattgttgagctttgcttggaccgcatcagaaagcttgctgacaactgcacaggtctccaaggttttctggtt

SEQ ID NO: 1822 - DNA, 250 bp, Glycine max
  Clone ID: 700960964H1
gtggttctggtgcttcctcatctgttctcgacaaagtagttcatgctgctaatgagaacataggctcacaggaaagctctattgatctagacaaaaagacgtcggaagatggaagtgtgaagaacagttctgtttctgccaaagttagtgatggggccagcagtcttgcaaagacaagtggaagtgccaagatcagcaaccgggctgattttgttgagagtggtaagagcagtatttgcagaggaagcac

SEQ ID NO: 1823 - DNA, 248 bp, Glycine max
  unsure (1)..(248): unsure at all n locations
  Clone ID: 700960965H1
tttcttccaacctctcaagtccaacctacccctttttcttctcccaccaacttcaccgtcnacttcctcgatcatgtctcacttcaagggcaagtaccatgatgagcttattgccaatgnngcttacttggcactcctggaaagggtattcttgctgctgatgagtcaacagggacaattggcaagcgtttggccagcatcagtgtagagaatgttgaatccaacaggcgtgctcttagggagctgct

SEQ ID NO: 1824 - DNA, 248 bp, Glycine max
  Clone ID: 700960972H1
gaagacgaaggacagagcaatgcctcgatggtagcatctgcatcttcaccttcctcggagtgtttcaccctaaatgaggctagattgaaagaacgcaattacctgggattgtcagattgctcttcggtggacagttctattgtcccgagtttgtctgatgagaaaaaggagaatctgaatttgaaggctactgagttgaggcttggacttcctggatcccagtcacctgaaagggatccggatctttt

SEQ ID NO: 1825 - DNA, 243 bp, Glycine max
  Clone ID: 700960994H1
gccaacctcggcgactcgagagctgttcttggcaggagggatacggtgagaaagaacagtccagtggtggcacagcgtttgtcaacagatcataatgtagctgatgaagaggtgagaaaagaattgaagctctccatcctgatgactcgcacattgtggtttataaccgtggagtttggaggattaagggcattatacaggtgtcaagatctatcggtgacgtgtatttgaagaaacctgatt

SEQ ID NO: 1826 - DNA, 272 bp, Glycine max
  Clone ID: 700961009H1
tttggggtttctctcttcaaactagggttttacagaatataagctctctctatctttggttttcgtcattcaaatccaatccaatatcaaatatgagtcgtcatcccgaggttaagtgggctcagagacttgacaaggtctatatcacggtgcaattggctgattcaaaaaatgccaaggtggatcttacaccagatggtatttttaccttctctggtagtgctggtgctgaagaccatcagtatgagctaaaactggagctctttgacaag

SEQ ID NO: 1827 - DNA, 265 bp, Glycine max
  Clone ID: 700961018H1
cgagtttcagactcaaaacggcacgcacaaacgatgtcgtagcatcggggatattttctccctctcggaactagccaacagcaagagcgtggtgaagctctgggacaccataggcttcggcctgggcttggacttcgatgattacgatggttactacgttggtaacgcggcggttccgacgagctccaccgcgtctccctcggtggttgtctcggcgggggaaggcgcgtgcgggaatctggcgctggagatctgggacacgcgg

SEQ ID NO: 1828 - DNA, 264 bp, Glycine max
  Clone ID: 700961027H1
aaggcagaaagcaagctcatcctagagttttaaaaatggcagcagcctcctccatggctctctcttccccatccttggctggcaaggccgtgaagctgggcccatcagcccccgaagtcgggagggtcagcatgaggaagaccgtcaccaagcaggcctcctccggaagcccatggtacggcccagaccgcgtcaagtacttgggcccattctctggcgagcccccgtcctacctcactggcgagttcccaggtgactacggct

SEQ ID NO: 1829 - DNA, 254 bp, Glycine max
  Clone ID: 700961046H1
atcaaagtttcttcctttctctgctctttgccttctctgacacatttggtgccttgtagagcgtgttttggcaggaaggtggtatggcgaaggacgttgaggttgctgagcgtggctccttctctgggaaggactaccaggaccctccaccagcaccactcattgatgctgaggagctcacaaagtggtccttttacagggctctcattgctgaattcattgccactttgctcttcctctacattactgtgctc

SEQ ID NO: 1830 - DNA, 257 bp, Glycine max
  Clone ID: 700961073H1
atcttctcataagctttacttaattagcaaatccaaatatggcactttcttcttcatcatcttcaacatccatatttgctttagctttgttcactcttttgcttataggaagttcttcagctcaactctctgagaacttctatgatagtaaatgtcccaaggttttctatgccgtaaaatccgttcttcaatctgctttggctaaagaacctcgccagggagcatctatcgttcgcctcttctttcatgactgcttt

SEQ ID NO: 1831 - DNA, 250 bp, Glycine max
  Clone ID: 700961082H1
catcttttgtttgttcttcagtactttagtgtgtgatttaattccaagattttgagaatgtctagctgtgggtgtggaagtagctgcaactgtggcagcaactgcggttgcaacaagtactcttttgacttgagctatgttgagaagacaaccacagagactcttgttttgggtgttgggtctgtgaaggcccaattggagggtgctgaaatgggtgttgcagctgagaacggtggctgcaactgtggat

SEQ ID NO: 1832 - DNA, 237 bp, Glycine max
  Clone ID: 700961111H1
ctcgttgaaatgaaaatgggttcttctttgtggactttgtgtctaattttggcttcactagcctcttctgcattctgtgcctttccacggaggccagtggatgttccattcggcagaaactacgttcccacttgggcttttgatcacatcaaatacttcaatggaggttctgagattcaacttcatcttgacaagtacactggtactggcttccagtccaaagggtcatacttgttt

SEQ ID NO: 1833 - DNA, 239 bp, Glycine max
  Clone ID: 700961115H1
ctcatgaatgttcatcagcaagggccagttcatctagtcagtctgacaactcttgtatcgagtgtcctgtttgtcggaggtttatctgtgtggactgtaaggttccttggcattcttctatgagttgtttagaataccagaacctgccagagaaggagagggatgtttctgacattaccttgcatcgtcttgctcagaataaaaggtggaagcgctgtcagcagtgtcgtagaatgatt

SEQ ID NO: 1834 - DNA, 243 bp, Glycine max
  Clone ID: 700961116H1
gtaatgtagtgcttaatgtagcttgactgttaaatggggatttgagtaggctttatttggcattcagatagttatgaaatctgaattgacttcagtttcttgctaaccttggtgagaagcagactttgtagctggatctgaatggtgcactatgaatcgaccatgtactttaactgttttaacattttctagccagttgttaggtttctagtgtttctgtaatcacagggcagcgttattcaa

SEQ ID NO: 1835 - DNA, 269 bp, Glycine max
  Clone ID: 700961204H1
ctatttttcaagtaacttaaggtttcaaacctaggaagttggaagtcatggcagcaacattgatggcagcaacaacaagttctggtactcttaaagcaactcctttccttggccaaggcaagggtgccaatgccaatgctcttagggatgttgtctccatgggaactgggaagtacaccatgggcaatgatttgtggtatggaccagacagagtgaaatacttgggacccttctcagctcagaccccttcatacttgaaaggagaattc

SEQ ID NO: 1836 - DNA, 265 bp, Glycine max
  Clone ID: 700961212H1
aaatgattgagtctggctttcagcctactatttttgttctgacatcgcttgtccagtgctatgggaaggttggacgtactgatgatgttttgaagacatttaatcaactcttggatttgggcatcagtccagacgaccgtttctgtggttgtcttctgaatgttatgacccaaacaccaaaagaagagcttggtaagctaaatgattgtgtggagaaggctaatccaaagcttgggtctgtgctaagatatttggtggaagggct

SEQ ID NO: 1837 - DNA, 265 bp, Glycine max
  Clone ID: 700961213H1
aaagaaagaggtgaagtcaaatggtccttagttctgggagtgttgatgcttgagtcttgacggaacgaacggaaaaggggatctcaatggacaacaccaagccccttatcgaactggaactcgacgatgatggcagaatcagaagaaccgggaatgtgtggactgctagcatacacattataacagtggttgtaggggcaggggtgctgtctttggcatgggttatggcacaactaggatggttagctggcatagccagtatcat

SEQ ID NO: 1838 - DNA, 264 bp, Glycine max
  Clone ID: 700961241H1
gtttgaatgatccctaccaattcttgcagcactttcggaaatgatcttgaacccacaagcaactggctagaagtgattttcagtatatgcatagtactcagtggactattgcttttcacattattgattggtaacattcaggtattcttacatgcagtcatggcaaagaagagaaagatgcagctgagatgtcgtgacatggaatggtggatgaggaggaggcagttgccatcgcgattaagacaaagagttcgccattttgaa

SEQ ID NO: 1839 - DNA, 263 bp, Glycine max
  unsure (1)..(263): unsure at all n locations
  Clone ID: 700961244H1
agcgagcgncgtctntgncgaccgcgtctnccttcgnattcgcntccgccgcggactnctctgtcatgganntctgccgcggatcggcgattcagctgctgaatttcgccgacgncntcncgatcgggagccggtcgccgnaaaggctgttccgaancctcgacgtgttcgagacgctgcgtgacctatttccggagttcgaggctctgtttgctgatcagtttagtgtgtcgctcaggaatgaagcgattacgatttncaag

SEQ ID NO: 1840 - DNA, 262 bp, Glycine max
  Clone ID: 700961249H1
aatcaattaactgaatgcttagagagagaaagaggagaaggagtagtgataaggtgatcatagagcatattataagagagtgaaaactaatggaggttggcctcaagaaggagaacatggggtttgaggaaactgagttaaggcttggactgcctggaaacggaggcactgaagaagtgctcatcaggaagaggggtttctctgagactgaaactggtcatgaagatgagtctgccaccactgtggatttgatgcttaatct

SEQ ID NO: 1841 - DNA, 268 bp, Glycine max
  Clone ID: 700961265H1
cttatagcttcatcccaaaaagctcttttccttctaaatttgattccttagttcagcattctattattatatatggcttcttcaccttcctcagaaaacaaaaacctagagggagtagctggtggtgccggagagaaacccattccacttggtgagaacgttctgcagaagcatgctgcattctttgacttgaataaagatggtgtcatctacccatgggagacttttaaagggttgcgtgaaatcgggactggggttttgctgtccg

SEQ ID NO: 1842 - DNA, 262 bp, Glycine max
  unsure (1)..(262): unsure at all n locations
  Clone ID: 700961280H1
attaaaacggtaaaacgaacacaccctngttacttggacgtggaaattcacgttcgcgctncctttttatcttggcattgcgtttgtgtgtgtgtgcaatatcacacaacccaaccttattcgttcttctgttgttctgaggcgagccatgacggacggncatctcttcaacaacatcaccctcggtggccgtggaggcaccaatccagggcagataaaaatatatcctggaggaattgtatggaagagacagggtggtggt

SEQ ID NO: 1843 - DNA, 259 bp, Glycine max
  Clone ID: 700961295H1
ggttacttcagcttccacatatcttgaagaattgatcaatgggcaagtctgtagttgagaagctactttggatggcaattgtgtgcttggtgctgggtgtaatttccattactcccaaggcccaagcagcagtgacatgcaaccaggtggtgagcaacctcaccccatgcatttcttatgtgctcaatggtggcaaaaccgtgcctggcccttgctgcaatgggatcaagaccctctttaacctcgctcactccacacc

SEQ ID NO: 1844 - DNA, 243 bp, Glycine max
  Clone ID: 700961304H1
cttgtctcacgatctcaacggagcacctctcttcaggtcgccatctagactgcaatcatggctgatggaccacagcatccatcagttgttcagaagctagctggacagtcttacctggtgtccaggctaagccccaactttaactctgggaattattcctcgactggttcttacttcaatggaggactgcactcttctgggttggctgttgtgtcgcctggatctccagttactgtgcatgct

SEQ ID NO: 1845 - DNA, 249 bp, Glycine max
  Clone ID: 700961316H1
cacaatgaatgcattaaaaaacttaggtctcaatgttgttaaggcaaatgtctttctggattcatctggcaagcacaacaagttctccatcacaaaagctgatactggcagaaaagtggaagagccagagttgttagaggcaattcgtttaacaattataaataatcttattcagtaccacccggaatcaagttcccagttagcattgggagcagcttttggacttctgcctccaaaagagcaggttga

SEQ ID NO: 1846 - DNA, 243 bp, Glycine max
  Clone ID: 700961319H1
ttacaatatagtatatattattactgctccatattgctgaaccatccttctagaattccaatgaaatgtatattatccaattaatcccaaagggtttaagcataaagcaatcattacgtgattccttttacttttaacatcatttcattttttggttcagctgtacattgtaacatttctagatattgttagagttgccccttgccactttataaatagtgaaatactatcaaactgactttt

SEQ ID NO: 1847 - DNA, 72 bp, Glycine max
  Clone ID: 700961352H1
caagaaccaggttgtttgagtgttttttattatcaatgttatctgatcaataacactatgcttggatttgtc

SEQ ID NO: 1848 - DNA, 78 bp, Glycine max
  unsure (1)..(78): unsure at all n locations
  Clone ID: 700961355H1
aanggttgncannctccatgtgttagcctgtagcctttgctccttncgtcgtgnggtgttatnganggacagtgagna

SEQ ID NO: 1849 - DNA, 241 bp, Glycine max
  Clone ID: 700961356H1
ctttaatccctcgcctatatcttcagaaaattagatctgcttcagatctagggtttcccttttccaaatcacgagtccgttgagtttgattttgtggatgaaagcatagggatagggcttttgcaaacctctccaatgtttctcgaaattatatgaccatgcgtcgaattcgtatgctgcactccttctccgtcgtgttcctctactggttctacgttttctcatgaactccctctcaaat

SEQ ID NO: 1850 - DNA, 84 bp, Glycine max
  unsure (1)..(84): unsure at all n locations
  Clone ID: 700961366H1
gcttgtaatacgaanacaaagcntccatgggaagaatgggtggnggaaanggccacnttggtncttccttgntngagggnagna

SEQ ID NO: 1851 - DNA, 236 bp, Glycine max
  Clone ID: 700961381H1
tctcacacaaaataatggacaagaagcttggcaacacgtctcatgatcctgaagtgagaaaggggccatggacaatggaagaagacttaatcttgatcacctatattgccaatcacggggaaggggtttggaactctttggccaaggctgctggacttaaacgtaccggaaagagttgccggctccggtggctaaactacctccgtcctgatgttagaagagggaatattacaccc

SEQ ID NO: 1852 - DNA, 234 bp, Glycine max
  Clone ID: 700961382H1
attggggtggcctgatatgcgtttgccaatcctctatacattatcatggcctgacaggatttattgttctgaagtcacttggccacgccttgatctttgcaagcttggttcacttacatttaaaactccagataatgtaaagtatccatccatgaatcttgcattttctgctggccgtgctggaggcacaatgacaggagttcttagtgcagcaaatgaaaaagctgtagagat

SEQ ID NO: 1853 - DNA, 232 bp, Glycine max
  Clone ID: 700961392H1
cctggcttggcctccccaacttacctcaatggcactcttcctggtgacaatggatttgaccctctgggactagctgaggacccagagaacttgaggtggtacgttcaagccgagcttgtgaatggacgttgggccatgttgggtgttgcaggaatgctacttcctgaggttttcaccaagattggaatcatcaatgcccctcaatggtatgatgctgggaaatcggagtact

SEQ ID NO: 1854 - DNA, 257 bp, Glycine max
  Clone ID: 700961403H1
gcgaaaaaaggtggcgaattagtttttggtggtgttgacccaaagcacttcaaaggaaaccacacttatgttccaattactgaaaaaggttactggcagattgaaataggagattttttcattggaggtgtttcaactggtgtttgtgagggtggctgtgctgctattgtggattcaggaacatctttgcttgctggtccaactcctgttgtggctgaaatcaaccatgctattggagctgaaggagttctcagtgt

SEQ ID NO: 1855 - DNA, 258 bp, Glycine max
  Clone ID: 700961404H1
agatacccaaagtagaaatatgggcaagtcaaacaaaaagaagcatccaactaaaaagaaaaaggtgaactctgaagcagaagtgataacagttggggcattagacaacttgcaacaaatggacaaattcagcacaagagcagtaacccttgaaggttattatggcacacagcagagcgtgcaagggatgttgaacttgatgggaccaacacgtgatgattactacgggaatcaacagacacttcaggggctgggacc

SEQ ID NO: 1856 - DNA, 258 bp, Glycine max
  Clone ID: 700961406H1
tgaagatgatattggacttttacctctccctccagatgtcagcaactacttgatgtctgaggatgtaccgaatggtaatgctaatgcccccatcagtgaaggaatcaatggtgcagaagtggaacgaaggttaagccaacctgatgataaattttcggttgatttagtcacccgacccatgacaaacagtgttgaattcagacatgaaacctctcagccaactgctggtattatttcaaatgtcactggccctgcatc

SEQ ID NO: 1857 - DNA, 256 bp, Glycine max
  Clone ID: 700961410H1
gattgtttgttgttgtaactcgttcttcttcttttgttgttctgtgtttgtgtttgttttttctctcacctgaaaatgtcttgctgcggtggtaactgtggttgcggaagctcctgcaagtgcggcaacggctgcggaggctgcaagatgtacccagacttgagctacactgagtcaaccaccaccgagaccttggtcatgggagtggcacctgttaaggctcaatttgagggtgctgaaatgggtgtgcccgctg

SEQ ID NO: 1858 - DNA, 252 bp, Glycine max
  Clone ID: 700961448H1
cagaacagggactcactctggcagcggcactctcggtggctataatctttctgtggtgagttgtcaagatgtacacatcaaggaagaaaatccacaaggataaggatgctgagccaactgaatttgaggaatcagtcggacaggcattgtttgatctggaaaataccaacaatgagctgaaaagtgatctgaaagatttatacataaactcagctgtccaaattgatgtttctgggaaccgcaaggctgtgg

SEQ ID NO: 1859 - DNA, 247 bp, Glycine max
  Clone ID: 700961479H1
ttcaactcttttccattttattattcttccaaaactggaccttactttacccgaatctaaatcccaacccgaaccaaccatgttcggaccaacccaaaccgcttcccaacctccgaaatccactctcaaattcctctgcagctacggcggcaaaattctcccccgctaccccgacggcaagctccgttacctcggcggccatacccgcgtcctcgccgtcgatcgctccattccattctccgagcta

SEQ ID NO: 1860 - DNA, 245 bp, Glycine max
  Clone ID: 700961491H1
caatttaaacacagaaacaaaatcaccaccttcaaagtcttctctctcgagaatcatcgaataaaactagggtttccgatcgtcgtcgaggagaatgccgaagaacaagggaaagggaggaaagaaccggaagcgcgggaagaacgaggcggacgacgagaagcgggagcttgtgttcaaggaggacggccaggagtacgcgcaggtgctccggatgctggggaacggccgctgcgaggcgatgt

SEQ ID NO: 1861 - DNA, 249 bp, Glycine max
  Clone ID: 700961509H1
gaacataccaatctacaataaacgatgattctcattatctccctcattttttctcttctctctttctcccatgcttctgtcctagatttctgtgttgcagattatgcaggtcctattggacctgcaggatattcctgcaagaagccttcaaaggtcacagcagatgattttgcttacagtggccttggcattgctggtaacacctcaaacattatcaaagctgcagtgacccctgcatttgatgctcag

SEQ ID NO: 1862 - DNA, 247 bp, Glycine max
  Clone ID: 700961518H1
cttctgtctctagaattattcctggacaaagaactgctgttttccaacgttacttgcgtcctgagaaggactatttgtctttttcacttatttacagtaacggaaagcgatcgcttgatttgatttgcagagataaagttgaggcagaagtgtggattgctggcctcaaagcactgatagcttctggtcaaggtggtcggtccaaaattgatggatggagtgatgggggtctcattcttaatgatag

SEQ ID NO: 1863 - DNA, 244 bp, Glycine max
  Clone ID: 700961521H1
ctcccctttgccgctgttgttgttgctgcaccaccgaacaacttcccctgtaaatcgcgtttcgtttgtgcaaggttttaaaagatggctgatgctgaggacattcaacctcttgttgttgataatggaactggaatggtcaaggctggttttgcaggtgatgatgctcctagggccgtgttccccagcattattgggagaccacgccatactggtgtaatggttgggatgggtcagaaggatg

SEQ ID NO: 1864 - DNA, 117 bp, Glycine max
  Clone ID: 700961540H1
ggttaggcccaaatatgcagtttttctcccccttgtgaagatgtatacatgtgctggaaaactcagtgtaacccggaaatgtagattatgtctaatgtctaatatttcattctagtt

SEQ ID NO: 1865 - DNA, 240 bp, Glycine max
  Clone ID: 700961546H1
gtcgttgtgaaaacactgcaacgttgggtgagagaaaaaatgttaaccttcctggtgttgtggtggatctacccacacttactgagaaggataaggaagacattcttggatggggtgtacccaacaagattgacatgattgctctttcatttgttcgtaaaggctcggatcttgttaatgtccgcaaggttctggggccacatgcaaagaatattcagttgatgtcaaaggttgagaatc

SEQ ID NO: 1866 - DNA, 241 bp, Glycine max
  Clone ID: 700961554H1
ctgaaagaaggaatttgtactagtatggtgcaactgcaagcagtagtgagtgatgaagatgaaaagtggtttccatttaattgaagtggtagtatgctagccaggtagcatttacatatttgctttggtgtgtggcactgcaaattaagagcaaacaaagtcttggtctttgtggctgtgaagaagggaagggatgctttgcttgatgcttggaaaaacaaaaacaaaaaggcatgaggat

SEQ ID NO: 1867 - DNA, 237 bp, Glycine max
  Clone ID: 700961563H1
atcatcagtgctgtattgaccagtcgagcaatattccaaaggatgaagaattacacaatctatgcagtttccatcacaatccgtattgtgcttggtttcatgttactggccctcatatggcaatttgattttccaccattcatggtgctgattattgctattcttaatgatggtaccattatgacaatatcaaaggacagggtaaaaccatctccatatccagatagctggaagttg

SEQ ID NO: 1868 - DNA, 241 bp, Glycine max
  Clone ID: 700961565H1
gaaccagtttggaatatatttttattccttctttgtttcttcactttcttccatacacataaccatgtcttctcagaccgttgtcctcaaagttggtatgtcatgtcaagggtgtgctggagctgtaaacagggttttggaaaaaatggaaggtgttgagtcatttgacattgatctgaaggagcagaaggtgacagtgaaaggaaatgtgcagccggacgaagttctgcaagccgtttcc

SEQ ID NO: 1869 - DNA, 238 bp, Glycine max
  Clone ID: 700961571H1
caacatcatccgggatgtaaacggaattgccactttccagagaacgaaaggaacaaggaaatattgaatctgtacgttgccttttaattctggtggctggtgatcatgttaaattacatttgtcctttctattagcataatttggtttgtaaattcttttaagtgccatttttatttcaagggaaatcttaagggcagcaatagttgaattattccagggcaacaaggctatggtgta

SEQ ID NO: 1870 - DNA, 240 bp, Glycine max
  Clone ID: 700961572H1
gtgatttcagtgagtgatcggtgttcacttgatctcatcataatcgtcagcgtcaattgaagaagatgccgatcagaaacatcgccgtcggaaggcctgaagaggcgactcaccccgacacgttgaaggcggctttggctgagttcatctcaaccttcatcttcgtgttcgccggctcaggctccggcatcgcctacaacaagctcaccgacaacggcgctgccacccctgccggcctca

SEQ ID NO: 1871 - DNA, 237 bp, Glycine max
  Clone ID: 700961578H1
atcaaaacttttatcatgtgactcatcgatggatttatctcttccacattccaatcagaggtttagcactggagcatcaattaactcacccactaatcaaaacatcagttctcaccctcgtggatactttcagcattccgaacaaattggttcagagttctcaacagttccccttacatcatcagatagtaaaactactagttcaagacttcctagatactaaatatacattttttt

SEQ ID NO: 1872 - DNA, 237 bp, Glycine max
  Clone ID: 700961586H1
aaaagcttaacaggaactgcacgttatgcaagttgcaacactcacatgggaattgagcaaagttgtcgtgatgatttggagtctcttggctatgttcttatgtactttttaagaggaagccttccttggcagggtttgaaagctgctaccaaaaaggaaaaatatgacaatatttgtgagaagaaattatcaactaccattgagatgctttgcaagtcgtatcctgcggagtttgct

SEQ ID NO: 1873 - DNA, 210 bp, Glycine max
  Clone ID: 700961625H1
ccatcttcgagatttttcgttgcccttattgttgggctctgaaggtaagtttcacatttttcctgttgtaacgctgttttagttgttaaaaactactttcaatgctcaaccttgtcgtagtaccagcagcagccttaagtctttgaaacgaggatgtattaaaatgatgccccaacagatttgcggaagttgcgaagataatttctttct

SEQ ID NO: 1874 - DNA, 273 bp, Glycine max
  Clone ID: 700961630H1
ctgtcatcgaccatatcactttggtcaccttcagatacattcgtcgcattcatccatttaacttccacaaattcctacaaattctaaccaaacccttcactactccaaatcccacaacttctctcttttttttccctccttcttttccctttttctgttgtccgatcttctgcctcctagatcttggtatttgggattgatcacctggagttggaaatggttaaaagttatggagtgttctgatttgcgaaagatatcatgttgcagtgctta

SEQ ID NO: 1875 - DNA, 269 bp, Glycine max
  Clone ID: 700961639H1
gcaaataaagcacagaacagttgaagtgaatggcataaaaatgcatgttgcagagaaaggagagggtccagtggtgttgttcctccacggcttccctgagctctggtactcatggcgccatcagattctctctctcagctccctcggctaccgcgccgtcgctcccgatctccgtggctacggtgacaccgaagcaccaccttcaatcagcagctacaactgcttccacatagtgggtgatctcgttgcgcttattgactctctgggtg

SEQ ID NO: 1876 - DNA, 267 bp, Glycine max
  Clone ID: 700961659H1
ggattttaatagccacactctaactggtgtggggttttttaaccccccggctagggaaaacagcgtgaaaaagttgcagcaagagataaaacttgaataagttcatatatttgaagtccgatcaagcatcaattctcatattgctgtttgtgatcttttttcattttcattttttccaccttttcttctttttattacagtttatgctgtatttgtacccctatcaaggcacatgtatcttaattatgctgtttgttatcctgtcta

SEQ ID NO: 1877 - DNA, 266 bp, Glycine max
  Clone ID: 700961665H1
gtgtgagagcaaaatcaaaatgtgggcaagcgcagaaggtggtgctccggaggttactctggaaacttccatgggttctttcaccgttgagctgtactacaagcatgcgccgaggacttgtaggaacttcattgaactgtctcgccgaggttactacgacaacgttaaattccacaggatcatcaaggacttcatagtacaaggtggggatcccactggaacaggaaggggaggagaatccatatatggtgcaaagtttgaagatg

SEQ ID NO: 1878 - DNA, 257 bp, Glycine max
  Clone ID: 700961704H1
aaaatgcccactttttttcttccaacgctcctcctccttctcatagccttcgccacctctgtctccggccgccgtgacctcgtcggagactttctccggctgccctccgaaactgataacgacgacaacttcaagggcacccggtgggccgtcctcctcgccggttccaatggttactggaattacagacatcaggctgatgtttgtcacgcctatcaaatattgaggaaaggtggtctgaaagaagaaaatattat

SEQ ID NO: 1879 - DNA, 250 bp, Glycine max
  Clone ID: 700961714H1
attcattcaagattcagcaagtgcgttttggaagcagagaccgaaatacttcgagatggcccgtacaaagcaaactgctcgtaagtcaactggaggaaaagctcccaggaagcagcttgcaaccaaggctgcacgtaagtctgcaccaacaactggtggtgtgaagaagcctcatcgttatcgccctggaactgttgctcttcgtgagattaggaaataccagaagagcactgagctcctaatcaggaag

SEQ ID NO: 1880 - DNA, 246 bp, Glycine max
  Clone ID: 700961770H1
atccgcaacggaggcagagattgagcgtatgatatgagagagaagacggaacaaaatcaagggcggagaatgccccatggctgacatcatgtcggttaacactttattcagacaacactatactcattaatcaaaatcaaatgacctaaccactctctctttttcccaattttcgaatctctctcctccatggacccaacttcgatccctccccctccggccaccaccgtccccttcactgtcgaa

SEQ ID NO: 1881 - DNA, 240 bp, Glycine max
  Clone ID: 700961778H1
tgaaaacgtgaagaagagtcaatatgctgtcagaggtgaattataccttcgagcttctgaacttcagaaagagggcaaaaagattatctttactaatgttggcaacccgcatgcattgggacagaaaccactgagcttccctcgccaggttgttgctttgtgccaagctccattcctacttgatgatcctaatgttggactgctattccctgctgatgcaattgcaagagctaaacacta

SEQ ID NO: 1882 - DNA, 243 bp, Glycine max
  Clone ID: 700961785H1
gtgtagactgtcgagcagtgaataccagttgctcctatagccggcgctcaacaacatggcggacaaggcagtcaccatccgaaccagaaagttcatgacgaacaggcttctctccagaaagcaattcatcgttgatgtccttcatccagggagggctaatgtttccaaggctgaactgaaggagaaattgggcagaatgtatgacgtgaaagacactaacactgtatttgtcttcaagtttcg

SEQ ID NO: 1883 - DNA, 238 bp, Glycine max
  unsure (1)..(238): unsure at all n locations
  Clone ID: 700961790H1
gccagttcgtggaggccgtggaggtggacgaggtgggggacgtggatttggacgtggtcgtgggtttagtcgtgactcctcgantgatgagaactcattccctaccagcagagctccttataatcagggtccttttgaagaaggagatgctgggaagtcttctgaaagacgcagttatggtggaccacgagttccttaccgtggtggtcgtcgtggaggtttcagcaatggtgaaatg

SEQ ID NO: 1884 - DNA, 250 bp, Glycine max
  Clone ID: 700961802H1
gacaaaatgaagagttttttgttgtggcgtgtggccattgtggaaaaaaatagaccctatgttgcaatgttgttcattcagtttgtgtatgctggaatggccttgctttccaaggctgcaatttccaagggaatgagcccttatgtgtttgttgtttatagacaagcctttgcatcagttgctctatctccatttgctttctttgacagcaagcaaccagctcctttgtcatgcaacttgttgtgcaaat

SEQ ID NO: 1885 - DNA, 244 bp, Glycine max
  Clone ID: 700961805H1
cagctatttttctaaagctgtaaaattttatttttgattttttgagatcttagagatgttttttgagggaaaagtcaaaccataaagctatggattttattttcttgttagctaatcaggtgccatgtttctccgaaggtgtcccattaggggtccaatgtttttgtatttcattagtctcaatttacttatttttgttgacatagtaattgtttaacttgtcagttcataaataacattatcg

SEQ ID NO: 1886 - DNA, 242 bp, Glycine max
  Clone ID: 700961812H1
ctcttggcatcttgtgttgtgtccctcttttaagctatttccttctcttaacacaattggttgtgccaattgccatagtcaccaaccaattaacaaaggtatatatatcatcatatcatcaccaaatgaaaaatattgggttgttttttcttgtggtggtggctacttttgtggtggcagccacagctggtagcttttaccaagactttgaaataacgtggggtggtgagcgtgccaaaatc

SEQ ID NO: 1887 - DNA, 243 bp, Glycine max
  Clone ID: 700961813H1
gagatttcattccccatcaaatctcttccttctctctcctcatttccaaagttcccaactttcctaacccgagctgcaaggaatgccgctgatattagcgaaaagcgattcgatccagattcgcgaggtgtggaacgataacctggaagaggagttcgcgttgattcgcgaaattgtggacaactacccttacatcgccatggacacggagtttccggggatcgttctccgaccagtggggaa

SEQ ID NO: 1888 - DNA, 250 bp, Glycine max
  Clone ID: 700961817H1
aaggacttgaaaatgtgattgcaagacacagtcgtttaggcaaagcaaccagacttgctgtagaggcatggggtttgaagaattgcacccaaaaggaagagtggtacagtgacactgtgactgctgttcttgttcctgcttacattgatagtactgaaatagttagaagggcatggaagagatacaatttgagcttaggtcttggactgaacaaagttgctgggaaggttttcagaattggacatcttgg

SEQ ID NO: 1889 - DNA, 232 bp, Glycine max
  Clone ID: 700961891H1
catctcctgagatgctatgctgtttttgccctgctccttttaggcagttccttgagattgtagtaaacatgaagtttgatgaagaacctaactattccaggctaatatctttgtttgatggtatgcttggaccgaatcctgcattgaggccaattaacactgaaggtgctcaaaaggttgggcagaagaggggtagattgaatattgaggaagaggatgattcacagcccaa

SEQ ID NO: 1890 - DNA, 264 bp, Glycine max
  Clone ID: 700961901H1
gtttgggtcttttaacacgcaaaacgacgccgttgagaatgggaataatgctgaaacgccgttgatggaatcggccaaggtttcgattcttgactccggcgcctcgatgttctccggcatggaggtggctgcgcggacgactctgccggtgcggggacgtgctgccgtgaagttccggtggggagttaggattccggcggagttcaaggggaacaacgcgtttcagaagattccgtttctcgtaatggataagatcggcgtgga

SEQ ID NO: 1891 - DNA, 254 bp, Glycine max
  Clone ID: 700961910H1
gccgccgcagagttcctcgcatttgaatgaagagaagaagaaaccgaggcccaaggatgttttcgggcggcctcttccgactgaggaggaattcgaagttcttaaaaatgcgcctaggctggaaacaggagctcctgccagggtgaaaccttttggaattgaagtccgtaatgtaaaatgcttaagatgtgggaactatggtcaccaaagtggtgatcgtgagtgtcccttgaaggatgctataatgcctaatg

SEQ ID NO: 1892 - DNA, 258 bp, Glycine max
  Clone ID: 700961918H1
gaggatatagaagaaggagtagaaggtactggatttgatgatgagaaatcactacttatgtcacaaatgagtcttgagaaaaggtttggtcagtccgctgtctttgttgcctctacgcttatggagaatggtggtgttcctcaatctgctactccagaaactcttcttaaggaggctattcatgttatcagctgtggttacgaggataaaactgattggggaagtgagataggatggatttatggttctgtcacagaa

SEQ ID NO: 1893 - DNA, 252 bp, Glycine max
  Clone ID: 700961928H1
ttctccatttccattttctctctcacttttcaagaatcgtaagctatgggaaagtcttacccaactgtgagtgctgattaccagaaggccgttgagaaggcgaagaagaagctcagaggcttcatcgctgagaagagatgcgctcctctaatgctccgtttggcatggcactctgctggaacctttgacaagggcacgaagaccggtggacccttcggaaccatcaagcaccctgccgaactggctcacagc

SEQ ID NO: 1894 - DNA, 259 bp, Glycine max
  Clone ID: 700961933H1
aaaggcttaaaaatgagcaagtctttgggtaatgttgtggatccacgtttagtgattgaaggaagtaaaaatcaaagggaatcacctgcatatggagctgatgtcctccgactctgggtttctagtgtagattatacaagtgatgtgatgattggcccacagattcttcggcaaatgtctgaggtttacagaaagttgcgaggaactttgagatacctcttggcaaatcttcatgattggaaaacagaatacactgttc

SEQ ID NO: 1895 - DNA, 241 bp, Glycine max
  Clone ID: 700962010H1
ttttctctctcgatacaaaaatacatagaaatggcctcttctcttgcatcctcatcaactgttctctggatcctttttctaaccattgcaactcttcatttgagttcagccaggaagttgtccgggtcagacccgcagttgcagtttcaataccacagaggccctctcctcaaaggcaaaatctcagtaaacctcatttggtacggtaaattcaaaccttctcaaaaagccatcgttgctg

SEQ ID NO: 1896 - DNA, 236 bp, Glycine max
  Clone ID: 700962012H1
caattgttgaaaatattcttaaatatccatactttgaaaatagacaatttagttcttgatagatttatgagacctattctgtatgttaatcttgggtatcatgttatcatcattatttttattattttacatgaatcttgggttgtagcatttgcgatcattggtttgttattggtgaatttacgtaaatgttggctgatggttgctgcatctcttttgatcttttttgtttttgg

SEQ ID NO: 1897 - DNA, 235 bp, Glycine max
  Clone ID: 700962014H1
cttggaggcttcatccttccaaaacgtgaaattcctgattggtgggtgtgggcttactgggtgtcaccattgacatacggctttaatgccttgtctgtgaatgaaatgttagctccaaggtggatgcatccacagacttcttctgataaaaataccacattgggtctatcagtactaaggaactttgatgtttatgctaaaaaagattggtactggattggagctgctgctcttc

SEQ ID NO: 1898 - DNA, 235 bp, Glycine max
  Clone ID: 700962015H1
ttcgaatagattatcctaagtctttgggaatagtgctgcaatggcttcaagtcaggaggaggtgacccttttgggagctactggaagcccatttgtgtgcagggttcatattgccctcaagttgaagggagttcaatacaaatatgtcgaagaaaatttgaggaacaagagtgaactgcttctcaaatccaacccagttcacaagaaggttccagtgtttattcacaatgagaag

SEQ ID NO: 1899 - DNA, 233 bp, Glycine max
  Clone ID: 700962031H1
ccccatacacctacaatctaagaaacacaggccctgatgatgtttacattaaagttcactactgtggaatttgccattctgatctccaccagattaaaaatgatcttggcatgtccaactatcccatggtcccaggacatgaagtggttggtgaggtactggaggtgggatcaaacgttagcaggttcagagtgggagagttggtgggagttggactcctcgtaggttgctgc

SEQ ID NO: 1900 - DNA, 232 bp, Glycine max
  Clone ID: 700962045H1
gcttcatcttgataaatacacaggtactggcttccaatcaaaagggtcctacttgtttggtcacttcagcatgtacataaaattggttgctggtgattcagctggcacagtcactgctttctatttatcatccacaaactcagaacatgatgaaatagactttgagttcttgggaaacagaaccgggcaaccttatattttgcaaacaaatgtgttcaccggtggcaagggt

SEQ ID NO: 1901 - DNA, 231 bp, Glycine max
  Clone ID: 700962046H1
aattagttcattctctttgcgcagttccctacctctcctttcaagatgcagatcttcgtcaagaccctcaccggaaagaccatcacccttgaggtggaaagctctgacaccatcgacaacgtcaaggccaagatccaggacaaggaaggaattcccccggatcagcaacgtctcatcttcgccggaaagcagctcgaggacggccgtaccctcgccgactacaacatccag

SEQ ID NO: 1902 - DNA, 235 bp, Glycine max
  Clone ID: 700962057H1
cagatttcaaagcagctgtagcaagggctggccatcctgaatgggaactgccagatgacgcaggcaagtacaatgatgtcccagaatctactggattcttcaaatcaaatggcacgtatgtcactgagaaagggaagttcttcttgacctggtattctaacaaattgctgaatcatggtgatcaaatactagatgaagccaacaaagctttcctgggctgtaaagtcaaattagc

SEQ ID NO: 1903 - DNA, 232 bp, Glycine max
  Clone ID: 700962058H1
ctatgcttcccagattactgccaaacccaggcttcttgagcctgtctacctggttgaaatacaggctcctgaacaagctcttggtggaatctacagtgttcttaaccagaagcgtggacacgtgttcgaggaaatgcagaggccaggtaccccactatacaacatcaaggcatacctccctgtcatcgagtcctttggtttctcgagcacattgagggctgcaacatcaggc

SEQ ID NO: 1904 - DNA, 229 bp, Glycine max
  Clone ID: 700962060H1
gagatgttgactgcctccaatcttattcctggtgctgtctattggaccattcggagtattgtgtcctgtgcatcgcatattttaggcataactggcttgggtcaaggatatatgacatcaacaacagagacttgggagctttccagtttggcccataagcttgataacataaatagtcaccttcgaaagcaactcaccgtttgtcgtcagcatttagatgataacagac

SEQ ID NO: 1905 - DNA, 230 bp, Glycine max
  Clone ID: 700962061H1
agaaagtcttttgcttttgattctgatgcccctggtgctggcatgactgagaaaagaaaagtcttcgagatggctctgagcacagcagatgccacattccaaaatcttgattcatcagaaatttccctcactgacgtcagtcattactttgactcagacccgactaatctggtacaaaatctaaggaaagatgggaagaagcctagtgcatacattgctgatacaaccac

SEQ ID NO: 1906 - DNA, 229 bp, Glycine max
  Clone ID: 700962063H1
gaagcactgagcagttgaggaaatgggaacccttgggagagcgatctacagcgttggtaactggattcgagaaactggacaggccattgatcgtctcggttcccgtcttcagggcggttactacttccaagagcagctctctaggcatcgaactctgatgaacatatttgataaggctcctgttgttgataaggatgtatttgttgcgccaagcgcctccgtcattgga

SEQ ID NO: 1907 - DNA, 229 bp, Glycine max
  Clone ID: 700962064H1
aaaggagttgaaaccatcgcttattccacgatcgcctcttactcagctgaactaatggcggtggttgggtcctctgttcttgagtcaaatttgtatttctattgtaacatcacattgcctttgttacccattaaattgttggaagaatgcatcatcatccgcagatagattattgtatttgatatttagagcaaagtactcatgtaaatcccaccttgggatgaagtat

SEQ ID NO: 1908 - DNA, 234 bp, Glycine max
  Clone ID: 700962073H1
gggaagaggaaccctagctagggtttggaagaagctgatccgagaagatggtgcagcgtctcacctaccgcaaacgccacagctatgctaccaaatccaaccagcacagagtcgtcaagactcccggtggcaagcttgtttatcagaccacgaagaagagggccagcggacccaagtgccctgtcactggaaagaggattcaagggattccacatttaaggccagcagagtata

SEQ ID NO: 1909 - DNA, 227 bp, Glycine max
  Clone ID: 700962077H1
atttaatgagtttgtgaattccctgctttctgattctaaggatttctggcctacaatatgatgatttagtgaaggttgactgtaatttgtatgagatccaaattgagaagtatcttgtggaaggactaaatacttgcttaatggttcataagggtcaattgttggtatctctggagaccctagtgttccatttgtgtactggatttctgtgggtttatctgcactat

SEQ ID NO: 1910 - DNA, 227 bp, Glycine max
  Clone ID: 700962079H1
ctctttttgaaaacactttagtttcgcaaagttgattctttctctctttatctttctttccccaatttgtgagtgttactgttgaatcgattggattggcattaggttgatctgaaatacgcaattgacatggcgagcgcgatggtagaggacgcgaacttcgaagatgaccaactagccaatatgaccaccgacgacatcgtcagagcttctcgtcttctcgacaa

SEQ ID NO: 1911 - DNA, 242 bp, Glycine max
  unsure (1)..(242): unsure at all n locations
  Clone ID: 700962082H1
gaaccgtcgagctcgctggaagaccaagacgctggagaaggattacgaggctctgcatgcaagttttnagaatcttaagtccaactatgacagcctcctcaaggagaaagacaacttaaaagctgaggtggcgagcctcaatgagaaggtgcttgcaagagggaaacaagaggggcacatgaagcagcaggctgaaagtgaagaagaaacaaaaagattattgcatttgcaggaacaggaac

SEQ ID NO: 1912 - DNA, 233 bp, Glycine max
  Clone ID: 700962088H1
cacactctctttcttctgctgcaccagcaacaacagagaatgaacagtactgaggaggggatgcaaggcataggcataggcataggctgcttccaaaacgacgtcgtagggcagctggagctgagtcccactatgagcaactcctcctcctcgctatccatggagctggacgagtccccggagagcagaatccaacggttgatatcggagcacccggtcatcatcttcacccg

SEQ ID NO: 1913 - DNA, 230 bp, Glycine max
  Clone ID: 700962089H1
gagcaaacaaacaactagcaagggaagaaagaaactacagaaaagaaatggcttccacttctgcagtttcaatggctatgccagtaacttatgctagccagaagagggtggtgcctagctcggatgcattcttcaagccactgcctctacggtcttccaaggcagtgacagcatcaaaactcaatggaaggtttcaagtgagggcctccatgaaggagaaagttgtgacg

SEQ ID NO: 1914 - DNA, 225 bp, Glycine max
  Clone ID: 700962090H1
gggagagatcgcacgggagttgcccggggtctctctctcgtgtggtgtgtggtgtttgctgtgctctccttttcgttatgccttttattattacctatctgtcgctccactccgtattacgactctggatcagagggatacatcagaggattcgctccaactcctatcgaataaggtattatctgtcaatttacattggaaagggttaggatattcaattttaca

SEQ ID NO: 1915 - DNA, 224 bp, Glycine max
  Clone ID: 700962093H1
gctttattagaagcgaagttggttttgtcattactcttacaacgcttctcatttgagctttctcctacctatgcacatgctccagtcactgtgctcactcttaatccaaaatttggtgctcatatcatcttacataagttgtagtgtcatctattaatttgtatcctgcacacctaattatctccattcctttcttatgttctaatctcttgtatttatagagg

SEQ ID NO: 1916 - DNA, 224 bp, Glycine max
  Clone ID: 700962094H1
atcaagcaccgagtcctcttctatccgtgtgtggtcgcgactacgcttcttcgtaactcgaagcgcgtgaaaaaaatagcttcttctggatctggatcacgaaagccatggcgttttggagatctctcgtagcgttctctgcggttcttctgcttctcatccatggctctcactgcttctacctccccggcgtcgctccacaggatttccagaagggagattca

SEQ ID NO: 1917 - DNA, 224 bp, Glycine max
  Clone ID: 700962096H1
attagatctgatgaattaattgagcatctgagtgcagaaagaatagaggatcgtggtcgatggcgtctgctagccttggaagtggtggggtcggcagttcgaggtctgttaatggtggcttcaggggttcttccagttccgtcgattggcttggcagagagatgcttgagatgaggttgagagaccacgaagacgatagagatagtgagcctgacatcattgat

SEQ ID NO: 1918 - DNA, 256 bp, Glycine max
  Clone ID: 700962104H1
acaatacaacactgccatggctgcctcagtctccactattggagctgtcaacagagctccactgagcttgaacagctctgaagctggagattcggttcccagttcagccttctttggcacaagcttgaagaaggttactgcctcaagggtccctaacgtcaagatttcttctggaagtttcaaaatcgttgcggcggagaaagagattgatgagcaacaacagacaaacaaggacagatggaaaggtcttgcctat

SEQ ID NO: 1919 - DNA, 257 bp, Glycine max
  Clone ID: 700962108H1
gcaatgaatctgatgcaggcggttcgctacgacgcctacgggggaggtcctgccggcctcaagcacgttgaagttgccgttcccagtccaaaggcaaatgaggttttaatcaaactggaagcagttagcattaaccctattgattggaagattcagaagggtcttctccgtcctttatttctccccagaacctttccccacataccttgcactgatgtggctggagaaatagttgagatcggaactcaagtcaaaga

SEQ ID NO: 1920 - DNA, 259 bp, Glycine max
  Clone ID: 700962116H1
cctttcctgatttcgttaaccctgcggggaagaaaatatctaaaagagaaaagatacaaattaatgtggatgctgttactggaggtgagcttctgtgcaagacattaagccacccactgaaggaagtgaggcgtcatgttgggagcatgggcttcttatatgattccgatgttctttcatggtctaaagttgattttagcttttcatatgctgtttcttcaagtcatataactggtggtgttcttttggaatctgcatc

SEQ ID NO: 1921 - DNA, 252 bp, Glycine max
  Clone ID: 700962121H1
gtcgatgcaatttcaattctgatcatgtcaattttctcttttctctatactatttcctgttgctgtttttgttacaaaattgttgctttgtttttgttttttttgttttcattttatctgttttgtggttgatgtcggcgtcgaattacgaattctcgcttgggtttcttcaattttctagaattttgttatggaagttgtgaatctattttaaaacttgtcaaattactgatactcattttgaaataattt

SEQ ID NO: 1922 - DNA, 255 bp, Glycine max
  Clone ID: 700962124H1
ggtgaatcgatgccagattcaggaatggtatctaaagttcaaatctgtatccatcaagaccttaattcgtcaacttccggaatcatttattcagtaccttttagatgactcggggcccttcttgttgcatgtttctgtcttaaatgaagatgcattacccaatagaattcataacccagatgaggaagatgattttcaggtgtcagaaggatctggagatgaagcagaagaaggttctccaccgccttcttttcc

SEQ ID NO: 1923 - DNA, 254 bp, Glycine max
  Clone ID: 700962129H1
cttggctattcgagaaacccgaatcaaggctgcgcctgtgcatgcatcagcccattggtatctggagaatgttttgcctgttctacagagttatggtattgctgcaatctctccattttctcacagactgagttttgacaacttgcctatggatattcaacacctacgctgtaaagtcaacttccaagctttaacctttgttcctcatatcagagcacttggagatgcccttatcagccgccttcgctatcctg

SEQ ID NO: 1924 - DNA, 254 bp, Glycine max
  Clone ID: 700962135H1
caaagagacaattcaacttaagagatcaatatggccaccaccactacccagcctccctctaatatctgttttttccttctgttgttgcttctagcacactttcatttgggcataagccaacttgagctgaattactactctaaaagctgcccaaaagctgaagagatcatcaaggaacaagtcacacaactatataacaagcatggaaacactgccgtttcgtgggtcagaaatctcttccacgattgcgtggt

SEQ ID NO: 1925 - DNA, 251 bp, Glycine max
  Clone ID: 700962136H1
gttgcgttttaggcctaccagacaaagactatggagagattgttagtgcaatcgttgtgccagaggccgatgttaaacgaaaacaagatcaagaatcaaagcctgttctaagcctagaagaattatccaactgggccaaagacaaaattgcaccttacaagattccaactcagctaatcgtgtgggataaactccctcgcaatgccatggggaaggtaaataaaaaagagctgaagaagctgcttgtttca

SEQ ID NO: 1926 - DNA, 249 bp, Glycine max
  Clone ID: 700962142H1
ctcggaggaatgggttgcagcgccgggatcattggtgtggacctggccaaggacattcttcaggcgaacccaaataactacgcggtggtggtgagcacggagatggtggggtacaactggtaccaggggaaggataggtctatgcttatcccgaatagcttcttccgcatggggtgttccgcggttctgctttccaaccgtcgaagggactatagccgcgcaaagtaccgccttgaacacattgttcgc

SEQ ID NO: 1927 - DNA, 250 bp, Glycine max
  Clone ID: 700962151H1
gttctcgctctcttattcctttctctcttgtcttctctccgaatccacgtcctagatctgttgttctcttcccacagttctcactgaatcaggatccattttgataccaagttgctgtttagagatctgtttccttctagacaacggtctgtggtatctgttattttagttgaatcgaagctgcaacaaaatcttcctgatctttgctttgaggttatggcatcggcgggtgtagcacctgcttctgggg

SEQ ID NO: 1928 - DNA, 121 bp, Glycine max
  Clone ID: 700962153H1
gaacaacagggaattaatttccttcatcattatctcaccatggcaccattcactccgtcgaagttgcttctgttaactctggttttcacgttgagccagaaacagagtctctgttccacac

SEQ ID NO: 1929 - DNA, 250 bp, Glycine max
  Clone ID: 700962161H1
aaagaaaaagaaaaagaaaaagcatacaacgatggctatgaatggatcacctcgacggtgggacgtgagattagttttgacattttctctacttttaatctcagcctctgtttctgctcttgaacatgtaaaccacaaaaagattgatcccaccaccgctgaaactagttttcttggcaaagtcatgaactttttgtggagctcatctgggtctggatacgaacatacttggccagaaatagaatttggg

SEQ ID NO: 1930 - DNA, 121 bp, Glycine max
  Clone ID: 700962172H1
gctcagctgagtagtgttgttggtattttggggtctgatgtatcataatgcttgacttgactgtctatcgtggctttcatgctgcgagaaataataaattcaggtaactgtttgtccttgt

SEQ ID NO: 1931 - DNA, 118 bp, Glycine max
  Clone ID: 700962179H1
attgactgtgatgaaataatgttcattttgttttcttgatatttcacacatgttgtgtttatatttgacaatatgacttctatttacattgcttaatggtatgtgatgtgttcttatg

SEQ ID NO: 1932 - DNA, 254 bp, Glycine max
  Clone ID: 700962180H1
aagaagtcctgagaaggcatctagaacaaagctctgaatctgattttgaaaactggaacgcgtaaaatgaacggtacccctccctcataaataaaatctactactaaacgctcttctcttctgcaatcaatttgcaaaccaaacacaacacaaggagaagaaccagatctctctttctcaaatcaccaagaatagttgaaaatggggctgtctttcacgaagctgttcagccggctctttgcgaagaaggagat

SEQ ID NO: 1933 - DNA, 245 bp, Glycine max
  Clone ID: 700962187H1
gcctaaggtcccatctgggagttacaacatagctcaggtaacatatgaattaaatgtgcttgggactcgaggaccaagaaagatgcactgcgttatgcattcaataccagcttcagcactagatgcaggtggcactgttcctggccagccagagcttcttccccgttccctggaggactcgtttcggagcatctcgttttcaaagtctctagatcattctattgagttcagcagttcgcgatttt

SEQ ID NO: 1934 - DNA, 244 bp, Glycine max
  Clone ID: 700962190H1
ccctaatgtaaatagttcttccaattgcttggttaacacatcaacccatgtttctgatacaaaaccatcaccacataagcttgggtttgatttgcaaaatcctccaggtctgtccagaagatgtattacaagcaggaggggaaggagacaccctgatataaatagttcttccaattgcttagttaccacatcaactcatgtttcttctacaaaaacatcaccgcataagctgggatttgatttg

SEQ ID NO: 1935 - DNA, 244 bp, Glycine max
  Clone ID: 700962191H1
cttttgtttgttcttcagtactttagtgtgtgatttaattccaagattttgagaatgtctagctgtgggtgtggaagtagctgcaactgtggcagcaactgcggttgcaacaagtactcttttgacttgagctatgttgagaagacaaccacagagactcttgttttgggtgttgggtctgtgaaggcccaattggagggtgctgaaatgggtgttgcagctgagaacggtggctgcaactgtg

SEQ ID NO: 1936 - DNA, 284 bp, Glycine max
  Clone ID: 700962236H1
atccatttagaaagacattgtggttacccatagtctcatagtgtcatactgcaacacaaaacaatgggttcccttatggcaggatgggactctacccacatagatcctcaatcagccacacttaaaaggaaccgctcactcaccaaggatgaaattgatgcttactggaaatcaaagaagaagatagaggaagaacaccttagagctatttccaacttgtcagagactattcaggctagcaaaagcacagaacctgagaagaagttgcagaagtcaatgaccat

SEQ ID NO: 1937 - DNA, 284 bp, Glycine max
  Clone ID: 700962249H1
tggaagggttatatcagttaaatggggtgattatacaaggcgaataggtattgatggcaccccagaagccattaaagaagcaattagggctgcttttaggttgagaactaaacgtacattttggttggaggatgaagatcagattatcagaagtattgaccgtgaaatgcctttaggaaattacactcttcacattgatgaaggaatggccattaaattacctctctatgatgagcctgaccatatacctgtgcatactgaagataagatattttacactgaag

SEQ ID NO: 1938 - DNA, 270 bp, Glycine max
  unsure (1)..(270): unsure at all n locations
  Clone ID: 700962277H1
ccatggnaggaaatgatcaggctattgcaaacgaatgancccttgtggatgaaaggtgctgatgggagggatgtccttgatcttgattccnatganagaatgttccccaaggcnaatagtcacttgaagaaccccaatgttcatgctgaagcttcnagagattcaggagttgnaattatgaacggcttaactttggttganatgttnatggacccgaacaagtggatggagntatttcccaccattgtcacaatggctagaacaattgag

SEQ ID NO: 1939 - DNA, 270 bp, Glycine max
  unsure (1)..(270): unsure at all n locations
  Clone ID: 700962294H1
aattggttcataaatgcacgagtacggctatggaaaccaatgatagaagaaatgtacaaagaggagtttggagagttttctgaagactccaacccggctggtaacaactacttgacgagggaagataccacggattgtgtagaggattgaatcaaaagctccagtgaacaaaaaacttattgtttgacaaacatgggcctttaaatgcttgcntttttcctccaaaatcgagagataaacattatgtaacatgacaagatgatgagccaa

SEQ ID NO: 1940 - DNA, 171 bp, Glycine max
  Clone ID: 700962305H1
ttacaatctcaccagtgatcctgtaattgagtttgagggacaacaatagtgatcttctccccccaaaatgagtgtcttttgcattttccatcttcaatgatggatcacttttttggtacataatgatgaaactcttacgttgggctggttaatgtagtccactaagcatct

SEQ ID NO: 1941 - DNA, 267 bp, Glycine max
  Clone ID: 700962316H1
aacaccttctctgcacgcaaaaaccgcgaaaagaactagaaccaaagatgcagagattcaaagctctgctacctcaacaaactaggtcctcacttcgcactctctgttctcaccgtcgagctttctccgctcaaccgaattacgcaaagcaccacgacgacgattctcaggaacagattttagtcgaaggaagagcgaaatcacgagcagctattctcaacaggccgtcttcgctgaactcgctcaatgcttcaatggttgctcggt

SEQ ID NO: 1942 - DNA, 266 bp, Glycine max
  Clone ID: 700962334H1
cagtcctgcacatgttatgccgcttctggaaattgtacgtaccaagcagacctctgcccaagtgatagttgacgtgttagatatttcaaagaagataaagaaaactccagtggtggttggaaactgcacaggatttgctgttaataggatgttcttcccatatacccaagcaggtctcttgcttgttgaacgtggtgcagatgtttatcaaattgatagagtaataaccaaatttggaatgcccatggggcctttcagattgatgg

SEQ ID NO: 1943 - DNA, 256 bp, Glycine max
  Clone ID: 700962341H1
tgataaagttcagcatgtagatctttctgacacaattatgcagggttctgctgtcagttgtcagaaaataccttggaatgagggaaatgccaagttagaagacagagaaagttctggcaagaagttaaagacaggtttcggtgggatttatggttctggaggtagagactcttttaatgacagttttacatctcttggaaataatcttggctcctgttcttcagttgaggacaaaggatgtgaggaagcttgtgat

SEQ ID NO: 1944 - DNA, 255 bp, Glycine max
  Clone ID: 700962343H1
ctcgatgtttccaggtgtgcaatcactgatactggtatcgcagcccttgcccgaggaaaacagttcaacctggaggtactttctttggcaggttgcgcattggtttcagacaagagcgtgcctgcattgaaaaaattgggccgttcccttgctggattaaatatcaagctttgcaatgcaatcagcagccgctcagttgacaagcttctgggacatctctgcatgtgtgacatcctctactgaacaggaaaatgc

SEQ ID NO: 1945 - DNA, 61 bp, Glycine max
  unsure (1)..(61): unsure at all n locations
  Clone ID: 700962347H1
cgaactgcacaacttgttcattctagttcagttgttccacacaacatacgnncnccnanaa

SEQ ID NO: 1946 - DNA, 254 bp, Glycine max
  unsure (1)..(254): unsure at all n locations
  Clone ID: 700962359H1
gggtactgtgcttggaaatatgatgggagattcttggttaagagcacacgagcaatataaggactattatgcagcactttatttgaggaccagctggggaaagcttctatctattcttgtagttccaagggacatactttcaccctccagtgcaagtgtgacaagccaagacttggcaaagagactaaatgctttcaatctagcttttgntgaaaggtacaagaagcaatctaattgggtaatatccgatgaga

SEQ ID NO: 1947 - DNA, 256 bp, Glycine max
  Clone ID: 700962361H1
ccggtatctagatatgcatagataaagaggaattggatttcactggcgaacgttatgaatacttgcactattattatgaattccatgccagttccttctcctttgttgataaagtcctttaaaacatttccatcgttcaaatgctgcagcaagagctcagatgagaagggaagtgaagatgtgaaggacacattatctggggtggtggacgagcaagttgaagagttcttgagtagaaaagagaacaaggttttgc

SEQ ID NO: 1948 - DNA, 258 bp, Glycine max
  Clone ID: 700962362H1
acctattctaattcctagaagtgatggtcataggcatcggaagggaagccatggtgatgttatcttcttgacaaatcgtggagagattacatcatactcccctggcttgcatggtcatgatgctatttggcagtggcaacaatcaactggtgttacatggtcaaacctaccctccccatcaggaatgatggaaggtggtctggtgattcccacactaaagcctctttccttacggttgcatgataatcaagaaatgat

SEQ ID NO: 1949 - DNA, 256 bp, Glycine max
  Clone ID: 700962368H1
tttcattaccgccgtgataacacactaacaccaccacttcatcaactttacttgacaacaatattgtaaaactcaaaatctagtttcatactttttttcttcttcttgaaatggctctccaggctgcttctcttgttcctgcttctttctcggttcttaaagagggaaagagtggtgtgtctctcaaggactccaccttgttcggtctttcattttcagaacctatcaaagctaacttcagctcttctgcatgagg

SEQ ID NO: 1950 - DNA, 254 bp, Glycine max
  Clone ID: 700962378H1
tacagttacagcataacttctattctatatttctttctactcgcaagcaaatcagaagaagagaatggcagcagcagaggggctaaacagagagcagtacgtgtacttggcgaactgtcggagcaggcggagcggtacgaggagatggtggagttcatgcagaaggtggtggtggggtcgacgccggcgtcggagctcacggtggaggagcgcaacctcctctcggtggcctacaagaacgtcatcggctcgct

SEQ ID NO: 1951 - DNA, 253 bp, Glycine max
  Clone ID: 700962386H1
caggtggcgagaggaacagtagtgtataccgagagtgcttgagaaatcatgcagccagcctaggaagctacgccacggacgggtgcggcgagtacacggtggacggcgcggggggactacaatgcgccgcgtgcgggtgccaccgcaacttccaccggaaagtgaagtacctggcggcggctgaaagccctcccacggagtatgggggcagcaacagcaagaagcggttcaggtctaagttcacggaagatca

SEQ ID NO: 1952 - DNA, 236 bp, Glycine max
  unsure (1)..(236): unsure at all n locations
  Clone ID: 700962419H1
tggcttcttcaatccctaatgcgccttctgcgttcaattctcagagctacgttggtctcagagcgccactgaggaccttcaacttttcttctcctcaagctgccaaaattcctcgctcccaacgccttttcgtctcagagcctccgattcggagttcgaagccgccgttgtcgccggtaaggttccgccggcgcctcccgtgccgcccagaccggcggctccggttggaanccggt

SEQ ID NO: 1953 - DNA, 136 bp, Glycine max
  Clone ID: 700962431H1
caatgatgtaatttagcatgtaagatgtaatgttatgttgttgatttctttgctttgtttggtcttttgttgaaaagggaatccttgaaatattgcttgtacatgatgtgggataattcatttagtcttcagtagt

SEQ ID NO: 1954 - DNA, 236 bp, Glycine max
  Clone ID: 700962434H1
aaaaaaaatgggttcttctctgtggacctgtctgattttgttatcacttgcttctgcttccttcgccgccaacccaagagcaccaattgatgtgccatttggcagaaactatgtgcctacctgggcctttgatacatcaaatacctcaatggtggttctgagattcagcttcatcttgataaatacacaggtactggcttccaatcaaaagggtcctacttgtttggtcacttcag

SEQ ID NO: 1955 - DNA, 236 bp, Glycine max
  Clone ID: 700962450H1
attttccattcgtagacgccaagaaccctaacagatcaaaactcagaagctgaagcctttggggcatgaggttttgcatgtctacatttatgggatttgtgtaatttacccccttttctggtttgactttatcgagctgaaacaaaggagaatgcaatggacctggataatttatgaggatatttaacatagtgtacattgtgctcctgtaattattttcatcagttggtgttgtg

SEQ ID NO: 1956 - DNA, 232 bp, Glycine max
  Clone ID: 700962468H1
cccctttctctgcactctgcaactccctccaatttagtttgagccttagaggcattgttctttggttggatagatctctgatctgaagatgagtgcgtcgaggttcattaagtgcgtcaccgtcggcgaggcgctgtcggcaaaacctgcttgttgatttcctacaccagcaacacttttcccacggactacgtgcccacggtttttgacaatttcagtgctaatgttgtgg

SEQ ID NO: 1957 - DNA, 239 bp, Glycine max
  Clone ID: 700962492H1
ggaaggagagaaagaaaatcccgatggtaacgccgctttggtgaactccttctgcgaaatcacttcctcttccaaggaagaagctcttttctttttggagagccacaatttcgacctagacgctgccgtttcgactttcctcgacaacgccaacaaccccctcatccctctcaacgacgaccttgccattcccaaccccaacgccgtttcccctccctcagattctcactctccggact

SEQ ID NO: 1958 - DNA, 258 bp, Glycine max
  unsure (1)..(258): unsure at all n locations
  Clone ID: 700962504H1
atcagatacgaaggcattctctacaacatcaacacngnagagtccagtattggcctcagaaatgtgcgatcttttggaacagaaggaagaaaaaaggatggcccacaaattcctccaggtgacaaggtttatgagtatatacttttccgtgggactgacatcaaggatttacaggttaaatcttctccacccgtccagcctattccacangtcatcngacntgnanntattattcagtctcactatnctcacccggtc

SEQ ID NO: 1959 - DNA, 258 bp, Glycine max
  Clone ID: 700962506H1
gcgttgccattctcatcctcttctttctctctctaccattgccatggatccctacaagcaccggccatccagcgccttcaattctcccttctggactacaaattctggtgctcctatttggaacaacaactcctctttaaccgttggagctagaggtccaattctgctggaggattatcatcttgtggagaagcttgcaaattttgatagggaacgtatcccagaacgtgttgtccatgccaggggcgctagtgcaaa

SEQ ID NO: 1960 - DNA, 253 bp, Glycine max
  Clone ID: 700962512H1
ctcgcaatcttcactattttcaccgagcatttgcattccacattgaatatggctgaggctacacaatctaatgctgagttattggagtggcctaagaaagataagcgccgcttcctgcatgttgtgtatcgtgttggtgatcttgatcgcaccattaagttttatactgaatgttttgggatgaagcttttgaggaaaagagatattccagaagagaaatatgccaatgcttttcttggatttggccctgaac

SEQ ID NO: 1961 - DNA, 254 bp, Glycine max
  Clone ID: 700962514H1
atttagatgaggaaggagtttctaaacagaatgatgagatgctatacgaggtaaatgcaaattctggaaattggatgatagccgggaggaaaagaggatatgcatctctgtccacaaaacaaggggcaagaatagttatctcggtactatgcatgccactggtggctggttatgttcaccctcccgtacttgggctgccagatgttgatgaggcaaatataagctgcaaacctgctgggccacatctggtttgt

SEQ ID NO: 1962 - DNA, 251 bp, Glycine max
  Clone ID: 700962528H1
atctttgtcagctttttcttgcttccgtagttcatatggcgtgtgttcaagtcatcacagtttttctctttgcattggctctagctaaaatttacccctcaacatgtcaagtggtgcagggaaaagtctcctgcgttgactgcactcacaactatgacttatctgatattaaggtttcggtgaggtgtgatggtgtgaaaaaactggctttggctactacagaaaatgatggctccttcaaggttgatctt

SEQ ID NO: 1963 - DNA, 236 bp, Glycine max
  Clone ID: 700962529H1
acggggagcgtgagttcatgttctacagaaaccccagcgccgacatgctcctcaagcccgaagaactcaatctcgaactcatcagatctgcaaaagttttccattacggatcaatcagtttgatcgtggagccatgcagatcagcacacttgaaggcaatggaagtagccaaggaatctgggtgctgctctcctatgaccccaaccttcgtctacctttgtggccttcggctgagg

SEQ ID NO: 1964 - DNA, 258 bp, Glycine max
  Clone ID: 700962533H1
gttcagcgttcaccaacagaaacagcagaaggaaggaaaaggtgactgcacagaggtatcgaataaagtcaaaagtcggaatggtttcactctgatcaaactgaggaatcgaggaaggaagggttaggatcagctagagtaccttgaggagcgccggttgaaggatttgattaagaagcattctgagttcattagctacccaatttctctttgggttgagaagactaccgagaaggagatttctgacgatgaggatga

SEQ ID NO: 1965 - DNA, 256 bp, Glycine max
  Clone ID: 700962534H1
ctccaagtgcagtggcaagggttctaagtctggtgcttcgatgaagtgtgctggttgtcaaggaactggtatgaaggtttctataagacatcttggcccatccatgattcagcagatgcagcatgcctgcaatgaatgtaagggtactggagaaactatcaatgacagagatcgctgcccacagtgcaagggagagaaggttgtgcaggagaagaaagtccttgaagttattgtagaaaaggggatgcagaatggg

SEQ ID NO: 1966 - DNA, 252 bp, Glycine max
  Clone ID: 700962542H1
gtagaaacaaaaaccgcggaagcagccatggccgaagcagaacacaacgatcccacctcgccggagcgcgaggaccaaaccaaaagcaacaaaaagaagctccgaaagagaaaaagacctcaaaagaccgagcagaaacaagaggaggagaagaacgatgcgaacattgatagcgcccaaacacaaactgaagatgaaggagagaatcaagaagacacaaatgtgaacaacaacgtctcatctggaatcatg

SEQ ID NO: 1967 - DNA, 249 bp, Glycine max
  Clone ID: 700962544H1
ttttaaacatgcaatgtcaagatcttctgatgatcttcatgctttacgcatgaggcagaaagaggaattcatcactgagtttcatgatcaaataaggggagatcaagaaagagagaatgaaatggaaaaacctgaagatggtcatatggacaatttctttgatgatggttttgattcttatctgctttctggttcagcagaaaactgggtaatgccaattacagatgattcaagtgatgtcaaaaccct

SEQ ID NO: 1968 - DNA, 250 bp, Glycine max
  Clone ID: 700962545H1
acctgatgtcttcattcacacttcccatggaacacgcattccagcccacgcacccattctggcttctatgtccccggttctggagaacttgatagatcgcccacgtaagcatcggagctccgagagaataatccaaatccacggcgtcccctgcgacgctgtcaccgccttcgtccgattcctctactcctccaggtgtacggaggaagagattgaccagtacgggatgcacctccttgcattgtcccac

SEQ ID NO: 1969 - DNA, 248 bp, Glycine max
  Clone ID: 700962561H1
aatgcttacacattcacagttgatcaaggcaagacatacagattcaggatatcaaatgtagggctcaccacttccatcaactttagaatccaagggcataaaatgacaattgttgaggtggaagggacccacactctccaaaacgtttatgactcacttgatgttcatctggggcagacttactctgtgttggttactgctgatcaaccaccccaagactacctcattgtcgtcacgacacgattcac

SEQ ID NO: 1970 - DNA, 249 bp, Glycine max
  Clone ID: 700962567H1
ggagagtgcaacaacaaacgcaccaggtacgctctctttctctctccctaaatttcaattcaaaccacaaacacaaacccatatccccaaaacctgtgtctgtcaactgcacttagagagagtgagtgacgcaaccagactagcacgcacaacacacaataactgcatatggataggtatcagagggtagagaagcccaaggcagagactcctataaacgagaatgagatacgcgtcactactcaagga

SEQ ID NO: 1971 - DNA, 246 bp, Glycine max
  Clone ID: 700962568H1
tgatagacaggtgacagttgatgttccagatataaggggaaggactgaaatcctaaaggttcatgctagcaacaaaaagtttgatgctgatgtttctcttgaagtgattgcaatgagaacacctggctttagtggagctgatcttgcgaatctgttgaatgaagctgctatattagctggtcgccgtggaaagacagctatttcatctaaagaaattgatgattctattgataggattgtggctgg

SEQ ID NO: 1972 - DNA, 249 bp, Glycine max
  Clone ID: 700962570H1
aaaaacccttcttctcttctcttggtttcgttctgtgcatctgccaaattaggattaggattagggctaccaataccaataccaataccaattctattctatggcttgctcaagcgcccaaatacacggtctcggaaccccttcctcccgaaccctatttttaggtcagaggctaaataccaaggccgcctttatcaagctcaagtccacacctagaagactccgccctctcagagtggttaatgagaa

SEQ ID NO: 1973 - DNA, 248 bp, Glycine max
  Clone ID: 700962571H1
atcttgatgctgaaaaagagatgatgtctcaatgtgtggctcttcttggaaaatttattgctgtccgtgaaccaaacattcgatatcttggcttggagaatatgacaagaatgttgatggttactgatgtacaagatatcattaaaagacatcaagctcagattattacctcattgaaggatcctgacatcagtattcggaggcgtgctctagatttgctttatggcatgtgtgatgtttcaaatgca

SEQ ID NO: 1974 - DNA, 244 bp, Glycine max
  Clone ID: 700962579H1
tttggagagtttttttgtgttgttttgttgaggttgggtttgtgagtgagagaatggtgggtgctctatctgttgtgggctcatcagtgatggactctcacactggcccttgtttgtgtgttgatgctctcccaacaactagtgttaatctcaagagtggtggagatgttttgtacaagaatttgatgggaaggaagcataatttggtgaagcatggtggtgggaccatgaagttgagcagttc

SEQ ID NO: 1975 - DNA, 246 bp, Glycine max
  Clone ID: 700962586H1
aaaattgctcctgcgctgattgctggaaactccattgtgctcaagcctccaactcagggagctgtttctgctcttcatatggttcactgctttcacttggctggttttcccaaaggcctaatcaactgtgtcactggcaaaggctcagaaattggtgacttccttacaatgcatccaggagtgaactgtataagctttactggtggtgatactggcattgcaatttcaaagaaggcaggcatgatt

SEQ ID NO: 1976 - DNA, 244 bp, Glycine max
  Clone ID: 700962590H1
atcaacttggagcacatcaaggccatcatcaccgcccacgaggtcctcctcctcaactctcgcgacccctccgtcacccccttccttcaggagctccaggccaggatcctccgccaccaccaccagactctggccgatgccaaccccaaccctgacgacgccatcaagattctccccttcgagttcgtagcccttgaggcctgtctggaggccgcttgtagcgtcttggaaaacgaggctaaga

SEQ ID NO: 1977 - DNA, 243 bp, Glycine max
  Clone ID: 700962591H1
aacgtgtgttcgtttgttcggtggtgaattcctatccacacgtctcaccggaaacatgtcagcggtggttgctggttcctcctcttcattctctgccaccttcacccccataaggagcccctccttaaaaaactctcaactctctcattccaaggcactcacttcacctcaatgccagaaaacatctttacaagggctctcacttcatgaagccaaaaggggtgtttcagaatccttcctagt

SEQ ID NO: 1978 - DNA, 242 bp, Glycine max
  Clone ID: 700962592H1
caaatcgcaatagaaatggaaagtaacgcaccagtactagcagagaaagtgtggagcatggtacgtgtgctgttgttcatgcttcgaaaaggcatatcaaaggggaagctaatgatggatctcaacatgatgctcaaacgccgcggcaagctcgccggcaaagccattgccaatctaatgtcccacaaccacaaccaccgtgggtcccacaagtcgcaacttcggttctctgctccaaggga

SEQ ID NO: 1979 - DNA, 242 bp, Glycine max
  Clone ID: 700962594H1
aaaaaattaggcgtctaaagggccaaagcttagaaagttgaagctttttttgttgaggtgaaagtgaaatggttggcaaggataatctgagggctgaggacttgaacttgtgctttaagaagcttatgatggtggccgggagtgggaacagtgagaaaggggtgaacttgaaggttggggtgatcaccgagtggaaggatattcctgtggagcttctgatgcaaattctgtcccttgtggat

SEQ ID NO: 1980 - DNA, 244 bp, Glycine max
  Clone ID: 700962596H1
gaaatttatccagtttcagctcacggttaatgttgctgctcttgtaataaatgttgtggcagcaataacttctggtgatgttcctttaaatgcagtgcagcttttgtgggtcaaccttatcatggatacacttggggcgcttgcactggctactgaaccgccaacagaccgcctaatgcacagatcaccagttggccgaagagaatctcttataacaaatatcatgtggagaaacttgatcgta

SEQ ID NO: 1981 - DNA, 251 bp, Glycine max
  Clone ID: 700962615H1
cgaaaaccaaagaagaaaaaagagtttcttctttccgaaatccaagcagtagggttagggttttttccgatctcaatggcggaggaaccggagagcaccgtcaccaccggcgcccccgacgaatcgctgctcgataagatcaccgagaagcttcacggccacgattcttcctcttcttcctcttcggattccgattccgaaaaaaccgttacttcgtccgttaaggatagggtttttcgcctcttcggaag

SEQ ID NO: 1982 - DNA, 242 bp, Glycine max
  Clone ID: 700962645H1
cgcggcttcaaccttgtagttattctctttcttcttttttagctatccctctcttgaaaaatctagatctcgttcttccttgatctacgttacgcttttagtgaccggatctgtatggatctgaaccagatctacacgccgatggtggttttggcctggtctttcatagatctgatgcatggaggctcagatctactgtacagagatactgtagataatcgatgagaagaacgcagatccag

SEQ ID NO: 1983 - DNA, 120 bp, Glycine max
  Clone ID: 700962759H1
ctcatttttttaggctcataaatcttttttatgggtttcagggtcactactactctgtctctgctctccctgttttggctcttgtccctgcaccaagcaagagctgcaaagttccacaat

SEQ ID NO: 1984 - DNA, 259 bp, Glycine max
  Clone ID: 700962775H1
catatccccccctagctacagagcagccaaaggggaggaataataataagcctatattctaaggccggaaaaataaaaaaggaataacaaaaatgtctggaaaggtaattatctcggctgtttctctcatcctggtggttggagtggccataggtgtggtggtggccgtcaacaagaagggcgaggatcccacacttcaatctcaacaaaaatcagtaggggttatctgccaaaacactgatgaccagaagctctgcca

SEQ ID NO: 1985 - DNA, 118 bp, Glycine max
  Clone ID: 700962778H1
aaagatggtatcagagaggccagtggtgatattcagcaagagctcgtgctgcatgagccacaccataaagaccctcttgtgtgactttggggtgaatccagcggttcatgagctggat

SEQ ID NO: 1986 - DNA, 259 bp, Glycine max
  Clone ID: 700962793H1
ggaggagcttcactcaccggaagcctatgagatgatccaaaaccacttggctctcattttgggcaaccgtttaggggattcaacatctgttgctcagatcagcaaaatcagggtaggacaggtttatgcagcttcaataatgtacgggtactttctcaagcgagttgtgcaaaggttccagctggagaggacaatgaagattcttcctaatgcaacagaagagaatagcattcaacaaactgttgtagatgattcaaga

SEQ ID NO: 1987 - DNA, 55 bp, Glycine max
  unsure (1)..(55): unsure at all n locations
  Clone ID: 700962833H1
atttgatgaccatgaacctattgatttgtccaaactncatnctntnctcccttng

SEQ ID NO: 1988 - DNA, 261 bp, Glycine max
  Clone ID: 700962849H1
ggaaaaaagaagaaggaagaaaagttagcagtagtttggcgtggtaattggtagagcgagaaacagagaaatggacgattacacgagggaaatgatggacctgaagacactggtcactcgcactctcgagaagaaaggcgtcctcgccaggatccgtgccgaactcagggcgagtgtgttcgaagccatcgaagaggaagatcgtgtgattgagaaggaacaaggtctacctcctgcattgctaggtagttgcaacgatcg

SEQ ID NO: 1989 - DNA, 56 bp, Glycine max
  unsure (1)..(56): unsure at all n locations
  Clone ID: 700962853H1
gaagcatcgctcacctttccctttgcgaacgccgtgaagatnacgaaagcncaaca

SEQ ID NO: 1990 - DNA, 251 bp, Glycine max
  unsure (1)..(251): unsure at all n locations
  Clone ID: 700962864H1
attgaaccagctctaaaaaagcagcttatcanctctacagtactcatgactgttggaattgcaattattagttggattgctctgccaacatccttcacaattttcaactttggtgctcagaaggaagtaaagagctggcagctgttcctctgtgtgggtgttggtctatgggctggacttattantgggtttgttactgagnactatacaagcaatgcttacagtcctgtacaagatgttgctgattcctg

SEQ ID NO: 1991 - DNA, 250 bp, Glycine max
  Clone ID: 700962877H1
gtgaaaaaggagagatggcagctgcaacatctagtgctgtgttaaacgggtttggatctcacttcttgtgtggaggaaagaggagccatgcccttcttgctgctagcattggagggaaagttggtgcttctgttagtcctaaaagagttattgtggcagttgctgctgcaccaaagaagtcatggatccccgctgtaaaaggtggtgggagtttcatagacccagaatggcttgatggctcgctaccagg

SEQ ID NO: 1992 - DNA, 253 bp, Glycine max
  Clone ID: 700962885H1
aagaagggttgaaggaagaaaaaaagaaaaacacagaaatggagggtgggaacaacagcagcagtaacaacaaccctgatgagttggcggtggggtgcttgctttcgatcaggacaacgttgggcgacgaattcgaaggccaggtcgtcaccttcgatcgcccctccaacattctcgtactccaggagccttccaaacctagccctcgtcgaaatcttaggttgctcaaagccaattacatcaaagacttcac

SEQ ID NO: 1993 - DNA, 247 bp, Glycine max
  Clone ID: 700962889H1
tccaaatcatggctagctcactgcttgtgagggttgccagctgcatggttgtggtgtggatgtttagttttgggcacataattcccttggcagaagctgaaattccatgtggcagggtgcaaatcactgtggctccatgcatagggtacctaaggggtcctggtggaggtgtccctgcaccatgctgcaatggggttaagagcataaacaaccaagccaaaccaccccagatcgtcaaggggtgtgt

SEQ ID NO: 1994 - DNA, 261 bp, Glycine max
  Clone ID: 700962901H1
gttggtggcaaagctggtgctcttggtgactctgttaccgttacacgtgagaagactaagattattctcacctctgactgtaacttttccaaacggtatttgaagtacttgacgaagaagtacttgaagaaacacaatgtgcgagactggctcagagtgattgcttcaaacaaggatagaagtgtttacgaactgaggtacttcaacattgctgagaatgagggagaggaagaagattagttgtctgatagccttatttgc

SEQ ID NO: 1995 - DNA, 249 bp, Glycine max
  Clone ID: 700962921H1
tctcagtctctgtgtttgcggctgaggattccgaacgagtgaccttcttcgtttctcgcaaagtttaagtaatcatgggtaaggaaaaggttcacatcaacattgtcgtcattggacatgtcgactctgggaagtcaactaccactggtcacttgatctacaagcttggaggtattgacaagcgtgtgattgagaggttcgagaaggaggcgccgagatgaacaagaggtcattcaagtatgcctgggt

SEQ ID NO: 1996 - DNA, 248 bp, Glycine max
  Clone ID: 700962936H1
cgcaacacaacaaaaaaagacaacccagagagcgcgtcttaataaacgctcttctctgaaaacccccatttcttttcttctttcttcttctctttcgcttcttcgatcttcgatcttcgtcgctgaaaatgagagagtgcatttcaatccacatcggccaggccgggattcaggttggaaacgcctgctgggagctttactgcctcgaacaggcattcagcctgatgggcagatgccaagtgacaaga

SEQ ID NO: 1997 - DNA, 257 bp, Glycine max
  Clone ID: 700962948H1
caagaatatcaaattggtctcttgtcttcctcctcatctctacactactccacatagagcccagcctctcaagcccaagcccaagcccaagcccaagcccgttcataaaatcctcctgcagcagcacccagtacccagccctctgcgtctcatccctctccgtctacgcctccagcatccaacaggaccctcaccaactggttcagacagcactctcctctccctgaaccgcacccaagccaccaaaaccttcgtgg

SEQ ID NO: 1998 - DNA, 284 bp, Glycine max
  Clone ID: 700963004H1
aaaatggccaaatcaatcaaattctttgagttgaacacaggggccaagattccttctcttgggttagggacttggcaagctgaacctggtgttgtagctgaagctctcaccacagccattcaggttggatacaggcatattgactgtgctagtgcgtataagaatcaagcagagattggttctgctcttaagaagctttttgatgatggtgtggtgaagcgtgaggacttatggatcacttccaaactctggtgttcagatcatgcaccagaagatgtgccaaa

SEQ ID NO: 1999 - DNA, 280 bp, Glycine max
  Clone ID: 700963024H1
gagagggggtggggtgacactgccgagcgtgtcctcgagatgatccagcttctcctggaccttcttgaggcacctgacccttgcaccctcgagacattccttggaagagtccctatggtcttcaatgttgttatcctttctccccatggttactttgcccaagataatgtcttgggataccctgacactggtggacaggttgtttacatcttggatcaagttcgtgccttggagaatgagatgctcaaccgcatcaagaaacaaggcttgatatcacccc

SEQ ID NO: 2000 - DNA, 274 bp, Glycine max
  Clone ID: 700963053H1
ttccattcttgtattctcgtattagcacaagatttcgtttttgtctatctatgtccccatcgtaattgatggtataacatcaacatgcatatgattatgggttatgagagagtgagagtgctgtttcttctgtttctgataccactgccaacggttctgggttggggcaaggagggccactatgccacttgtaagattgcacaggagtatcttagtgaagatgctctatttgcggtcaaacaattgcttccagattctgctcaaggtgatcttg

SEQ ID NO: 2001 - DNA, 278 bp, Glycine max
  Clone ID: 700963066H1
gtcaagataccagtgatctacatgagaaagtcgattttgtggcatgcttgggtggagatggcgttatactgcatgcgtcaaatctattcagagatgctgttccccctattgtgtcatttaaccttggctcccttggttttctgacttctcatgattttgaagattacaagcaagacctacgacaagtcatccatggaaataatacacgagatggtgtgtatattactcttagaatgcgcctccgatgtgaaatttttcgtaaaggtaaagcaatgcca

SEQ ID NO: 2002 - DNA, 244 bp, Glycine max
  Clone ID: 700963114H1
tggcatcttgtgttgtgtccctcttttaagctatttccttctcttaacacaattggttgtgccaattgccatagtcaccaaccaattaacaaaggtatatatatcatcatatcatcaccaaatgaaaaatattgggttgttttttcttgtggtggtggctacttttgtggtggcagccacagctggtagcttttaccaagactttgaaataacgtggggtggtgagcgtgccaaaatctatgag

SEQ ID NO: 2003 - DNA, 241 bp, Glycine max
  Clone ID: 700963142H1
cgctttccccaacgaacctcgttgttgtgaatcgcgctgctgaatcaatcgttctcggttttcgcgtactctactcgttcatcccgacatggtttgcttggcttgtttgctgcccctctttctcgtcccaatcgtcaacatcctccctcttctcttccattttatcatggggaaaatctatcgggtttttggttgggagtacaggaaaccggagagggctcctcctgcatgtccattcaag

SEQ ID NO: 2004 - DNA, 237 bp, Glycine max
  Clone ID: 700963178H1
acttaagagatcaatatggccaccaccactacccagcctccctctaatatctgttttttccttctgttgttgcttctagcacactttcatttgggcataagccaacttgagctgaattactactctaaaagctgcccaaaagctgaagagatcatcaaggaacaagtcacacaactatataacaagcatggaaacactgccgtttcgtgggtcagaaatctcttccacgattgcgtg

SEQ ID NO: 2005 - DNA, 234 bp, Glycine max
  Clone ID: 700963192H1
ctccatgcttctgtgctcgcccttgtattccttcttgtcatactatttcaggaaggattggtaacatgtatgaagaatgaagacggatcagaagaatggggatatgtgcaagttagaccaaaagcccacttgttctggtggctttacagaagtccatacagagtggagaatccctccaagccttggccaatcattctctggcttcagggaggaccaggctcttcaggagttggg

SEQ ID NO: 2006 - DNA, 234 bp, Glycine max
  Clone ID: 700963193H1
ctcgagatgaaaccaacgaatcttttgttactgatgagcttgaaaatcagaagttggagatagatgatggcaagcacacacaaaagactaatgacacttgtgaagtctctaagttggagaattctggtgcttcagaattggttcaaactgagaaaacagatggtcgtaattgtgcattaacaatagatggggtgccaggcaatcagaattacccaagacatgtccctgtgcacg

SEQ ID NO: 2007 - DNA, 254 bp, Glycine max
  Clone ID: 700963206H1
cttcattttccattcgtagacgccaagaaccctaacagttggtgttgtgatggatggtgataatggccttaacatacgtaattggggttactatgaacccgccacgtcgtttaagagccacctggggctgcaactgatgtcatccatgccggaaaaacctctaattggagggcgcaatgctgcggttttagctggtactaatggggcatttcaccatagggacattggtggtatgccccaagctacatacccta

SEQ ID NO: 2008 - DNA, 253 bp, Glycine max
  Clone ID: 700963214H1
gagagaacttcaagtgagggtgagagtgacacaaatctagagagagcactagtactctaaaagtctattatattcttcaaaatatgaccatgcatcgcgagtcttgggcttttgtcttcggcgttatgggcaacatcatctcctttggagtgttccttgctccattgccaaccttttaccaaatctacaagaagaaatccactgaaggtttccagtcacttccttatgttgttgcactgttcagtgcaatgct

SEQ ID NO: 2009 - DNA, 256 bp, Glycine max
  Clone ID: 700963248H1
caaccttgtagttattctctttcttcttttttagctatccctctcttgaaaaatctagatctcgttcttccttgatctacgttacgcttttagtgaccggatctgtatggatctgaaccagatctacacgccgatggtggttttggcctggtctttcatagatctgatgcatggaggctcagatctactgtacagagatactgtagataatcgatgagaagaacgcagatccagccgcttccgcttgttcgatcgc

SEQ ID NO: 2010 - DNA, 254 bp, Glycine max
  Clone ID: 700963268H1
tctgtatggaaacatcgtgcttagtggagggtctactatgtttccgggaattgctgatcgcatgagcaaggaaattagtgctcttgcacccagtagcatgaaaatcaaggtggttgcacctcctgagagaaagtacagtgtctggattggtggttctatcttggcatcacttagcaccttccaacagatgtggatctccaagggtgaatatgatgaatctgggccagccatcgttcatcggaagtgcttctaaa

SEQ ID NO: 2011 - DNA, 252 bp, Glycine max
  Clone ID: 700963285H1
cacttccaagcctttccatttgcttcgctcgagttattattttgcacagagagagagagaaaggagacagatttgaattgagtggtattccaacgtcgaaagcagagaggagaaacactaaggtttctcctaaagtgctctatttttaattctctctctttctatatatctatgtgactccgcctacatcactcagaccggtggtcatgtccctcatgtgacaattcgggagctgcaaggttttggtcttgt

SEQ ID NO: 2012 - DNA, 245 bp, Glycine max
  Clone ID: 700963290H1
cacaacagaaatcaaaatgttctgaatctgggaaggttgatgagatgaaaacatctgatgttgtcagggttgatccaggactgaagtccaaaatcgcagattttccttcttccttagtgatggagcaagataaagctgctgcatcatatgatagcccactggctgctgcagaaccaaaatattgtttgaccggagagaattgtgaaaatgctaatgaggaaccaaatccttcagaagctgagatc

SEQ ID NO: 2013 - DNA, 245 bp, Glycine max
  Clone ID: 700963291H1
gtttgtttggtggttgcagcatccttggcactggcagtgtttgtgtccataactgtaactggcaggcctggctatgcaggtgctgggctgagccctgcaagatgcctaggtccagcgttgcttcatggaggcccactatggaatgggcattgggttttctggcttgggcctttcttggcctgcataatctattatagtgtctccattaatctaccaaagaaaggtttgaattgggttgatggaga

SEQ ID NO: 2014 - DNA, 275 bp, Glycine max
  Clone ID: 700963333H1
ctagaaacttcctgaaggccgtggaagaggccgtagatgaggccagtagaagatgcggccttggattggtttgtaggtgtaggggccctgggaatttttgccccaccgatgtggaagggtattattctgttcaggtgccggattatgagcctggagtgtattctgatgctcagatcagaaaggccagaagtgaatttggagctgcggaaatgctttcttttctgaagcaattggcattgaatccacatggtggtgatcagagaagcattggtttc

SEQ ID NO: 2015 - DNA, 273 bp, Glycine max
  Clone ID: 700963335H1
cccaattacagtatgcttctacaaatgacatgaggtctcaactctgcttggctgccaaggatccaactggagaaagttgctctagtgacatggtacatttctttgcagaatttagaaaattcattagccatgattattatgcttccctggatcaggaaatgtctttggaacgaatgaactatgagaccggagtaacctctacagcagcattggcttctatgacacctgcaatggagccttgcagtgattcttattggactgatagaatatcca

SEQ ID NO: 2016 - DNA, 265 bp, Glycine max
  Clone ID: 700963385H1
aagtaagcaaagatggctttcacggaatcgtctctcctccttccttcggtttcaggaaccaacaagaacaagaacaaggttccagaagacaaatggtatttagcctacattgtgtattttaccctgggtctcggttaccttctcccatggaacgctttcatcaccgccgttgattacttctcctttctctaccctgacgccagcgttgaccgcatcttcgccgtggtttacatgatagtcgggctggtggggatctccctcataa

SEQ ID NO: 2017 - DNA, 259 bp, Glycine max
  Clone ID: 700963389H1
ctcataaaagagacatgacatttgaggaaaaacaaaaactaagcactaaccttcaaagtttgccttcagagaagcttgatgctattgtacaaatcattaagaagagaaattcagcacttaatcaacatgacgatgaaattgaagtggacattgatagtgtggatgctgagactctctgggagcttgatagatttgttaccaactataagaaaagtttgagcaaaaacaaaaggaggctgaacttgctcgagctagagca

SEQ ID NO: 2018 - DNA, 264 bp, Glycine max
  Clone ID: 700963403H1
tgcgtatctctttctctctccatttttatttatatatttctctccattatttggtgtgcatgctctagacacacacacaccccaccaccaccaacactgagttttagcagaaggatagagagcagaatgattcaaagaactgtgtcctttcccagtttaaggaaattgcttcttcgggctggttgttctaaatctgcttcgtccaagatcggaacttacaattgctttgcttctcagtcctcccctctaccgagccacaaccct

SEQ ID NO: 2019 - DNA, 262 bp, Glycine max
  Clone ID: 700963404H1
gtgatccctctctttcttttactttcgccaaatctgaacaacatgatcaacatcagagatccaagagctttgaggcttacggcgatgtttccaagtctggtgtgtggggcgtccttgctcagaaagccaaagaaattctggaggacgataagtcgtcatccccacaacacaacgacgtcatcaatatcatgccaccagttgtcgacatagacaaactcaaatcgcactcttttaatacctttgctcctcctcctcaggagaa

SEQ ID NO: 2020 - DNA, 261 bp, Glycine max
  Clone ID: 700963405H1
cggagagcttgcacaagatatggcacagcaacatgccatacaacaagattgctgacaggaaaggtcaccagggatggatgaaactagaaggtcaacactttatattccctggtggtggtacgatgtttccagatggagcagagcaatatattgaaaaacttggtcaatacattcctataagtgaaggtgttctgaggactgcgcttgacatggggtgtggggttgctagttttggaggatatatgctatctaaaaatattt

SEQ ID NO: 2021 - DNA, 260 bp, Glycine max
  Clone ID: 700963406H1
gtcatttgatctacaagcttggaggtattgacaagcgtgtgattgagaggttcgagaaggaggctgctgagatgaacaagaggtcattcaagtatgcctgggtgcttgacaagctcaaggctgagcgcgaaagaggaattaccattgatattgctttgtggaagtttgaaaccaccaagtactactgcacagtcatcgatgcccccggacatcgtgactttatcaagaacatgattactggtacctcccaggctgattgt

SEQ ID NO: 2022 - DNA, 258 bp, Glycine max
  Clone ID: 700963412H1
cagactgggcatagcatccacgctttaatcgaccactgcttcttctacttttctttcctcaaggttttggcgggagtcgtcgtcgtcattgaatcagccatgcctcggtactactgtgactactgcgacacctatttgacccacgattctccatctgttagaaagcagcacaatgcaggttacaaacacaaggcaaatgtgaggacctactaccagcaatttgaagaacaacaaacacaaagtttaattgatcaaagg

SEQ ID NO: 2023 - DNA, 260 bp, Glycine max
  Clone ID: 700963413H1
gagtcctccgtccccctcccgccggcgaacccttgaagcccaaacaggacccacacccacactcccagcagcaatcgtacctcaccaacgccgtgttcttcgggctgttcttctcgctggcgtacttcctcctccaccgatggcgcgagaagatccgcacctccactcccctccacgtcgtcacgctctccgagatggctgccatcgtctccctcatcgcctccttcttctacctcatggccttcttcggcattaccttc

SEQ ID NO: 2024 - DNA, 261 bp, Glycine max
  Clone ID: 700963415H1
gattgactttttttcttcttctattctcacacatacccatctactccttccctcatggctgaacaatcttccaactccatttacgatttcactgtcaaggacatcagtggaaatgatgtgagtctgaatgattacagcgggaaggttctactgattgtgaatgtcgcctctcaatgtggtttgacacagacaaattacaaagaattgaatgtattgtacgagaagtacaagaatcaaggatttgaaatcttggcatttccg

SEQ ID NO: 2025 - DNA, 264 bp, Glycine max
  Clone ID: 700963417H1
gttgctagctcctgtttctttcttttttgtcggagaaaatagtgatagtaatgtcgggtgaggagacacagaggaatgtgtttggcgcggaaacggcgtcgtccttggtgaaggagctgagggacaacttcggtaaaggaaccacgcgaagttacgaatggagagtgtcgcaagtgaaggctctattgaaggcggtggttgaaaacgaggaccagatcgtcggtgctctttgttccgacctagccaagcctccgctcgaaaccg

SEQ ID NO: 2026 - DNA, 258 bp, Glycine max
  Clone ID: 700963422H1
ctttgaagagctgactgcagcctataaaagtggagagttacatcctggtgaccttaaaccagcattggcaaagtcgttgaataaaattctggagcctgtaagggaacactttaggaaggacagcaatgctaaagagctattgaaaagggtcaaggcttacagagtcaagtaatatgctgattaaggacttcaggctaatatctattctttgccaatcagccatagaattttcacgttgagattatgcacttttggact

SEQ ID NO: 2027 - DNA, 255 bp, Glycine max
  Clone ID: 700963428H1
agcgctccgtgtgcctacacccaatgtttcagttgttgaccttgttgtgaatgttgagaagaagggtcttactgctgaagatgtgaatgcagcattcagaaaggcagctgaggggccgctcaaaggtgtattggacgtgtgtgatgttccacttgtgtctatcgacttccgctgctctgatgtttcctctactattgactcctccttgactatggtcatgggagatgatatggttaaagtggttgcttggtatga

SEQ ID NO: 2028 - DNA, 257 bp, Glycine max
  Clone ID: 700963436H1
cgccgcattactcctcaactgatctgggaaaataaggcgtctcttcttaccagctgctgctaatgtttttcctgcctgcaattttccatcttccctgcagaaatttccaaaacaaatagttgttggtgatttgtcaacatgaagaagttgttagattttgggaagaaagccctcttttatgttagggtgctttctggatatgaagagcgaagaatacgatcttataggctgcagcttgagcaacgtgtacaacaggc

SEQ ID NO: 2029 - DNA, 256 bp, Glycine max
  Clone ID: 700963438H1
gcagagcagagatctagcgtattctctcgctctttctttcactgtcacagagccacatccatgggcttcccagccaacggcgcctctgcggcccagcccctaaacttcctcatctacggccgcacgggctggattggcggcctcctcggctccctctgccgggcccagggcatctccttccattacggctcgggccgcctcgagaaccgggcctccctcgaaaccgacatagccctcctcaagccctcccacgtct

SEQ ID NO: 2030 - DNA, 256 bp, Glycine max
  Clone ID: 700963440H1
aaaaaaaataaaaatcccacttcctttttcttctttttttgttctttgttttttgtttgataagaaactgcgagaagaaagtaaaaggttcaatttttacccttttttcttcccagaagcgatctctgaagccgacccattttggaattcggaaaacccagtgctgatcgctctctgggtgttcccaaaatgaagcttcggagatcttcgctgtgcgtctttctagggtttctggtgctgttcctttcgccgccgc

SEQ ID NO: 2031 - DNA, 255 bp, Glycine max
  Clone ID: 700963445H1
ctgcaacagtagggtacatggcatccccagctagacaaagagaagatgacatgagaaaaccaccttcagggttccctgattgttccatcaagctgcatgcacatgaagttcggttccttgctgcagcaaggaaactagagtttggcaatggtgttcttttctatgatcgtatctcagttggtgcagatttgtctgatgctattggattcaaaggttgtagagaaattgaagggccttatgtggactatctagaga

SEQ ID NO: 2032 - DNA, 256 bp, Glycine max
  Clone ID: 700963447H1
gctggaggaattggtgttagtgttcacaacattcgtgccacaggaagttacatccgtggcacaaatgggacatcaaatggtattgttccaatgctgcgtgtgttcaacgatactgctcgctatgttgatcaagggggaggcaagaggaaaggtgcatttgctgtgtacctggagccatggcatgctgatatatttgaattcttggatttaaggaaaaaccatggaaaggaagagcatcgagctcgagatttgtttt

SEQ ID NO: 2033 - DNA, 259 bp, Glycine max
  Clone ID: 700963448H1
gaagctagctcaaccgagaagaagcaagggataatcattattagtcttctttctcttttggttactattgattgctccaatcatcgatactatgtctctaaaaatagcagcagaaatttatccaaaatcaccatcagagacagtgaaggagcctttggtggtggtaaaggaatatgatgaagatagacacaaggtcgctgtagagagacttgagaggctttgtgaagttgggcagagtggaaagccttctcttgtcact

SEQ ID NO: 2034 - DNA, 257 bp, Glycine max
  Clone ID: 700963450H1
attgatccttttcctgtcttgttttcatgacataaactatcatcaactgttgctttccattttggctataattccacaaaatgtgccatttattgcaagtgtaatattactagcatttccatatatcagtccatggcctccttaatgctcaatggagctcatcaaaatccaaacctcattagtggcatagctccaaatggccttaactttcacaacaagtgtttattccaaaagggtgtgctgtctcatggtaacaa

SEQ ID NO: 2035 - DNA, 256 bp, Glycine max
  Clone ID: 700963451H1
acatactctagttggaagtggtaaattactcgctaacagggaaggggagttgaacaagaaacagcagtgcctggcgaagaagagaaagaaaacaatcatgagcttcattctgtttccgattctctttgcatttacctttctgtcctcgcccgttctctctgcttcggatctggtcctcgccaaggttgaccgtcgcattgatctgacttcacagattgtgcgcatcactacttcactaaaggtgcagaatacggga

SEQ ID NO: 2036 - DNA, 254 bp, Glycine max
  Clone ID: 700963454H1
atttacaacaacaatggcttctgtgcctcaaccaaaaatctcccttctaaccttattcttcttctcgtccttcaccatcattgcgcatgcaattgttcctcaaaacgaaaccttcaaatttgagaactcaggtgaacttggaccctacatcgttgagtacggtgcagattacagaatgataagcatcttcaactctccattccaagttggtttctacaacaccaccccaaatgccttcactctagctttgcgtg

SEQ ID NO: 2037 - DNA, 253 bp, Glycine max
  Clone ID: 700963462H1
ggagttcatcgacattgttgagaccgtctaccgtggagccaggaagggacgtggtctcgtcatcgctcccaaagattactccaccaagtaccgttactagtttcattcatctgtaacatacaacaaactaaatattatctcttttcttacttctctggtgtggtgctggttgtggttgtatgatcattctgatttctgcttattcacaactctgttacatgaattgcttttgtcatatgctaaagtgttgtta

SEQ ID NO: 2038 - DNA, 253 bp, Glycine max
  Clone ID: 700963468H1
ggaaatagataatatttattacgaaacggaataccgaagagaatggtgcagcagcaagggtaaaccatcgacttgcttcctttttgccagaaaatttactcggactgctgctttaaggcttcttaatatgtctgttctgggagtgttcaattaagagaacaaaaggctctttgtcagagagactgatacaaggaagaaaaaatacacttagcaaaacaaataagaggaagaaaaggaataaagtaaaagcagt

SEQ ID NO: 2039 - DNA, 249 bp, Glycine max
  Clone ID: 700963473H1
ctcaatagatgatcttaatgtcaagtcagtacctatatatgatggcattcacacaaataaagttatgaagagaaagaaacggaaaaaagctgaagaaagtgatttatcatcatatgtgtctaatcatagtatattctcttactacgagaacaaaaaccgtggcgcttgtattgaagattttcgtggtgatgccttgagaggtaatgcagagattaatattgaggagttaaagtttaatgataagctgcc

SEQ ID NO: 2040 - DNA, 249 bp, Glycine max
  Clone ID: 700963475H1
agaagacacagtagtgttgtatccagccccaggcataggccacattgtatccatggttgagcttgctaagcttctccaattacatgctcattcaatcacaattcttctcaccacgggtctccttgaccacccctctatcgacacctacatacaccgaatctccatctctcacccttccatcttcttccaccgcctcccccacacatcactctccaccaccaccaccgtgagcatggccgccaaagcctt

SEQ ID NO: 2041 - DNA, 250 bp, Glycine max
  Clone ID: 700963476H1
ctaactcactcactcacaactcagtgaaagagaatccgaggcgaagagaagagaaaaattaagatggaggggaaggagcaggatgtgtcgctgggagcgaacaagttcccggagagacagccgattgggacggcggcgcagagccaagacgacggcaaggactaccaggagccggcgccggcgccactggttgacccgacggagtttacgtcatggtccttttacagagcagggatagcagagtttgtgg

SEQ ID NO: 2042 - DNA, 252 bp, Glycine max
  Clone ID: 700963478H1
aatggcttcgttatcgctttgcatagccatgacagcacccactccctcagcttctctcattctcactgccccaaaaccatcttcgctctctttgaaccttacccgcacttgctccaccgctcgctctccgcttctccattgctccttcctctcttctccttcccttctctctcccccttcctccatttcaggcttgtcacttggattggatttgacatctaattttgggaccagaagaggaaaaggttctgg

SEQ ID NO: 2043 - DNA, 253 bp, Glycine max
  Clone ID: 700963479H1
ggctctgcaattgcaaattcagaggatgtcgatcttcgagtacaacggaagcgccgtggtggctatggtcggcaagaactgcttcgccattgccagcgaccgaaggctcggcgttcagctccaaactatagccacggattttcaacgcatttccaagattcacgacaagctcttcatcgctctctctggcctcgccaccgatgctcaaacattgtatcagcgtcttgttttccggcacaaactgtaccagctg

SEQ ID NO: 2044 - DNA, 250 bp, Glycine max
  Clone ID: 700963484H1
ttcatccctaacgcgtgcatagcagagtcagagacagagacgcagccatggggcggagacctgcgaggtgttataggcaaattaagaacaagccataccccaagtcacgtttctgccgtggtgttcctgatcccaagatcaggatttatgatgttggtatgaagaagaagggtgttgatgagtttcctttctgtgtccatctggttagttgggagaaggaaaatgtttcaagtgaggccctggaagctgc

SEQ ID NO: 2045 - DNA, 247 bp, Glycine max
  Clone ID: 700963487H1
tctgttattacttttgcttgcatctctctgtgttcaatcttcaaagacttgaattcttcttacttaggttctgaatggctggaatttgctgtggtgttgtcggagaaggtgacactccggctccactcgagccaactactcgcccctccaggcgccggagtttggacatcttacccttaaaatacatcgctgacatggcggtgccgccgtcggatggttcacggaaacgtcccaagctggatctcag

SEQ ID NO: 2046 - DNA, 249 bp, Glycine max
  Clone ID: 700963493H1
ctctgttccgttggcgggtgggtctttcttctctcaaaatggccaccggagtgaccagaaaaatttctgctgcatcagctcgggcccacaccagaagggcgaagaaaaccaattctctaccccttccttcaggaattcttggaacagcactagcagtgttgtttattgggtttctagcatgggcttatcaggttattcaacctccccctcccaagatatgcggcactcctgatggaccacctataacag

SEQ ID NO: 2047 - DNA, 289 bp, Glycine max
  Clone ID: 700963605H1
ggcaatggcatttccgtccgtaacctctgtaactgtggagaacgtgacattccctctcaccgtgaagcctccctgctcccccaacaccttcttcctcgccggcgccggcgtcaggggcctccaaattcatcacgctttcgttaaattcactgcctctgcatttacctccaatacgacgccctttccttcctctccgttaagtggaaaaccaagtctgctcaccagttaacggaatccgaccaattcttctcagatatcgttacaggtccattcgagaaatttatgcagg

SEQ ID NO: 2048 - DNA, 288 bp, Glycine max
  Clone ID: 700963607H1
gctcttgagagcggatcgaagaaacagatgaacaacacattgcatcctctcagtgttctcaagctctccaaaagaatgagcactagcatgagggagtccattctcccaatttgtctcttagatgcaactgcttccccttgcaggtcaccttggagatctttactcatcatgagattcaggttgcaaccaattcttttagccaagaaaatttgattgggaagggtggttatgctgaagtttacaaagggtgtttgccaaatcgtcaattagtggcaattaaacgtttaa

SEQ ID NO: 2049 - DNA, 287 bp, Glycine max
  Clone ID: 700963628H1
gggagaacccaaaggatcctgatgaagttttagtcaagtatgaagcatgccttgaagatggaactcttgtggcaaaatctgatggagtggagttcacagtcaatgatggttatttttgtcctgctttgtcaaaggctgttaaaaccatgaagagggagagaaagtgcttctgacagtgaagccacaatatggatttggtgagaagggtaagccagcacatgatgaagaaggtgcagttccaccaaatgcaacattgcagattactcttgagttagtttcttggaaga

SEQ ID NO: 2050 - DNA, 286 bp, Glycine max
  unsure (1)..(286): unsure at all n locations
  Clone ID: 700963644H1
gctgctagctattagctatggctagaggaaagatccagatcaagaggatagagaacaacaccaaccgccaggtncacttactctaaacgacggaatggccttttcaagaaggccaacgagcttaccgttctctgcgatgccaaggtttctatattatgttctccagcactggaaaactccaccagtacatcagcccctccacctcaacaaagcagttcttcgatcaataccagatgactctgggagttgatctctggaactctcattacgagaatatgcaagagaa

SEQ ID NO: 2051 - DNA, 289 bp, Glycine max
  Clone ID: 700963648H1
tatcatcaatattcttgtcaattgcctctacatgaaagacctgctctaccaattgacccaagagctagtgatggtatgaatggatatctctggttgtacgaaaggaatgtgctcagaaccactgtatcttctcccatcaagggattgcaagacttgagtttaatcaagttttaaatattacttatctcaatcctcgtaaacatagacatattccaaaacctccggatggtgtactaatgccaaaaaagatattaaaagccattgacattaaaccttttcctgtgttatg

SEQ ID NO: 2052 - DNA, 287 bp, Glycine max
  Clone ID: 700963650H1
agagaatccgaggcgaagagaagagaaaaattaagatggaggggaaggagcaggatgtgtcgctgggagcgaacaagttcccggagagacagccgattgggacggcggcgcagagccaagacgacggcaaggactaccaggagccggcgccgcgccactggttgacccgacggagtttacgtcatggtccttttacagagcagggatagcagagtttgtggccacttttctgtttctatacatcactgtcttaaccgtcatgggagtcgccggggctaagtctaagt

SEQ ID NO: 2053 - DNA, 284 bp, Glycine max
  Clone ID: 700963657H1
gggagttcaagaatttggagacaaaaggggttcctttcccaaagaaccaacccatgagaatatactctagcctttggaacgctgaggattgggccacaaggggtgggcttgtgaaaacggattggagcaaggccccattcacagcctcatcagaaacttcaatgccctaacctcttcctccactggccaatcactggacgccacggggctggccaagatccattgggtgcaaaagaattacatgatttacaactattgcactgatattagacgtttcccacaag

SEQ ID NO: 2054 - DNA, 283 bp, Glycine max
  Clone ID: 700963659H1
gaagaagatcaaggagcagtttcataccgagaccttggacaatgttcagaaactcactggcatcacccttgacattgtgagtggtttgtccaacatcctcgagaagttcgggttgaagtttaatcttaaacccgcgtctcgccgtcttctcgcaaggatgggttgcccacttggttctctgctgctgatcgtaagcttttgggtcgtggatggagatcacgtgtcaagcccaatgttgtggttgcccaggatggcactggtcagttcaaaaccgttgccgatg

SEQ ID NO: 2055 - DNA, 287 bp, Glycine max
  Clone ID: 700963662H1
ctctcttctttttactctctctctgtctctctctacgctttctcgttcgagatccctcaagggatccactaactgaaggagaaatggggttgacattcaccaagcttttcagccggcttttcgccaagaaggaaatgcgaattctgatggtggtctcgatgcagctggtaagaccaccatcctgtacaagctcaaacttggagagatcgttaccacaattcccaccattgggttcaatgtggagactgtggaatacaagaacattagtttcactgtctgggatgttg

SEQ ID NO: 2056 - DNA, 282 bp, Glycine max
  Clone ID: 700963687H1
gccactgccataactcactcactagcttcttctctgttctcaccaatggcatcaacaatatcagcaatggccatgatcaacgccaaatgcgtcaacccaaagttccccaatcccaccaagctcgcaccatcaaaaccctcccttcagacaaccttccaaagggcctcatagcctcacccgaaagcactaaactttcccccgcgacagcaatcgcaggagcaatattcacaaccctcggaacctgcgacgccgcattcgctgttcaacaaatagccgacatag

SEQ ID NO: 2057 - DNA, 280 bp, Glycine max
  Clone ID: 700963691H1
ctcactcaatggcttggcactcgttcctcttattagcgacggccattctcgccgttgtgtgctccgccgtgagcggttgctcgccatcggatagggcggcgctgctggccttccggaaggcgctgagcgagccctaccttggcctctcaactcgtggacgggctccaactgctgcctcgactggtacggcatcagctgcgacgccaccaccggccgcgtcaccgacatcaacctccgcggggagtccgaagaccccatcttcgagaaagccggtcgctcc

SEQ ID NO: 2058 - DNA, 281 bp, Glycine max
  Clone ID: 700963692H1
ttcactctcaagcttcaagcatgactcctttttacttcctcctatttgccttcatccttttcctctccataaacttcttgatccaaacaagaaggttcaaaaaccttcctccgggaccattttctttccctataatcggaaacctccacaactcaagcaacccctccaccgcacgttccatgccttatcacaaaaatatggccctattttctccctctggttcggctcccgttttgtcgtcgtcgtttcgtcgccgctcgcggtgcaagaatgcttcacca

SEQ ID NO: 2059 - DNA, 283 bp, Glycine max
  Clone ID: 700963694H1
gtgctcagcaacaccgctgccaacggcgaggagctggtggcggatgctcatttgttacctgccaccgcggttgggcagaaagccggtgacgctattaagaagtatttgttttctgatgcgaaaccgacggtgaagattttgtttgaaggacaaagttggggattcagccatctcctgtggtggcagcgtttagctctagaggacccaactcgatcaccccgcagatccttaagccagatcttatcgcgccaggtgtcaacatcctagccgggtggtccaaggc

SEQ ID NO: 2060 - DNA, 284 bp, Glycine max
  Clone ID: 700963695H1
gtggtacttctttagtccacgagagaggaagtatccaaatggggtgaggcctaatagagcaaccgtgtctgggtattggaaggccactggcacagataaagcaatctatagtgggtctaagcatgtaggggtgaagaaggctttggtttttataagggtaagccaccaaagggtctcaagacagattggattatgcatgagtatagattaattggatcaagaagacaagccaatagacaagttggatccatgaggctagacgactgggtcttgtgtaggatcta

SEQ ID NO: 2061 - DNA, 265 bp, Glycine max
  Clone ID: 700963701H1
gttggcttcatagggactggactccctccttttgttgcattaagagctgacatggatgctcttcctctgcaggaaatggtggagtgggagcacaagagtaaagtacctggaaagatgcatgcatgcggtcatgatgctcatgttgccatgcttctcggtgctgcaaagatcctcaaacggcatgaaaatgagatacgaggaactgttgttcttgtttttcaaccagcagaagaaggaggtggaggggctaagaaaattttagatg

SEQ ID NO: 2062 - DNA, 263 bp, Glycine max
  Clone ID: 700963706H1
cttttcccaatactcattatcatcaccatatctgggtgtcaatgctacaaaaatttcaaattattttgagagaaaacacgtcagcttagaaaccaaatccaatattagacaaacctgttgtatgccacaaatcacaatccaatccctaattttgtatcttgcaaagcccccaacccccacacacacaaaaaaaggggaaagtcacttaaattaaaaccctgagaatgtgaaaattttgaaactcgcatcaaccgactctgacc

SEQ ID NO: 2063 - DNA, 259 bp, Glycine max
  Clone ID: 700963710H1
atagaagcaagattatcttccttttggaatgtgtacttaaatttctctgattaattatttccaggaaaggtatatcgggatatagttggtagtgcttactatgttgctcctgaagttctgcggcgcagatgtgggaaggaaatagatatatggagtgcaggagtcatattgtatatcttacttagtggagtccctccattttgggctgagactgagaagggaatatttgatgccatattggaaggtcacattgattttg

SEQ ID NO: 2064 - DNA, 260 bp, Glycine max
  Clone ID: 700963711H1
taaccctcttctttttgtttttgtataatcccttcaaatttgcattaggtaaaaaagaggctcccgaagttgcaggtgcatggccaatacttggtcacctaccactattgagtggttcagagacacctgatagggttttgggtgctttggctgataagtatggacccatattcaccatcaacaatggtgtcaaaaaggttttggtaatcagcaactgggaaattgctaaggaatgcttcaccaaaaacgacatcgtcgtt

SEQ ID NO: 2065 - DNA, 261 bp, Glycine max
  Clone ID: 700963715H1
gatcgcaaaggacaagcgcggttggatcttcgatcccatagcacccattattgttggatgcaattggaatacggcgtcgtttttggtttggaagtgtttaccgcgtgttcgtttgtgaaacaattctctgaactactgattaaggcagctagtgattatggtgctttgacagcatcagtggcaaatttttagtggagaggaatgaaagaggatagggtcatgctgcattttgatttttgacaggtgtaggctaggggaggc

SEQ ID NO: 2066 - DNA, 261 bp, Glycine max
  Clone ID: 700963723H1
gcatgattagggactccgccgaccattatggattgagaacaaggagtgatggtgatgccatctccatttttggatccaccaacatttggatcgatcatgtttccctctctaactgtgccgatggtcttatcgatatcatccaaggctccactgccatcaccatctcaaattgccacatgaccaaacataatgatgtgtttctctttggtgctagtgactcatacaacggagacaagatcatgcagatcacagtggcattca

SEQ ID NO: 2067 - DNA, 261 bp, Glycine max
  Clone ID: 700963747H1
cgacgacgatgatctcgaagagggtgagatccccgtcgacggcgaagatagcggcgccaccgccacaacgaagcctccggccgccctcgcccgaaacccccaccctctggagaattcctggaccttctggttcgacaacccttcctccaagtccaaacaagccgcatggggcagctccatccgacccatctacactttcgccaccgttgaagagttttggagcatttacaataacattcaccacccgagcaagttgggttt

SEQ ID NO: 2068 - DNA, 259 bp, Glycine max
  Clone ID: 700963755H1
ggtttttcttttggtcctgggtctgagaccgcggtgtcccctaacccattggtcagagaattatctgctcgcggtgtgtggtgtgtggctgctgctgtcacaagagaattttgcacatgacattttgatgagaagacaaatagatggaaaaatgtgctatgatcaattggtgcgctcttgattcattatcaggagatgcacatgcagcacgtcatgctattgttaaggaacctgttgccgatattttgggagcgcatta

SEQ ID NO: 2069 - DNA, 258 bp, Glycine max
  Clone ID: 700963759H1
gaagtatatccctagggaaaaataatttcttcacatttacaatgaagcaatccactctattcctgttcctattcctattccccctcgttcatgctctttcttacgaagctgcttatattagagatggcctcaaatcctattcccagcttgatctccctcactccgtttttggttctgaaagtgtagccttcgattgccatgggaaaggaccatatgttggagtgtctgatggtagaattctcaagtggcaagagacaa

SEQ ID NO: 2070 - DNA, 258 bp, Glycine max
  Clone ID: 700963760H1
gcaccagtttcaccgcacgaatatcttgttgtttggagcgatccgagaaaaactctgtaaacatgttggtttaccaggacctccttacaggtgatgagcttctctctgactccttccgttacaaggaaattgagaatggaatgctgtgggaagttgaggggaagtgggttgttaaaggagcagttgatgtagacattggtgcaaacccttctgctgagggtggaggagaagatgagggagttgatgatgcagctgtta

SEQ ID NO: 2071 - DNA, 257 bp, Glycine max
  Clone ID: 700963792H1
gaaagcagctcgaggacggccgcaccctcgccgactacaacatccagaaggaatcaacccttcacctcgtcctccgtctccgtggtggcatgcagatcttcgttaagaccctcaccggcaagactattaccctagaagtcgaaagctccgacaccatcgacaacgtcaaggctaagattcaggacaaggagggaatccccccagaccagcagaggctgatcttcgccgggaagcagctcgaggacggacgcaccctt

SEQ ID NO: 2072 - DNA, 216 bp, Glycine max
  Clone ID: 700963796H1
gaagaagatacgaaacctcaagtttaatctacctattagatgttgggttaggatattaggattttaatgccttttgaacttgtttttgttatacatctttgaagatattttaaccttgtgagcaacgaattggcattttgtggatttcttatgtgtattagtttcctgccaccttattttctcctgaatttattgtttattgtttagaacaatgtg

SEQ ID NO: 2073 - DNA, 250 bp, Glycine max
  Clone ID: 700963806H1
tggattcgtatgtttatcaggatagaattcaaatgttaaccctttcattgtcttcaatttttctgtatttgatttattaaaacattagttacatattgacgagaaaagatcacaacatttaaatttttgtatgattattaaactcttttcaatttggtctttcttttataataaccacaattttcttattttattaatttctaagttgcatttgttgcaaagtatattattaaatacttataattaaata

SEQ ID NO: 2074 - DNA, 248 bp, Glycine max
  Clone ID: 700963809H1
cttcgcaacacaacaaaaaaagacaacccagagagcgcgtcttaataaacgctcttctctgaaaacccccatttcttttcttctttcttcttctctttcgcttcttcgatcttcgatcttcgtcgctgaaaatgagagagtgcatttcaatccacatcggccaggccgggattcaggttggaaacgcctgctgggagctttactgcctcgaacacggcattcagcctgatgggcagatgccaagtgac

SEQ ID NO: 2075 - DNA, 245 bp, Glycine max
  Clone ID: 700963811H1
gttcaagctttgcttgcaactaagctaattgacgaaattggccattcacttgcaaaagggcatgatttcatcaagaagtctcaggtgagagacaacccttcaggagattttaagagtatgtatcgtcatattactaaagggtcttggacattctcagatcaagaccatggatggcaagtttctgattgcactgcagaaggtttaaagtgttgtcttcttctatcaaagttgtcaccagagattgt

SEQ ID NO: 2076 - DNA, 248 bp, Glycine max
  Clone ID: 700963822H1
atttcatactctattatcggccttcgtttcgttcgttagtttctcagtcgtttgttctgagatcaaccttgcatcagggttagggaatggctgctatcttagctcggaaatcactccttgctcttcgtgcgcgccaattggctgtaagcggtcaagggctgcacagctcccaaaactatggccttcgattaagtgcacactcctactctaccaaaagagaggatgaagaaagggagcaactcgcaaag

SEQ ID NO: 2077 - DNA, 246 bp, Glycine max
  Clone ID: 700963823H1
gcacacgccttgttctttgcaccggaagcactcacttgtatatgtggaccccatctggcgcctattgtgttcatgttcctctatcgcaatttactataacagacctgaaatggaattctgatggcagttgtctacttcttaaggacaaggagtcattctgctgtgcagctgtacccttgttgccagaatctagtgagtacagctcagatgattgatgatcacgagggaatgaaacaaaatgatggt

SEQ ID NO: 2078 - DNA, 245 bp, Glycine max
  Clone ID: 700963828H1
agttgccaaactatttttctctctcctttttttgacttttctttctttctgcaactccaaaatgtcttccataggggcaaaaaatctagcactctcctcagcctttttgctccttttggtcggttttgcaacctcagacatcaaccaagacaaagcagaatgtaccgacaaacttcttggtctagctggttgtcttccctatgttggtggtgaagccaaagtccccgccatggattgttgctctg

SEQ ID NO: 2079 - DNA, 247 bp, Glycine max
  Clone ID: 700963829H1
aaagggattcatcgttcttcttcccaggttatttagaaaagcaaaatggtgaagatttgctgcattggtgctggatatgtggggggtcctactatggcagtcattgcacttaagtgcccatccattgaagtcgctgttgttgatatctctaaatcccgcattgcagcctggaacagcgaccagcttcctatctatgaacctggccttgatggtgttgtgaagcaatgccgtggcaagaacctcttct

SEQ ID NO: 2080 - DNA, 251 bp, Glycine max
  Clone ID: 700963831H1
gcgtttttcctccatttccttcttcgctagattacccagatctacgacgagtctctgctatgaattaattctcatatctcaaaatcattcaccgttttcatttcattctaactaatctttccagaaccctcgaatctcttctttcgaacgtgcaaagatttttgacttgaccgaatgctgttgcggttgaaatcggtgtgagaaatagggtttcgacgatgccttcgcttccctttggactccttctacgc

SEQ ID NO: 2081 - DNA, 252 bp, Glycine max
  Clone ID: 700963836H1
ttaactttcccctttgaaatcctttctcagttctgcgccaactgaaacgcagatcgaactccgccgtagccatcatcaccgatcgaacttcgcaagacagagatcagattctgattccgacacagtaacagtatgagcgtcatcgacattctaacccgagtcgattccatttgcaagaagtacgacaaatacgacgtcgataagcaccgcgatgctaatgtctctggcgacgatgcctttgccagactctac

SEQ ID NO: 2082 - DNA, 243 bp, Glycine max
  Clone ID: 700963843H1
gccatgtgttcaatgggttgatgacaaccttaagcaaagcaaagaagattgttttgctcattcaatggaatacgatattgagactaatcaagttcgagcactcacggtaaagacagatccatggtgctcatgtggaggacttacacctgatggtaccctagttgttgctggtggttttgcagacggagggaaaacctccagatactatggcggtcaacctgattgccaagactgtgactggag

SEQ ID NO: 2083 - DNA, 250 bp, Glycine max
  Clone ID: 700963847H1
tctgcctgcagtctccaacaaaacagagtctataagattcattcatcacataaccgcaaaaccttcgctcgcgttcacaacacaaaccctagaagccaacgtttttcagggttgttagagcacgatggttcagtataattttaagaagatcactgtggtgccaaatgggaaggatgtcgtcgacatcatcctctctcgcacccagcgtcagacaccaaccgttgtgcacaaaggatatgctatttcacgg

SEQ ID NO: 2084 - DNA, 242 bp, Glycine max
  Clone ID: 700963859H1
ggttgatccatgataattcttctgggtaaactttcaatattgagggagtaaagcacttgttaattacttgctgatctctctcttttctcactcttggacacacgcacacagaggtcaggattgtggaatgtgaacgctgtaatacttgatcttaccacagttagtaagttctcatgacatacgagattcactaatcttttttgatacatgaagggcccaaagggctgagattcactagtcta

SEQ ID NO: 2085 - DNA, 246 bp, Glycine max
  Clone ID: 700963861H1
cagcgggataaagtgtatcccgaaggaatacgtgaggcctcaagaagagctcaagagcatagggaacgtgtttgaggaggaaaagaaggaagggctacaggttccgacaattgacttgagagagatagattcggaggacgaggttgttcgagggaaatgtcgtgagaagctgaagaaagcggcggaggagtggggtgtgatgcacttggtgaaccatgggatccccgatgagctgatagagcgggt

SEQ ID NO: 2086 - DNA, 251 bp, Glycine max
  Clone ID: 700963865H1
gaacctaccctcaaatacccggtggagatccacggtgttatcctagcaccggttccgcagttttgcttcctcttcgagaacctaatgtggaggctgaggttctgatttgtggtggagccccgagaggggcttttcggaatactctctcgggtaagtttgttggagcgttgagaacttgcgctcggattaaaataaccgacccgaaagcgaattgggtgatggaaaccatgccgggtgcgagagttatgagt

SEQ ID NO: 2087 - DNA, 250 bp, Glycine max
  Clone ID: 700963867H1
gtttggtgtgagtgaatagggatcagggatgtggaggctgaagatagcagatggaggaaatgatccatacatattcagcacaaacaatttcgttgggaggcagacatgggagtttgatcctgaagcaggcagtccagaggaacgggcccaggttgaagcagctcgtcagcatttctaccacaaccgcttcaaggtcaagccctgcgctgacctcctttggcgttttcaggttctcagagaaaataacttc

SEQ ID NO: 2088 - DNA, 240 bp, Glycine max
  Clone ID: 700963874H1
accacattcaaatccaaatggccctttacattacactaataattggcctcctagtaaacaccctagtactctataaatagcatttgcatgcaccttagtcttcaccaaaatactcctcttggcatcttgtgttgtgtccctcttttaagctatttccttctcttaacacaattggttgtgccaattgccatagtcaccaaccaattaacaaaggtatatatatcatcatatcatcaccaa

SEQ ID NO: 2089 - DNA, 250 bp, Glycine max
  unsure (1)..(250): unsure at all n locations
  Clone ID: 700963882H1
cttcaaggttcaagtataagancccaaaggggcatagatcagctattagaatctcacgcatagtgtctgagacacttaggcttgggatggaggatgtgaggtggtttgtgatgggggatgatgacacggtttttgtggcagaaaatttggtgaaagtgttgcaaaaatatgaccacaatcagttttattacattgggagttcctcggagagtcacttgcaaaacatttatttttcttataatatggctng

SEQ ID NO: 2090 - DNA, 243 bp, Glycine max
  Clone ID: 700963887H1
ctctgtctcagccaacaacacaacaatcaatgtacgctgcatcaaccatgaaatccatgtacaagcctccattgcccagatctccaattcgccttcgaccctctcatgctgttcattcatcaaactctatcgctcttcaaaccccaccaggttccttgaccaaatctcagaaacctgttatctctccaaacatgcgacccgaataccgcaccatttcgtgcgaattacgggctctgaccaaga

SEQ ID NO: 2091 - DNA, 241 bp, Glycine max
  Clone ID: 700963890H1
gagagatttgatagcctcaactcaagtaagggttttctctttgagaaaatcgtatcttacaccttttggtgaccactttgagtgagagaagagaaattaagagagatactcaaattagattcaagagagatggccatcaaccatgaaacttgggctttcattttcggtcttctaggcaacgtgatctcctttatggtgttcctcgctccattaccaactttttaccaaatctacaagaaaa

SEQ ID NO: 2092 - DNA, 250 bp, Glycine max
  Clone ID: 700963896H1
cgatcaaacacaaaatggaaaagaatgtggggattctcgccattgacatctacttccctcccgcttgcgttcagcaggaagcattggagactcatgatggtgccagtaaagggaagtataccattggacttggccaagactgcatgtcattctgtaccgaagtagaagatgtcatctcaatgagtttgacagtggttacttctcttcttgagaagtatgggattgatcctaaacaaatcggtcgtctgga

SEQ ID NO: 2093 - DNA, 249 bp, Glycine max
  unsure (1)..(249): unsure at all n locations
  Clone ID: 700963920H1
cttctctttacacncccctcnctattttgcgttcattctgttttccagttgaagtctttccntagccaatggncactnattgnttgacccgggttcacagtgtccgtgagaggcttgatganaccctcactgncaacaggnacgaaattttggcccttctgtcaaggatcgaagctaagggcaaggggatcctgcaacaccaccaggtcatgctgagtttgaggaaatccctgaggagancatncnaaa

SEQ ID NO: 2094 - DNA, 258 bp, Glycine max
  Clone ID: 700963928H1
ccagagccaaggtaggttaaacactcttcttcatcgtcgtcgcaatgggacgtgtgatccgtgcgcacgtaagggagcaggctcggtcttcaagtcccacacgcaccaccgcaagggccctgcccgcttccggagcctggatttcggagagcgcaacggctacctgaagggtgtcgtcactgacgtcatccacgatcctggccgtggcgcgcctctcgctaaggtcgccttccgccacccgttccgctacaagaagca

SEQ ID NO: 2095 - DNA, 266 bp, Glycine max
  Clone ID: 700963930H1
ccttgctaccaacactgagcttaaccgagcttcgcaaagatgaatcgggaaaagttaatgaagatggccggttcggttagaactggaggaaagggtactgtgagaagaaagaagaaggctgtccacaagacaacaaccacagatgacaaaaggcttcagagcaccctgaagagaataggggtgaatgccatccctgctattgaagaggtcaatatctttaaggatgacgtagttatccagtttctaaatcccaaagttcaagcatc

SEQ ID NO: 2096 - DNA, 252 bp, Glycine max
  Clone ID: 700963943H1
gcttggtttggctaggaaaattaccatctccaaggattctaccactgtcattgctgatgctgcgacaaaggatgagttgcaagccagggttgctcagttaaagaaggagctgtctcagacagactcagtatatgatactgagaaactggctgagaggatagctaaactgtctggtggagttgcagtcatcaaggttggtgctgctacagagactgagcttgaggatcggaagctccgaatagaggatgccaa

SEQ ID NO: 2097 - DNA, 248 bp, Glycine max
  Clone ID: 700963951H1
ctggaacttgtctcaggagcaagaacaacccctttggagtgaaggcattaaggcgtactccagcgaaaccccattggaccttcggacgtaagaacaaggtcagcagtgcttaagcagtttaaggaaatgtgaacgtgcagaaggagccaatgatgaagtaaaagggaagacgaaggactaaagcaccagctggatgcacttcccccttcttcacataatgctgcacgtaacataaagatctttaccat

SEQ ID NO: 2098 - DNA, 242 bp, Glycine max
  Clone ID: 700963986H1
caacttctgctacttcctactccaaccgcacttctgctccgcaattatcatgggcaaggtcaagatcggaatcaacggatttggaagaattggccgtttggtagccagagtggctctgcagagagacgatgttgaactcgttgccgttaacgaccctttcatcaccaccgattacatgacatacatgtttaaatacgacagtgttcatggacactggaagcatcacgatgtcaccgttaagg

SEQ ID NO: 2099 - DNA, 243 bp, Glycine max
  Clone ID: 700963987H1
tcttctgctactgctgctcaacccacacaccaccctgggagcgcagaacctcatgctaccctaccataacggcgccctcctcaaaggaaccattaccgttaacctcttatggtacggcagcttcaccccaatccaacgctccataatcctcgacttcattaactcgttaagttccaccgcgggggccccacttccctccgtagcatcgtggtggaagaccacggacaagtacagggggggatc

SEQ ID NO: 2100 - DNA, 252 bp, Glycine max
  Clone ID: 700963993H1
gattactggtacctcccaggctgattgtgctgtccttatcattgactccaccactggtggttttgaagctggtatttctaaggatggacagactcgtgagcatgctcttcttgctttcacccttggtgtgaagcagatgatctgctgctgtaacaagatggatgccactaccccgaagtactctaaggctaggtatgatgaaattgtgaaggaagtctcttcctacttgaagaaggttggttacaacccaga

SEQ ID NO: 2101 - DNA, 269 bp, Glycine max
  Clone ID: 700964007H1
atttctccatttccattttctctctcacttttcaagaatcgtaagctatgggaaagtcttacccaactgtgagtgctgattaccagaaggccgttgagaaggcgaagaagaagctcagaggcttcatcgctgagaagagatgcgctcctctaatgctccgtttggcatggcactctgctggaacctttgacaagggcacgaagaccggtggacccttcggaaccatcaagcaccctgccgaactggctcacagcgctaacaacggtctt

SEQ ID NO: 2102 - DNA, 269 bp, Glycine max
  Clone ID: 700964009H1
gtgaagtatatccctagggaaaaataatttcttcacatttacaatgaagcaatccactctattcctgttcctattcctattccccctcgttcatgctctttcttacgaagctgcttatattagagatggcctcaaatcctattcccagcttgatctccctcactccgtttttggttctgaaagtgtagccttcgattgccatgggaaaggaccatatgttggagtgtctgatggtagaattctcaagtggcaagagacaaagagagagt

SEQ ID NO: 2103 - DNA, 268 bp, Glycine max
  Clone ID: 700964012H1
gttagactttgatagtttgattagctctaataaggttaaggaccagagaaagagagaaagaaacagaatttggaagaaaaaaagcacaagatgggttattggaagtctaaggttcttcccaagatcaagaaggtttttgagaagaatagcaccaagaaagctgctgctgctgaggccaccaagtcctttgatgagtcaaaggaggaatacaacaaagcctttgaagaaaagaagactgaacttcaaactaaagtagttgaaatatacg

SEQ ID NO: 2104 - DNA, 267 bp, Glycine max
  Clone ID: 700964023H1
attgaattctccagagagaagaagaaacttaatcgatcatcacttcacttcactaatacatcatggcagacgagacccagaacaagtatgagagctctgaggttgaggtccaggatcgtggtgtttttgactttctcggtaagaaaaaggatgaagaagacaagcctcatcctcaggaggaggtcatcgccaccgagtttcaaaaagtcactgtctcagaccaaggagagaacaagcacagcctcttagaaaagcttcaccgatctg

SEQ ID NO: 2105 - DNA, 267 bp, Glycine max
  unsure (1)..(267): unsure at all n locations
  Clone ID: 700964029H1
attctctcacacaaaataatngacaagaagcttgggcaacacgtctcatgatcctgaagtgagaaaggggccatggacaatggaagaagacttaatcttgatcacctatattgccaatcacggggaaggggtttggaactctttggccaaggctgctggacttaaacgtaccggaaagagttgccggctccggtggctaaactacctccgtcctgatgttagaagagggaatattacacccgaggaacagcttttgatcatggaatt

SEQ ID NO: 2106 - DNA, 263 bp, Glycine max
  Clone ID: 700964040H1
cggaaataaaaaaatcccaaagaaattcaatcttcttcatccccaaaccaaagacttgagatctcagattacaccctttcttcctttgttttctcattcctgtcctttctcagacaacaccatctctctctctcttgttccctttttagggtttttgtaatgggtctcggtaacgacgaagaagaggataacaataacaatgataaggttgtggatgacggagatgttggaggaggaaagtctttcggttcagtgtcgtgttc

SEQ ID NO: 2107 - DNA, 263 bp, Glycine max
  Clone ID: 700964041H1
gtttctccctttctctctgtctctctctcgctcttcttctcatccagcaccgagtcacagactcaccgatcttccgattccctttcgtcttggtttatgagctcgaaggagagacccactcttggtggcacgcggattaagacccgcaaacggaatattgctgcgccgctggaccctgcagcattctcggatgcagtggtccagatttatttggataatgctggtgatctggaacttattgctaagagcattgaatcttcaga

SEQ ID NO: 2108 - DNA, 271 bp, Glycine max
  Clone ID: 700964048H1
tctctctctgattcgatcgatttcgattgttgaattcatcacatcacggagccttgtacgttgacaacgatggtgctgccgctatttactgctttcattctctttgcttttattccgaatggattgttagcagttccttccaccgtcccggcattcctttggtcatcacattatgaactggcctctgaaaatatattgaaggaatctgtaaattaccaagtcatttctccgaaggatctagcaaaatctattttatctgaagcaggctggt

SEQ ID NO: 2109 - DNA, 262 bp, Glycine max
  Clone ID: 700964051H1
ggttgacaatgaacatgggagttaaaaaattgcaggagaaggtgaagaaataaagtgcatctttgaagaaaattgaagaaagaaagagtcattgtgcgatttgttattggataatcatgtggaaacaaatggtgcattccaaggaaaggcaaaattgctctttgctcatgctggagacaaatgggatgctgagttttatgcaaaagtcaatgatgatgtctatgtaaatattggttagtttttctttgacttaaaccctgca

SEQ ID NO: 2110 - DNA, 260 bp, Glycine max
  Clone ID: 700964052H1
gctctctcactcacaaacgcacactgaattcaaaaacatcgaaagagagaggcatggccgagcaaaccttcatcatgatcaagccagatggcgttcaaagaggccttattggcgagattattagcagatttgagaggaagggtttttacttgaaagggttgaaactcgttactgtggaccgtccttttgctgagaagcactatgctgatttgtctgcaaagcctttctttagtggtttggtggattacattgtctctggc

SEQ ID NO: 2111 - DNA, 261 bp, Glycine max
  Clone ID: 700964056H1
cccgaagcagccatggggatcgatctcaaggccggaggtaagagcaaaaagaccaaaagaacagcacccaagtccaatgatatctatctcaagctcttggtcaagctttatcgcttccttgttcggagaactggcagcaacttcaatgctgttatacttaagagattgttcatgagcaaggttaacaaacccccattgtctttgtcaaggttgattaagtatacgaaggggaaggaagataagattgcagtggtggtgggg

SEQ ID NO: 2112 - DNA, 261 bp, Glycine max
  Clone ID: 700964058H1
gtggaacgcctgtctgctctaagaactcgtatagttgtaatggctggccaagaaggtcctacaattacaagaacaaaaaggaaaagtgccacccaacatggaggttcaacactggctgatcttcagcaggctcttgaagactacttgcttgtacttttgggattagttgaaaatggaagccatttacaatacaaagtacaatttgcttgggtgaatcaagaggatgaagcagaggaaacaaccatgtctaatgcttggtat

SEQ ID NO: 2113 - DNA, 261 bp, Glycine max
  Clone ID: 700964059H1
agcactcatccacacattctccgtcgccacgacaacaatggctccaaagaaaggtgcgaaaggtggagttgtagcagcaaagaagaaggttcaggagaaggtaacgaaccctttgttcgagaagcgtccgaagcagttcgggatcggaggcgcgctgccgccgaagcgggacctgacgcgcttcgtgaagtggccgaagaacgtccaaatccaacgcaagaagcgcatcctcaagcagaggctcaaggtccctccggctct

SEQ ID NO: 2114 - DNA, 266 bp, Glycine max
  Clone ID: 700964062H1
aaagaatgcttgtccctggcagttgataatcttcctgttcttgatgggaagactccagtccaagtgtaccagagtttctgtgagagcttcaagtcttcattctctccattcatgggctctacgatcatgagcatttccatgggtttaggaccggatggtgagctacgttatccatctcacccccagctgccgagtaatggaaaaactcaaggtgctggggaattccagtgttatgaccaaaacatgctcagctttctcaagcaaca

SEQ ID NO: 2115 - DNA, 261 bp, Glycine max
  unsure (1)..(261): unsure at all n locations
  Clone ID: 700964067H1
atcgcaggcaaaatctgttacgagaaatagttggttaccgtgcagatattattnngtcttcaggaggttcaaagtgatcattatgaagaatttttttctcctgaactggacaaacatggttattatggtctttacaaaaagaaaacaaatgaggtatacaatggaaacattaatacaattgatgggtgtgcaacatttttccgtagagacagattttcacatgtgaaaaaatatgaggttgaatttaataaggctgcacag

SEQ ID NO: 2116 - DNA, 259 bp, Glycine max
  Clone ID: 700964071H1
caaacaacagagtttatttctttttggttccttggttcacgctggctgcaaggcttgtgtttggtgggagcagcttctcaccgtgacgctgctctacgaagacgacgacaacctcgtgtgacaacatcaaataatgggaaaaggaaacatggaactcgagacaaacaaggtctatgactacgaggatgcacgaggggacgttgaagtcccagataccgctcatcagataagcactgattcatggtttcaagtggctttt

SEQ ID NO: 2117 - DNA, 259 bp, Glycine max
  Clone ID: 700964072H1
cacaaacccgtccctcacactctccaaaccctagcggcactacacactagttctatcgctatctccccaagatgtcgagcgccgatcccgagcacagagaagaggaggaggcacccgccgttggcgacgacgaggacaccggagctcacgtcgctccaatcgtcaagctcgaggaggttgctgtcaccaccggcgaggaggacgaagatgcaatcctggatctcaaatcgaagctttaccggttcgacaaggacgggaa

SEQ ID NO: 2118 - DNA, 259 bp, Glycine max
  Clone ID: 700964076H1
gagcgagagaacaagaacataagggaaccacagcggcggtaacagaagaacaagcagagaatgggtcgagtgagaacgaagacggtgaagaaatcctctcggcaggtgatagagcgtcactactcgcgcatgaccctggacttccacacgaacaagaagcttctggaggaagtggcgataatcccgtcgaagaggctaaggaacaagatcgcggggttctcgacgcacctgatgaagcgcatccagaagggccctgtgc

SEQ ID NO: 2119 - DNA, 267 bp, Glycine max
  Clone ID: 700964080H1
gtctgtttacatatatgacctggtgagtggtgcacaagttgcaaaacttgatcatcatgaggcacctgtaagagattgtagttggcacccctattatccaatgatgatcacttcggcttgggatggtgatgttgttaggtgggaatttcctgggagtgatgaagcccctgcttctccaaataaaagagaaggtcgaattcataggagaaatttgctttatctatagttcatgctctttgtacatatgtgtctggatccatactatat

SEQ ID NO: 2120 - DNA, 256 bp, Glycine max
  Clone ID: 700964085H1
ctttctctctctctctactccaactccttgatgccaattttagcatcagcgttgttgcctccattcttcttcttctcttaatgggttgcatttactcgcgagtctgcataggcgacaattgcagaggctcaagcatcaacggagaccccattatcgcccgaaacgacgtcgccgaagtcgcgaatttctccccttcctcttcggatgttgaagaaggcgaaatcagagaccaattgaaccaattgagcatcactcg

SEQ ID NO: 2121 - DNA, 256 bp, Glycine max
  Clone ID: 700964086H1
gccgcgaggtggcagacctctccctctcctccgtgcagtccaacatcgagtccctcatcctcaggatcgcccactccatcctctccggccacggcttctctttcgacgtcccttcccgctccgccgccaaccagctctacgtgcccgagctcgaccgcatcgtcctcaaggacaaatcctcccttcgcccgtttgcgaacatctccactgtgcggaaatccgccatcaccgcccgcatcctgcagctcatccacca

SEQ ID NO: 2122 - DNA, 258 bp, Glycine max
  Clone ID: 700964092H1
ctggcctactgagtgggcaaaggcacgggaagcataagggatcaggaaaatcgaaaagatctgtcaaaatgatgagcaccttacgaatgcctgctttaagaatgtcgagtttctccggattacgtactcttaatcctatggattctctgtcgagaccacgccacacttttccgttgaatacaacttctaggcgcgagagggctaaaagatttgtacctaaagctatgtttgagcgtttcacagagaaggcaatcaaag

SEQ ID NO: 2123 - DNA, 256 bp, Glycine max
  Clone ID: 700964118H1
ttcttatcttcatcctacgccaatagcccaaaaccttgttctctttttgtggttcatttctctcttccagatgccacttgccgttcttcaccctcacgattttctcaggaaaaacccatctaaccagtaccagaccataatccctcactctcccaacatgaatcctaataagtctcatcggacttcccgaaaccgtaagaagcggcccgatccaagcccacaaggcgttgtcagcccagcccggctcacattatcc

SEQ ID NO: 2124 - DNA, 248 bp, Glycine max
  unsure (1)..(248): unsure at all n locations
  Clone ID: 700964153H1
gaaccacacagactttatcatcaccagcaccttccaagagattgctggaagcaaggacactgttggacagtatgagagtcacactgccttcacccttccaggactctaccgtgttgttcacggtattgatccctttgatccaaagttcaacntcgtctctcccggtgccgacatgagcatatacttcccatacactgaaactgancgtaggttaacagagttccaccccganattgaaanacttcngt

SEQ ID NO: 2125 - DNA, 247 bp, Glycine max
  Clone ID: 700964178H1
ggcagaattaccggaatttatggcacaccgatctcatgagatccattcaggccgatactccttattgttgcctcgcgttgtggtgtgcaccatgtgtgtcttaccttcttcgcaaacgagctctctatgatgatatgtcaaggtacacatgttgtgctggctacatgccttgcagtggtaggtgtggagaaagtaaatgtcctgaattttgcctttgcactgaggttttcctctgctttggaaattc

SEQ ID NO: 2126 - DNA, 243 bp, Glycine max
  Clone ID: 700964191H1
cttatttttggttttgttggtgtcatgtgctagaggggaagacccttatagattctacacttggaatgttacatatggagacatttatccacttggtgttaaacaacaggggattttgataaactggcaattcccagggccacaaattgaagctgtgaccaatgacaacttgattatcaatgtttacaacagcttggatgaacctttcctcttatcttggaatggagttctgcagaggagaaa

SEQ ID NO: 2127 - DNA, 249 bp, Glycine max
  Clone ID: 700964196H1
cgtaacagaagggcccggaggcggcggcgcggctgccgacggtgacgccgctgtcgaagtgcaagctaaggctgctgaagctggagcgcataaaggactacctcttgatggaggaggagttcgtggcgaaccaggagaggctgaagccgcaggaggagaaggccgaggaagacagatccaaggtcgatgatctccgaggttctcctatgagcgttggtaacctagaggaactcattgacgagagtcatg

SEQ ID NO: 2128 - DNA, 257 bp, Glycine max
  Clone ID: 700964209H1
gcccggcgagaaaatgagagaaatcctccacatccagggcggccaatgcggcaaccagatcggagccaagttctgggaagtaatctgcgacgagcacggcatcgaccacaccggaaagtacagcggcgactccgaactccaattggaacgcatcaatgtctactacaacgaggccagcggcggaaggtacgttcctcgcgccgtcctcatggatctggagcctggcacgatggactcggtcagatccgggcctttcg

SEQ ID NO: 2129 - DNA, 256 bp, Glycine max
  Clone ID: 700964211H1
ctctgctcgtagggtttctccacctagagggaaatggctcccaaaccgcctagtacgggtctgtttgttggactgaacaagggtcacgtcgtcaccaagaaggaattgcctccacgcccctcagatcgtaaggggaaaacaagcaagagggtgcactttgtgaggaacctcataagagaggtagccggttttgcaccctatgaaaagcgtataactgagttgctgaaggttgggaaggataagagggcactgaagg

SEQ ID NO: 2130 - DNA, 256 bp, Glycine max
  Clone ID: 700964212H1
gaacaaacatggtttcttccaacactgccgagctgctgagagaggagattcctgtgaagcaacaacctctgactttgtctgcagacatcataaccggcctcgtactcgtcgatgttgtcaatggcttctgcaccgttggagctggcaatttggcgccgaaagaaccagatgaacgaatttctcagatggtaaaagaatctctgaggctgtccaaagcattctctgagagaaagtggccaatttttgctttccttga

SEQ ID NO: 2131 - DNA, 257 bp, Glycine max
  Clone ID: 700964213H1
ggaaaaaaaaaggactttccggttacatggtccatcgggtcgaatgatttgaatacgagcgaatccaggtaaatttgcctccgtacccagaacggaaccttcgctaagccttcttggtgtttgcgtcaagctcaccgaggaaaaacgacaatattttatttagttgcctgtgtttcgagacgccaaataaacgacattatcactggcaacccgaaacacactcttcatgccgtttcattcgtcacttcgcgcgtctc

SEQ ID NO: 2132 - DNA, 259 bp, Glycine max
  Clone ID: 700964214H1
cttttgccaactcaacttcgaactcaaatcaagcaatcaatttcaaatccaaaaatggggagctccacaaccttctgtgccttcttcctcgtgtgtacgatcttgtccgtccacgtggcgcaatcctcatcctccaccctcgacctggacacctttttcctccctctcaaatccggctgccgcggatccgtcgccgagtgcagcctcctcgccggcgacgacgacaccgagtttctgatggagtcggagagcaaccggc

SEQ ID NO: 2133 - DNA, 262 bp, Glycine max
  Clone ID: 700964217H1
cactcttattgttttcttaaaatttcttccttgccactgccagtgtgtcaccaccatggccaccgtcacaacccaagcctccgccgcgattttccggccatgtgcctcgaaatcgaggtttctgaccggctcttccggtaaactcaaccgggaagtgactatgaggccaatggggtgccctccttctgcctctttcaaggttgaagccaagaagggagagtggttacctggcttggcctccccaacttacctcaatggcact

SEQ ID NO: 2134 - DNA, 255 bp, Glycine max
  Clone ID: 700964220H1
ccccgccaggttcagagacttttccgattcctggaagaagagaagagaaaacctaaatcacagatccatggcggaagaacaccgatgtgaacctcccgaaggtcaccgactctgcgtcaacaactgcggcttcttcggtagcaccgccacgatgaacctctgctccaaatgctacagcgcgatccgtttgaaggagcaagaagaagcgtcgacgaaatccacaatcgaaaccgcgctctcttctgcctcctcggc

SEQ ID NO: 2135 - DNA, 252 bp, Glycine max
  Clone ID: 700964223H1
gcttctagcgatgctgagttgagaggcaatcagtttcatctggaagagagatatggtaataataataggtactcaaaggatgcagttctcactaagggtgaatgcctctgggagggaatgcttcaaccaaatatctctagcactcattcagtcgtaagcatctttaagagtggtgagaaaactgctgctgaagactggcctgggtttcttgagatcaagggaagggtgcgatgtgatgcatttgagaaattt

SEQ ID NO: 2136 - DNA, 253 bp, Glycine max
  Clone ID: 700964236H1
aaaaaaaaaacccttagccaacacaaccatcatggccacctctgctattcagcaatcagcattcactggtcaaactgctctgaagcagctcaatgagttcgtccgcaagaccggtggcgccggcaaaggtcgcactaacatgcgccgcaccgtcaagagtgctcctcagagcatttggtatggccctgaccgtcccaagtacttgggtccattctcggagcagattccatcatacctgaccggagaattccct

SEQ ID NO: 2137 - DNA, 257 bp, Glycine max
  Clone ID: 700964245H1
tggcaaattagctactgatttcactgctgacacattgggtttcaagacctatgctccagcatatcttagcccacatgcatcagggaaaaacctccttattggagcaaactttgcttcagctgcatctggttatgatgaaaatgctgctactttgaatcacgcgattccgttgtcccaacagttgagttatttcaaggaataccaaggcaagctggccaaggtagctggcagtaaaaaagcagcctcaatcatcaagg

SEQ ID NO: 2138 - DNA, 254 bp, Glycine max
  Clone ID: 700964256H1
cgcaaaagtatttactcttctccaggaggtaccctgttcctctgtatcttcagcaaatgagagttcaataacaatgtctgtgccactgggaaatccatgtgccttcaaggagattacaccttccgtgaaagaggtaatagcacgagatgaaaaaactgaatcttttgtcactgttgaacctgaaaatgggaagttggagatcaatgatggaaaacagactaatggcactagtaaagactccaggttagaggatt

SEQ ID NO: 2139 - DNA, 254 bp, Glycine max
  Clone ID: 700964259H1
gcggctatgaagaaccatccagataagggaggagatcctgaaaagtttaaggagttaggtcaagcatatgaagttttaagtgatcctgagaagaaagaactgtatgaccagtatggtgaagatgcccttaaagaagggatggggggaggaggctcgtttcataatccatttgatatatttgaatcattttttggaggagcaagctttggtggtggtggtagttcccgaggtagaagacagaagcatggtgaaga

SEQ ID NO: 2140 - DNA, 251 bp, Glycine max
  Clone ID: 700964267H1
tgatagcttaagtggcagcagtagttgtttgagcaatcgacaagatgaagtgggagatgaatgttggggtcttaccgagtttgattctggcacatctgtcaattactcttttagtaatttctcctttaagaatctctcccagcttgcatcaatcaactatgatctcaccaagggatggaaagatgacccgccaacgaattctagtgcatagctgtatgtattaacctatgtcaaagtccagaatttggttt

SEQ ID NO: 2141 - DNA, 250 bp, Glycine max
  Clone ID: 700964270H1
atccatcaccctttctttcattctgttgggaaatggaagtcacactttcagcgtgcaagtccattagctcgccttctgttcccgtcgcagctttatttgcggggaaagcaggaactaagagttcgcaatgcagttttttagctggagcaaacaaagtgaggtttcctaggcaagtcggtcaagttagccacgttcgcaaacagcgccaaacgcgtcactgtggtgctctccacgcgacttgcagcggtga

SEQ ID NO: 2142 - DNA, 262 bp, Glycine max
  Clone ID: 700964280H1
caaccttgatccatcaggtagagcagcacttggagtgcatgcatcagcttatggaaaccaggtcaaagctgtagaaccagagaagatcatacccaagatggaagtttctccactaggagttgccatatagagcttgtatgagccatagcaaggactagtagttgccctagaaccagcatataatattattatactagtcatcataaaatgaaaattttgcttgctttgtagtttatccagggaatggtatataaatagataa

SEQ ID NO: 2143 - DNA, 252 bp, Glycine max
  Clone ID: 700964282H1
ggtgacaagagcttccattcaattgcactaaatatctaggagtagtaaatgttattcagtttaatatgaattctcatgatgttttgaaaactctggtcttgcagtttgttgcttcgtcgggagtgttgttcctttagcaatggagaatatttgaaggcaggtttacatgagttggaacaatggtgtcttaaagcaacagaccagtttgctgggtcatcttgggctgaactcaaacacatacgccaagctgtg

SEQ ID NO: 2144 - DNA, 248 bp, Glycine max
  Clone ID: 700964285H1
ggcatggtgtgcactgctagggttgtgtccaaggctgtgatcactgggtacaaagatgggttcaaccagattaagtccttggttgatgttggaggtggcattggagggtctctttctgagattgttagggcttatcctcacatcaatgccatcaactttgacttgcctcatgtggttgccactgctcctaagtatgatggaatcacccatgttggaggtgacatgttcgtgtccattccagatgctga

SEQ ID NO: 2145 - DNA, 248 bp, Glycine max
  Clone ID: 700964286H1
gcctcgccgactcggttgctatcagcgagtgagagtgagtgagtggttctcttgcagcaacaaggtttagtgacaccaaacagacgggaaatgggtcgtggggtcagtgctggtggtggacagagttccttggattatctctttggcagtggggtacctgccagcagtgcaaatggtgctcgcactcaaaatgcaagtgctccttcaccaccggttgataagcaaagtccagcaccagcaccagcacc

SEQ ID NO: 2146 - DNA, 234 bp, Glycine max
  unsure (1)..(234): unsure at all n locations
  Clone ID: 700964291H1
cctcttctaacttctccatttcacacaggaagaagatcagancacatttagaacaaaaaagagagtttgagaaatggggaggggtaagattgagatcaagaggatagagaactcaagcaacaggcaagttacatactcaaagagaaagaatgggatcctaaagaaggccaaggaaatcactgttctatgtgatgctcaagtttcgcttatcatctttgctgcatctggaaagat

SEQ ID NO: 2147 - DNA, 258 bp, Glycine max
  Clone ID: 700964294H1
taaaaataaaagtaaaatagagggagaaatgagaagtgtgaagatggtaaaatgatctcaaactcggaccccgtagaaccagtcacggcaaccgccactgccggcgccgacgacgccaccgtctcaacaaccgcctcttcttccaatgaagatcagcctgcaccgccggcggcaccaaacattgtgatgtcctccaaggatcacgattctctcttcagcggtggcggcatcagctttctctctggaagccgaaatgga

SEQ ID NO: 2148 - DNA, 259 bp, Glycine max
  unsure (1)..(259): unsure at all n locations
  Clone ID: 700964295H1
gangggttgcttctggacgtgatgcagntgctgagggaggtgaggatagaagttataggggtgcagtcgtcgcttaacaatggggtgttcgtggcggagttgagggctaaggtgaaggaacatgcaaacggcaagaaggtcagcattgtggaagtgaagagggcacttaaccaaattataccccatgctgttgactaaagagggggtgcatgcttgaattttcagggcttgactttatggatgaatattccaagtagaa

SEQ ID NO: 2149 - DNA, 261 bp, Glycine max
  Clone ID: 700964321H1
cgacttttcttggtctctacttcgcatttccgttctttgcttttctcgggctacgaaaaacgacgtcgttttcccaattttccccggcgaccgggaaatggtggagccggtggagcttcgcggcgaggagcagctctcgttgctgtcagattccagcaatggtgaccggtcgtggcggttgaacttcgacgggtttcagctatcttcggagcacacggagaagcaagtgaaaccccctcgcggactccatgactgttatgg

SEQ ID NO: 2150 - DNA, 264 bp, Glycine max
  Clone ID: 700964330H1
cttacacttacccacagggaggcgaacagagaaactcagagacccgaaggcagatttcaagatgaagttcaacattgcgaatcccaccaccggttgtcagaagaagctggagatcgatgatgacctgaagctgcgagcattttgggacaagaggatctcacaagaggttgttggtgatgctctgggtgaggaattcaaaggttatgtcttcaaaattactggaggttgcgacaagcaaggatttccaatgaagcaaggagtgtt

SEQ ID NO: 2151 - DNA, 256 bp, Glycine max
  Clone ID: 700964340H1
gtcccgcctttgtaaatacaattgggacactactaggattgggaagaagggtctttacatttttagtttggcaaatagatattgcaactacctttgtataaatctatttctgaagaagcaattacaactttcaagggatgatagcattttgtggcataaggattaaggaggcataaaggaccaattgctttggaatattcactcatgacaaggcacaaggtcatgcgtgtatgccaacacatagtaatgatgtgtg

SEQ ID NO: 2152 - DNA, 259 bp, Glycine max
  Clone ID: 700964351H1
gtactgcgtttcggaagcagacacagatggctcgtacgaagcaaaccgctcgtaagtccacaggaggaaaggctcctaggaagcagcttgcaaccaaggctgcacgtaagtctgcaccaactactggtggtgtgaagaagccccaccgttatcgtcctggtaccgttgctcttcgtgagattaggaaataccagaagagtaccgagcttttgatccggaagctccccttccagaggctggttcgtgaaattgctcagga

SEQ ID NO: 2153 - DNA, 255 bp, Glycine max
  Clone ID: 700964353H1
ggtgtgtcctgttccgttcctaaaagactatcccttttacaaactgaagtgaatcggaggatctgttctgttccataagatggctggacttttgggatataggagccttccacctaaggcaaagaatttggtagttgctgggggtttgacagcttttgtctttggtgcctacttctacaccatgagggctgttggaggcactgatgaactgcaggtagcaattgataagtttgaagctgacaagaacaagaatgc

SEQ ID NO: 2154 - DNA, 254 bp, Glycine max
  Clone ID: 700964404H1
ctcctcactccatctcagtctcatcactctccaaccacaatggctgtcttgggcggcgccgcctccgctcgcatcattccctccgtctcactctccacctcttctcgctccttcttctccttatcatcctcttccaaactcaaatgcttgcgctcctctcctcgcatttcgcacctctttctcaatcagcaaagagcggaggttcgcgtttcgagtggaggatacggaacggtatcggcgccgaagtccgttgc

SEQ ID NO: 2155 - DNA, 252 bp, Glycine max
  Clone ID: 700964408H1
ctatcttgcctctcttcttctgctactgctgctcaacccacacaccaccctgggagcgcagaacctcatgctaccctaccataacggcgccctcctcaaaggaaccattaccgttaacctcttatggtacggcagcttcaccccaatccaacgctccataatcctcgacttcattaactcgttaagttccaccgcgggggccccacttccctccgtagcatcgtggtggaagaccacggacaagtacagggg

SEQ ID NO: 2156 - DNA, 247 bp, Glycine max
  Clone ID: 700964412H1
gttcaggggttgggcctggtgaacccgaagaaggtgttcacgttttacgaccaattacacagttatctggcgtccgcgggtgtcgacggcgttaaggtggacgtgcaatgcatcttagagactctgggtgcaggactcggtggaagggtggaactcacgaggaattaccatcaggcccttgacgcttcgatttctagaaacttccctgacaatgggtgcatcgcctgcatgagccacaacacggacg

SEQ ID NO: 2157 - DNA, 254 bp, Glycine max
  Clone ID: 700964415H1
attcattcaagattcagcaagtgcgttttggaagcagagaccgaaatacttcgagatggcccgtacaaagcaaactgctcgtaagtcaactggaggaaaagctcccaggaagcagcttgcaaccaaggctgcacgtaagtctgcaccaacaactggtggtgtgaagaagcctcatcgttatcgccctggaactgttgctcttcgtgagattaggaaataccagaagagcactgagctcctaatcaggaagcttc

SEQ ID NO: 2158 - DNA, 247 bp, Glycine max
  Clone ID: 700964428H1
ggtgggccatgctcgccactctcggagctctcactgttgagtggctcactggtgttacatggcaagacgccggaaaggtggagctagtagaagggtcatcataccttgggcaaccacttccattctcaatcaccacactgatctggatcgaggtactcgtaattggctacatagagttccagaggaatgcagagctcgacccagagaagaggttgtacccaggtggcagttacttcgacccattggg

SEQ ID NO: 2159 - DNA, 145 bp, Glycine max
  Clone ID: 700964433H1
gtccccggaaagtgagcgtcaaagaacgaaatgacttttgagagtttttagatttgtgtttggtgaagtacttcagataatgtgaattatcttgtgtatccgaatccaacttaatgttacttgctttttacaaaactcaagtgtc

SEQ ID NO: 2160 - DNA, 246 bp, Glycine max
  Clone ID: 700964439H1
gtcaagctcgtggacttacatggttcattcctaacgatgacccaactctgatctccaaacaacaactctttgcaagaattgttggaggactaggtgggagggctgcagaagaaattattttcggtgagcctgaagttacaactggagcagctggtgatttgcagcaaatcaccagtttggcaaaacagatggtgaccacatttggaatgtctgatattggtccttggtcacttatggaaccatcag

SEQ ID NO: 2161 - DNA, 247 bp, Glycine max
  Clone ID: 700964452H1
cacaacattcgtcattcaccgccttgtcttgtcttcttctgtctccgaatcacggaatctctctgaatcgcgggattaagagaggaatatgcaacagaggctaaagttgcagcaacaacaggccctcatgcagcaagctttgcttcaacagcagcagatgtaccaccctggcatgctcgccgctgctatgtctcagatggagcctgttccaagtggaaatgtgcctcctggttttgatacgtctgca

SEQ ID NO: 2162 - DNA, 240 bp, Glycine max
  Clone ID: 700964458H1
atcctggtgaggtaaacagaattagggaattgccacaaaattccaagatagtggctacacatacagacagccctgatgtccttgtttgggatgttgaaagtcaacctaatcgccatgctgtccttggagctacaaactctcgtcctgatttgatattgaccggacaccaagataatgcggaatttgctcttgctatgtgcccaactgaaccctatgttctttcaggaggaaaggacaaaa

SEQ ID NO: 2163 - DNA, 243 bp, Glycine max
  Clone ID: 700964470H1
ctcactccttccccatttcaaatcttcgtctccaattcgcgctcacataaaccctaccctcaatttccattcgcaatttttgttgctgctgagcacggaatcggagatgaaagtgaagatcttgcaatggcatgctattgcttcttggacttgggatgcacaggacgaaacgtgtgggatttgtaggatggcctttgatggatgttgtcctgactgtaaacttcctggagacgactgcccgct

SEQ ID NO: 2164 - DNA, 245 bp, Glycine max
  Clone ID: 700964472H1
ctcagacacacactctcactctctctccctcaccttccataatgcagctcctccggccactgctcgcggcggcgctgctcctcctcgccaccctctccgacgcgcacaacatcaccagcatcctcgcaaagcaccccgagctctccaccttcaaccactacctcaccctcacccacctcgcccccgaaatcaacggcaaaaccaccatcaccgtctgcgccgtcgacaacgccgccatgtcggac

SEQ ID NO: 2165 - DNA, 241 bp, Glycine max
  Clone ID: 700964475H1
gaggagtacaagattgatgtattccaaaatgccagggcttgtctgaggttgagggctgcctgcgagaagctgaagaaggtgcttagtgctaatccggaggcccctttgaacattgagtgcttaatggatgagaaggatgtcagaggctttatcaagcgtgatgagtttgagcaactaagtcttccaattttggaacgggtgaagggacctttggagaaggcacttgcagaggcaggtctta

SEQ ID NO: 2166 - DNA, 239 bp, Glycine max
  Clone ID: 700964476H1
acattgacagcggcacctacctgtacttgtattattttggtattcgtataaatgttttcctctttctctcttctcttctaaatctaattcgaatcttcgccagttaatagaaactcaactttgagtagataatactgctggatgtctcgtctctaattattgtatttggaaaatagttttgagttgaggatctaatcattaccagatttaatatacttggcaaatggggtctgaaggtc

SEQ ID NO: 2167 - DNA, 244 bp, Glycine max
  Clone ID: 700964478H1
ggaggaggtcgcagaagattcccagtctcttcagtggaagatgtgtaaaagctttggaaacagttcaagcaaagtccttgatgttcaatttggaatctctcttgctagtttgaaaatggttgctgcatattcagatggtaatgtaagagtttttgagctctcggatcccttggaactgagaaactggcagcttcaggctgaatttcaaaatgttattgagtcagtgtcttcatttggaaaggct

SEQ ID NO: 2168 - DNA, 241 bp, Glycine max
  Clone ID: 700964488H1
gatgtaggagtgatcatttatggaagaaacacatggagaggaaatggggtaaggtgtttggtgatgctgcttataggcaatggaaatggcatgtagcttccaagaacagagaaaaaatctcctccaaccagcacaatcagaaaggaatatttgctttccttcgtggtggttttctccccttcatatggatcaaagcaaaatcagaaaagggcacagagtcaagtagctcattaccagaaga

SEQ ID NO: 2169 - DNA, 238 bp, Glycine max
  Clone ID: 700964490H1
gctcatccctttagggtgaaagaagaatggtgctttcggaggaggaaatcggtcgtctataccgaataaggaagacggtgatgcagatgctgagggacagaaattttctggttggtgacttcgagatcaacatgtccaagcacgagttcaagtccaagtacggcgaacacatgaagcgcgaggacctcgtcatcaacaaatccaagaaggacaactccggcgaccagatctacgtttt

SEQ ID NO: 2170 - DNA, 240 bp, Glycine max
  unsure (1)..(240): unsure at all n locations
  Clone ID: 700964495H1
ggattngaatcggttcnanaatgttttctaatttgttgataatcantaattntcattatggggtcnttgnttgttcnaggtgaanntgatcaaacaataaagnttgtntgtgtttgctttgtattacngagtnaactcatttnngtagtagcacatagtanggctctttgccntnatggtgttgatgtcaaatacttaagaacacaggnnntggnggcatttccaagtntatngcttggg

SEQ ID NO: 2171 - DNA, 247 bp, Glycine max
  Clone ID: 700964502H1
cacttgttgtttgaggttccctggtcagttaaactctgatctgcgaaagcttgcagtgaacctcattcccttcccgcggctccactttttcatggtgggatttgctcctttgacatctcgtggctctcagcaatacagagccttgagtgttccagagctcacccagcaaatgtgggattccaagaacatgatgtgtgctgctgaccctcgacacggccgctacctcactgcctcagccatgtttaga

SEQ ID NO: 2172 - DNA, 237 bp, Glycine max
  unsure (1)..(237): unsure at all n locations
  Clone ID: 700964506H1
tatattcctgatcctgaggntnngnaaccagangggtctgntgtcatcccaaaagngctcccnanaccccgangccaancaagcctgaaggttgggatgntgaggnanctggtgagtgnncaccccctaccnttgccaaccctgagtacagnggcccatggnangcgtgnaaatcnagaaccccaactataaaggaaatggtaggcaccttgatngatnccccagntttcaggatga

SEQ ID NO: 2173 - DNA, 240 bp, Glycine max
  Clone ID: 700964522H1
ggaattatcagtgtcttctctttcatacatcaagaaacaaaagggtgttgaaataatgggaccctcttgctctaatcgatcaatagatgacggcacacttctattgaactacaaacagtgttccttcaataagaaattgatgaatgggtatttttcttttggagcacagggccttgctgttgaagattccaatagctgcgcaaagtcaaacagcagctacaaacgtttaagttccatagt

SEQ ID NO: 2174 - DNA, 241 bp, Glycine max
  Clone ID: 700964535H1
gaagaatagagagtgatggagtgcgtattcggattggtgggtaatggattcgcgatcgtggtggctgattcatcggcggtgcacagcatcctcgtccacaagtccaacgaggacaagatcatgcttctcgattcccacaaactcatcgccgctagcggcgagcccggagacagggttcaattcactgagtacattcagaaaaacgtcgccttgtatcagttccgtaacggcatccctctca

SEQ ID NO: 2175 - DNA, 239 bp, Glycine max
  Clone ID: 700964541H1
cgagatttaaaacccgaaaatctactattggatgaaaatgagaatttgaaggtttctgactttgggttgagtgcacttgctgaatctaagtgccaagatggattgctccatactacatgtggtacccctgcctatgttgctccggaagtgataaacagaaagggctatgatgggattaaagctgatatatggtcatgtggggtaatcttgtatgttctattggctggtcatcttccatt

SEQ ID NO: 2176 - DNA, 251 bp, Glycine max
  Clone ID: 700964548H1
gcacctcagattcatggaaaaagtaatgatcctagtaatactgagtctgctctaaatgcaagttcaactgtgtctcatgctggtgtaaaagtgacaaaagttgatataattattgttgatgttgactcttcagacccaagctcgggattgacatgccctgctccggattttttggatgagtcttttcttgagaccgtaaaggataaactttcagaggatggtctctttgttgtcaatttggtgtcacggtc

SEQ ID NO: 2177 - DNA, 185 bp, Glycine max
  Clone ID: 700964549H1
gaaccttgacggggattgttactttccaaggaatgttgaaggttttcagagaccacctcaaatccatgtgctaacagttactactttactactatattacatgatgatgatgtagacaacaacaactactatgctactacttcctctaatttgttgcaataaaaacccgcttgcaaattgtctcc

SEQ ID NO: 2178 - DNA, 239 bp, Glycine max
  Clone ID: 700964552H1
gcatggactccgccgggtacacctccgacatcaacgaggattccaaaacgacaggtttaatgggcatgaaccgaggatccctctcgttggtaacacaaatgtcgcttccgaaattttcctactgcatctctggggaggacgctctcggtgtcctcctccttggcgacgggacggacgccccgtcgccactgcagtacacccctttagtgacggcgacaacctcgtcgccgtatttcaac

SEQ ID NO: 2179 - DNA, 306 bp, Glycine max
  unsure (1)..(306): unsure at all n locations
  Clone ID: 700964553H1
gtcgtagcngagggtctctttcntttaggtttttgtacaattgctttaatcctancccaagcatgatcgcgctccgtgtcananacgcctngcacatctancatcancncaagctgagagggtctctncgtgctttgatctgctnannagtctnacgnaagntnttccngcaagccagaagnactntcgagngcgtacanngacgcgtgtagagagagtggatagagagangnganngagannaggccaagtgangnaanatccggaattagggnnctngagnggtaaaaatgtgggaattgccaa

SEQ ID NO: 2180 - DNA, 238 bp, Glycine max
  Clone ID: 700964554H1
caaaaacgaagtactactacaagggaagaaaaacttagctactaaggaaggatcaaagagaatggctcaagcaatggcatcaatggctggcttgcgtggttcctctcaggctgtgttggaaggtagccttcaggtgagtggctccacacgcttgaatgtggggagtggaagcagggtggcctcagtcacacgtgcagggttcacagttagagcacaacaacaacaagtgagtggtgag

SEQ ID NO: 2181 - DNA, 244 bp, Glycine max
  Clone ID: 700964561H1
gattgttcctccgaacagtgaaccctcacctaacaatcagaacccaggatttggtgaaacgatgaacagtgataggaaaattggggttgccttggacttttccaaaggaagcaaaatcgctctgaaatgggctattgacaatcttatcagcaacggtgacactctctacatcgtccacaccaagccttccggaggaagtgaatcaggaaatcttctctggtccaccactggttcacctctgatt

SEQ ID NO: 2182 - DNA, 246 bp, Glycine max
  Clone ID: 700964579H1
ggctatcctctttgttcctaagagggcaccttttgacctctttgacacaaggaagaagcctaacaatattaagctttatgtccgccgtgtctttatcatggacaactgtgaggagttgattcctgagtatttgggctttgtcaagggtattgtggattccgaagatctaccactcaacatttcaagagaaatgttgcaacagaacaagatcttgaaggtcatcagaaagaacttggttaagaagtg

SEQ ID NO: 2183 - DNA, 270 bp, Glycine max
  Clone ID: 700964609H1
cttgttctctgattggcctagccagtagtagccaatttgttggagctggttgggaatggcgtcgaaaccgaaatcaaatggaaattccaaatgcaacaaaggattcgctgacagctatatgctgttgaatcctgaagacgctcatttcttcgatcttgttcatgtgctgtattcccgtaacttgggaaaccgaaaatttgtggacagcaatgctgagggatcttatgagggaagcttccgccaaagatggcttatattcgtctctgtggt

SEQ ID NO: 2184 - DNA, 268 bp, Glycine max
  Clone ID: 700964611H1
ttcacctcaataaacaacccttcctctgcttcagtgccctcccctgccttttcagctaactttttcttttaatatcatatcactcatgtcttacttagagtctcaggtctacaaagagagaaagtttgaagaagaatcagaagaggtcactcttgatgggagtgttgatttccatggacgtcctgcaatcagagccaaatctggcagatgggtggctgcaattatcatcctcttgaaccaagctctggcaactcttgcattttttggg

SEQ ID NO: 2185 - DNA, 268 bp, Glycine max
  Clone ID: 700964614H1
ctgctacttcctactccaaccgcacttctgctccgcaattatcatgggcaaggtcaagatcggaatcaacggatttggaagaattggccgtttggtagccagagtggctctgcagagagacgatgttgaactcgttgccgttaacgaccctttcatcaccaccgattacatgacatacatgtttaaatacgacagtgttcatggacactggaagcatcacgatgtcaccgttaaggacgagaagacccttctcttcggtgacaagcca

SEQ ID NO: 2186 - DNA, 265 bp, Glycine max
  Clone ID: 700964627H1
gaaaaaaaggtgaaatatagagtgaagaagaagaaatagagggttttggtgtttgaatcgtgaaaatgttcagaaaccagtacgacacggacgtgacgacatggagcccggcggggaggctgttccaggtggagtacgcgatggaggcggtgaagcagggctcggcggcgatagggctccgatccaagacccacgtggtcctcgcatgcgtcaacaaggctaactccgaactctcatcgcaccagaagaagatcttcaaggtcga

SEQ ID NO: 2187 - DNA, 264 bp, Glycine max
  Clone ID: 700964636H1
ggaacaccccccacgaagcaccaattatggctctgaatctttgtatctcacctaagtttaaatgggttccttccttagatagtgcttcctattctttgagaccttcacttgggtcttgttttggtaacataaacattgctagtgtgagtctaagtactactagaagtttgagtttgaggaggagtgggagtgttagtgtaagatctagtttagaaactgcggggcccacagtcacagtgggacaggtcactgaggttaacaagg

SEQ ID NO: 2188 - DNA, 267 bp, Glycine max
  Clone ID: 700964638H1
aacatagcatagagtgagaagtgagaagagaaaaatggcaatctccatacccagtagacaacttttcatagatggagagtggaaagtccctcttctcaacaatcggtttccgatcatcaaccccgctactgaagacatcatagggcatattccagccgctactaaggaagatgttgaccttgcggtggatgctgctaaaagagccttttcccataacaaaggcaaagattggtcttcagctcctggctctgttcgtgctcgctatct

SEQ ID NO: 2189 - DNA, 266 bp, Glycine max
  Clone ID: 700964641H1
aaaatgttggagtcactacccacaccactcgtgcagctgagagacatgtgaaaggctaattcagaagaatcttgggagaaccacaccacaaaagctaactgatgtagttggcgaacctaaagcgttataaacctcgcattagtgttccatactttcaattgtaaccattatccattttttaatccatgcaagcatccatcgatactttgctagaaaatttgtttgtactttgcaaacacaaaattcactgacagaactgcaagcaa

SEQ ID NO: 2190 - DNA, 263 bp, Glycine max
  Clone ID: 700964642H1
gcagaggcaatggaggttcaaagtctcagctttgagaataacattttgtgggttggctcttttgtggaggctttggtgcttgacactttccttgccactgccaaatctcttgcttgctttgtcatcttgactggatctctccttacggatgtcaataatttagtgtcaccgatggtggatggaaggtttcctttagaccaactgtgcaagggaaaacatacttttgaagaaaacaaggatgctagtgatacagaggatgatga

SEQ ID NO: 2191 - DNA, 262 bp, Glycine max
  Clone ID: 700964643H1
tcggaacaagcaaactagtcaatctgaaggttatgggtttattgagtttaatagtcgtgctggagctgagagaattctccaaacatataatggggctattatgccgaatggggggcagagtttcaggttgaattgggcaacttttagtgccggtgagaggtcgcgtcaagatgattctcctgattacaccatatttgttggtgacttggctgcagatgttactgattatcttcttcaggagacattcagggctcgttacaac

SEQ ID NO: 2192 - DNA, 262 bp, Glycine max
  Clone ID: 700964645H1
ctttagccgaggtcaggaggagcactagctaagttcacaatttcaaaatggctaggggactaaagaagcatttgaaaaggctcaatgctcctaagcattggatgcttgacaaactgggtggtgcatttgcgcctaaaccctcatctggaccacacaaatcgagggagtgcctccccctcattcttattctgcgaaaccggctgaagtatgctctgacataccgtgaagtcattgctattctgatgcagcgccatgttcttgt

SEQ ID NO: 2193 - DNA, 262 bp, Glycine max
  Clone ID: 700964646H1
ccgaagaggctcagaaaaaagggcaacttcgcaactcgtgaatcgattactgtagaaattgtcgtcgattctatataaaacatattaggcactggctaccattttgaattctggttgagggattgaagtgtgattataggtggaggaggatggcttgtaggggatgctgggaatgccttttgaagcttttgaacttcatattgactcttgctggtctggccatggtgggctacgggatttatctgtttgttgaatacaataa

SEQ ID NO: 2194 - DNA, 265 bp, Glycine max
  Clone ID: 700964647H1
ctctgtttctgtctctgtgtttgcggctgaggattccgaacgagcgaccttcttcgtttctcgcaaagtttaagtcatcatgggtaaggaaaagactcacatcaacattgtcgtcattggacatgtcgactctgggaagtcaactaccactggtcatttgatctacaagcttggaggtattgacaagcgtgtgattgagaggttcgagaaggaggctgctgagatgaacaagaggtcattcaagtatgcctgggtgcttgacaag

SEQ ID NO: 2195 - DNA, 262 bp, Glycine max
  Clone ID: 700964662H1
gaagcaatgaatggtgttagacatcttcttgttcggaaatctatcccaaatggactagtttttgttggagaattgccttatggatctaacagtggtttcagcccaaaaatggatcacctggtgtgtttcctacctggtacacttgcaattggtgccactaaaggccttacaaagaaacaggcaatggaaaacaatatgcttaactttgaagacctagaaaatttgaagctagcagaagatctgactaaaacatgctttgaaa

SEQ ID NO: 2196 - DNA, 262 bp, Glycine max
  Clone ID: 700964671H1
cacgagctagccggaaagggagaggaagacttcgaagttgtgctaatatccagcgaccgcgaccaagcatcctttgactcctactacagcaccatgccttggttagccttacctttcggtgacccagaaatcaagaacctcgttagacactacaacgtgcaagggattccctggttggtgatcataggccctgatggtaaaacaataaccgtacatggcaggagtttgataaacttgtaccaagaaaatgcgtaccctttca

SEQ ID NO: 2197 - DNA, 259 bp, Glycine max
  Clone ID: 700964682H1
gccaaatgcttcatggcacaataggaaaatccaaaaagaatataattttttgaggtttcggtggccaagtttgaaccaccattacaaaagcattgaaggagggtgtacatgtaaaaaatgtaatataaaatttgttgtgaaagcgacctctgaaaaatcttttgagtctgaacctcaagcttttgatccaaaaagcattttggactctgtcaagaattccttggatgctttctacaggttttccagacctcacacagtt

SEQ ID NO: 2198 - DNA, 256 bp, Glycine max
  Clone ID: 700964689H1
cttgtgttgtgtccctcttttaagctatttccttctcttaacacaattggttgtgccaattgccatagtcaccaaccaattaacaaaggtatatatatcatcatatcatcaccaaatgaaaaatattgggttgttttttcttgtggtggtggctacttttgtggtggcagccacagctggtagcttttaccaagactttgaaataacgtggggtggtgagcgtgccaaaatctatgagaatggaaaccttctcaca

SEQ ID NO: 2199 - DNA, 256 bp, Glycine max
  Clone ID: 700964692H1
tagtactctcgttaatttttttgctaattgctaattgggcacaatggaaaagcttcatgctgtgtgcatcccatacccagcacaaggccacataaacccaatgctcaagctagcaaaactccttcatgttagaggcttccacatcacctttgttaacacagaatacaaccacaaacgccttctcaaatcaagaggttctgattccctcaatagtgtcccatcatttcaatttgaaaccatccctgatggtctctct

SEQ ID NO: 2200 - DNA, 264 bp, Glycine max
  Clone ID: 700964714H1
ttccaccaaaattcaaaaatctctcggcatggggtgcgtgtcttcgaatttgctgaaccaagacgaagacttcagcacccaacttggctcctccgcactgggccaccacatcgtgtccctcacctccaccacctacggcctcctcaccctcgaccctccttccacgcctccttcccgctttacccttggatctctcttcccctccgaaccagaggtcatcaactcatgggagctcatgtccggcctcgacaccgacagcttccg

SEQ ID NO: 2201 - DNA, 265 bp, Glycine max
  Clone ID: 700964720H1
tgctgttcaaatacagtggtgcctcagctgctctcactgtagacccttcactacacttgtcaagagcttctagcattgtgatgttgattgcatatgttgtctacattgtctttcaactgtggacacacagggagttatttgaagaagaagatgacggtaaagatggcgaggatggttcagaagaacaagctgtgattggattatggagtggcattgcttggttggttggaatgactgtattcattgctgtgttgtctgaatatgt

SEQ ID NO: 2202 - DNA, 260 bp, Glycine max
  Clone ID: 700964727H1
ttcatttctacatccctggctctgttccgtcgatgacgatggcgtttagggtgcgaaaccctgacctccgctttctcattcttctctctctcttgtccatcacttccgccaaggtcttcttcgaggagcgtttcgatgacggatggggaaatcgttgggttaaatcagattggaaaaaagatgagaacctggctggggagtggaaccacacctctggccaatggaatggagacgctaacgacaaaggtattcaaaccagt

SEQ ID NO: 2203 - DNA, 266 bp, Glycine max
  Clone ID: 700964734H1
atttgtcaaagagtagccatcgccccaacgatcccgtttcccttcacttctctacgcaaagccccttgttttgcatagagctacttaaaatgtcggagggaaatgcggagagaggaaagagaattgccattattggtgtctcaaccttattgttggtggcgatggttgtggctgtcacagttggtgtcaatgttagtgagaatggttccaacaatgaggacacaaaaattgcttcttctgtaaaagccgtccaaacccttttccat

SEQ ID NO: 2204 - DNA, 259 bp, Glycine max
  Clone ID: 700964741H1
atagaatcatatacacatatattaaactgaacgaagttgtcctagaagagaagaaccaatggctgctggcgtgggtttccgcagtcacaaatctttgttaataattcttttgggttttcttggcttgttctcctttacagttgaagcagacacaaagaaataccaatttgatattcaagtaaagaatgtgagtagactatgtcatgcaaaacccattgtaacagtaaatgggaggttcccagggtcaacgatttatgtg

SEQ ID NO: 2205 - DNA, 257 bp, Glycine max
  Clone ID: 700964745H1
atcgttcgcaaatgcctcgcccgcaacgaacagcagtgttccttcgttgagcatcgcaactacaaaattgtatatcgtcgctacgcctctttgtttttcctcgttggagttgacgatgatgagaatgagctggctattttggaatttatacatctcttggttgaaaccatggatcgtcattttggcaatgtgtgcgagctagatattatgttccatttagaaaaggcgcattttatgttggaggaaatggtcatgaa

SEQ ID NO: 2206 - DNA, 259 bp, Glycine max
  Clone ID: 700964746H1
gaatcctgtgccctaacccacatcacacttatcgtcgtccgttcaccgtctttcttcgccggcggctgaggcaccgcatccatctattaatctcgagagagcgaaagaaaaagagagaaaaactggggaagcgaaagagaccgaaagcgaaaggtagagtgagggagatggagagttcggggttaggtccagtggattgcgacgttggatcgattgtttgggttcgaagaaggaacggttcgtggtggccgggtcaaat

SEQ ID NO: 2207 - DNA, 261 bp, Glycine max
  Clone ID: 700964747H1
ggtagctgcaagagatgaaaaaattggcctgcaacattttgtgcccataaggccgttgggttgtggagacactggcagtgttcatttggtggagctcaaaggtacgggtgaactatatgcaatgaaggcaatggaaaagtccgtaatgctaaatcgtaataaggttcaccgatcatgcattgagagagagattatatcattattggatcatccttttcttccaacactatacacctcatttcagactcctacacatgtatg

SEQ ID NO: 2208 - DNA, 260 bp, Glycine max
  Clone ID: 700964752H1
gtaaaccctaacaataatggagttgtggaacgtggtgtttgtgtgttgtgttttatgttacagtttttgtcacactgcggaggctatcgttaagctacgaggcaatgaaacaataccagcattgattttgttcggggattcgatagttgacacaggaagtaacaataacctaataacggggcttaagtgcaattttcctccttatgggagggatttcgagggtgggataccaacaggaagattcagcaatggcaaggtcc

SEQ ID NO: 2209 - DNA, 256 bp, Glycine max
  Clone ID: 700964753H1
tgaatttagcgatcctcgggatgctgatgatgctagatatagcttggatggtcgtgatgttgaaggaagtcgtatcattgtggaatttgccaaggggggtcctcgtggttcccgggaaaacttgggtcggggtctacctcctggatctggacgatgctttaactgtggcattgatggtcattgggcccgagattgcaaagctggggattggaagaacaagtgttaccgttgtggggaaagaggtcatatagaaaag

SEQ ID NO: 2210 - DNA, 260 bp, Glycine max
  Clone ID: 700964754H1
cgccaatatgaccaccgacgacgtcgtcagagcttctcgtcttctcgacaacgagattcgcatcctgcaaagaagagttgcagaggaccaatttggagttggaatcgtacaaggacaagatcaaggagaatcaggagaagattaagctcaataagcagttgccctacctcgttgggaacatcgttgagatattggaaatgaacccagaagacgaagctgaagaagatggtgccatattgatcttgactcacaaaggaagg

SEQ ID NO: 2211 - DNA, 256 bp, Glycine max
  Clone ID: 700964757H1
ggttcagctgtgcctcaaatcaggttgcgcaggttctgctaacactgccatactctttctctcagctgggaatgctctctggcatcatattccaagtcttctatggaataatgggaagttggacagcttatctgattagcattctgtacatcgagtacaggaccagaaaagagaaagagagtgtcagcttcaaaaaccatgtcattcagtggtttgaagtgttggaaggtttactgggtccatactggaaagccat

SEQ ID NO: 2212 - DNA, 256 bp, Glycine max
  Clone ID: 700964759H1
ctcttcgctcccactcccacaagcctagaagacgtatacgcaattcttagagtttttcagattctcggaatcgaagagaagaataatcctgtgagcgaggacacttgtcagaaagtggttgaaaatctagcctcgtcttctcctctcaaggatttgttctataccttgttaaggccattttaaaatgcaatgtcaatggaaacgttttcaaggaaatgccaactcttgttgcagatggtaatgatgcactcactgg

SEQ ID NO: 2213 - DNA, 256 bp, Glycine max
  Clone ID: 700964761H1
caaaaacaaacagcagttgcaacaacaaggcacatttcaacgtttatttatttttgttgaaagaagagaagcaacaaatcaatctcacacttagtgttgttacgatggaatcaccgttcaaaccagagattctgaaggggaaggttgctctaatcactggtggagcctccggaatcggattcgaaatttccacccaattcggtaaacatggagcctctgttgcgctcatgggtcgccgcaaacaagtccttcagtc

SEQ ID NO: 2214 - DNA, 262 bp, Glycine max
  Clone ID: 700964766H1
gggcgccgacgtggttgaacaacagcaacgccgccacgctccgccagcagaatttcctccacctcgcagccggaatccgccgcgacggcggggcagcaaaacgacgacgttcgtgctatggatcggaaccggaccgagagcaactctgaagcggacgatttggcggaatacaaagcagatattttaggtcaccctctctacgaccagctcctatcggcgcacgtctcgtgcttgagaatcgccacgcccgttgaccagcttc

SEQ ID NO: 2215 - DNA, 259 bp, Glycine max
  Clone ID: 700964768H1
ctctctagcttggacgagtgaattagattcatcatcaagatgtcgtctctgatagcagaagatgtgaagagcagatcagaggtgtaccacggggacgaaatgtgccaagtgaagtccaaggagcttctcaaggaaatcgccctccccaacggccttcttcccctcaaggacatggaggagtgcggctacgacagacaaaccggcttcgtctggctcaaacaaaagaagagttacacccacaagttcgacaagatcggaa

SEQ ID NO: 2216 - DNA, 254 bp, Glycine max
  Clone ID: 700964775H1
atcatagcgtagaccttttgttctaaaaccacacctcattccatttccatcttctgccacctgtttctaactccccaacccaagaaatttccttttacccctttcccctctcctcttttcttattcatcaaaattcctctttggtgtcctctccctcggtcaactccgtttactataaatatgaccactcttttcttcctcttcttcaacttcaatactcacctttgaatggattctaattcttcttctccaag

SEQ ID NO: 2217 - DNA, 255 bp, Glycine max
  Clone ID: 700964776H1
catatacattttttagccttttgttagccccaaacacccacacgggcacacccctgcaggtacaaaagggggagttcacaacaaaaagaaaacaatgagaaaaccttgttgtgacaaggaaaacatcaataaaggtgcttggtccaagcaagaagaccaaaagctcattgactacatccaagtccatggtgaaggctgttggcgttccattcctaaagctgctgggctgcatcgttgtggcaaaagctgtaggat

SEQ ID NO: 2218 - DNA, 254 bp, Glycine max
  Clone ID: 700964778H1
atttatttattttaattattatcatctcatctcacccaattcaattcacgtaccttggaatcgattcttagggtttctgactcctttatgtgtttgtctcgcaattgatcatcgcaaccacaatgtccggtcccctcgatcgttttgccagaccttgctttgaggggttttcgggcagtgacgagaagaaggagaggagatctgacttcgagaactccgaggatgaaaggaggaccagaattggatctctcaaa

SEQ ID NO: 2219 - DNA, 260 bp, Glycine max
  Clone ID: 700964780H1
ccgaaagtaacggagggatttccttaacccacaaactctcaaataccctctctctctcaccgaccactatgttgcagagacctagacgccgctgcgagggcactgccatgggcgccatcgttctcgatctccgtcccggtctcggaattggacccttctccctcgggatgcctatatgtgaagcatttgctcagatagagcagcaacctaacatatacgatgtggtgcatgtcaagtattttgatgaggaacccctgaag

SEQ ID NO: 2220 - DNA, 256 bp, Glycine max
  Clone ID: 700964784H1
atgaatttgaaggctacagagttgaggcttggtcttcccggattccaatcgcctgaaagggaaccggatcttttctctttaagctcaccaaagcttgatgagaagccactcttccctttgcttcctactaaagacgggatttgctcgtcggggcagaaagctgttgtttctggcaacaaaagaggttttgctgataccatggatgggttttctcaggggaagtttgctggtaatacagggatgaacgcggtgctat

SEQ ID NO: 2221 - DNA, 222 bp, Glycine max
  Clone ID: 700964788H1
ccagagggcatcctgctaatctgtatgatgtcagaatttgttataatactagctagtactggtattttagcatgttcctgcaaaacagcgacagagattgcaaaattggtaattacaagtccaagccaattagtattcaaaagagtttggtatactcatttctaactaaaacatgattgtccttttaaagacagagagattagtcatattacatattacgtt

SEQ ID NO: 2222 - DNA, 251 bp, Glycine max
  Clone ID: 700964791H1
gttagaagttctctgacaaatcactcaggccacattatttgtatgttatcttgtgtcagtttgcagtatcttgtcacacattcttgaaattgcctgatttcatttatatcatccgttatgcagcctgctcgcgagacggatctgagagtgttcggagttgtgctctactattctctctttatcataacatttttggtttaaccaatgttacttccaatataagtgcagctgtgggtgctgttgtaatgctg

SEQ ID NO: 2223 - DNA, 246 bp, Glycine max
  unsure (1)..(246): unsure at all n locations
  Clone ID: 700964889H1
agctctnttcaccctnttnttnttnttnttcttcttcactttgtaactttcgaatcttcttcnttncaccgcaatggccaccnccacgcttagccccgccgacgccgacaagctctccaacctcaaatcctccgtcgctgcattgagccaaatcagtganaatganaanaatggattcacaagcctcgttgctcgttacctcagtggcgaanaccagcatgttgagtggaggtgttgaagctcaat

SEQ ID NO: 2224 - DNA, 267 bp, Glycine max
  Clone ID: 700964905H1
caagaattgagcacacttgatgaagccaaactgaaggagaaaggaagagccttccatgatatgttcttgaccaagttgtcattgttgcttaaagggacagttgttgcacctcctgataagtttggtgaaacactgcaagacgaacgaattaatggaggtgcatttattggtgctgatggtgttcagttccctcacaagctaatacctaatgcagggatgcgtctttatggtggtgcacaatatcatcgggcaatggctgaatttcgt

SEQ ID NO: 2225 - DNA, 268 bp, Glycine max
  Clone ID: 700964907H1
cgatgtagtgtcggagcagacatcggatagaagttttgggatgagaaacttcaagtacgtaaacactatcaaagcagcggttgagaaagaatgccccttcacagtgtcatgcgctgacattgttgctctttctgccagagatgccattgctttgttgggaggaccaagcattgaaatgaagacagggagaaaggacagcaaagaaagctatgcaatggaggtggaagacttgattccaaaccacaatgattccatgtcctcagtgctg

SEQ ID NO: 2226 - DNA, 272 bp, Glycine max
  Clone ID: 700964911H1
gccgctcgcaagcaaaaagaaagaatcccaggcgaggagaaagatggaggggaaggagcaggatgtgtcgttgggagcgaacaagttccccgagagacagccgattgggacggcggcgcagagccaagacgacggcaaggactaccaggagccggcgccggcgccgctggttgacccgacggagtttacgtcatggtcgttttacagagcagggatagcagagtttgtggccacttttctgtttctctacatcaccgtcttaaccgttatgg

SEQ ID NO: 2227 - DNA, 276 bp, Glycine max
  Clone ID: 700964913H1
aaacgcggctcgccattctcatttctctctccagaagataaaaaacccttttatatttttatatttttatcactagaaaaatcaaacaaataaaattttcattttcattttcttttcttttctcgctcttgttttttcggggaaattgatttcaccgtaataggagccaagaaaaacaaaacagaaaaattccgaacccgtgaactcttttacctgctacaaatgcatttctctctcttttctcacactttttctctgctaaactcgcaaacacga

SEQ ID NO: 2228 - DNA, 269 bp, Glycine max
  unsure (1)..(269): unsure at all n locations
  Clone ID: 700964918H1
cagactttatcatcaccagcaccttccaagagattgctggaagcaaggacactgttggacagtatgagagtcacactgccttcacccttccaggactttaccgtgttgttcacggtattgatccatttgatccaaagttcaacattgtctctcccggtgcagacatgggtatatacttcccatacactgaaactgagcgtaggttaacagaattccactctgacattgaancgcttctttacagctcagtggagaatgaggaacacata

SEQ ID NO: 2229 - DNA, 239 bp, Glycine max
  Clone ID: 700964919H1
tgggaaggggaagagtggagttgaagaggattgagaacaagatcaacaggcaagtgacctttgcaaaacgaaggaacgggcttttgaagaaagcttatgagctttccgttctgtgtgatgccgaggttgctctcatcatcttctccaatagaggaaagcagtacgagttttgcagcggttcaagcatgctcaaaacgctggagaggtaccagaaatgcaactatggagcgcctgaggac

SEQ ID NO: 2230 - DNA, 266 bp, Glycine max
  Clone ID: 700964920H1
tttggaacttgtgctcatcacaatggcattgagtggttggttttgtgaggcaaattgcagtggagggagttttctacaagaacctgtcacggggttggttacaatgaagtttcctgatgatttacggtagcaaatcaaacccccggatgccgcaactggcacgcaatcttggttagattcttcttgcagaagaggggggtgatttagcctcttccaagtgctttcagcagagtcaaggataacagattggttaaggttgggagcaa

SEQ ID NO: 2231 - DNA, 270 bp, Glycine max
  Clone ID: 700964927H1
agggtttctctgtctgcttcttcactttctctcgtttcaatcgaaaccaaaacaaaaacatgggcagaaaattcttcgtcggtggcaactggaaatgcaatgggaccactgaggaggtaaagaagattgttactactttgaatgaggctaaagtccctggagaagatgtcgtagaagttgttgtgagccctccttttgtgttccttcctgttgtaaaaagtttgctgcgccctgatttccatgtttcggcacaaaactgttgggttcgca

SEQ ID NO: 2232 - DNA, 263 bp, Glycine max
  Clone ID: 700964950H1
gttgcttgcaggtccttatcatggaggtgtatggaaagtaagagttgagctgccagatgcttatccttataaatctccttccataggctttatcaataagatctatcacccaaatgttgatgagatgtaaaaatattgtattttttaatattgctgcgaaactctatactttgagtagtttgccttgtgttaattttaagtattgtgtgcgatcatattggattataataatttcaggtcaggatcagtttgtcttgatgtta

SEQ ID NO: 2233 - DNA, 263 bp, Glycine max
  Clone ID: 700964957H1
gacatctcgagtgtgaagtttgtatgactaaacatttgcaggtggtccgataacggcccaataattggtggctcgataggcccaacaacaattgctaagataggtattgattatgaaaatggtggaacatcctaatatagtcaatctcattgaggtgattgatgatccagagtcggatgacttctacatggtacttgaatatgtggaaagcaaatgggtgtgcgagggtacaggtcatccttgtgcattaggtgaagagactg

SEQ ID NO: 2234 - DNA, 259 bp, Glycine max
  Clone ID: 700964972H1
caaaaatgagtgacaaaaacaacatggttatagcctccaaaacagccactggtagttcttcatcatcttcaagaatgtccacaaaaacattctcgggactcggaaacctcgtcaagctccttcccaccggcactgtctttctgttccagttcctcatccctgtcgtaaccaacagcggacactgcaccactcttcacaagtacctcactggctctttccttgtcgtatgcgcattcaactgcgccttcgcctccttcac

SEQ ID NO: 2235 - DNA, 262 bp, Glycine max
  Clone ID: 700964975H1
atttcattttctttacttctttaatggcccaggatttctccaaagctgttgatgacggcctcaagctctccaaacgcatatacttcgggaaggacagggcggtggcacctcctaaacctccgccgccgatgacgcgctccgccaccgcgtttctcccctcggcgccgatggtctacgcggtgatctccgatccagggatcgtggacaaccccgacatcccgagctaccaaccgcacgtgtacggaaggtgtgatcctccagc

SEQ ID NO: 2236 - DNA, 256 bp, Glycine max
  Clone ID: 700964986H1
gtcgctccgcaccagtttcaccgcacgaatatcttgttgtttggagcgatccgagaaaaactctgtaaacatgttggtttaccaggacctccttacaggtgatgagcttctctctgactccttccgttacaaggaaattgagaatggaatgctgtgggaagttgaggggaagtgggttgttaaaggagcagttgatgtagacattggtgcaaacccttctgctgagggtggaggagaagatgagggagttgatgat

SEQ ID NO: 2237 - DNA, 265 bp, Glycine max
  Clone ID: 700964993H1
gttaagaagagtctttggtggagggaagaagggttgaagcaccttgcactgcaaaagaaaaaaacaagaagaaaaacacagcaatggagggtgggaacaacagcagcatcaacagcaaccctgaggagttggcggtggggtgcttgctttcgatcaggacaacgttgggcgacgaattcgaaggccaggtcgtgaccttcgatcgcccctccaacatcctcgtactccaggagccttccaaacctagccctcgtcgaaaccttag

SEQ ID NO: 2238 - DNA, 202 bp, Glycine max
  Clone ID: 700965007H1
ttctaatctcaagttgctgcaaaattatcccaccacaaacattagtcatttgctctatgttgccaacaagtttcgtgtacagtcagtctaatgttgcattttgctcttctatctctagtttctcttcaaattcaatgcctgtaaatgacttttaagtgtgagactcacagcaatgccggtttatttatttgtttttacttat

SEQ ID NO: 2239 - DNA, 244 bp, Glycine max
  Clone ID: 700965022H1
tttcaatcaaagcaaatatacaataatacgatggtcgagtttggaacgagaatgggatccatatggacggtgttgttttgttttgcatcggttttcgcgatcgtttctgcagaacgaagcattgtgaaaatggaagtgccgagattcaatgtcaccagccgagagcctcaacagagtttcctcaccaaagctttgaatttcttatggcaatctggagaatcagggtaccaacacgtgtggccgg

SEQ ID NO: 2240 - DNA, 110 bp, Glycine max
  Clone ID: 700965033H1
gcctaacattaaactaagcaacgctcggttctattttctctttcaccatatccattgtcccttaagtctagggcagagtttctacaatgccttagacacacaatttcgcc

SEQ ID NO: 2241 - DNA, 240 bp, Glycine max
  Clone ID: 700965039H1
ctgacctatcttggaagagttttgaagtttaaaccttcaaacccttttgcctttagattctgattctgagtctctgctgctatatatggcgccacgcgtatttcttgtgttggggatgttgcgatggtgtgccttgttaaggtttcgtctgatccaaagagagaagaagaaatactggaagaagaactacattttcccgataacgagccacttattgtgagagacgggaacagaaggcta

SEQ ID NO: 2242 - DNA, 240 bp, Glycine max
  Clone ID: 700965040H1
ggttcaggtcctttattcggattcacgaaagcgaacgagctatttgtgggaagattggctccctttccagtaataatttctccaatcaatcttgtatacactcttgtttatcatatgatggacctcctatagagtattatgagattgttgaggaagaggctgagattgaggaagagcggacactgaatgatatcagtagaccactccttgtagaagctgagtggcctgacattgagcaga

SEQ ID NO: 2243 - DNA, 239 bp, Glycine max
  Clone ID: 700965041H1
ggccattaaggtgggaggagccaaccacagccatgccactcaagaccttcatgattcaattgctgctggtaactatcctgagtggaaactgttcgttcagacaatagatcctgagcatgaagcaaatttgactttgaccctcttgatgttactaagacttggcctgaggacattatacccttgcagcctgttggtcgcttggtcctgaataaaaacatagataatttctttgctgagaa

SEQ ID NO: 2244 - DNA, 240 bp, Glycine max
  Clone ID: 700965052H1
tgcactacctggcgacgaagaaacgccacttgtgggcgatatttcgggccttgaagggcgcaagagccaccacaccagggatgttcatatcctgagcttggcctttctcttggtctttctcgcttcggtgccgctcagaatttgcagagcactctcaacactgaggatgacttgggtaccacctcacttgggatcctgtatttgtctttcacattcttctccgtggttgcttctttggtg

SEQ ID NO: 2245 - DNA, 237 bp, Glycine max
  Clone ID: 700965074H1
tgctactgctccttggttttttagttgttgtgttgttgtcttcaactccacacagttccctcacttctcttccctttgaccattcaaccttcctcgcctttgcctccgtttccgtgactggatggctggaggtgttattcagcagatattgaggaggaaactccaccctcggtttactaactctcccttgttgtcacccatcgtagcaaaaaaagatgatgctggctctactggcag

SEQ ID NO: 2246 - DNA, 238 bp, Glycine max
  Clone ID: 700965075H1
cgggactttcactagccgcagcagcctcaggaggagaataaggatgtctcacaggaagttcgagcacccaaggcacgggtcactgggatttctccccaggaagcgtgctgctcgtcacagggaaaagtgaaggcattccccaaggatgacccatccaaggcacccaagctcactgcattcttgggttacaaggctggtatgactcacattgttagagaggtcgagaagccaggatcaa

SEQ ID NO: 2247 - DNA, 237 bp, Glycine max
  Clone ID: 700965090H1
cagtttttgtagatgatgatgaggatcttcgtaagtccttagagaaagcgagaagattagctcttaaaaagaaggagggggaaggggcatctggtcctcaagctattgcgttgcttgccactctaatcataataatgagactgatgatcaaaaccctacagctggagagtcacgagaaaacaaggtggtcttcacagagatggaagaatttgtctggggtctccacattgatgaaga

SEQ ID NO: 2248 - DNA, 266 bp, Glycine max
  Clone ID: 700965103H1
gtgaggttaaaacaatgggtgtggagaagttgagcttattatcgacgacgaacctcgccgtgttagctcaagcgaacaacaaatgcagtagcaggaagcacgtgtgttggagatcatccacgacgccgtttcatctgcagcggaagccgatctcatggtctgtgttgtgcggtttcatgctatttgggttgggcctcatttctctcttgacgggccacatggtctctgatctcgaatggtactctcaccgtcgctctctctactct

SEQ ID NO: 2249 - DNA, 263 bp, Glycine max
  Clone ID: 700965106H1
ctcttttgcattctctctgaattcgtatgccatggagtcacccggtaacgagcatgtggtgggtggcgcagaacccaacgacgtcgttacgcccttttcccacagagaagaacctcacaattcccaacccctcaccggcgacggtgccagtcccggaaagatatttataggtggtttagcgagagaaacgaccattgcccaatttatcaagcactttggtaagtatggtgagatcacggattcagttatcatgaaggacagga

SEQ ID NO: 2250 - DNA, 264 bp, Glycine max
  Clone ID: 700965115H1
gcatgctgtatgtggagacagctgatcggcctggattactggttgatcttgtaaagattattactgacattaacattgctgttgaatcaggagaatttgacactgaggggctcttggctaaggcaaagtttcatgtcagctacaacggtaaagcaatcagcaagcctctccagcaggttcttgctaacagcttgagatatttcttgaggcgtccgacaactgaggaatctagtttttgagtggcacttcatggaaagtagtgca

SEQ ID NO: 2251 - DNA, 265 bp, Glycine max
  Clone ID: 700965119H1
tttacctaaccctacaattcgccgatccttccagttggggtttttcgctttcagcgaagagcggtgtatatagaaaccctattccccctatgcaccaggggaattgaatatagaaataagaaaaaggcaaaaaaaaaagaggttgaaaaagttgtatgttaaataggtaattctgttgtttttcgtgtttctggactcaggagctgagctgtttccagggaaaagcatgtacagtatgaactctaaatgcagtgctggggattgc

SEQ ID NO: 2252 - DNA, 265 bp, Glycine max
  Clone ID: 700965124H1
gctgagagggttgttgtttctacaaagagcccaagatcagataagcaatatgtgtgggaagcagaagctgacagtagctcttatgtgataaaagaagaaactgatcctgaaaaggttctgcgtcgtggtacacagattacactctatttaagagaggatgacaagtatgaattctcagagccaagcaggattcagggtttggtgaagaattactcacagtttgtttccttccccatctacacatggcaagaaaagtcaagaactg

SEQ ID NO: 2253 - DNA, 265 bp, Glycine max
  Clone ID: 700965131H1
agctgaatgagagaattgctaaattgtctggtggtgtggctgtgatacaggttggcgcacaaactgagacagagctcaaggaaaagaaattgagagttgaagacgctcttaatgctacaaaggcagctgtagaggaaggtattgttgttggtggtggttgcactcttctgagacttgcatcaaaggtggatgcaatcaaggatagccttgataatgatgaagaaaaagttggagctgatattgtgaaaagagctcttagttaccc

SEQ ID NO: 2254 - DNA, 267 bp, Glycine max
  Clone ID: 700965134H1
caaatcttaaaaatattcagtgaagatcaacctcaatggcatctcttggcgtgcgaccagttcttccccctccattaacttccatctccgacccacctcctcttttcgatggcaccaccaggttgtacatcagttattcttgcccctatgcacaacgtgtgtggatcgctaggaactacaaggggctacaagataagatcaatttggtccctattaaccttcaagacaggccagcttggtataaggagaaagtctaccctgaaaata

SEQ ID NO: 2255 - DNA, 261 bp, Glycine max
  Clone ID: 700965138H1
ggacaacgccaatgataacaagcaaaacatagatgagaaagatgaagatcttgacggcaagaaatgcagttctaattatgaagcgatgcagaaaaacctgctatttgtagaaaataacgagggactgttaaccatagggcttggacaaggaaagcttaagactcatcgaacaggttttaaaccctacaaaagatgttccatggaggccaaggaaaatagggttggagcaagcagcaatcaaggtgaagagcaaggttgtaa

SEQ ID NO: 2256 - DNA, 261 bp, Glycine max
  Clone ID: 700965141H1
cctagccagtagtagccaatttgttggagctggttgggaatggcgtcgaaaccgaaatcaaatggaaattccaaatgcaacaaaggattcgctgacagctatatgctgttgaatcctgaagacgctcatttcttcgatcttgttcatgtgctgtattcccgtaacttgggaaaccgaaaatttgtggacagcaatgctgagggatcttatgagggaagcttccgccaaagatggcttatattcgtctctgtggtgctccag

SEQ ID NO: 2257 - DNA, 259 bp, Glycine max
  Clone ID: 700965142H1
gcggcagaggaggcgagggcggatgccgctgaattgaggaaggttttgggagagacagagtctagggttgagtctctggaaagggaattggcagggttgaagaaggtgaaggctgagagtgaggttagggttagggatttggagaggaagattggagttctggagactaaggaaattgaggaaagaaacaagagaattaggtttgaggaggagactagggataagattgatgaaaaggagagggaaattaagggttaca

SEQ ID NO: 2258 - DNA, 263 bp, Glycine max
  Clone ID: 700965146H1
tttcgctcacacaacacaactcctaccaacaaggtgctctgctcgttcactcctctctcatacagcctctggctcctcctccggtgaaagagggtgagaagaggagttagcaagcaatttttgtttcttttgggagttgggacccctcactcacatggacgcatcaacggctttaatgatcctatccgcaatagcggcctatttaatatggttcaccttcgtcactcgctccctaaaaggtccacgtgtctggcccctattcg

SEQ ID NO: 2259 - DNA, 264 bp, Glycine max
  Clone ID: 700965147H1
ggaaaccgaaatgggcgaggttgggggaaaaaaaattggcgactaccctcgccaaatccttagattttgcctcaccctcctcggcttcttcgccttctaagtttccagtgtctcctatgaagagttgttcttcctctccttgcctgaattccattaaaatgctacctccaaaccctgaatctttgctcctcaaaaaaggggtggataaaaaggcttcctcatcatcctcacccgtgaaatttgcaagttccgtcagttcaccca

SEQ ID NO: 2260 - DNA, 266 bp, Glycine max
  Clone ID: 700965148H1
ccgatcagaaacatcgccgtcggaaggcctgaagaggcgactcaccccgacacgttgaaggcggctttggctgagttcatctcaaccttcatcttcgtgttcgccggctcaggctccggcatcgcctacaacaagctcaccgacaacggcgctgccacccctgccggcctcatctccgcctccatcgcccatgcattcgccctcttcgtcgccgtctccgtcggcgccaacatctccggcggccacgtcaaccccgccgtcacctt

SEQ ID NO: 2261 - DNA, 269 bp, Glycine max
  Clone ID: 700965149H1
cgaccttgaggatttatttaattacaaagatctggacgaggaatttctgagccgtgttactgataacactcggaggtatattgggattttttccaatgcaattgatgaactcatgccggagcccactgaggacttcacagatgatgatcatgacatattgatgactcagagatctgatgaaggagtagaaggcaccgacggttccgatccacgtcagaagatgcctcctgaaatcaagcgttactatgaactttatattaaagcatctt

SEQ ID NO: 2262 - DNA, 264 bp, Glycine max
  Clone ID: 700965162H1
aagaaacttaatcgatcatcacttcacttcactaatacatcatggcagacgagacccagaacaagtatgagagctctgaggttgaggtccaggatcgtggtgtttttgactttctcggtaagaaaaaggatgaagaagacaagcctcatcctcaggaggaggtcatcgccaccgagtttcaaaaagtcactgtctcagaccaaggagagaacaagcacagcctcttagaaaagcttcaccgatctgacagcagctctagctctt

SEQ ID NO: 2263 - DNA, 265 bp, Glycine max
  Clone ID: 700965163H1
ggaagcaaagaaaatcccagaagtgatactaaactcagggaaaaagatgccagtgataggcctaggaaccgcatcaattcctcttccatcacatgaagctctcacctccatccttattgatgcctttgaggttggctacagacactttgatactgcttctctgtatgaaagtgaggagtctctaggcaaagctgtggcaaaggccttagagctaggcctcataaatagcagagaggaattattcatcacatcaaaactatggtcc

SEQ ID NO: 2264 - DNA, 257 bp, Glycine max
  Clone ID: 700965174H1
gctggctgctgctgttttgttcatgatgaaggaagaactagttaggggggttcgtttcttgcttgccaatgatgctgtaaagccaaagcatccgtgattgaagaggccacactagcttgatcaagatttcatgatgtaccatcttgaggtagcaaattagttcaaatggtaggggaattagagtgattcaaacaaaatattaagatatatggctgtaactgtatctttgattattttcatcaggttagtttccatag

SEQ ID NO: 2265 - DNA, 259 bp, Glycine max
  Clone ID: 700965176H1
ctagagtaattgcggaatcagctagaattttctaataatggccaaagacgttgagcaggttacagagcaaggtgaatactccgcgaaggattaccatgacccacctccggcgccgttgatcgacccagatgagctcactaagtggtccttgtacagagccgccatagctgagttcatagcaacactccttttcctttacatcaccgtgttgaccattattggctacaagagacagagtgacaccaaaatccccggtaac

SEQ ID NO: 2266 - DNA, 263 bp, Glycine max
  Clone ID: 700965182H1
agagtggtgagattttgagatccatttgaagttgataatgagccaaagagtattagtagtcctgctgcttgttttgaattatgtgttggttgcagaaggagaaacagctgatggagatttgaccacatttttgtctcttataaatacctgggagaacacccctcctaattgggtgggttcagatccttgtgatgattgggttggaatcaagtgcaagaattcacacattacatcaataacattatcaagcaccggtttggctg

SEQ ID NO: 2267 - DNA, 259 bp, Glycine max
  Clone ID: 700965191H1
cttatcttagctaccccatcacaacaaccacgatactatttctcatactctattaggcaaaaacaccaccaaatgggagaggaaaaggagcagcctaagaatgacaccgagaaaaagcccgaggaggtagcccccaagaaagacgacggacccatccctgtcgtttacaaactcgacttgcattgcgagggatgcgtcaagaagatcaaacgcacctgtcgccacttcgaaggtgtggaaaccgttaaggcggatctat

SEQ ID NO: 2268 - DNA, 251 bp, Glycine max
  Clone ID: 700965209H1
caagattctcacaaacaactcttgagaaagaaagaatggctgccaacacattgatgagttctgccatctcagccttcccatctctcctttcctcctcaaaatccagatttgccgcagcagttcctctttcagctttgttgtcaccaatgcctcttcttctcgcttttccatgagtgctgactggatgcctggccagcctagacccccctaccttgatggttcagcacctggtgactttggattcgaccctc

SEQ ID NO: 2269 - DNA, 248 bp, Glycine max
  Clone ID: 700965210H1
ggctgcagatatccaaaccttaaattcggtcctcgaatctttctgatcattggttgttttttattctttcaaatacattccaaaatctcttggaaattgcgagattcactgcttatcctagcagcagatttgggttctgacccaattattcattttccccaactgggtcttgtggattttttgttggggttttaaatttcgtgttgctgggtttgaaagttatttcctttcttccccgtctggattca

SEQ ID NO: 2270 - DNA, 249 bp, Glycine max
  Clone ID: 700965249H1
caactactacaagtacttccttacaatcaaaaccaacaacaactatggcaagttatcaaaagcactacgatgatcagggtcgcaaggttgacgagtatggcaacgttgagaagcaaaccgacgaatacggcaaccctgttcatgctgctagtgtcacctatgtagccaccagaactgctgctggtggttacagtgatgacattaataagcaacatgataccaccaatgcctacggcgtagacactggta

SEQ ID NO: 2271 - DNA, 243 bp, Glycine max
  Clone ID: 700965251H1
aaaatggccaaatcaatcaaattctttgagttgaacacaggggccaagattccttctcttgggttagggacttggcaagctgaacctggtgttgtagctgaagctctcaccacagccattcagttggatacaggcatattgactgtgctagtgcgtataagaatcaagcagagattggttctgctcttaagaagctttttgatgatggtgtggtgaagcgtgaggacttatggatcacttcca

SEQ ID NO: 2272 - DNA, 98 bp, Glycine max
  unsure (1)..(98): unsure at all n locations
  Clone ID: 700965266H1
gagccgatctacacttgatttggattccaatctggctaggacccattcatcaagtaatcattcacacaattcctannctantgnncnaccatnatnnc

SEQ ID NO: 2273 - DNA, 243 bp, Glycine max
  Clone ID: 700965273H1
gtcgcctgcaggaagagggtgtgaatatcacagccaactcggtccatccaggagtgataatgactcctcttatgagacactcatcttaccttatgcatttcttaaaggtcttcaccttttacatatggaagaacgtcccccagggagcagccacgacatgctatgttgctctccacccaagcgtgaaaggtgtaactgggaagtactttgtggattgcaatcaatgcaaaccaagttcacacg

SEQ ID NO: 2274 - DNA, 240 bp, Glycine max
  Clone ID: 700965275H1
ctccatcatccaaatatagttagaattcacgaggttattggcacaaaaacgaagatatacattgtgatggaatatgtttcaggaggacagctattagacaagatatcctatggagagaagtgaatgcatgtgaggcaagaaaactattccagcaacttattgatgccctgaaatactgccataacaaaggggtttatcatcgagatctcaagccagaaaacttgcttcttgacagcaagg

SEQ ID NO: 2275 - DNA, 241 bp, Glycine max
  Clone ID: 700965277H1
attattttcaggctagaatattccattatggctccatcagcttgattgatgagccatgcaagttcagctcaccttgctgctatgagcattgccaaaaactctggttgcattctatcatatgtccaaatttgagattggctctatggccttctgcagacgccgctcggaaaggcataatggatatatgggatcaagctgatgtcataaagataagtgaggatgagattacatttttgactgg

SEQ ID NO: 2276 - DNA, 244 bp, Glycine max
  Clone ID: 700965279H1
atttgaagttctgttggtgagtgtgagtgagtgtatcaatcggccacacagaaatgggcagtgcttctctgattccagtttcctggttgccttggcggccactttctcctttcaagggaacgtgaaaaccttggtcgcaaaaccatggctgaagaagattcagcaagcaagacccctcatttccgtggttaacaaggctgcctctctatcttcccccgtgacagcacccagcgtcggcgttcgg

SEQ ID NO: 2277 - DNA, 243 bp, Glycine max
  Clone ID: 700965282H1
cgtgactagacactcatctcactcgcgccatcttagggtttctccttttgtttcgcaacatggttgccgctaagaaaactaagaagacccatgagagcatcaacaacaggctcgctcttgtcatgaagagtggcaaattcaccctcggttacaagaccgttctcaaatctcttaggaactccaaaggaaaattgattatcattgctaacaactgcccccctttgagaaagtcagagattgaat

SEQ ID NO: 2278 - DNA, 235 bp, Glycine max
  Clone ID: 700953892H1
cccaaagacccactaatagtaacaattatgctccaaagaccaattcctctcaaattggtcatcataagaacaataccaccaacagcaacatcccagtgattgacatgaagcacatctacggtggtgacgagggaaagagggctgagacgctccggctcgtgtcggaggcgtgccaagaatggggttttttccaggtggtgaaccatggagtgagccatgagttgatgaagggggc

SEQ ID NO: 2279 - DNA, 255 bp, Glycine max
  Clone ID: 700959272H1
attaggctttcacaacacctcagcgtcactgtaccagttggaaatggagacaataacagagaacggatcagatggtgtgagtttggcaagaaatacatccaacaacgcccgtcgagggttgccaatgatccaaacaaacatgaagccaacggattcggaattccaagtgtgccacgacgacagcaccccgccggtcagagcccaaaccattcacgagctccattctctgcagaagaaaaagtcaaccccttccac

SEQ ID NO: 2280 - DNA, 232 bp, Glycine max
  Clone ID: 700961793H1
tgcattaggctttcacaacacctcagcgtcactgtaccagttggaaatggagacaataacagagaacggatcagatggtgtgagtttggcaagaaatacatccaacaacgcccgtcgagggttgccaatgatccaaacaaacatgaagccaacggattcggaattccaagtgtgccacgacgacagcaccccgccggtcatagcccataccattcacgagctccattctctg

SEQ ID NO: 2281 - DNA, 243 bp, Glycine max
  Clone ID: 700961324H1
ggaaagacatttacaaatgaagtaattgaggctgtgacttctatcaatgaaaaacctcttgttttggccctctccaatccaacttcacagtctgagtgtacagctgaagaggcttacgaatggagtgagggtcgtgcgattttcgctagtggaagtccatttgatcctgtagaatacaagggcaaagtgtactattctggccaggccaacaatgcatacatcttccccggctttggtcttggg

SEQ ID NO: 2282 - DNA, 234 bp, Glycine max
  Clone ID: 700905407H1
tgagaaattactaaatgatgagttttacattgggcttagacaaaagagggcaactgggcaggaatattctgaacttttgcacgagttcatgactgctgtcaagcaaaactacggagaaaaagttcttgttcagtttgaagattttgcaaaccacaatgcttttgagttgcttgcaaaatatggcacaactcatcttgttttcaacgatgatattcaggggactgcatctgttgt

SEQ ID NO: 2283 - DNA, 255 bp, Glycine max
  Clone ID: 700956234H1
ccttcagcttgtttgcctattaccattgatgtgggtacaaacaatgagaagctgctgaatgatgaattatacattgggctaaagcaaagacgagcaactgggcaggaatatgctgaacttatgcacgaatttatgacagcagtcaagcatactctatggggataaagttctaattcagtttgacgactttgcagaccactatgcttttgatctgcttgacgtatatagatctacacatctggtctttaatgatga

SEQ ID NO: 2284 - DNA, 261 bp, Glycine max
  Clone ID: 700965158H1
cactcttcttcaatcaagcgaaggtggtctcgattgcaagtgatccacgatacactctacgcttcacaaaaccttcaaacccaattccacagaattcttctgcttcaccatgccaccaaagcctttagactatgggtcaataaatgaaaacgtgaagaagagtcaatatgctgtcagaggtgaattataccttcgagcttctgaacttcagaaagagggcaaaaagattatctttactaatgttggcaacccgcatgcatt

SEQ ID NO: 2285 - DNA, 227 bp, Glycine max
  Clone ID: 700961520H1
ggcagattgtggatcagattcctgggagagcaactggtgcctatagccatagtcagggtgttcagggcttgcgtgatacaatagctgctggaattgaagagcgtgatggttttcctgccaatcctgatgacattttcatgactgatggtgcaagccctgctgtccataatatgatgcaattactcattagatcagaaaatgatggtattctgtgtcccattccacac

SEQ ID NO: 2286 - DNA, 260 bp, Glycine max
  Clone ID: 700956467H1
attgacctcgggcggtttaggcgcttatagtgactcccgcggccttccaggagtgaggaaggaagtggctgagttcatactcaggcgtgatggttatccaactgatccagaactcatatatctcactgatggtgccagcaagggggtgatgcagatattaaatactatcatcagaggtcaagacgatgggattttggttccagtcccacaatacccactctactcagcaacaattgctctgcttggtggtacccttgttc

SEQ ID NO: 2287 - DNA, 164 bp, Glycine max
  Clone ID: 700959696H1
gcaattactcattagatcagaaaatgatggtaatctgtgtcccattccacagtaccctctgtactcagcctcaattgccctccatggtggctgcctggtaccttattatctagatgaagcaactggctgggggttggaaatacctgaactcaagaagcaattgg

SEQ ID NO: 2288 - DNA, 233 bp, Glycine max
  Clone ID: 700958391H1
gatagcccgaattgttgcaaagcaccccaggcttctggttctctctgatgaaatttacgaacacataatttatgcaccagcaactcacacgagctttgcatctttaccaggaatgtgggacagaactcttactgtgaatggattttctaaggcctttgcaatgactggttggcggcttggatatattgctggtccaaaacattttgttgcagcatgtggaaagatccaaagtc

SEQ ID NO: 2289 - DNA, 271 bp, Glycine max
  Clone ID: 700954813H1
gagatttcacaaaggacccaattccttctctagttcaaggtctagaggtcggatctctatggctgttgcagttaatgtatctcggtttgaaggcatacctatggctcctcctgatccaattctcggagtttccgaggcgtttaaggcagacaatagtgatgtcaagctcaatcttggagttggggcatacagaacagaagaactacagccatatgtgcttatgttgttaagaaggtctttgttccgtattttatgtgtcttctgtgatttg

SEQ ID NO: 2290 - DNA, 254 bp, Glycine max
  Clone ID: 700953963H1
attttctattgcagatggcttcgtcggttctctccgcagcttcgcactctgtctcaccctcatgttctctgtccaccacgcacaagggaaagcccatgattagagacaacactttgggattccacagaggacccaattccttctctagttcaaggtctagaggtcggatctctatggctgttgcagttaacgtttctcggtttgaaggcatacctatggcgcctcctgatccaattctaggagtttctgaggca

SEQ ID NO: 2291 - DNA, 261 bp, Glycine max
  Clone ID: 700955412H1
gttcatcgcagactcaacactctctccagacacttccttcatcaaatggcttctcacgacggcatctccgctgcttcttcagattccgtcttcaatcacctcgttcgtgctcccgaagatcctatcctcggggtactgttgcttataacaaagatccaagtccagttaagctcaacttgggagttggtgcttaccgaactgaggaaggaaaacctcttgttttgaatgtagtgaggcgagttgagcagcaactcataaatg

SEQ ID NO: 2292 - DNA, 268 bp, Glycine max
  Clone ID: 700909477H1
gttcgcactctgtctttcccctgtttccgcgtcactgagtcatcgcgattcgcaactcgctcaccggccaattcctccgccgcagctccgtcgccggagcaaggctcatgtcttcttcgtcctcatggttccggagcatcgagcccgctcccaaggatcctatcctcggagtcactgaagctttcctcgccgatcagagtccaaacaaagtcaacgtcggagtgggtgcgtatcgcgatgaccacggaaaacctgtggttttggaatg

SEQ ID NO: 2293 - DNA, 249 bp, Glycine max
  Clone ID: 700964436H1
gggaaatcatattgttaatgttttctcattctcaaaagcatttggaatgatgggatggcgggttggatatatagcatatccctctgaagtaaaagactttgctgaacaacttctcaaagttcaagacaacattcccatctgtgcttcaatattatcacagtatcttgccctgtattcattggaagtggggcctcaatgggttgtagatcaggtaaaaactcttgaaaagaacagagaaattgttttaga

SEQ ID NO: 2294 - DNA, 250 bp, Glycine max
  Clone ID: 700962862H1
aatcaatggcctttctttagggtcacacttgatttggtggaaatggtgtttgccaaaggagatccgaaaattgccgctctgaatgatagactccttgtttcaaaggatctgtggccgtttggggatcaattgaggaacaaatatgaagaaactaggaaactcctacttcaggtggctggacacaaggaaattcttgaaggggacccttacttgaagcaaagactcaggcttcgtcatgctcccattacca

SEQ ID NO: 2295 - DNA, 262 bp, Glycine max
  Clone ID: 700962754H1
aatcaatggcgtttctttagggtcacacttgatttggtggaaatggtgtttgccaaaggagatccgaaaattgccgctctgaatgatagactccttgtgtcaaaggatctgtggccgtttggggatcaattgaggaacaaatatgcagaaactaggaaactcctacttcaggtggctggacacaagggaattcttgaaggggacccttacttgaagcaaagactcaggcatcgtcatgctcccattaccagcctcaatattg

SEQ ID NO: 2296 - DNA, 261 bp, Glycine max
  Clone ID: 700955462H1
tgagaacaatgcaactacagaatcagacattgaagaaactctcaagaaacttgtatttgacttgaagaagtctcctcaggaagtttttgatgcactgaaaaaccagactgttgatttagttcttactgctcatctactcaatcaattcgtagatctttgcttcaaaagcatggacggataaggaattgtttatctcaattgtatgccaaagacattactcctgatgataagcaggagcttgatgaggctctacaaagggag

SEQ ID NO: 2297 - DNA, 249 bp, Glycine max
  Clone ID: 700959358H1
agtaaacctgctgatgaacttataacacttaacccaacaagtgaatatgcacctggtttggaagacaccctcattctcaccatgaagggtattgctgctggcttgcaaaacactggctaaatctgagtttttgtcttctctttggttccacttttattttctgtttcctttatcagaaataacgagtttagctgcatgcaccaaagggtgtttttccctcccctgtacccatgtttccattataagata

SEQ ID NO: 2298 - DNA, 283 bp, Glycine max
  Clone ID: 700963637H1
ctttagagagatagagagatagagagagagagaaagaaattaagaaaaaatggcagcctgcactgtctactcaacacaatctctgagctcaaattgctccatctcaaccccatcaaagacacagctgagtttcttccaccaaaagcaggtacgttctggaggaacagcaacaggggcaacagcagcagcagaagaagctatgtgataacatgtgcagcaggtgactcacagacagtggtgattggtcttgctgcagactcagggtgtgggaagagcacttcat

SEQ ID NO: 2299 - DNA, 265 bp, Glycine max
  Clone ID: 700959747H1
gagcaccttcatgaggaggctgacaagtgtgtttggaggagcagcagagccaccgaagggtggcaaccctgactcaaacacactcatcagtgacaccaccactgtcatatgcttggatgattaccactctttggatagaactggcagaaaggagaagggtgtcactgcccttgaccctagagccaatgattttgatctcatgtatgaacaagttaaagctcttaaggatggaattgctgttgaaaaaccaatctacaaccatgtc

SEQ ID NO: 2300 - DNA, 265 bp, Glycine max
  Clone ID: 700961206H1
agacgacctcaagaaaatcgccgcctacaaggccgtcgagtacgtcgagtccggcatggtcctcggcctcggcaccggctccactgccaagcacgccgtcgaccgcatcggcgagctcctccgccaaggaaaactcaaagacatcgtcggcatccccacctccaccaaaacccacgaccaggccctctccctcggcatccccctctccgatctcgactcccaccccaccgtcgatctcgccatcgacggcgccgacgaggtcgat

SEQ ID NO: 2301 - DNA, 262 bp, Glycine max
  Clone ID: 700951860H1
ctgaaatcgagctctttatttggagaatctctaagagtggcatccaaatcaacactaaaggtttcaaagacaaagaatacttcactcgtgaccagatgtgaaattggtgacagtctggaagaattcctcacaaaagcaacaccagataaggggttgatcaggttgttggtgtccatgggagaagcattaagaacaatttccttcaaagtgaagacggcttcttgtggtggaacacaatgtgttaatactttggggacgagca

SEQ ID NO: 2302 - DNA, 268 bp, Glycine max
  Clone ID: 700909473H1
tgtgattctgtatgatagccgtcactctttacttccaaaaattgaggagggcccaaagacatttgtcaatgccctatctagtaccctgagcaagctccagtccagtaaatctttccggagatttagagaagctgctaggggtgttacgaaacgaattggtaggtctgcatgaattggcagctaaagtggatgaatatgctcgtggtatgatgggtcctctaggtgctactctttttgaagagcttgggttgtactacataggcccagt

SEQ ID NO: 2303 - DNA, 245 bp, Glycine max
  Clone ID: 700962626H1
gcacgatttaacaagcctgacaatgagattgttgaccattacacatatgttatattgggtgatggttgtcaaatggagggaatttcaaatgaagcatgctcacttgccggtcactggggtctagggaagcttattgctttatatgatgacaaccacatttccattgatggggacactgagattgcattcactgagaatgttgatcaacgttttgaggcacttgggtggcatgtaatttgggtgaa

SEQ ID NO: 2304 - DNA, 240 bp, Glycine max
  Clone ID: 700907766H1
caacaagcaggtttctttaccaactgctactcttgatggacccataccacctgtaggagccttgagtagcgctctcagtagattacaatcaaataggcctcttagagaattgagagaggttgccaagggagttcctaaacgaattggaggtcctatgcatgaattggctgcaaaagttgacgagtatgctcgtggcatgatcagtggttctggatcatcactttttgaagagcttggact

SEQ ID NO: 2305 - DNA, 308 bp, Glycine max
  Clone ID: 700954594H1
tccttcccatcattctctggcctcaagtcacattctacatgcaaagcagcagcagccacgtcctcgcgtagaaggggtgcttgtccatccaccaacgttgttcgagccgctgcggttgagacactcgaccaaaccaccgaggtttctctggtggagaaatccgtcaacaccattcggtttttggccattgatgcagttgagaaggccaactctggtcaccctggtctccccatggggtgtgctccaatgggtcacattctctacgatgagataatgaggtacaatcctaagaaccccgttggttcaac

SEQ ID NO: 2306 - DNA, 246 bp, Glycine max
  Clone ID: 700906586H1
actcgagccgaatcggctcgagttcagttgaagaaggaatccatcactgcaatgctagcaaacttggacttcagggatgtgacttcacaaaggatgtcaacaaagcaataatgatcagtgatgcaatggaaacgggaacagttcagataaattccgccccggctcgtgggccagatcattttccctttcagggtataaaggacagtggcattggatctcaagggattaccaacagcataaacatga

SEQ ID NO: 2307 - DNA, 247 bp, Glycine max
  Clone ID: 700956280H1
cttttctaacatggctgctgggactggactctttgcagagattgtggatggagatgtgtacaagtactatgctgatggagaatggaagaaatctgcttctgggaaaagtgttgccatcatcaaccccactaccagaaagactcaatacaaagttcaagcttgttcacaagaggaggttaacaaggtcatggacttggcaaaatctgcccaaaagttatgggcaaagaccccactatggaaacgtgct

SEQ ID NO: 2308 - DNA, 254 bp, Glycine max
  Clone ID: 700957466H1
atggctgctgggactggactctttgcagagattttggatggagatgcgtacaagtactatgctgatggagagtggaagaaatctgcttctgggaaaagtgtttccacatcaaccccactaccagaaagactcaatacaaagttcaagcttgttcacaagaggaggttaataaggtcatggacttagcaaaatctgcacaaaagttatgggcaaagaccccactatggaaacgtgctgcgtcttcacaaagcagt

SEQ ID NO: 2309 - DNA, 239 bp, Glycine max
  Clone ID: 700957672H1
atctatctatccatctatcttttctaacatggctgctgggactggactctttgcagagattttggatggagatgcgtacaagtactatgctgatggagagtggaagaaatctgcttctgggaaaagtgtttccatcatcaaccccactaccagaaagactcaatacaaagttcaagcttgttcacaagaggaggttaataaggtcatggacttagcaaaatctgcacaaaagttatggg

SEQ ID NO: 2310 - DNA, 238 bp, Glycine max
  Clone ID: 700962678H1
gacttggcaaaatctgcccaaaagttatgggcaaagaccccactatggaaacgtgctgaacttcttcacaaggcagctgctatccttaaagagcacaaagcaccaattgcagagtgcctggtgaaagaaatagcaaagccagccaaagatgctgttacagaggttgtaagatctggggatctggtttcttatactgctgaagaaggtgtaaggattctgggagagggaaagttcttgg

SEQ ID NO: 2311 - DNA, 159 bp, Glycine max
  Clone ID: 700957692H1
gctctcaccaacttccgctacttcctactccaaccactttcttgtttcccgcagtcatgggcaaggtcaagatcggaatcaacggatttggaagaattggccgtttggtggccagggtggctctgcagagagacgatgttgaactcgttgccgttaacg

SEQ ID NO: 2312 - DNA, 253 bp, Glycine max
  Clone ID: 700961292H1
cgccaatttcattgaaggcctggtcttggatgctaaggagaaaggagcaacattctgtcaggagtacaaaagagaaggcaatctcatttggcctttgctactggacaatgttaggccagacatgagaattgcatgggaagagccatttggaccggttttaccagtaattaggatcaattcagttgaagaaggaatccatcattgtaatgctagcaactttggacttcagggatgtgtcttcacaaaggatgtc

SEQ ID NO: 2313 - DNA, 269 bp, Glycine max
  Clone ID: 700963585H1
atggcattgcaatttcaaagaaggcaggcatgattcctctgcaaatggagttgggaggaaaagatgcctgcattgtacttgaagatgctgacctggatttggttgctgcaaacattataaagggaggtttttcatacagtggtcagagatgcactgctgttaaggttgtcctggtaatggagtccgctgctgatgctttggttgagaaagtgaaggctaaggtggcaaaactaactgttggaccaccagaggatgactgtgatatcacc

SEQ ID NO: 2314 - DNA, 148 bp, Glycine max
  Clone ID: 700764629H1
gaaggctcaggtggcaaaactaactgttggaccaccagaggatgactgtgatatcaccccggttgtgtcagaatcatccgccaatttcattgaaggcctggtcttggatgctaaggagaaaggagcaacattctgtcaggagtacaaa

SEQ ID NO: 2315 - DNA, 121 bp, Glycine max
  Clone ID: 700961412H1
caagatcggaatcaacggatttgcgaagaattggccgtttggtggccagggtggctctgcagagagacgatgttgaactcgttgccgttaacgatcctttcattaccaccgattacatgac

SEQ ID NO: 2316 - DNA, 141 bp, Glycine max
  Clone ID: 700908925H1
gtcatgggcactgtcaagatcggaatcaacggatttggacgaattggccgtttggtggccagggtggctctgcagagagacgatgttgaactcgttgccgttaacgatcctttcattaccaccgattacatgacatacatg

SEQ ID NO: 2317 - DNA, 224 bp, Glycine max
  Clone ID: 700956948H1
cacacaccgtttgttctattcttaactcaacttctgctacccactctcttcttccaagtccaaccacgctcttctctacagtcatgggcaaggtcaagatcggaatcaacggatttggaagaattggccgtttggttgccagagtcgctctgcaaagagacgatgtggagctcgttgccgttaacgaccctttcattaacaccgattacatgacatacatgttt

SEQ ID NO: 2318 - DNA, 244 bp, Glycine max
  Clone ID: 700958014H1
ctattcttaactcaacttctgctaccactctgttcttccaagtccatccacgcttttctctacagtcatgggcaaggtcaagatcggaatcaacggatttgagagaattggccgtttggttgccagagtcgctctgcaaagagacgatgtggagctcgttgccgttaagggccctgtcattaccaccgattacatgacatacatgattggatacgtcagtgttcacggacactggaagcatcac

SEQ ID NO: 2319 - DNA, 219 bp, Glycine max
  Clone ID: 700903658H1
ctcaacttctgctacccactctcttcttccaagtccaaccacgccgttctctacagtcatgggcaacgtcaagatcggaatcaacggatttggaagaattggccgtttggttgccagagtcgctctgcaaagagacgatgtggagctcgttgccgttaacgaccctttcattaccaccgattacatgacatacatgtttaaatacgacagtgttcacgg

SEQ ID NO: 2320 - DNA, 242 bp, Glycine max
  Clone ID: 700961862H1
actcgagccgattcggctcgagcacccacacaccatccgttctagactcaacttctgctctacccaactcctacaacgcttatctctgcactcatgggcaaggtcaagatcggaatcaacggatttggaagaattggccgtttggttgccagagtcgctctgcaaagagacgatgttgaactcgttgccgttaacgaccctttcattaccaccgattacatgacatacatgtttaaatacga

SEQ ID NO: 2321 - DNA, 262 bp, Glycine max
  Clone ID: 700903141H1
attcttaactcaacttctgctaccctctctcttcttccaagtccaaccacgcttttctctacagtcatgggcaaggtcaagatcggaatcaacggatttggaagaattggccgtttggttgccagagtcgctctgcaaagagacgatgtggagctcgttgccgttaacgaccctttcattaccaccgattacatgacatacatgtttaaatacgacagtgttcacggacactggaagcatcacgatgtcaccgttaaggacg

SEQ ID NO: 2322 - DNA, 255 bp, Glycine max
  unsure (1)..(255): unsure at all n locations
  Clone ID: 700907488H1
caacttctgctcttccaactcctacaacgctattctcagnactcatgggcaaggtcaagatcggaatcaacggatttggaagaattggccgtttggtactcagagtcgctctgcaaagagacgatgttgaactcgttgccgttaacgaccctttcattaccaccgattacatgacataaatgtttaaatacgacagtgttcacggacactggaagcatcacgatgtcaccgttaaggacgagaagacccttctct

SEQ ID NO: 2323 - DNA, 243 bp, Glycine max
  Clone ID: 700963289H1
caccaacttccgctacttcctactccaaccactttcttttttcccgcagtcatgggcaaggtcaagatcggaatcaacggatttggaagaattggccgtttggtggccagggtggctctgcagagagacgatgttgaactcgttgccgttaacgatcctttcattaccaccgattacatgacatacatgtttaaatacgacagtgttcacgggcactggaagcatcacgatgtcaccgttaag

SEQ ID NO: 2324 - DNA, 239 bp, Glycine max
  Clone ID: 700906172H1
ttctgctacttcctactccaaccgcacttctgctccgcaattatcatgggcaaggtcaagatcggaatcaacggatttggaagaattggccgtttggtagccagagtggctctgcagagagacgatgttgaactcgttgccgttaacgaccctttcatcaccaccgattacatgacatacatgtttaaatacgacagtgttcatggacactggaagcatcacgatgtcaccgttaagga

SEQ ID NO: 2325 - DNA, 249 bp, Glycine max
  Clone ID: 700962944H1
caacttctgctacttcctactccaaccgcacttctgctccgcaattatcatgggcaaggtcaagatcggaatcaacggatttggaagaattggccgtttggtagccagagtggctctgcagagagacgatgttgaactcgttgccgttaacgaccctttcatcaccaccgattacatgacatacatgtttaaatacgacagtgttcatggacactggaagcatcacgatgtcaccgttaaggacgagaa

SEQ ID NO: 2326 - DNA, 253 bp, Glycine max
  Clone ID: 700964087H1
acaacttccgctacttcctactccaaccactttcttttttcccgcagtcatgggcaaggtcaagatcggaatcaacggatttggaagaattggccgtttggtggccagggtggctctgcagagagacgatgttgaactcgttgccgttaacgatcctttcattaccaccgattacatgacatacatgtttaaatacgacagtgttcacgggcactggaagcatcacgatgtcaccgttaaggatgagaagacc

SEQ ID NO: 2327 - DNA, 281 bp, Glycine max
  Clone ID: 700959733H1
aacaacttctgctacttcctactccaaccgcacttctgctccgcaattatcatgggcaaggtcaagatcggaatcaacggatttggaagaattggccgtttggtagccagagtggctctgcagagagacgatgttgaactcgttgccgttaacgaccctttcatcaccaccgattacatgacatacatgtttaaatacgacagtgttcatggacactggaagcatcacgatgtcaccgttaaggacgagaagacccttctcttcggtgacaagccagtcac

SEQ ID NO: 2328 - DNA, 258 bp, Glycine max
  Clone ID: 700964742H1
ctcaacttctgctcttccaactcctacaacgcttttctctgcactcatgggcaaggtcaagatcggaatcaacggatttggaagaattggccgtttggttgacagagtcgctctgcaaagagacgatgttgaactcgttgccgttaacgaccctttcattaccaccgattacatgacatacatgtttaaatacgacagtgttcacggacactggaagcatcacgatgtcaccgttaaggacgagaagacccttctctt

SEQ ID NO: 2329 - DNA, 245 bp, Glycine max
  Clone ID: 700953045H1
aaaaatgctatcaaggaggaatcagagggcaagttgaagggaattcttggttacactgaagatgatgtggtctccaccgactttgttggtgataacagatcaagtatttttgatgcaaaggctggaattgcattgaataagaattttgtgaagcttgtctcttggtatgacaacgagtggggatacagttcacgtgtcattgacctgcttgtaatcgttgccaagaagtctttttaataaggtgg

SEQ ID NO: 2330 - DNA, 247 bp, Glycine max
  Clone ID: 700956242H1
taaaaatgctatcaaggaggaatcagagggcaagttgaagggaattcttggttacactgaagatgatgtggtctccactgactttatcggcgtgagcagatcaagtatttttgatgcaaaggctggaattgcattgaataagaactttgtgaagcttgtttcttggtacgacaacgagtggggatacagctcacgtgtcattgatcttcttgtattcgttgccaagaagtctctttaaggtgttact

SEQ ID NO: 2331 - DNA, 266 bp, Glycine max
  Clone ID: 700964732H1
caccaacttccgctacttcctactccaaccactttcttttttcccgcagtcatgggcaaggtcaagatcggaatcaacggatttggaagaattggccgtttggtggccagggtggctctgcagagagacgatgttgaactcgttgccgttaacgatcctttcattaccaccgattacatgacatacatgtttaaatacgacagtgttcacgggcactggaagcatcacgatgtcaccgttaaggatgagaagacccttctcttcgg

SEQ ID NO: 2332 - DNA, 259 bp, Glycine max
  Clone ID: 700952951H1
aaaaatgctatcaaggaggaatcagagggcaagttgaagggaattcttggttacactgaagatgatgtggtctccaccgactttgttggtgataacagatcaagtatttttgatgcaaaggctggaattgcattgaataagaattttgtgaagcttgtctcttggtatgacaacgagtggggatacagttcacgtgtcattgacctgcttgtaatcgttgccaagaagtctttttaattaaggtggttctaacattatg

SEQ ID NO: 2333 - DNA, 252 bp, Glycine max
  Clone ID: 700905876H1
gctccgcaattatcatgggcaaggtcaagatcggaatcaacggatttggaagaattggccgtttggtagccagagtggctctgcagagagacgatgttgaactcgttgccgttaacgaccctttcataccaccgattacatgacatacatgtttaaatacgacagtgttcatggacactggaagcatcacgatgtcaccgttaaggatgagaagacccttctcttcggtgacaagccagtcactatttttgg

SEQ ID NO: 2334 - DNA, 239 bp, Glycine max
  Clone ID: 700953564H1
ccgttaaggacgagaagacccttctcttcggtgacaagccagtcactatttttggacacagaaaccctgaagagatcccatgggggtcaactggagctgacatcattgttgagtccaccggagttttcaccgataaggacaaggccgccgcacatttgaagggtggtgcaaagaaggttattatttctgcccccagtaaggatgcccccaagttggtggtgggtgtcaacgagcacgag

SEQ ID NO: 2335 - DNA, 242 bp, Glycine max
  Clone ID: 700906196H1
gccagagtcgctctgcaaagagacgatgtggagctcgttgccgttaacgaccctttcattaccaccgattacatgacatacatgtttaaatacgacagtgttcacggacactggaagcatcacgatgtcaccgttaaggacgagaagacccttctcttcggtgacaagccagtcactgtttttggacacaggaaccctgaagagatcccatgggggtcaactggagctgatatcattgttga

SEQ ID NO: 2336 - DNA, 280 bp, Glycine max
  Clone ID: 700909405H1
aacaacttctgctacttcctactccaaccgcacttctgctccgcaattatcatgggcaaggtcaagatcggaatcaacggatttggaagaattggccgtttggtagccagagtggctctgcagagagacgatgttgaactcgttgccgttaacgaccctttcatcaccaccgattacatgacatacatgtttaaatacgacagtgttcatggacactggaagcatcacgatgtcaccgttaaggacgagaagacccttctcttcggtgacaagccagtca

SEQ ID NO: 2337 - DNA, 250 bp, Glycine max
  Clone ID: 700962884H1
gcagcactggagctgccaaggctgttggaaaagtccttcctgctttgaacggaaaattgactggtatggcattccgtgttcccaccgtggatgtctctgttgttgacctcacagtgaggctggagaaggaagcctcctacgatgaaattaaaaatgctatcaaggaggaatcagagggcaagttgaagggaattcttggttacactgaagatgatgtggtctccaccgactttgtgggcgatacagatca

SEQ ID NO: 2338 - DNA, 254 bp, Glycine max
  Clone ID: 700907981H1
ggatgtctctgttgttgacctcacagtgaggctggagaaagaagcttcctacgatgaaattaaaaatgctatcaaggaggaatcagagggcaagttgaagggaattcttggttacactgaagatgatgtggtctccactgactttatcggcgatagcagatcaagtatttttgatgcaaaggctaaaattgcattgaataagaactttgtgaagcttgtttcttggtacgacaacgagtgggatacagctcacg

SEQ ID NO: 2339 - DNA, 263 bp, Glycine max
  Clone ID: 700963317H1
caagaccaatggatcaactcctgtgaggggagagttagtggccaagttgaaggtggcaatcaatggtttcggacgcattggtagaaacttccttcgctgctggcacggccgaaaagactcaccccttgaagtcgttgttgtcaacgacagtggtggtgtcaagaatgcttcgcacctgctgaaatatgatcctatgctgggaacctttaaggaaatgttgaaatactagacaattgaaccatcactgttgatggtaatccatc

SEQ ID NO: 2340 - DNA, 265 bp, Glycine max
  Clone ID: 700905151H1
atcattgttgagtccaccggagttttcaccgataaggacaaggccgccgcacatttgaagggtggtgcgaagaaggttattatttctgcccccagtaaggatgcccccatgtttgttgttggtgttaacgagcacgagtacaagccagagcttgatattatttccaatgctagctgcacaaccaactgccttgctccacttgctaaggttattaatgacaggtttggcattgttgagggtttgatgaccactgttcattccatca

SEQ ID NO: 2341 - DNA, 257 bp, Glycine max
  Clone ID: 700957310H1
gttaacgagcacgagtacaagccagagcttgatattatttccaatgctagctgcacaaccaactgccttgctccacttgctaaggttattaatgacaggtttggcattgttgagggtttgatgaccactgttcattccatcactgccacccagaagactgttgatgggccatcagccaaagactggagaggtggaagagctgcttcatttaacatcattcctagcagcactggagctgccaaggctgttggaaaagt

SEQ ID NO: 2342 - DNA, 245 bp, Glycine max
  Clone ID: 700907957H1
caagccagagcttgatattatttccaatgctagctgcacaaccaactgccttgctccacttgctaaggttattaatgacaggtttggcattgctgagggtttgatgaccactgttcattccatcactgccacccagaagactgttgatgggccatctaccaaagactggagaggtggaagagctgcttcatttaacatcattcctagcagcactggagctgccaaggctgttggaaagtccttcc

SEQ ID NO: 2343 - DNA, 260 bp, Glycine max
  Clone ID: 700957321H1
ctaaggttattaatgacaggtttggcattgttgagggtttgatgaccactgttcattccatcactgccacccagaagactgttgatgggccatcagccaaagactggagaggtggaagagctgcttcatttaacatcattcctagcagtactggagctgccaaggctgttggaaaagtccttcctgctttgaacggaaaattgactggtatggcattccgtgttcccaccgtggatgtctctgttgttgacctcacagtg

SEQ ID NO: 2344 - DNA, 304 bp, Glycine max
  Clone ID: 700954591H1
tacactttctatctcatttccaatctcattttcgttcggttcaaacactctcatggcatcagacaagaagattaggatcggcatcaacggatttggaaggattggccgtttggtggccagggttgctcttcagaggaatgacgttgaacttgttgctgtcaacgatcctttcatcaccactgattacatgacatacatgttcaagtacgacaccgttcatgggcagtggaagcattttgatgtgaagctgaaggactctaagacccttctcttcggtgagaagcccgtcaccgttttggattca

SEQ ID NO: 2345 - DNA, 202 bp, Glycine max
  Clone ID: 700960745H1
caaggctctactctactgcttcacattctgctctagaaaattcagtggtgacacacagcttcggctactctctctgtagccaaaccagcccttcaggcaaatgggaaaggcttctctgaattctctggcctctgcagctcatcaggcttccttcccttttctagaaaatcttaagaggatttccactctgccattgccttcc

SEQ ID NO: 2346 - DNA, 246 bp, Glycine max
  Clone ID: 700906879H1
tacaaggctctactctactgcttcaccttctgctctagaaaattcagtggtgatacatggcttcggctactctctctgtagccaaaccagcccttcaggcaaatgggaaaggcttctctgaatctctggcctccgcagctcatcaggcttccttcccttttctagaaaatcttcagaggatttccattctgtcattgccttccagacctatgcagtctaaagcagtggaggatacaagaagggtgt

SEQ ID NO: 2347 - DNA, 275 bp, Glycine max
  Clone ID: 700960223H1
ctagtttcttacaaggctctactctactgcttcaccttctgctctagaaaattcagtggtgatacatggcttcggctactctctctgtagccaaaccagcccttcaggcaaatgtcgaaaggcttctctgaattctctggcctccgcagctcatctggcttccttcccttttctagaaaatcttcagaggatttccattctgtcattgccttccagacctatgcagttggaagcagtggaggatacaagaagggtgtgacagaagcaaaactgaa

SEQ ID NO: 2348 - DNA, 268 bp, Glycine max
  Clone ID: 700906218H1
gtttcttacaagcctctactatactgcttcaccttctgctctagaaaattcagtgctgaaacatggcttcggctactctctctgtagccaaaccagcccttcaggcaaatgggaaaggcttctctgaattctctggcctccgaagctcatcaggcttccttcccttttctagaaaatcttcagaggatttccattctgtcattgccttccaaacctatgcagttggaagcagtggaggatacaagaagggtgtgacagaagcaaaact

SEQ ID NO: 2349 - DNA, 283 bp, Glycine max
  Clone ID: 700962204H1
actgaacaacgaggtccaccactgagacgtttgcagaagaagtgaatgcagcattcagagagagtgcagacaatgagctccagggaatcctctctgtgtgtgatgagccacttgtgtctgttgacttcaggtgcactgatgtgtcctcaaccgttgactcatcgttgaccatggtcatgggagatgacatggttaaggtgattgcttggtatgacaatgagtggggctactcccaaagggttgtggatttggctgacattgttgccaacaagtggaagtgaga

SEQ ID NO: 2350 - DNA, 263 bp, Glycine max
  Clone ID: 700962351H1
ggaaatcaaagttgtttctgaccgcaaccctgccaaccttccttggaaggacttggggatagacttggtgattgaaggaaccggggtgtttgtagacagagaaggtgcagggaaacacattcaagcaggagctaagaaggtgctcatcactgctcctggtaaaggagatatccccacctacgtggttggtgtcaatgagtatgactacagccctgatgaacccatcatcagcaatgcctcttgcaccactaactgccttgcac

SEQ ID NO: 2351 - DNA, 244 bp, Glycine max
  Clone ID: 700954983H1
catggatcaggcaaggtcaagatcggaatcaacggtaagtcttctccatccttcgatctctcttctgttgtttcagatcagcttagttattttttctactattccattttcgctgtttttttctctctcaattttatctaaatcgaaatgtaacaggatttggaagaattggccgtttggttgccagagtcgctctgcaaagagacgatgtggagctcgttgccgttaacgaccctttcattac

SEQ ID NO: 2352 - DNA, 238 bp, Glycine max
  Clone ID: 700961364H1
gaaatcctcttcaaccgcaacaaggacgcgatctcctccgacacggcgtcccgatcgacgtctttatccgtgcgttcacgcacgcgtatggcggatgagctggagcaggtgttcaacaagttcgacgtgaacggcgacggcaagatctcggcgtcggagctgaagaccactccgtgtgcctacacccaatgtttcagttgttgaccttgttgtgaatgttgagaagaagggtcttact

SEQ ID NO: 2353 - DNA, 240 bp, Glycine max
  Clone ID: 700961396H1
gaaatctctcggcaaccgcaacaaggacgcgatctcctccgatacggcgtcccgatcgacgtctttatccgtgcgtgcaggcacttaacatggcggctacgctggagcaggtgttcaacaagttcgacgtgaacggcgacggcaagatctcgcaatctcaatggaatagcgctccgtgtgcctacacccaatgtttcagttgttgaccttgttgtgaatgttgagaagaagggtcttact

SEQ ID NO: 2354 - DNA, 252 bp, Glycine max
  Clone ID: 700963442H1
gtgacacagttcaaccccacttgctcaaaaactcatcttcactcatctcagctcccttttctatcgaggactcttcctagacatcgccactgcactattgcgccacttctgctccgccattatcatgggcaaggtcaagatcggaatcaacggatttggaagaattggccgtttggtagccagagtggctctgcagagagacgatgttgaactcgttgccgttaacgaccctttcatcaccaccgattacat

SEQ ID NO: 2355 - DNA, 258 bp, Glycine max
  Clone ID: 700956835H1
aaatacttgaagccctctgttgcaggattcctaatgcagaaggagcttgattatctagttggggctgtgtcaaaccccaagagaccatttgctgctattgtcggtggatcgaaggtgtcttccaagattggagttattgaatccttgttggagaaagttaatgttctcttgcttggtggaggaatgatctttaccttttacaaggctcagggttattcagttgggtcatctcttgtggaggaagacaagcttagcctt

SEQ ID NO: 2356 - DNA, 256 bp, Glycine max
  Clone ID: 700959058H1
gctaacagcaagactgtgccggcatcaagcatcccagatgggtggatggggttggatattggtcctgattccatcaagacatttggtgaagcattggatacgactcagaccattatttggaatggaccaatgggtgtttttgagtttgataagtttgccacaggaacagaggctatagccaagaaactggcagagctgagtgggaagggagtgacaaccatcattggaggaggtgactccgttgccgctgtggaga

SEQ ID NO: 2357 - DNA, 252 bp, Glycine max
  Clone ID: 700952526H1
gaggaatgatctttaccttttacaaggctcagggttattcagttggttcatctcttgtggaggaagacaagcttagccttgcaactacacttctcgaaaaggccaaggctaaaggggtttctttgttgcttccaactgatgtggtcatagcagacaagtttgctgctgatgctaacagcaagactgtgccagcatcaagcatcccagacgggtggatgggattagatattggtcccgattccatcaagacat

SEQ ID NO: 2358 - DNA, 267 bp, Glycine max
  Clone ID: 700910043H1
ctctttaccagttgccacactacaccgagattccccctaaacccgtttgcgttgttgtttgcgaagaaatggcgactaagaggagcgtgggaacgttgaaggagggtgatttgaaagggaagagggtgttcgtgaggtcgatctgaacgtgcctttggatgacaaccttaacatcaccgatgacactagagtccgtgctgctgttcccaccatcaagtacttaactggtcatggagccaaagtgatcctttctagccacttgggacg

SEQ ID NO: 2359 - DNA, 269 bp, Glycine max
  Clone ID: 700963530H1
aaagggtgtcactaccaaatacagcttggcacctcttgtgccccggctttctgagctcattggtatccaggttgtcaaggctgaagacagtattggtccagaagtagaaaagttggtggcttgtcttccagatggaggtgttcttcttctagaaaatgtgaggttttacaaggaggaagaaaagaatgatcccgagcatgcaaaaaagcttgcctctctggcagatctgtttgtgaatgatgcatttggtactgctcacagggcacatg

SEQ ID NO: 2360 - DNA, 249 bp, Glycine max
  Clone ID: 700958261H1
agttgccacactacaccgagattccccctaaacccgtttgcgttgttgtttgcgaagaaatggcgactaagaggagcgtgggaacgttgaaggagggtgatttgaaagggaagagggtgttcgtgagggtcgatctgaacgtgcctttggatgacaaccttaacatcaccgatgacactagagtccgtgctgctgttcccaccatcaagtacttaactggtcatggagccaaagtgatcctttctagcc

SEQ ID NO: 2361 - DNA, 253 bp, Glycine max
  Clone ID: 700909538H1
tatttccaccaaacccgtttgcgttgttgtttgcgaataaatggcaactaagaggagcgtgggaacgttgaaggagggtgatttgaaggggaagagggtattcgtgagggtcgatctgaacgtgcctttggatgacaaccttaacatcaccgatgacactagagtccgtgctgctgttcccaccatcaagtacttgactggttatggtgctaaagtgatcctttctagccatttgggacgtccaaaaggtgta

SEQ ID NO: 2362 - DNA, 255 bp, Glycine max
  Clone ID: 700962832H1
ctttgcttctagagaatgtgaggttctacaaggaggaagagaagaatgatcctgaatttgcaaagaagttggcttctctagctgatctctatgtgaatgatgcatttggcactgcccacagagctcatgcttctacagaaggagttgccaaatacttgaagccctctgttgcaggattcctaatgcagaaggagcttgattatctagttggggctgtgtcaaaccccaagagaccatttgctgctattgtcggtg

SEQ ID NO: 2363 - DNA, 254 bp, Glycine max
  Clone ID: 700906269H1
cgcgactaagaggagcgtgggaacgttgaaggagggtgatttgaaagggaagagggtgttcgtgagggtcgatctgaacgtgcctttggatgacaaccttaacatcaccgatgacactagagtccgtgctgctgttcccaccatcaagtacttaactggtcatggagccaaagtgatcctttctagccacttgggacgtcctaaaggtgtaacacctaaatacagtttgaagcctcttgtgccaaggctgtctc

SEQ ID NO: 2364 - DNA, 94 bp, Glycine max
  Clone ID: 700958782H1
ccatttgtttttgctttttgagatttcatcatcctgtatttttggtttctgttttcggacttcaatggaaattaatggatgagaactaatgaat

SEQ ID NO: 2365 - DNA, 243 bp, Glycine max
  Clone ID: 700959845H1
gaagaacaagtagttgagaactaagaaggagaagcaaatggcttcctcaatgatctcttccccagctgttaccactgtcaaccgtgccggtgccggcatggttgctccattcactggcctcaagtccatggctggcttccccaccagaaagaccaacaatgacattacctccattgctagcaacggtggaagagtgcaatgcatgcaggtgtggccaccagttggcaagaagaagattgagac

SEQ ID NO: 2366 - DNA, 268 bp, Glycine max
  Clone ID: 700961649H1
gttgagaactaagaaggagaagcaaatggcttcctcaatgatctcttccccagctgttaccactgtcaaccgtgccggtgccggcatggttgctccattcactggcctcaagtccatggctggcttccccaccaggaagaccaacaatgacattacctccattgctagcaacggtggaagagtgcaatgcatgcaggtgtggccaccagttgggcaacaagaagtttgagactctttcctacctgccagaccttgatgatgcacaatt

SEQ ID NO: 2367 - DNA, 261 bp, Glycine max
  Clone ID: 700959008H1
aacaagtagttgagaactaagaaggagaagcaaatggcttcctcaatgatctcttccccagctgttaccactgtcaaccgtgccggtgccggcatggttgctccattcactggcctcaagtccatggctggcttccccaccagaaagaccaacaatgacattacctccattgctagcaacggtggaagagtgcaatgcatgcaggtgtggccaccagttggcaagacgaagtttgagactctttcctacctgccagacctt

SEQ ID NO: 2368 - DNA, 281 bp, Glycine max
  Clone ID: 700963683H1
aattggcaaaggaagtagaataccttcttaggaagggatggattccttgcttggaattcgcgttggagcacggtttcgtgtaccgtgagcacaacaggtcaccaggatactacgatggacgctactggaccatgtggaagctgcctatgtttggttgcactgatgcttctcaggtgttgaaggagcttcaagaggctaagactgcataccccaacggcttcatccgtatcatcggattcgacaacgttcgccaagtgcagtgcatcagcttcatcgcctac

SEQ ID NO: 2369 - DNA, 265 bp, Glycine max
  Clone ID: 700955418H1
gtttgtttgctcacaaccttatttgcaactgacttctttgagatcaaggctgtaaaggagattgagcctgcattgaagaaacaactcatcatttccactgccctgatgactattgggattgcaattgttagttggatgcactcccaacttccttcactatcttcaattttggagttcagaaagatgtcaagaattggcagctattcttgtgtgttgctgttggtctttgggcaggtcttattattggatttgtaactgagtacta

SEQ ID NO: 2370 - DNA, 250 bp, Glycine max
  Clone ID: 700959847H1
gttggattgcactcccaacttccttcactatcttcaattttggagttcagaaagatgtcaagaattggcagctattcttgtgtgttgctgttggtctttgggcaggtcttattattggatttgtaactgagtactatactagcaatgcatatagtccggtgcaagatcgttgcagactcctgcaggactggtgctgcaactaatgttatatttggccttgccttgggatacaagtctgttattattccaa

SEQ ID NO: 2371 - DNA, 249 bp, Glycine max
  Clone ID: 700952058H1
ggagcaacctctttccttttcactgagtataagtacgtgggaatcttcatggtggcttttgccattttgatattcctcttccttggctctgtggaaggattcagcacaagctaccagccttgcacctatgaccaaactaaaatgtgtaagccagctcttgccactgctgttttcagcaccatatctttcctgcttggaggtgtcacatcgcttatttctggattccttggaatgaaaattcaacttatg

SEQ ID NO: 2372 - DNA, 253 bp, Glycine max
  Clone ID: 700904602H1
gactgggtcggtctttttgaggccatcactggttatggtcttggtgggtcttctatggctttgtgtggtagagttggtcgaggtatctatactaaggctgctgatgttggtgctgatcttgtcggaaaggttgaaagagacatccccgaagatgatccaagaaatccagctttgattgctgataatgaccgtgataatgttggggatatcgctggtatgggatctgatctgtttgcggtcatatgccgagtca

SEQ ID NO: 2373 - DNA, 251 bp, Glycine max
  Clone ID: 700953633H1
ctgtgactgcctctgttccgccaagcgcacattttcccaccgttcaggccaccggctgagttaggtttccggcgaggatgggtgctgctctgctgtcggagcttgcgacggagatagtcgtgccagtgtgcgccgtcatcgggatcgtgttctcgctggtgcagtggttcctcgtgtcgcgcgtcaagctcactcccgaccgcaacggaacgacgtcgtcgccgcgcaacaacaaaaacggctacggcgac

SEQ ID NO: 2374 - DNA, 309 bp, Glycine max
  Clone ID: 700954577H1
gaagcaccagcctcaatgtacttcttaagctcatggcggttgagtctcttgtgtttgctcccttggtttgctacacatggtggcctactcttcaagatctaaaggatttgatagaaaaagagtatcgtccatcatttttctacaacgacagaacaaggaaaagccgtccctttaccaatgccttctcgtttttgtgttagtctttaactcatctgtcatgtcaattccattgtttttgaaaccttttcctcccccaccttgaaacaaagtatattttgtctcatgtagttttaagacaattgattaggc

SEQ ID NO: 2375 - DNA, 268 bp, Glycine max
  Clone ID: 700908149H1
ctgccggaaacacgactgccgctattgggaagggatttgccattggttctgctgcccttgtatcactggccctctttggtgcctttgtgagccgagctgctattacaactgttgatgtgttgactccaaaggttttcattggtttgattgtgggtgcaatgcttccttactggttttctgctatgactatgaagagtgtgggaagtgctgctctgaagatggttgaagaagtacgcaggcaattcaacaccattccagggttgatgga

SEQ ID NO: 2376 - DNA, 255 bp, Glycine max
  Clone ID: 700952580H1
ttcttatttttttcctctcttcactttcactctctctctctctctcagccatcatcatgggagcagtgattctcccagatctcggcaccgagattttgattccggtctgcgccatcattggaatagggttcgccctcttccagtgggtcctcgtctccaaggttaagctctccgctgccagagacgcttcccctaacgccgccggcaaaaatggctacaacgattacctcatcgaagaagaggaaggcctcaacg

SEQ ID NO: 2377 - DNA, 258 bp, Glycine max
  Clone ID: 700952567H1
cctcattcttatttttttcctctcttcactttcactctctctctctctctcagccatcatcatgggagcagtgattctcccagatctcggcaccgagattttgattccggtctgcgccatcattggaatagggttcgccctcttccagtgggtcctcgtctccaaggttaagctctccgctgccagagacgcttcccctaacgccgccggcaaaaatggctacaacgattacctcatcgaagaagaggaaggcctcaa

SEQ ID NO: 2378 - DNA, 238 bp, Glycine max
  Clone ID: 700953831H1
cttatttttttcctctcttcactttcactctctctctctctctcagccatcatcatgggagcagtgattctcccagatctcggcaccgagattttgattccggtctgcgccatcattggaatagggttcgccctcttccagtgggtcctcgtctccaaggttaagctctccgctgccagagacgcttcccctaacgccgccggcaaaaatggctacaacgattacctcatcgaagaag

SEQ ID NO: 2379 - DNA, 248 bp, Glycine max
  Clone ID: 700904783H1
tccctcattcttatttttttgctgtcttcactttcactctgtctgtgtctctcagccatcatcatgggagcagtgattctcccagatctcggcaccgagattttgattccggtctgcgccatcattggaataggttcgccctcttccagtgggtcctcgtctccaaggttaagctctccgctgccagagacgcttcccctaacgccgccggcaaaaatggctacaacgattacctcatcgaagaagag

SEQ ID NO: 2380 - DNA, 238 bp, Glycine max
  Clone ID: 700952870H1
ttccctcattcttatttttttcctctcttcactttcactctctctctctctctcagccatcatcatgggagcagtgattctcccagatctcggcaccgagattttgattccggtctgcgccatcattggaatagggttcgccctcttccagtgggtcctcgtctccaaggttaagctctccgctgccagagacgcttcccctaacgccgccggcaaaaatggctacaacgattacctc

SEQ ID NO: 2381 - DNA, 232 bp, Glycine max
  Clone ID: 700961948H1
caatcttatttctatccacacttcacattcactctatctctctctctcagccatcctcatgggaacagtgaacatcccagatctcggcaccgagattttgattccagtctgcgccatcattggaatagggttcgccctcttccagtgggtcctcgtctccaaggttaagctctccgctgccagagacgcttcccctaacgccgccggcaaaaatggctacaacgattacctc

SEQ ID NO: 2382 - DNA, 253 bp, Glycine max
  Clone ID: 700906779H1
attccttccctcattcttatttttttcgtctcttcactttcactctctctctctctctcagtcatcatcatgggagcagtgattctcccagatctcggcaccgagattttgattccggtctgcgccatcattggaatagggttcgccctcttccagtgggtcctcgtctccaaggttaagctctccgctgccagagacgcttccactaacgcctccggcaaaaatggctacaacgattacctcatcgaagaag

SEQ ID NO: 2383 - DNA, 269 bp, Glycine max
  Clone ID: 700906027H1
tgtgtcacatcgcttatttctggattccttggaatgaaaattgcaacttatgccaatgcaagaaccaccctggaggcaagaaagggtgttggaaaggctttcattacggcttttagatctggtgcagttatgggttttctccttgctgcaaatggtcttttggttctttacattgccatcaacttgttcaagatttactatggtgatgactggggtggtctttttgaggccatcactggttatggtcttggtgggtcttctatggcttt

SEQ ID NO: 2384 - DNA, 164 bp, Glycine max
  Clone ID: 700957555H1
cggctcgaggcttggtggtgtcacatcgcttatttgtggattccttggaatgaaaattgcaacttacgccaatgggagaaccaccctggaggcaagaaagggtgttgggaaggctttcattacggcttttagatctggtgcagttatgggttttctccttgctg

SEQ ID NO: 2385 - DNA, 245 bp, Glycine max
  Clone ID: 700953858H1
cgccggtgaggccaggacattggaggagcatctcgccgaggccgccatgggaaatgccttcctcctccagggcggagactgtgctgagagcttcaaggagttcaatgccaacaacatccgtgacaccttccgcatcatcctccagatgagcgtcgtcatgatgttcggcggccaaatgcctgtcatcaaggtggggagaatggcggggcaatttgcaaagcctcgttcggattcgtttgaggagc

SEQ ID NO: 2386 - DNA, 255 bp, Glycine max
  Clone ID: 700958333H1
ttttagaactttaatctcaaaatgtattcaatattcttttgaaaatataattcataaacgattttaaaacaccacctcgccgaggccgccatgggaaatgccttcctcctccagggcggagactgtgccgagagcttcaaggagttcaatgccaacaacatccgtgacaccttccgcatcatcctccagatgagcgtcgtcatgatgttcggcggccaaatgcccgtcatcaaggtggggagaatggcggggcaa

SEQ ID NO: 2387 - DNA, 247 bp, Glycine max
  Clone ID: 700963862H1
ctcgagccgattcggctcgaggaggggataacattaacggagactactttcgacgagaagtcgcggattccggatccgcagaagatgattagggcttattgccaagccgcggccacgctgaatcttctcagagcttttgccaccggtggttatgctgctatgcagagggttactcagtggaatttggacttcacggatcacagcgaacagggagataggtaccgagagcttgctaaccgagttgatg

SEQ ID NO: 2388 - DNA, 249 bp, Glycine max
  Clone ID: 700953162H1
cagatgcgaatgaattggacctagtcctccaaaccctctcttcttttcccccaatcgtcttcgccggcgaggcgaggaatctggaggagaagctcgctcaggctgccatggggaacgcttttctccttcagggcggtgattgcgccgagagcttcaaggaattcactgccaacaacatccgtgacacctaccgtgtcatccttcaaatgggtgtggtcctcatgttcggtggccaaatgcccgttatca

SEQ ID NO: 2389 - DNA, 243 bp, Glycine max
  Clone ID: 700952432H1
tggacatctcatgagtgcttattgttgccttatgaacaatccctcaccaggttggattcaacttctggtctctactatgactgttcagcccatatgctctgggttggggaacgaaccaggcagcttgatggtgcccatgtcgagtttctaagaggagttgctaatcccttgggaattaaggtaagtgacaagatggatccaaatgagcttgttagactcattgagatcttgaatccccaaaac

SEQ ID NO: 2390 - DNA, 260 bp, Glycine max
  Clone ID: 700906275H1
gggagctaaggttacatggtcagagaacagtgtcactgtttctggaccaccacgagatttttctggtcgaaaagtcttgcgaggcattgatgtcaatatgaacaagatgccagatgttgccatgacacttgctgttgttgcactatttgctaatggtcccactgctataagagatgtggcaagttggagagttaaagagactgagaggatgatagcaatctgcacagaactcagaaagctaggagcaacagttgaagaag

SEQ ID NO: 2391 - DNA, 264 bp, Glycine max
  Clone ID: 700905146H1
tgcttccagagaaaggttgggaggttgatctagatgctgttgaagctcttgctgatcagaacacagtggcgttggcgatcataaaccctgggaatccttgtgggaatgtgtacagttaccaccatttggagaagattgctgaaactgcaaaacgggttggaacaattgtgatctctgatgaagtttatggtcaccttgcatttgggagcaagccttttgtaccgatgggagtttttggctctactgttcctgttctcactcttg

SEQ ID NO: 2392 - DNA, 268 bp, Glycine max
  Clone ID: 700961605H1
cttgggattcttgttgacagagatgatcagggcactctgcttcagattttcaccaagcctgttggggacaggccaacgatattcatagagataattcagaggatcgggtgcatggtggaggatgaggaagggaaggtgtaccagaagggtgcatgtgggggttttgggaaaggcaatttttctgagcttttcaaatccattgaagaatatgagaagactttggaagctaaaagaaccgcgtaagcacattggaagaacacaaatactc

SEQ ID NO: 2393 - DNA, 257 bp, Glycine max
  Clone ID: 700906510H1
gttgacagagatgatcagggcactctgcttcagattttcaccaagcctgttggggacaggccaacgatattcatagagataattcagaggatcgggtgcatggtggaggatgaggaagggaaggtgtaccagaagggtgcatgtgggggttttgggaaaggcaatttttctgagcttttcaaatccattgaagaatatgagaagactttggaagctaaaagaaccgcgtaagcacattggaagaacacaaatactcc

SEQ ID NO: 2394 - DNA, 514 bp, Glycine max
  Clone ID: jC-gmfl02220050a01d1
acactaaaaacagtttctcttttatacatactctctgttgtcatttgtcaacactacaaaaaatgaaaaagtaaggtagaatctttaatcattcacaaatatggagcaggctgcagagggcattctgtattctaagataatacatatgaaagatgttacatatataggctattcaaacagtggctggtactggagttgaaggagcaacacggttttcagctggaatttcaacaaactcagacaatatagcacggaattcatctccgctcagagtctccttctccagaaggacttccacaatcttgtcaatggcctcacggttgttccttatatgctccagtgcaatttcatatgcttcatctgagatcctcttgatggcagcatcaatgtcttctgcaagcctctctgacattgagttccttgccatcattctcatgatgacatccccaccttgtgctgatggttccataagtgaccaaggaccaatatcagacattccaaatgtggtcaccat

SEQ ID NO: 2395 - DNA, 474 bp, Glycine max
  Clone ID: jC-gmfl02220050a02a1
agagggggtcagagtgagaaagagaaagagagaattcgtaaaccctaatttcggaaagatcggcgatgactgcctccaaggatcgcgagaacttcgtctacatcgccaaactcgccgagcaggccgagcgttacgaagagatggtggaatcaatgaagaacgttgcgaatctcgacgttgaactgacggtggaggagcggaatttgctttctgttgggtacaagaatgtgattggtgctcgcagagcgtcctggaggatcctgtcttccattgagcagaaggaagaaacaaaagggaacgagttgaatgcgaagcggattaaggagtacagacagaaggttgaattggagctatcgaacatctgtaatgatgttatgagagtgattgatgagcaccttatcccttcggctgcaacttgtgaatccactgcgttttactataagaagaaaggagattattatcgttatcctgctg

SEQ ID NO: 2396 - DNA, 510 bp, Glycine max
  Clone ID: jC-gmfl02220050a02d1
gcttatatcttccattgtttcaattgtataatttcatctaaacaatattcagaaaaaatgaaagaaaatatcctcataaatcatgtttgctatctcccctactaaataattagactccatctatacctcaaaccccacgtaggatttatgtacaaacagacgaaagagggggcaaaaaataagtgaaatttaaagaggaccttggacaactttcaataaccaagtttagtcccactctgcctatctacccatgcatcgttaagctaagctatgtactcattcaccttttggctttactttgtattgtttggacctgaagtgacgattgtgatccaccactgagtgcagcagcagcagattcaacatgtgtaagaagatattcatatatcttcttcctcaaccggtcaattgtctctgctgatatctcgcatgattctccctcatccttgctcgatcctatctcatctaaccaatcattaacactctttagttgagtgagcattcctgcta

SEQ ID NO: 2397 - DNA, 530 bp, Glycine max
  Clone ID: jC-gmfl02220050a03a1
catgttccctcaaggagcagatgcatatattgatgaacttgcatcagttattccaattgcagatggttctgtcagaacagcactggacactggttgtggggttgcaagctggggagcctacttgctaaagagaaatgtcctggctatgtcctttgctccgaaggacaaccatgaagcacaagttcagtttgctctagaacgaggggtacctgctgttattggtgttcttggcaccatccgccttccatacccatcaagagcattcgatatggcccagtgttctcgatgtctgataccatggacttcaaatgagggaatgtatctaatggaagttgaccgagtcttaaggcctggtggatactggattttgtctgggcccccaattaattggaaaacatactaccaaacatggaagcggtccaaggaagatctgaaggcagaacagacaaaacttgaggagttagctgaaagtctttgttgggaaaagaagtacgaaagggtgatattgctatttggagaaagataataat

SEQ ID NO: 2398 - DNA, 433 bp, Glycine max
  Clone ID: jC-gmfl02220050a03d1
cggattcgcttgctcgttacaagtcttatagtaaatgcagaccggtaccatccatgaagaaaaaaaattggctgccgtgccgacgctgtttatggactgctgttgcggctcgacctgccgaagtcatctttcatcccatgcactgaacgcctaatgctcgtcgtaatccgtcgcttaaaagaccatctggtgtggcctgtttgagctgcggaggctgaagctggcaccgaggtagtcggcaaggtgggcctccttcttgatgggggctaaaagtgccttgtcgacagacttttggtcctcaatacgggcctttgcggtctccttcttctcgggcttctcgccctgcttgaagaacgagtccttaccgggcttgcgggcggccttgtccttggtgaagtaaccattctctgtgaccttgtccaagaccttggag

SEQ ID NO: 2399 - DNA, 545 bp, Glycine max
  unsure (1)..(545): unsure at all n locations
  Clone ID: jC-gmfl02220050a04a1
gttctaattacattgactataacggcatagagaagtcccttgatgaagatcggagtaaacttgagaagataattcaaggcatggctgctagtagccttagatgtattgcttttgcttgcatgaaaatttcagaagacattgattataacgataaggagaaagtgcatcaaatccttagaaaagatggcttgaccttgctaggtattgttggcctaaaggatccatgccgaccagacgtcaagaaggctgtggaaacttgtaaacttgcaggtgttagcatcaagatgatcactggagacaacattttcactgcaaaggccatagcaacagaatgcggaattttagaccttgatggccatgtgaatgcaggagaagtggttcaaggtgtggaattcaggaactacacagaggaagagagaatggagaaagtcgagaagatccccgtgatggcaagatcgtcccctttggacaaacttttgatggtgcaatgcttgaaaaagaaaggtcatgttgttgcagtcacaggagattgcacanatgatgca

SEQ ID NO: 2400 - DNA, 545 bp, Glycine max
  unsure (1)..(545): unsure at all n locations
  Clone ID: jC-gmfl02220050a04d1
agtaaaacaccttctattatttgaagccacaaagttcagcagaaccacaatgaacaccaggaaatattaattgattatctcaagtgttttttttagtagtgagacaatgtaactcaaaattataaaggataacaatccaatatgaacaagataaattatttgattatatcaagtcatagcttctcttcaagtggagaatgcttaggttctcagggtgtgtataagcaggttccatcatcacttcttgcagttgggtcgaagtttgaggcatttggatcagtacaaccttcaggaacgggaatttttacttgctgggctgctttgccatagaaagttcctcttttgatggcatcctgattagcatcaccaagagcagcctcgttcaagtacttgtctgccagttgtactctcttcacattctcttgntcttggacaagcatgttaccatactccaagagcttgctcaaagtcatcttcggttggtcaaaggttggaggtccttccttggagttcacaagcttcttccaatcaagtcaacaccaaca

SEQ ID NO: 2401 - DNA, 511 bp, Glycine max
  Clone ID: jC-gmfl02220050a05a1
gacccatcaagtttgccaaaatatgttcccagcaaggagattgatgctaaattacgggatgaagccgtaaggcaaggagttgttggaggtagggaacaaaaagttgcctcaggagttagacaagaaaaaggacacagggcaaatgtcacagcaaaagacaatgctgacccaggcttagcagtgcagcaaggacactgttccagctcaaggaaccaaagtgaattatcaaaccctcatagaggatcggtgtctggaattctggttttccctcacaaacagtcagaaaaagaaatgaatgataatttctctgggcatctttataagaggccttcacattcaggcccattggttcctggttctgtctgggcaaaaggcaggaaagaagttgatgatgtgcctcctgtttcaaacagagtgaacctattaaaactatctgggctagtggcatctaggactttctctgaagatcaggaggttaaaccagttcactcgaaccacagaaaaccaattg

SEQ ID NO: 2402 - DNA, 506 bp, Glycine max
  Clone ID: jC-gmfl02220050a05d1
aaagcttagagaataacaatatatttatataattttactcgtgagtaacaacaaccacttgtttaccaacattgcgaccggtatagaggccaaccaaggctgcagggcccttctcaaggccctcagcaatgtcttccacatacacaaccttcccttctctgatatgaggcaggacaaactccaagaattttggatataaatgatagaaatcagttgcaataaaaccttccattttaacccgcttaaatatgagatttgccaaatttgttacaccatcgaactgagtaagattgtactgcgagatcattccacagacaggtatgcggccatgaaatttcatgtttgggagtactgcatcaagtgtcttgcccccaacattctcaaagtaaatgtcaatgccttctggaaagtaccttttcaaagctgcattgaggtctggctcttcttgtagttaaaagcttcatcaaatcctaatttattcttcagcagatccaccttctctttac

SEQ ID NO: 2403 - DNA, 575 bp, Glycine max
  Clone ID: jC-gmfl02220050a06a1
gagcaaagcgtcttgctatcataggatggatttgccttgttttcaacatcagtgtctttgctgcgcctctcttcattattaggcgtgtcataaagacgaggagcgtggaatacatgccatttactttgtcaatgtttttaaccatcaatgctgttatgtggttcttctatggccttctcctcagggattattacgttgctcttccaaacacacttgggtttgtcttcggcataattcagatggggatgtatttgatgtacagaaacgccaccccagtggcactagaggagccagtgaaggctcaagaattgaatggccacatcattgacgttgggaagatgggaacaatggaaccgaatcacgcagctactgctggtgctgttggcaaagtttgaatatcaccattgagattatatgaatgtggagaaacaagggatcaatgacaagaaaagttaaaaaaagggaataacctaaacttcaattactttactgagtgaggtcacatctaatatcactcatatctacaatgcacgaatagtaagtagtatttggtataagtgtaaattagttcgatt

SEQ ID NO: 2404 - DNA, 502 bp, Glycine max
  unsure (1)..(502): unsure at all n locations
  Clone ID: jC-gmfl02220050a06d1
aggacttaaaagaattatcacttgaatgaattattagttcaccaaactgtgaaagctagactttcataattacaaactgtaactaacatcgaccccttatagatatgttcaatatttgttcaataacaagtatatttctcaactgcctgaaggtctagttagtgtataccaatgtgactagcaattgacaggaaatttgccaagagaaaacctttcaggaagaagctgaatgacatgcattttgcgggcaaaattttgatagatcatatttccttatgtgctggcactagacaccaattccgaactttcaacattgcttcctacatttttctgaattactggaggagatgaaggtgtccttgcttcagccaaattcaaccgcaagggccgaccttgtacctncacaccattcatgatgtccaaagcagcccgtgcagattcggcagtttcaaaagaaacaaacccaaaacctcgagatcttccactgtccctctcatagatg

SEQ ID NO: 2405 - DNA, 528 bp, Glycine max
  Clone ID: jC-gmfl02220050a07a1
ttcatataatattgcttcttggttcattctagctaattttgatggctcttccaatttgtctcaccgttattgcaattttcaccctttgctgtgtcattaattgtaacaatggcgttgaagcgtttcatgacatatacccggatcttcaatccatttcagcacgttcggtgagcaaacttcagagaactggataccattttcaacctcgtaagaattggatcaatgatccaaatgggcccatgtactacaatggaatctaccatctattttaccaatacaacccaaaaggagcagtttggggcaacatagtgtggggacacgcagtatcaaaggacctcatcaattggaaagaacttgaacctgccctatacccatcaaaaccctttgacaaatactgggtttggtccgggtcagccactgtactcccgggttaaggacccgtaatcctttatactggagtcattgacaagcaaagcaatgaggttcacattgatgccatacttgaaacaaaatccacccaatttttag

SEQ ID NO: 2406 - DNA, 247 bp, Glycine max
  Clone ID: jC-gmfl02220050a07d1
ctattcgcctaagccccgatgacaagcagcctaacggaaaacaaagagcagcccaccgaaaaaggaaaaaagagagagacaacaaaaaaaacaaacggggaggccgaaaagaggagcaccaacagccgggggacaaaacccaaaaaggaaaaaggaaaggggggcgcactaaaggcccccaaaaaaaagggggggggggggagaaaaaccacacggaggaacgagcaccccgaaaacccggggggat

SEQ ID NO: 2407 - DNA, 535 bp, Glycine max
  Clone ID: jC-gmfl02220050a08a1
ctcccacaccacacccatgacactcctcctgctccttattctcctctttcacgcggcggaagccaagggacagtggcagctcctccacaaaaacatcggcattgtcgccatgcacatgcagcttctccacaacgaccgcgtcatcatcttcgaccgcaccgacttcggactctccaacctaaccctccccgacggaagatgccgcaacaacccaaacgagttggtcgtcaaacgcgactgcaccgcgcactccatcgaatacgacgtcgcagccaacacattccgcgctctctttgtccaaaccaatgtctggtgctcctccggttcggtctctcccgacggaacattagtccaaaccggtggcttcaacgacggctaccgtgcggtcagaaccttcaccccgtgccgctcgtgcgactgggcagaagttcagcatggactcgcggtgcatagatggtacgccaccaatcacatcttgccagatggacgtcaaataattatcggaggaagaagacaattcaactacgagttttac

SEQ ID NO: 2408 - DNA, 425 bp, Glycine max
  unsure (1)..(425): unsure at all n locations
  Clone ID: jC-gmfl02220050a08d1
aaacaagagttatatattattgctttattcatttatttgacattttataacttgggaattgtatatgaaaccagacactacagataaagcatttgcttagtaatggctattgtacatatattgatatatagcacttaaactgcagtgccatatatatgtatatatactaaccagctagtggctaagtttagtactagatgcatttttacacaaacttgtgcgtcctcttttggtggttataattaggtgagaagggtttaaagtttgatatgattgcgtggttgcttaggttgtttttccatgaataagaggcaagtcaacttcatcacaccactcgatgtacctagtttcaaaataagaaccctttgcttggttgggcaaatagctaacccaaaactctccccctattctncactttagcacac

SEQ ID NO: 2409 - DNA, 328 bp, Glycine max
  Clone ID: jC-gmfl02220050a09a1
attttctcgggatccgccgattcaccgtgcgatcccggggtttcttcttttttttcttcttcaaccccttcttccatttcctcttccttcttcttcttcttcttcccccccccccccccctaccccaccccttttttccctttcaattttcaatcttgtatctcgaaaagaaatgacaaatacaaagaaataggatcaatgaacgatcatctggtgctggtcgtggaccatctggtgcggcccgtgccggtggtcgagccgctgctggagctggcggagaggcgtatctgcctagaggaggacagtgtcagcgatttggagaccccct

SEQ ID NO: 2410 - DNA, 96 bp, Glycine max
  Clone ID: jC-gmfl02220050a09d1
cgggactgtgcccaattaattccctggtcgacaggctcactggtcggacggcgcggcctgggcgcttttcttcttaatttgccacatttgagtcct

SEQ ID NO: 2411 - DNA, 457 bp, Glycine max
  unsure (1)..(457): unsure at all n locations
  Clone ID: jC-gmfl02220050a10d1
agttggttggatttatggatcggtgatgtttattttaaactgcgttatctatccgaatcttcccaaaggaattgaagataaccatatattgctgagatccattgatgttcttattggatttatgttttttttttttaataaaccacgttatttcaatgtgatgtgaatctatatgattgagcctgataaacatcctttgcccctactatgactgcattttttttatttgatatggtttggtttcttccactggtagagcttcagttcgaggttctaaattatggttgttgcgattttgttgtacaaacattgacattgtggcctaaatcaaggtcgcacaccattttttaaaaaaacttgttttaagctttgaatgggtattgaatattgnttgtatcagctatggattttaccagctgcagagttctgttgtgtattttgtatatttattctattt

SEQ ID NO: 2412 - DNA, 417 bp, Glycine max
  Clone ID: jC-gmfl02220050a11a1
ctggaattcgagaagctaatcaatcgtttgcggttgctttgttcctcctctcatggttaggggaggaaggtttagcggcaaacgcaatttcaggaaaagggttcggtcaaaggagggaggttctgatgattcggatgaagactttgtggtttcagatgaatgttgagaggcatctgactattactgctcctccttagatggatgcgcatcagatgagggttttgatagttttatggaagaagaggacgagcaatttcgaagagtgaggagtatcaatagattcaagtcaataaagggcattgctggtcggcggaaaaatggcagttaaagctcacacaggaggggaaggattacatatgccgaagaagaagacgtagaagaggaggacgaggatgatgaagagtttgaagacaaata

SEQ ID NO: 2413 - DNA, 603 bp, Glycine max
  unsure (1)..(603): unsure at all n locations
  Clone ID: jC-gmfl02220050a12a1
ggaaaaatccttatcagatggggatgcaaatgtaatattatcgagggaggagaatgacagtcattcaagtgttgagagctgtaacagtgctggctttttttcaacaggtaagaagagacgtaactttcaacaacagttgataattgggagttaaagagtcaaaaagcatattgaagaatcttctggtttcaaatcctatgttaaacaggatagctcattcatgaactggatttcaaacatggtgaaaggactccaacaatcaattcaaaatgattcaaacactttggctcttacccttacaaatccagatcatcataatctactgcctgacgagaaacttttcacatgcaatatgaatcaagatcccgagccaaaaaatacaggattcaagtccttttttcagtccatatattgtccaagcttgaagaatggaggaacgagaatgtctcatcaagaagggaagagtagtgatgatttagagccaggtaacatggaacatggaatagatgctacnttcaatacctattgggcagaaaacaatagtctttccaaactgcgtntgcaatcaaataagtttgaagtatctattgggggaaaatgatg

SEQ ID NO: 2414 - DNA, 344 bp, Glycine max
  Clone ID: jC-gmfl02220050a12d1
agaaacgggaaaacatattttttttttatataaaatcccttggaaccccattaaacggaaaaaccccggaggggataaaccagggtaaaaaaaaggctggcagaaccaatttatgcaaaccccccagcatttttatccttcccaaaaaaaaccctttttttttactagcaaagggaagggcttccttagcaaggggatttacatccggaaccggggggtggaccttagcaactttagcaatagcctgggttttttaagggggtccacctttcaaaaagaccccgaaaacttttccgtgtttaaaccagtatggcccaaactttggctttgaaaaccccggattg

SEQ ID NO: 2415 - DNA, 455 bp, Glycine max
  Clone ID: jC-gmfl02220050b01a1
agagggggtcagagtgagaaatagaaagttagaattcggcaaccctaatttctgaaggatcggcgatgactgtctccaaggatcgcgagaacttcgtgtacatggtcaaactcgtcgaacaggccgtgcgtctcgaagagatggaggtatcacagaagaacgttgctaatctcgacgttgaactgacggtggaggagcggaatttgctatctgatgggtacaagaatgtgattggtgctcgcagagcgtgctggaggatcctgcctttcattgagcagaaggaagaaacaaaagggaacgagttgaatgcgaagcggattaaggagtacagactgaatggtgaattggagctatcgaacatctgtgatgatgatatgagagtgactgacgagcaccttatcccttctgctgcaggtggtgaatccactgaggattactatacgatgaacggagat

SEQ ID NO: 2416 - DNA, 541 bp, Glycine max
  Clone ID: jC-gmfl02220050b01d1
aaaatcagaatatttcttcggagtggatataataattgttgaagcgtacaaaatttaacaaatccaaaaaagataagatgatttgggtgagctttcactgtgacttacgtctatagtgaagagagctacactgaaagcttaggccatagaaatagagctacagaatacacttatacacctaggcattagtaacttatataagtgaatattatggcactattctgagaccttaatgctttcacttgtgagccacatcttcttttgaattataagcactacttcatcatcatcatcatctttaccttgatctacatcatatatggtcacagcattccagtgtaatgctgacaggtatttctttatgtactccaccatggaacgcttatcatggatgatgatgaaaccctttggccttaggattctgtcaatctcaattaataaatcctctggactgcattctttcttaataatatcagaaaacacagtccatgcatggagtagatcgtacgttcgagggtaggttgaaaatgcttcacaccag

SEQ ID NO: 2417 - DNA, 519 bp, Glycine max
  Clone ID: jC-gmfl02220050b02a1
gtaggttgctgcaaaaactgccagccatgccaacaagacattgagaattactgcagcaagaagatctggtcttacaatgatgtttatgtcgatggaaaacccacacagggtggctttgctgaaaccatgatcgttgagcaaaagtttgtggtgaagattccagagggtttggcgccagagcaagtggcaccattactgtgtgcgggtgtgacagtgtacagtccactggtacactttgggctgaaagagagtgggctaagaggtggaatattggggcttggaggagtgggacacatgggggtgaagatagcaaaggcactgggtcatcatgtgactgtgatatgctcttctgacaagaagaaacaagaggcacttgaacaccttggagctgatcaatatctcgttagctctgatgccactgccatgcatgaagctgctgattcacttgactacatcattgacactgtgcctgttggtcacccttttgagccttatctcttcttgctcaaacttgatggc

SEQ ID NO: 2418 - DNA, 592 bp, Glycine max
  Clone ID: jC-gmfl02220050b02d1
aaaatcagaatatttcttttgagtggatataataattggtgaagcgtacaaaattaacaaattcaataaagataagatgatttgggtgagctttcactgtgacttacgtctatagtgaagagagctacactgaaagcttaggccatagaaatagagctacagaatacacttatacacctaggcattagtaacttatataagtgaatattatggcactattctgagaccttaatgctttcacttgtgagccacatcttcttttgaattataagcactacttcatcatcatcatcatctttaccttgatctacatcatatatggtcacagcattccagtgtaatgctgacaggtatttctttatgtactccaccatggaacgcttatcatggatgatgatgaaaccctttggccttaggattctgtcaatctcaattaattaaacctctggactgcattctttctaataatatcagaaacacagtccatgcatggagtagatcgtacgttcgatggtaggttgaaatgcttacaccagttgtaactggtctattagtcctctgtcgatattatcttgagatttttgtcattttt

SEQ ID NO: 2419 - DNA, 557 bp, Glycine max
  unsure (1)..(557): unsure at all n locations
  Clone ID: jC-gmfl02220050b03a1
attcatcacaacttctctcgtacctctgcagagaagtaaacatataggagtgagagggagggagagagaaggaaagcttggtagcgatggggaaggagcaagttcaggtgctgaatgccctggacgtggcaaagacacaatggtatcatttcacagcaatcatcattgctggaatgggcttcttcactgatgcttatgatctgttctgtatatcactagtcacaaagctacttggtcgcatttactaccacgttgatggggctgcaaagcctggttcattgcctcccaatgtgtcagctgcagttaatggtgtagcttttgttggaacactttcaaggcaactcttctttggctggctcggcgacaaaatgggccgaaaaaaggtctatggcatgacccttgcgcttatggttatagcttccattgcttcgggtctatccttcggacacgatgcanagactgtgatgacaactctatgcttctttcgcttcttgcttggttttggcatggtggagactaccctattcgccaccataatgctgagattcttaatagag

SEQ ID NO: 2420 - DNA, 318 bp, Glycine max
  Clone ID: jC-gmfl02220050b03d1
cagcgtggttgtttattttgatagctctatcatatgataaaaattcatatgagaaagctcccaaaataaacaaattgatattctatacctgcccggagcagagcctcaagtgaatttacggttatatgagatcatgggtcatactcaatagacccttttgttcaaaacaagctatttgagcggctaaaccactaataataggcaatggccccgagtctcgatcatataccaaatgacgatagattcaagagtctgaagtctaccatgctgctactgcagttagtgaaccaagccatacaccactaaatacgcttgtaa

SEQ ID NO: 2421 - DNA, 515 bp, Glycine max
  Clone ID: jC-gmfl02220050b04a1
gaagaaacttaatcgatcatcacttcacttcactaatacatcatggcagacgagacccagaacaagtatgagagctctgaggttgaggtccaggatcgtggtgtttttgactttctcggtaagaaaaaggatgaagaagacaagcctcatcctcaggaggaggtcatcgccaccgagtttcaaaaagtcactgtctcagaccaaggagagaacaagcacagcctcttagaaaagcttcaccgatctgacagcagctctagctcttcaagtgaggaggaaggagaagatggagagaaaaggaagaagaagaagaaggaaaagaaagggctgaaagagaagatcgaggagaaaatagagggtgatcatcatcatcacaaggatgaggacacaagtgtccctgttgagaaagttgaggttgttgaaacagcacatgctgaggaaaagaaggggtttctcgacatgattaaggagaagctaccagggcacaagaagacagatgaggccacagctactac

SEQ ID NO: 2422 - DNA, 404 bp, Glycine max
  Clone ID: jC-gmfl02220050b04d1
ttgtcttttttttttttttttttttttttttttttttttttttttttttttattttttttttttttttttttttattgtacagagccaaattccaggcttacaaaccggggaatccgaattaaaagatctcatgaagggtaacctaaagcaaattcaggggggggtgttttaaaaggtcataatggggaaaacctggggggtccccaaataaaatggcacgagacatatgcccattgtgccaagtggggaaagaacgaaaagggcctgaccgatggcccttaccaaaaggagcgcaaactgaatgggaaaggggaccccccttgtgcaggctgcttaaacgcggccgaggggggggtaacctccggcaggaacgctgcaatagccggggtcttaaagcccgtta

SEQ ID NO: 2423 - DNA, 494 bp, Glycine max
  Clone ID: jC-gmfl02220050b05a1
gcaattttataggtcctccaagaaagagagagagagagaggaaaacgaaaccaagggagaaaaacaaccaccgtccaaaccaccaccaacaacgtacgtcttacgttgttacatggccactcgtgttatcccaccaagaatcctaaggaagcttcgctacaacaccgtcacaaaacccctcaactcctctcaccctcctctctccccgtctctctctccttctccctgcctcctacctgctccgctgccgtcccccgccgtgctccgtccctccgccgccgcctccgacgacctcagcttccgcgacgtcgaaaagctcttctcctctgtctccaccaccagcctcctccgctcctccgccgtgctgcacgccaccgtcgtcgagcccatggttgacttcggcacatggctcttgcgatcaaatctcatgcacgtgcatggcatccgcgacctcatcctcgccaccgtccgcaacaccttcttcgaccactttt

SEQ ID NO: 2424 - DNA, 406 bp, Glycine max
  Clone ID: jC-gmfl02220050b05d1
aaggggcccctgtaactcaaaatttttgaggaagacggtccaatttgaaaaattttgtaggatcatctcaaacttagcatcttttttttgcccctaaaacattgaaaatgctaaaaatgttacccgcaagttccattacaacttttaccccttggattagtccaacaacctttacgaacagaaatttttacttgccaagtttgctttgcctccaattcaagactggaaaaaagttcccctctgaatagcatcctcgttagcatttccaagagcagcctcgttcaagtacttgtcagccaattggacttttttgacattctcttgttcttggacaagcttgttaccatacagcaagagcttctccagagtcattttgggctgctcaaaggttggaggcccatctttt

SEQ ID NO: 2425 - DNA, 560 bp, Glycine max
  unsure (1)..(560): unsure at all n locations
  Clone ID: jC-gmfl02220050b06a1
tagcattctgactcatacccaaattatttattgtttgtctacgaaagcagtgaaaaaaaatgacagtggagcttatggggttccccaaaatggaggaacagaaggcaattcaagaagctgccttcgaaagcctcaaggccatggaacacctcctccgtctcctatcctatcaaccctctcacctccacgctcaccacaccgacgccaccgtttccaacttcaaaaaactcatctccttactcagccgccgcaccggtcacgcccgtttcctgcgcgcacctcttccttccccgccaccggctaacccggtcactctccaccaacctgccttcaccttcgtcccttcgcactcccagtctctaaccctcgatttcacaaaacctagcattttcgcctccaacgccaaatccatggacctccaattctctaaagaaacctttagcgtctccttcaactgctacttcatgtcctncgtcataaccggcgacgccagtgtctcttacagtaaactaggatcctctctctttcttacttcttcgccagtctcagccggaaacctt

SEQ ID NO: 2426 - DNA, 598 bp, Glycine max
  unsure (1)..(598): unsure at all n locations
  Clone ID: jC-gmfl02220050b06d1
gaactcaatataccaaagcaatcaaacttgcgcttcttgcatatttttgcaaatggacataacatatataattacgtatttaatatatattatgcaaatcactaattagtagtagagctaatagtagtaataatagcactaggaataatatagtaattaaaagaaaaattaagaagctagcatcagatcatacacttgtgattattttgaccctcaggaatgttgactggtggaatcacgtccatcgtctccgccgtgatgttgcccggcactgcccggaggctccgagacgccgttcgccggaatctgcctgtaggcattaagggctgcaagcatgcctaagttactttcattagaagttgagcaccgccgttgccaccaccggcgtcaccgtcaccaacgataccggaacctagttgacctccgggcataaggttcatcggagaagcgaaattcatgaaatgaatgccacctggagcagacatagctcctctatacacaccactattcccaacagagggaantgcccaatgggatattatcgctgctacatgggttgcaccgcgcgttgcacacactatgggtggtgcggaccgca

SEQ ID NO: 2427 - DNA, 492 bp, Glycine max
  Clone ID: jC-gmfl02220050b07a1
caacaacaaaaaaaaaaaaaccatcccttctctccaaaacgaccaaccaaaggcaaaacgcacaacaacgatgaagaagcagaagcgctcggaccctcaaaacgacaccactaaccccttcgaggttctcacggaggagctaatgttcgtgatcctggacttcctcgaaacggcggcgccgttggataaaaaatccttctcgctgacgtgtaagtggttttactcgcttgaggcaaaacaccgtcgtttgcttcggccgttacgggcagagcacctgcccgcgctcgcagcccgttacccgagcgtaacggaactagatctctcgctgtgcccgcgcgtgggcgacgacgcgctcgggcttgtcgacggcgcgtacgcggcgacgctgcggcggctggacctgtcacagtcgcggcggttcacagggagccggcttatgagccttggcgcgcagtgccagtacttggtggagttggacttgtcgaacgcgac

SEQ ID NO: 2428 - DNA, 516 bp, Glycine max
  Clone ID: jC-gmfl02220050b07d1
gcactatctaatgttgaaataaataaagaaatgcttatttgattgaaaatacattaatttgtaatgtataataataataataatgatatgggggtataggtacaaattttgctaacattttgtacacaaatactttcccgcagaaaaacggtgaaggtgattgattgctctaatcaccgttcaaaaagatcaccatcgaaatcaagccttgaagtccaccatcaatttgttcaacttcttgttgttaattctctgttcgataaaactcttcccgtagtcatcactttgctgcaaggaggaagaggcaccaggcgtcaacttgcgggcgagctgaacggcgtcgtcgtgggtgttgataatgtgattgaaacacaaataacgaccgtaggatgagacattctcgtagacgcagatgtgggcgtcgaccaagaagctcaaatcaacggtcacgaacaccccatcctcggacatctttgcggctcctcttacgtaaggctgtttgaccgagagatcatg

SEQ ID NO: 2429 - DNA, 507 bp, Glycine max
  Clone ID: jC-gmfl02220050b08a1
gtgaggaggaaaatgatgatgaattggctcttgtgccttgggtaccttcaccttcttaccagttctccgctgttgatgattctctcaacacaaatgtcgagttgatggaagctgatgaaatgggagaaggagaaggtgtgggatccatgatgatggatattgaacaagaagatgacactgacactgacgctaaaacttcaacatcaagcattcactacccaacgacacacggtggaataacagaggggttccagcaacactgcttgttaccaaagcttcctcacaacacctcaactcccattacatggacccgctgaaatttggtttgatttttattttgatagtatataccactattttctttgctgttaagcaaggttttctcctatttgggataaaggggtactagactagaacctagtggaccaaactagtatttagcttgcttttgcggtatgggaatctttccttggaagaagccatccaagtgcaacgaataaaagaaat

SEQ ID NO: 2430 - DNA, 459 bp, Glycine max
  Clone ID: jC-gmfl02220050b08d1
gcattaaaatcctatatttaggagcaagagtattgaaaaaataacacaagctttctcacttgcgagtgagtacctatacttactgaccctttttgaggtcaaatcaaatccacatgccatttgctcccccatacttggaaccaaaagatgatgcatgaaaataactagactctctttcagaatggggaaacccccctctctgcctcattgacaagattacaaaatctttacaacctatacaaaatttaacagattcagtaactgaagttagaagatgagatcctccattctttctaagtggagtctggataatgaagccatgtaaatgaatgccattacttttttgagaaagtgagatatgggtcttgagcaatggttaatacatctggtctctcagcctgggtatatgttagacaccgtcgaataaaatcctttgcctcattagaaatggtaggtcta

SEQ ID NO: 2431 - DNA, 496 bp, Glycine max
  unsure (1)..(496): unsure at all n locations
  Clone ID: jC-gmfl02220050b09a1
tgatttttctttgaacagtcctggcatggtaaacccagcttccaggcagatctacttgactttcccagcagatagcactttcagggaggaagatgtttcaaattacttcagcatatatggtcctgtccaagacgtgaggatcccataccagcagaagcgaatgtttggttttgttacctttgtttatccagagaccgtgaagcttattctatctaaaggaaaccctcattttgtgtgtgatgcacgagtgcttgttaagccttacaaggagaagggcaaagtcccagacaagaagctgcagcagcagcaggtagatagaggagatttttcaccatgtggtactcctactggattagatgctagagaccaatttgatcttcaacttggaggcagaatggtctacaatactcaagacatgctgtggaggaagaagctggaggagcatgctgatttgagcaagctcttgagctacatagtangaggctaatgggtctac

SEQ ID NO: 2432 - DNA, 491 bp, Glycine max
  Clone ID: jC-gmfl02220050b09d1
gcataaacgcagttcatagtttcatatatatctttataaatatcatatggtgatgaaggtggctaggcctcttcattgcagatacacacgacctctaagcatggcccctatagcttccaatggagaatggtggccacatctttaacctaacaaagaagaaaaatgcagtggtgaaagaccataaaaatattacacgttccttgaacaaaacggattgaacttcaatttggaatagagggtgatatgtggagaaatctccatatccacttttattattaggaaattcagcacatgcatgcattataacaagagcaattaattacagagtacattttagataggagaatacttagggaaccaagatgaggtcattgataatggttgatgttcatacggagaaagaggatgcaaggccaaactgaaggccccaaagctcaaaagatcctttaacaaagtcataggatcctcctttcagtgacaatggttttggt

SEQ ID NO: 2433 - DNA, 548 bp, Glycine max
  unsure (1)..(548): unsure at all n locations
  Clone ID: jC-gmfl02220050b10a1
aagaacactctcttgaacattcatggatccagtgagcgtgtggggtaacacgcccttggcgacggtggatcccgagatccatgacctcatcgagaaggagaagcaccgccaatgccgcggcatcgagctcatcgcctccgagaacttcacctccttcgcagtcatcgaggccctcggcagcgccctcaccaacaaatactccgagggcatgcccggcaaccgctactacggcggcaacgaattcatcgaccagatcgaaaacctctgccgctcacgcgccctccaggccttccacctcgacgcccaatcctggggcgtcaatgtgcagccctactccggctcccctgccaacttcgccgcctacaccgtcgtcctcaacccccacgaccgcatcatggggctggatctccccttcggcggccacctcacccacggctactacaccttcggcggcaagaagatctccgncacctncatttacttcgagagcctnccttacanagtaaactccaccaccggctacatcgactacgaccgcttggaggaaa

SEQ ID NO: 2434 - DNA, 426 bp, Glycine max
  Clone ID: jC-gmfl02220050b10d1
aaaaccatgtgcaccagagaggtttacatcttgttccaacacacttatttcattagataccgccgttccatccaatgaatctagtgtagacaaagcttttttgggtgcaccaacaagttccataaaatcagcaccactattaagcagatctgtatattttccacattgagtaattttcccatctttcatgaccaatataaggtcagcagcaggtaagaactccacttgatgagtgacataaaccactgtctttgaacataaaaggcctagcaagcattccttaaagaggtgagatcctgtgtgagcatccacagcactgaaagggtcatcaaatagatatatatcagcatcttggtaaagtgcacgtgcaatttgtattctttgcttctgtccaccactcaaatttattccacgttctcctataat

SEQ ID NO: 2435 - DNA, 605 bp, Glycine max
  Clone ID: jC-gmfl02220050b11a1
tggctcccagaaggccctttcccttcccactgggataggtattgtggttgcaggccctaaagctattgaggcctcaaaacatgctaaatcacttagagttttctttgactggaaagactacctcaaattctaccagctaggaacctattggccatacactccttccatacatttgctgtatggtctgagagctgctcttgatctgatttttgaggaaggactcgaaaatgtgatcgcaaggcacagtcgtttaggcaaagcaaccagacttgctgtagaggcatggggtttgaagaattgcacccaaaaggaagagtggtacagtgacactgtgactgctgtttttgttcctgcttacattgatagtactgaaatagttaggagggcatggaagagatacaatttgagcttatgtcttggactgaacaaagttgctgggaaggttttcagaattggacatcttggccacttgaatgagttgcaactgttgggatgtctagctggtgtagagatgatactcaaagatgtgggttatcctgttaagcttggaagtggagatgcttgttgcagtgcttactaccgaacactatttctatgatcccttt

SEQ ID NO: 2436 - DNA, 468 bp, Glycine max
  Clone ID: jC-gmfl02220050b11d1
acgtgattcattttcaacattttatttctccattgagagtgtgacaaaccaaaagttgaaggaataattttttagccctttttttcctgtgatcatactttattttctaactaaaattttcttttctctgatcatactttattttctaacatgaacatgctagccagaatagaaagaatttcagaagtgactaacatactaaccatctaaccaaagccagaatctcctgactattttttaactccctctaatttaaatctatacactttaaatggtagtagcacatgcctcgaccaaaacgagctggcatgataattaccaagcgtttatggatcgaactgccaggacgagcggaatttctaatcatcgcagccaatataatccaccctacttttcattttgacatatttgatgttggtcgaatctcaatattgactttagaataacccgaaaaacaattatacgaag

SEQ ID NO: 2437 - DNA, 558 bp, Glycine max
  Clone ID: jC-gmfl02220050b12a1
ataaaaaacaaagtttcatactttacgacacccttttctgcaactgatgatggaaggaagctgaaacagtgaaaaacagcaacaacgaccaccctgtctttgttttttgtttgttgagttgaaactttagagaaagtgaatagtgatatggatgcaaagggtgtgcggatcttagcgtatcaatcaatattttcgagcgttggatctggggacttcgatggggtgaagaaactggtggaggaagtgaagaaggaagaagggtcatcgctctctgatgtgatgtctcttcagaacgatgctggagagactgcgctatacatcgctgcagagaataatctgcaagagatgttcagcttcttgctcagcatctgtcactttgaggtcgtcaagattcgctccaagctgatatgaacgcctttcatgttgctgccaagcgtggcaatctatggttttttttttatttttcatggaataagttcttcttacggatgttgctattaattcagttaaatcattacatatgatagaatccgatagttctaatgtttcaacagaatt

SEQ ID NO: 2438 - DNA, 379 bp, Glycine max
  Clone ID: jC-gmfl02220050b12d1
ccccgggggaaaaaagccggggggggtccccaaaaggggggggtgagggggggaaacataccaaaaaaaaaggggggcccctaaaaagggatcccaaaaaaaaagacgggggggggaaaaaaatttttccccccgaaaacccccggggggggaaaccccccggggggggaaggcgggaaaaaaagggggcccccccctttggggaaacctttaaaaaacggggggggccaaaaaccccccgccaaaggggggaaaaccccggaaaaaaatttgccccccccccttgggggggggcaaccccccccccgggggggggcgggcgtaaaaaaaaaaagttggggaaaacccccaaaaacattacaccaacgggaagggcccc

SEQ ID NO: 2439 - DNA, 567 bp, Glycine max
  Clone ID: jC-gmfl02220050c01a1
gaaaaaaaagggtttcacactttgtccaatctttcacactgaactcttcaattttcaattctctttttcatgcaccactcttctttttcttcagacaccttcatcatctgcataccgcttagctccaaaaactacacacacaagaattctgtttctttctgttgatttgatggatccgcagatctaatggtttcacacactttcttcactacggatcattgtcttcttcatctggggcaccccaatagcttcttctaatcgatagtcaaattttgttggtttgtggtggatcatcttcgtcgttgtggtgactagtgaggagtgcaggactatacctatctatatagtgtatgaaaattctggggggtgaagtcgtttttggggtagttgatagatgttgaaatccttgacggctgtttggtgaaatgagggatgttatcggggttgatgaacttattgagggcctgctttcggccgggttcggatggatctacacgtgcaggttcggatgccggtggtagacaggatggactattgtggtacaaggactcggggcagcacttgaat

SEQ ID NO: 2440 - DNA, 537 bp, Glycine max
  Clone ID: jC-gmfl02220050c01d1
aagtacacaactcacagcaaaaaggtttataagctgtaaaggtacatgtaaccataaacaaaaatagtctccaagactataaaaacattacattttagacaaattagtcttcttccacttcatcctccgtcaacacctactacaactgctggtgttgctgctgcctaacatgtatcatattcactacaaacatcttagtaggagtagcctttgacgaacaactccttcttggcttcctcagattcaccctcaccggtgtacttcccaagctgggcgagcgagttggacttggcacggaaaagaagtgcatcttgtgccgccttcacattctctgggcggcctccccatgtcttcaaggcagtgttttggagggctctggcatacgagaacgacacgtgccacgggtttggagattggttcatggcattcaagttgagggtagcttcaacctcagactgtccaccagacaaaaacataattccagggacagcagggggaattctcctgtgaaggagcttgagggtgtaatcagcaact

SEQ ID NO: 2441 - DNA, 511 bp, Glycine max
  Clone ID: jC-gmfl02220050c02a1
cccattctctcgcatctcaatacccttttgatttgtgaaaggaaagcaaacatgcttgatcaggtccaacaccctacaatcatggacaaggttgctggccagctccatctccgttctggtgtttctggtattaggagttatgaaggagcctactgccaccccacaatgtaccaaagaccctcttttgggaattactcgaatgctgcattgcagtatcctgtgatgccctcatgcaaagctactatggatttgtctgctgctgcaacaactgcctcccccgtctttgttgctgctccagcagagaaaggccattttcttatagactttctcatgggaggtgtttcagcagctgtctcaaaaactgctgctgctcccattgaacgtgttaagcttttgatccagaaccaggatgagatgatcaaaactggtagactttctgagccctacaagggtattggtgattgctttaagagaacaatggcagatgagggtgttgtttcttatggagagg

SEQ ID NO: 2442 - DNA, 390 bp, Glycine max
  Clone ID: jC-gmfl02220050c02d1
acccaaaagttttttttaaaactaatttaatttttttataccaatacattattattttaactttaaattaaaaaattgcaagggccctgaggggcccccgccatacaaatagctataacttttatgggaatcttttaatcccacagtttattggacaaattttgctttggggagtactataaattttaaaattttaaaaattcaatttcctttctttaattgactaaacccattgggcattgtaacaaagccatttgggcatgtaaatcaaaaactggttaaatttcactccataaataacagcgatgagggtcacaggctggtgtaacccctaattggagaaaattgttgggaaatgaagaacattaccagaatttgaagccggaattg

SEQ ID NO: 2443 - DNA, 574 bp, Glycine max
  unsure (1)..(574): unsure at all n locations
  Clone ID: jC-gmfl02220050c03a1
ctatcgtagcaaagaaagaaagaaagaaaaccctagcttaccttttcaactttcaagatgcaaatcttcgttaagacactcactggtaagacaatcacccttgaggtggagagttcagataccatagataatgtaaagtccaagattcaagacaaggaagggatcccaccagaccagcaacgtctcatttttgctggcaagcagcttgaggatggacgtacacttgctgattacaacatccaaaaggagtccactcttcacttggtgctccggctccgtggtggaatgcaaatctttgttaagacattgaccggaaagacaatcacccttgaggtcgagagctctgacaccattgacaatgttaaggctaagattcaggacaaagagggtatcccaccagaccaacaaaggcttatctttgcaggaaagcagctagaagatggcagaaccttggctgattacaatatccagaaggaatctaccctncacttggtgctccgtcttcgtggtgggatgcaaatcttttgccagaccttgacttggaagacaattacccttgaagtggagagttctg

SEQ ID NO: 2444 - DNA, 554 bp, Glycine max
  Clone ID: jC-gmfl02220050c03d1
cattattaagaaaaggtaacgaagataaaatacgagcttgttttatagcaattgttattaatcgttgttgttttaaggtcaatctatttacgcgtctggataatatttttccttgttcactaataaatcgactaattaaacccatgtttttataatcaattcggtcccccgattggatcgggggcaaacgcctacgaaaagatcgcttggatttcataaagagtcgcttagatttttccatggtttatttatccctattccaaaaatcacatttattacaagaaatactataaaggatttgtttttttattctgacttttttaatatatgttgctatttttttaatatatgtcgctatatactgatatttgtatatattcaactgttaatgatagaatacagatagatctatctatttagataagaaaaatagatcattttacatgttaagttctttggttcgaagggtaacacacaagcgatcaatttgatctacttctttatttctgcgtgaattgatgttagcaacacggggacaaaatttttaattccat

SEQ ID NO: 2445 - DNA, 567 bp, Glycine max
  Clone ID: jC-gmfl02220050c04a1
gtgagcacaagcttggttctagtagttttagtagctctcacagttcaaattttctacatttcacccatagatccagttttgctggatataaaacctgctccttcaaccaaagacaatcaattacagaatatcattaagcttggagaaggacttttgaaggaaccagaagatgttgttgtagataaagaagggactctctatacagctactcgagatggttggattaaaagattgcgcaggaataatggaaaatgggagaattggaagcatatagatagtcatactttgctaggaatcgcaacagcaaaagaaggtggtctcattgtttgtgatacttccaagggtttgctcaaggttacagaagaagatggttttagtgttcttgcttcacacgtaaatggttctcagttaaggtttgcagacgatgtgatagaaggctcacacgggaatgtatattttagtgttgctagtacaaaatttgatcttcaagattggtatttggatgtgttagaggcaagatctcgtggacaagtttttaagtgcaatcccacatcaatgagactgtat

SEQ ID NO: 2446 - DNA, 522 bp, Glycine max
  Clone ID: jC-gmfl02220050c04d1
gcatacataactcattatacactacacaatatgccaccggctcgagggtactgcgaattacacataacaatcaaatgtgatcgctttcaccaaatagaattcagcaagcaatatttaatggatacaaaataaaattcgcatagaatgtcataagaaacttcttagctatatcctattcgcatagaatgtattcagccaagtttgttctccacgatacaataaaagagaagcaaccaaaacgagtatcttagcaatagcatagcattacagaagaaaacggaaaaaattggtgcccaacttcttagctatatcctatttgctgctgttgctggggaggttggtaattcgcatacccaggataactgccatacatattggggtcctgtccagcaggggcataaccataattttcatagcccccctgagcatatccgtagtatccaccaccactaccattccactggtttgcatctggttgagcctgtttgtttgaaggacttcggccccatgaaagcctaacat

SEQ ID NO: 2447 - DNA, 547 bp, Glycine max
  Clone ID: jC-gmfl02220050c05a1
gtgagtttcaccagaatgcaagtttcaagaggccacaattaaccaagacagaaatgacaaaggcttgtaacatgactaaggatctaaagaggattcttagtgagaatttccatgatgatgatgaaggagcagagcctcagactgtattatataagaacctgtggcttgaggctgaagctgcactttgttccgtctattacaaggctcgctataatcaaataaagattgaaatggataaacattcataccaggaaaaagagatggagaagcaatctaaatctgaggttgttccgtctttgagccagagtcagagttttgcaactaaagtgcatcatccaaaccctgattcttctgctgcccttaaatttcgtgtcttggatgcaaccaatctggaggaactatcttgcttgaatatttccactgatatgaacaagcctaatgcaatgacacctgaaggaaaaggtggtcaaaaccttgatagcttcatcaataattattttgttccctgctagacgatgaggcttgaagatatgatgagtcttctgta

SEQ ID NO: 2448 - DNA, 503 bp, Glycine max
  Clone ID: jC-gmfl02220050c05d1
ggtgcatcaaatcaacagagataactctctgaatctttatattatagatctattattgattcattacatacataattcagaaggaaaaaaaaaaaaacataacaaaaaaaaaagtgtccgcttcagatttgatcgcatttttcctattgcacaaagcctgcgcatttcattcaagtttcaacagaagcgtaaaaattgcacaagtgtcttagataaccacattagaaaatgaaaagggcaaccaccacccatcattataataagtaaacaatacctacaaattgcactattgcaaggcattggcaccagccacaatttccagaatttcaccagtgatcttagcctggcgctccctattgtacacaatggacaagttcttcttcaactcaatagcattatctgtggcattgctcatggcactcattctggcggcgagttcactcgccaaggactcctgcaatgccctcagaacctggctgttcaaatacaagtgcagcagtgca

SEQ ID NO: 2449 - DNA, 492 bp, Glycine max
  Clone ID: jC-gmfl02220050c06a1
ggttatggagtgggcgctttcctgtttcttctttctggtgaatcactgctaatgggagtgacaaagtgcatgtgctttgggaggcccttaacacctggggtaaatcgagcgtggtccattatatattttctttcttcttgggtcacttttctggtagcagaagcttgcttgatagcaggtgcaaccaagaatgcctaccacaccaaataccgtggaatgatttatgctcataacttctcatgtgaagccttgcggaaaggtgtcttcattgccggagcggttttcgttgttgcaaccatgattcttaacgtatactattacatgtacttcacgaaggcaatgacaacaccagtttctcataaggcaaatcgggtgagctccactgttggaatggctggatatgcatgatggactatggctgaaaagggtaacatattgagtcttaatttcagtggatatctctatgattgtcactagcaaaacggtgatttt

SEQ ID NO: 2450 - DNA, 524 bp, Glycine max
  Clone ID: jC-gmfl02220050c07a1
gaaaaataaatttcagttttttttcataatgggttccaccaatgccaataatgaaacggccgcagagattccggagtggatccgcgtcttcaaagatggctccgtggaacgcccacttgattttccgatcgtgccaccgactctcaacactggactctcatccaaagacatcaccatctcacaccacccttcaaaaccaatttctgcacgcatttacctttcaaacatcaccaattcccagactaagaaactttccatctacgtctactttcacggtggtggcttcttctttgaatccgctttctccaaacttttcagtgaccattttctcaaggtggtccctcaagccaacattatagaggtttccgttgagtacagactcgctccagaacaccctctccctgcagcttacgatgattgttgggactctctcaaatgggtcgcattccattctacttaagacaccaccctcaacaacactgaatcttggttgactgagcactgtgacttcacagagtgttcat

SEQ ID NO: 2451 - DNA, 378 bp, Glycine max
  unsure (1)..(378): unsure at all n locations
  Clone ID: jC-gmfl02220050c07d1
atgagattgagttgagacaaagagatgattctcattaaggtcctagagtcctatcttatccaaaaattaggacatgttaacatgcacactagcagtcttataggatttacaaatgggacaaatgtggagtgaagacccacacacagtacacaagcacaaatgacggcacggcaaaatcagcacacaagactcttccttcctacagttcctgcacaacctcccattaccaccaccctccttatccttcacccctgcgcaccccgctaacgtgcgccaaccccccgtttccttttctaaaccgtcctcctcggtgctcccgcagcaggactcggcgtcgtccatctccgcgccgtcgacacggtggcgccttcgncgacg

SEQ ID NO: 2452 - DNA, 580 bp, Glycine max
  Clone ID: jC-gmfl02220050c08a1
cggattagcatcaaagcaagtttacaaaatttgggtgcgtcctggattgacccttttgccccctctccctcaccctccactaactcctcctttttggtttttataaagcacattcccaatagaggagggtccctacacaacacaacccttcaatgacgtccatggccactttcttcgcccaaacctccttcccctcccactctctctccaaaaccttcgatacccatttcgcccctgccccgaaagtcaacgtctttgtgaacttcagggcgaggaggcacgttggggtgcgagtttcgaacgcgctgatcgaaccagatggagggaagctcgtggagcttgtggtgacggattttgagagggatttgaagaagggtgaggctctttcgttgccgaggatcaagctctcaaggattgaccttgagtgggtccatgttctcagcgaatgatgggccacacccctgaaaggcttcatgagagaagccgagttcctccaaacgcttcatttcaactcgctccgactcgatgatgggtccggtcgtgaacatgtcagtgcccatcgtgcttgctattgatgatg

SEQ ID NO: 2453 - DNA, 446 bp, Glycine max
  Clone ID: jC-gmfl02220050c08d1
ccctgaacgagtataatgtatctccattgcttcattacatcctgtgtaacaagcatgtaaaccagtgcattagaaagcacaagattgcttggttttcaagtataatatctcaaaatacatcaaactaataaattggtcacaatggtcacccttccattcttctatacatcgacttggcactcttttttataccgctagtagtcatcatcttcatttcttgacccaaagaatctcctcacaactgcagcggcagcaccaagaaacataaacagaagaatagtgtcaaatccaccttcaacgcctacagctacactgggacctggtgcaaagaatgaaaatggagaccatccccagccaccgtaaaatggcacaccataaccatagccatagccaccaactagcggaggtgccactcgaggattaatatagatattggttctggaatt

SEQ ID NO: 2454 - DNA, 555 bp, Glycine max
  Clone ID: jC-gmfl02220050c09a1
agaagctgaatagtgcaggaatagtcacagttgaagactttcttcggcttgtggttaaagatcaacaaagattgcggaatatccttgggagtggtatgtcaaacaagatgtgggaggctcttttagaccatgcaaaaacatgtgttctaagtgggaagctctatgtttattatccagaagatgcaagaaatgttggcgttatttttaacaacatctatgagctgcgtggccttatatcaggagaccaattctattctgctgattctctcactgatagccagaaggtttatgtagattcattggtgaagaaagcatatgaaaattgggatcaggttgtggattatgatggcaaatcactcgtgaatgctaaaatttcttctgaaaatgaacttcatgtggagtcaattgattatggtagtggtttagatcatcaactgcaactgccggtccttccagtgtctgttccttctgaacagcaatcaattcagggatacctgttggaggttacaacgataataatatagtaacaccgattccaacccaatctttgatttc

SEQ ID NO: 2455 - DNA, 447 bp, Glycine max
  Clone ID: jC-gmfl02220050c09d1
gcaataaacaatcctgctattatttctttcattaaaattgaatttatgtacaaaagtattggctgagttattcatgaattaagcatctatatattaacaggctcaaaatgagcaaaaaataatatgcatctacactactttttcacattcaaaaagcttcccaaaattcccgttccctttaaacataatatgtaagggaaatttgaagtggaatgtgtgcacttgttttagcaaggcaagcaagagttgcaagacccatttccagactcctattaactgaaaatgaagttgcacaagttaatttgatgcaagtcaatcctgggatgtggcagaatattcaaaaagaaggcgtttggatggagcagattgtaggagcactcgcaaacgacttgtaagcagatagctcaatgtccattgcattgccatctcggactccttcatttgcct

SEQ ID NO: 2456 - DNA, 486 bp, Glycine max
  Clone ID: jC-gmfl02220050c10a1
tcctcttcaaaaaaccccacagccactcttgatttcaaaggcactatcttaggaatcaaaccggcgccggttatagcttctttctcagcgagaggacccaacggtttaaaccctgagatacttaaaccggatttgattgctcccggtgtgaacatcctcgcggcttggaccgaagctgtcggcccgaccggtttggactctgatacgaggagaaccgagttcaacatcctgtctggtacctccatggcttgccctcacgtgagcggcgccgcggctttgctcaaatcggctcaccctgattggagccccgccgtcataaggtccgccatgatgaccaccgccaccgtcctcgacaaccgtaacaaaaccatgaccgacgaagccaccgggaacagttccacgccttacgatttcggcgctggccatcttaacctaggaagagccatggatcctggtttggtgtatgatatcacaaacaatgattat

SEQ ID NO: 2457 - DNA, 489 bp, Glycine max
  Clone ID: jC-gmfl02220050c10d1
actgaaagaatataatgcatttaatcataaatccgcaaaaacatggtacgttttggagtctaaatcaataagtcgcagggctgcaatagccgccgcagcagacatgagggcaaagaaacaaatattgatccaatgccagagcttttgggtggatgttagtttgttctcatttgtcactaggtacatatggtttgcaaggataaatgtgaggggaaatgtgctgatagctccagtgaggctcatgaaatctccaagaaatggcaacagagctgatacaaatgtgtttacagtcaggtagccacctcttaccaagactcgaaatgacaagttcttgaaagccagggcactccctttgatcccatatttggtatccaaatactcatacattggacttgcaaatatatgcaatgcaatgactgattgaagaaaggctgcaatattggccatggccttagcccaaactggaccattcacatcactcatcaaata

SEQ ID NO: 2458 - DNA, 593 bp, Glycine max
  Clone ID: jC-gmfl02220050c11a1
cggtttcagctgctcacgccaccgccggaaaattcgcaaccaccatttgccagccacgatcagtttattaaatttgatggataacaataattggagacctaatcaaggcactgaagccaatatggatactagtgattggagaggtggactgcatcatgagtcacgccaaagaattgttaacaaaataatggacacattaaaaagacatcttcctgttactggtcaagagggattgcatgaacttcagaagattgctcaaaggtttgaagagaagatttttactgctgcaacaagccagtctgattatctacggaaaatatctttgaagatgcttacgatggagactaaatcccagggctccatggcccccaacttacctacaaatcaaggtggccctagtaataaaccttctgatccaggacttggtattccacctcaagttcataatccagggcagcaacatcctattcctatgcccaatcaaccttcgaaccgtcaacagcttctacctcagaacattcaaaatagtattgcgtctcaaccttcgaatatagcccaagctcccatccaaatgttgggcagatattccaaca

SEQ ID NO: 2459 - DNA, 509 bp, Glycine max
  Clone ID: jC-gmfl02220050c11d1
aatccaatactcagcattttagcttattgtactagaaccacaggaacaaacctcagagttgtaaattgtaatttaaagtgagctgtcacaaagagaataactctggcacagtgtcaagtcatttctgattgaaaacatcagaacttaaatactgctaaggaccaatttggtccatttgctacataaacaaaatgcacttctattttggaatttcatcaagcgcaattaaaaaagaaattgggtctttctaccagaacacttactcggcttcaaatacctagacatgctttaatttcaaatgatcatagtatataaactattagaaacaaaaaaagatgtttatgtaaaaaaataaggtggaaaaatgaaaatggagcctatacctgtatatctatgtcagtttgtcctccttgagctccaccaagcggttggtgaatcattatccttgaatttggcaagctatatctatttcctttagtccctgcgctaagcagaatggcacccatact

SEQ ID NO: 2460 - DNA, 571 bp, Glycine max
  Clone ID: jC-gmfl02220050c12a1
tggggcactcgcacacaccctttctttccgttctcaaactcactcacactctctctactgctagattcgacgattcccgaagtgccttcctcctcctcctccttcttcccctctaatcggatccaaatccaaatccaaatccagttcaaagaagatgcaatacaagaacctggggcgatctggcctgaaggtgagccagctctcctacggcgcgtgggtgagcttcgggaaccagctggacgtgaaggaggcgaaggccctcctacagtgctgccgcgaccacggcgtcaacttcttcgacaacgccgaggtctacgccaacggccgcgccgaggaaatcatgggccaggccatccgggagctcggctggaagcgctccgacatcgtcgtctccaccaagatcttctggggcgggcagggccccaacgacaagggcctctcgcgcaagcacgtcgttgaggggaccaaggccttactgaaacgcctcgaaatggaatatgtcgatgttctctactgccaccggccggatacctctactccgatcgaggaaaccgtgagggccatgaatcat

SEQ ID NO: 2461 - DNA, 521 bp, Glycine max
  Clone ID: jC-gmfl02220050c12d1
aatataattatattcatatttatttatataaaatgaaatacaagtgcaacagcctcatataagagtttcccatatgagttggcagtagaaacgaaataacatctgcataatcacacaagtgaagtgaagctacacaacaagttcattgcttcactcacatcataacccccatatttatttatttaggtaataacacactcgacagtaaagataaataacaacagaacataaaaaccagaagtacttatatctccctcacttcatcttcgttctcgtcctcactccagcagcatttcagaatagacctaggagatgcactaccatcgcagccttgaacaaatgtttggtacacaactgcaccacctactccaagctcttcagtgctcctctcaccacagtagtatcctttgatgtctaagggaaatttattaagtttctcaccatgcatgtcaatgtgcaaagcaacagaaaactctgctggacaaaagcaagctaaaatcctttccacaagttcacctaga

SEQ ID NO: 2462 - DNA, 568 bp, Glycine max
  Clone ID: jC-gmfl02220050d01a1
tcttaacaaagcgccccacgttctgagacaaacccagtatgctgtctgccatggaggatgagaaagtttcgatttttcattgattgggtataactgcacaaagaggttagtgaagcaatgcatagagcgatcgtgtttctcattcacccacgattcctcctcctcttccttgtcctctcaattttcctcattttcacattttctggttctactactaccagtggttttgctacacctcaacaggttgttgagatcattgaggagaaaccagaagaggagcctgaaattacacacagagtattcttggatattgatattgataaacagcgtttaggtaggatagtgattggattatatggcaaagttgtaccgaaaactgtggaaaattttagagctttgtgtacaggggagaaaggcaagagtgaaaatggcataaagcttcattacaaaggaacaccatttcatcggataatatctggttttgtgattcacggtggagacattgttcatcatgatggctaagggtctgaatctatttatggcgggcacctttctgatgatattttca

SEQ ID NO: 2463 - DNA, 592 bp, Glycine max
  Clone ID: jC-gmfl02220050d01d1
gaaacggcagggccaattgcagccaccgaatgtcccatgatcaataaacctcaatatttgtagcagctaaagttaaaagaggaaaagaaaaactaaataacaaaaatatggatgaatgaaataaagagtcctctagttaaatcacaaattacctctatttatttacattattgtgagccatcgttagccatcaaattacagtatacaacaatctcctcctctccatgccgcaccagctacccattctgtaagatttattaggttgctcaaagaaaatgtgcaaaaataatttcagaaaaacatcccttgatcaacaacttcttggataggacggcgttttcgtcaggcgcctctgccaatgtttacatttgacaaatgttacatgcccagctcaaaatggacactttcatgtaatggaaaacaaattgcggaatcgttgtactctgcttgaacaaatgtttgaagactgtgcctgttcgtgagcacctgaactcttcagacgcaaggctcttcttttccttcttatccgaaacaaaaagtcttcggtatctaaaacatatgagaccctagatgaactgcaagctatcttaca

SEQ ID NO: 2464 - DNA, 592 bp, Glycine max
  Clone ID: jC-gmfl02220050d02a1
aaagaaacatatatcaagtagattacacaccttcacgttaatggattcccaaatgacgaagcttggaacctctctattggttccttctgttcacgagctagctaagcaacccatgaccaaagttccagaacgatatgttcgtctaaaccaagatcctgttgtatctgacacaatctctctaccacaagtcccagtcattgatctgaacaaattgttttctgaagatggaactgaggtagagaagctaaaccaagcatgcaaagaatggggtttcttccagcttataaatcatggggtcaaccctttattggtgcaaaatgtgaagataggtgttcaagagttcttcggtcttcaaatggaagagaagaggaaactttggcaaaaacaaggagagttggaggggtatggtcaaatgtttgttgtatctgaggaacaaaagttagaatgggcagatatattctacattaatacgctaccatcatgcgcaaggaatcctcacatatttgctaggaattcccaaccattcagaaatgatctagagagctaatctttagaattgtgaaaacttagcatcgcaatcattaaacttatt

SEQ ID NO: 2465 - DNA, 315 bp, Glycine max
  Clone ID: jC-gmfl02220050d02d1
gtccataactactgctattctgcttttattttgtttgtttatcatctaaaagaattctttttagtggtctcaatctacattgttacacgctgaaaatttaacgagctacatggttgatacatcacccttgtttacaacttgcaaccctctttgcatatcgttaataaaaatacaggaggcattttggtatcttttaaaaccatatttacacaacatttgaaaaatcatttagctctaccaaacagacctccagatcatgatctgaatttgaaatggtttagaaatctctaatttcaatgccagcttctgcttcag

SEQ ID NO: 2466 - DNA, 513 bp, Glycine max
  Clone ID: jC-gmfl02220050d03a1
gcgttcccatggacccgccaccatcttggccttcggcaccgccacgccgtccaactgcgtctcccaagccgattaccctgactactacttccgcattaccaacagcgaacacatgactgatctcaaagaaaagttcaagcgcatgtgtgaaaagtccatgataaagaagcgatacatgcacctgacggaggagtttctgaaagagaacccgaacatgtgcgagtacatggcgccatcgctggacgtgagacaagacgtagtggtgatggaggtgccgaagctgggaaaacaagccgcaacgaaagcgattaaggagtggggtcaaccaaagtcaaagatcacacaccttgtgttctgcaccacttcaggcgtggacatgcccggagcagattaccagctcacgaagcttctcggcctgaggccctccgtgaagcgcctcatgatgtatcagcagggctgcttcgccggcggcaccgtactccgacttgcgaaggaccttgccgagaacaacaa

SEQ ID NO: 2467 - DNA, 511 bp, Glycine max
  Clone ID: jC-gmfl02220050d03d1
aatccaaaaacttaaatttgaatatttctagttctactttctggataggaaaactcagtatacaaacattggttttaatgcatcacttatttctggaatttcagaaactagtccgtcgacaaagataaatacttgctgtcaaaattctgttacaagtgtaaataaaaaggtttgagtagtaatgttttccatcatcttcatcatcctttttctatatttgccagcaacattttaattgcacattgaaaaattaagcaaatggagaataataaattaataatactaccacttttcagctaccttcattttctttattaattggatctgagctcacagttggaagattccttctgtactgctgagacgtcaatctcctttccaatggtgttttcctcttgcttacaacaaatctgttcacccctttgcgcataggcattattgaaggaaaatcttcgtctggaatctgactgagctcagaaatatccttaatctgtgcgacgcgacggaacca

SEQ ID NO: 2468 - DNA, 600 bp, Glycine max
  Clone ID: jC-gmfl02220050d04a1
agagtttgttgtgagctataagctagtttatcgtgaggagaatatgaagttgtttgttttctttgttgctgcagtagttttggtagcatggccatgccatggcgcaggctaccaaaggttccctctccgaatgaaaactggctatggtgagcgttcttcggaggtaaaatgcgcaagttttaggcttgctgtggaagcacacaacatccgagcctttaaaaccattcctgaagagtgcgttgaaccaacaaaggactacattaatggcgaacaatttagatcagactctaaaacagttaaccaacaagctttcttttatgctagtgaacgcgaagtccatcacaacgacatatttatattcggcatagataacaccgtactctctaatatcccatactatgaaaaacatggatatggggtggaggaatctaatgaaaccttatatgatgaatgggttaacaagggcgacgcaccggcattgccagagactcttaaaaattacaacaagctgttgactcttggcttcaagatgtattcttgcacgaagattcttgacaaatggccgaacagaacaaacctaaagaagctggtttcacacat

SEQ ID NO: 2469 - DNA, 521 bp, Glycine max
  Clone ID: jC-gmfl02220050d04d1
agagcactgccaatttgaatttgtttctattcattttaactttagaaggcaaaacacacaagaacaatatggcattgccccacaaatgtctagcaaagatgtgactcaaattcatcgcatgctgcagctttctgctagctacgagagatggatcttataccttcactggccaccataaagggtgataattggagactcgagtcatggtgcttgctgacctccgttattgctcaatttacaatattgctttcaggaggaataaaaaaaagtacaacaaaccaactgtacttcaataatgaatcaacagacaagatttgacccaaatcatcctatgacaatatctagtaactgaagaactgttatgcctaatcccgtatcttctggactccaacccagcgagcataatccacccacaatagtgagcccagaaagtgtttccagttctaacagcaaagcaaactgcgcttagcataagtttgtgctggtgcagcaaaggttcaagaatacgttgttcaataact

SEQ ID NO: 2470 - DNA, 604 bp, Glycine max
  Clone ID: jC-gmfl02220050d05a1
tgatattgttggagaagccgtatatgatgaagaatatctcaagaaacgcaagcagaaaaggatgtcttctagtagctctgaaggagatgaagaatatcagtgggacgaatacaatgttgaagatgaagaagaagaagatgatgacgacgatgacgattccttgagcatcagtgaggatagtgacaagcctcgtaaggtcaaacagctgcagttgcatggtcgtacaaggagagaaaccaaactcaggtctgtgggtgagatacaatcgggtctaagacgtagtaagagggcaactaaaaatcgtataaattaccgacaatgtgaggtattagaatcagaaacagagtttatcaaatctgagaagtctaattcatcagctgatcactcagatcccaatgagaatggtgaatacatgatggaaagtgaagattcagatgacagtgataatgaagaacaagatatgaaagtagatgacccttgtacatattctgcagtagaagagaatgaacaaaaccagcctcctgaaaaattagtagtcctggtcaggatgaaagtgagagcagtacaagaaagagacgcttccttgattgaatgagcttgccct

SEQ ID NO: 2471 - DNA, 455 bp, Glycine max
  Clone ID: jC-gmfl02220050d05d1
ttttctttctttttttttttttttttttttttttttttttttttttttttttttttttttttttttttttttcttttttttttttcctttttcttttattcttaaaaaaccaaaacctacaatttcaccccaacaggggggaacctttttaaaaacacgtttcccaacccatttaaaaaccaggccaacccccaaatccacccataatacccccccaaacgcgaaccaatcgaaccacctcccttaccccaagcgccccactgtccaaccccccaaagaaaccccggggttctctcccagacccgggcgaacccttctcaagaacccaaccacctgctgaacccacttaatcaccacccatcgaaacttacgccccccccaatgactgctccttagaccccccacatccaaaacccccccccgtgaatcttccaccctaaagggcgccccattcc

SEQ ID NO: 2472 - DNA, 524 bp, Glycine max
  Clone ID: jC-gmfl02220050d06a1
ctcacggccagggttttagggcagcttctttctttgagattaagtttcagtagtaatgggtaaggaaaaggttcacattaacatcgtggtcattggccatgtcgactctgggaagtcaaccaccaacggtcaccttatctacaagctcggaggtattgacaagcgtgtcatcgagagatttgagaaggaagctgttgagatgaataagaggtctttcaagtatgcctgggtgcttgacaagctcaaggctgagcgtgaaagaggaatcaccattgatattgctctgtggaagtttgagaccacaaagtactactgcacagtcattgatgcccctggacatagggatttcatcaagaacatgattactggaacatcccaagctgactgcgctgttcttattactgattccaccactggtgcgtttggagcttggatttccaaggatggacagacttgtgagcatgctctccttgcattcactcttggtgcgaagcacatgatttgctgttggaacaagatggatg

SEQ ID NO: 2473 - DNA, 383 bp, Glycine max
  Clone ID: jC-gmfl02220050d06d1
aaagcaaatgcgatgtttatccttacagggggtaatctccttgggacaagacaaccgattttttgcccttttcaccaagtccagtcccgaatttagctaggccttaggcaagttttggggcatttaaacaaagctggcctttttgtcgggtttaaggccgttctgtttgatggcttcgggggtttgcaaagtaccctgttggagcctcctttttttttgccttggttgacctcaagcaataatctccttgggatttgtattcgaaaacaaagccttggggatctgctgtacggcaaaacaggcggcaaagtcaatgatcatgggggccgtaaactgggttcggaaccaggactcctttttgaacagttgcaaccaacttttga

SEQ ID NO: 2474 - DNA, 431 bp, Glycine max
  Clone ID: jC-gmfl02220050d07a1
cgcaaatgggagcaacactgaccgaaaaaagtacttttgcaacaaacatggcaccaccatcgtttggtgtgctgcaacagcatcatcatcatcaacaaccaaatgggcaacccttcacgaaccagtacatgcacagtggccaccaccaccaacaacaagaggttaacatttctactcagtatagtttcggtagtgcaaatgggatgggtggagggagcgttgggatgaacggtgtggacatgttcaacgctattttggaccaaagcaaggctttgtcgaagatcatagagcagaacaacaatagaagcagtagtggaggaacaacaaatggaggttcgagtagtgctattaataacgttgctggaagtaaaggaagtggggatgttatgactcttgactttttgggaataggacgtggaagaagtggtagt

SEQ ID NO: 2475 - DNA, 389 bp, Glycine max
  Clone ID: jC-gmfl02220050d07d1
agagaatccaaaaccagattttattagattgaaaagcgtaactgtacattgatagaaacagtaaatcctttatctaatgaacagagttacccccctacaatccccattccagtgatgactccccgtgccaattcaattacattgcccctcatgcataccttttacagtctccactaatcattatatagcatctcaccagcagaaaggaaagtctactgtctggctgcgacaactggccctttcaccttgaaagtggcttcccagatttcctcctcatttgcaggaactgcagtaatcttatttttaggattctcatagcacattaatccttcaacagctggagaggtcaaacattcttgagggaaagaagcaagtgactttgccacaag

SEQ ID NO: 2476 - DNA, 523 bp, Glycine max
  Clone ID: jC-gmfl02220050d08a1
gtcccatagcagctatgggaatcgatcttaaggctgggggtaagagcaaaaagaccaaaagaacagcaccaaaatccaatgacatctacctcaaattacttgtcaagctttatcggttccttgttcgaaggactggcagcaatttcaatgctgttatactcaagcgcttgttcatgagcaaggttaacaagcctccaatttctttgtcaaggttaattaagtatacaaaggggaaggaggataaaattgctgtaatagtggggactgtaactgatgatatcagagtatatgaagttccagcattgaaaattacagcactcaagtttactgagagagcacgtgcaagaatagaaaaggctggtggtgaatgcttgacatttgatgagcttgcccttagggctcctttgggacagaatacgggccttcttagaggccccaaaaatgctcgggaagctgtgaaacactttgttccttgttctggtgtgccacacagccataccaagccctatgtacgagcaaaggg

SEQ ID NO: 2477 - DNA, 371 bp, Glycine max
  Clone ID: jC-gmfl02220050d08d1
gaaaaaataaagggtaacttagggactagcaaagaatgtacatgtcttatccaaaagtgtacatgcatatgatataatgcctgtttaaggaccatccctttttctttaatggaaaggacactgatacttttgatcaaggacaatggtaaatttagtaaagaaactaaaattgccaaaggccataaagtggaatgttccccttgctgtgtattcctttggaccgcaccaaaatgctttactaggctgtctaccacaatggggcccaaattcttttaaggcccaacctttttatacacctaaggtagatgggaatcactttcaattctggctttccaggaaagtttccacaccttcagtggccttaccattct

SEQ ID NO: 2478 - DNA, 514 bp, Glycine max
  Clone ID: jC-gmfl02220050d09a1
tttcccgaaaccctaatttcctcaatcctggttttggaattcgacaatggagcagaagaggagcagcaagatgtacaacctgttcgtgaagcacttggacgggaaaaccctaaccctcctattcccctcttcgatcctctacgcgagttccatcaaggatcgcctcttccaactcactggaatccccgcccaccaccagcgcctcgtcaccggctgtcgccacctcaacgatgacaaatccgctatccagtgctccccgggggacggcaacatgtttccctccgtgcgcctcctcctgcgcctcaagggcggcaagggaggctttggctcgcttctccgtggcgccgacaccaaggccggccagaagaagaccaacaatttcgacgcgtgccgcgacatgagtggccggaggctgaagcacgtcaacgccgagaagaagttggaggaatggaaggccggagaagaggagaggaagctcgagaaggtggcccatgagtttctcaagaagcagatg

SEQ ID NO: 2479 - DNA, 517 bp, Glycine max
  Clone ID: jC-gmfl02220050d09d1
acaaagcgaacaacaattgatcatcaacatataaaaaataatcagaagacactcaatggtacatggcacacattgcaacaccagatggtggatgctacataatacatattattgtcttaaaatatactactacttaccaacccattaaggttcttcgaaccctatttacaatcttatttctagcagcaacacctgttaattgaaactcacagttctcatccaagagaaatctgtacacctcccattcacgctctgaagttgaatgccgtcctacttcagccgagaaaacacaaattccaactgttttgagagcaaatgtgacatcataaaaaactcgaggtcttcccattccagatagctcaactggattagcgaccaacagttcagtatctggtcctcggtttgcaatgattactcgcaatggatgaagcatttcttgtttcaaacgagagcagagtgcactctgcttctccggatccaaaatctttttcccatctttctgctgaataaatatatc

SEQ ID NO: 2480 - DNA, 555 bp, Glycine max
  unsure (1)..(555): unsure at all n locations
  Clone ID: jC-gmfl02220050d10a1
agcaatttgaagaaatgactttaaatctttgtgtactgacccccaatcgaattgtttgggattcggaagtgaaggaaatcattttatctactaatagcggacaaattggagtattaccaaatcatgcgcctattgccacagccgtagatataggtattttgagaatacgtcttcttaaagaccaatggttaacgatggctctgatgggcggttttgctagaataaacaataatgagatcactgttttagtaaatgatgcggaaaagggtagtgacattgatccacaagaagcacagcaaactcttgaaatagcagaagctaatttgaataaggcggaaggcaagagacaaacaattgaggcaaatctagctcttagacgagctaggacacgagtagaggctatcaatgtgatttcataacaagttgatgcgtncgaatatcggaataactaaaaaatggaaaatgaaacagtaagaatagatagaataaaaatataagatgagtagaaaaacttattagatacccgagtgaatggtatcttataagttctaacta

SEQ ID NO: 2481 - DNA, 528 bp, Glycine max
  Clone ID: jC-gmfl02220050d10d1
aatacaaaattcaacgatcttcccatacatagaaattgaagatttttttacagtaccaaaaaacttttacgctgtcaataaattctaattacattcaaaaacaaaaaggaaaagcactagccacagaaaaaaacaaaaggaaaatagtaaataatttattttaacaaataagtaaataattaaattaaagatgagtttctaataatgatactcaatttctcaaacaattctgtgctaccagatgaagacattcaacacattttaaagttgagaaggtagcacagggctgtgtaactgcctgcagtcttgagaaaataattgcaagagtgatccctatctgttccattcattgtctgctccatatctggggttggtactattcacttgactatatacctctggctttatggagtttccaaaggcattccaacctagaaggtatggcatgatacaattgaaaagtgaccttaaaacttctaggtctgcccttgtaacagggagaaagatgctttcctgaattcccctcat

SEQ ID NO: 2482 - DNA, 468 bp, Glycine max
  Clone ID: jC-gmfl02220050d11a1
caattgtgttgcctcaggcagcgcatcagttaaattttgattgagacaataattagacttgtgtatgcttattgactttttttttttttaaactcagcccaaaggaaatattgttggcattattttcttatgaaaaaaaatctatatcaattccatttcaataatgtaatacataattataaataaaaataccaaataaaaaataaaaaaaaaaaaaaaaaaaaaaaaaaaaaaaaaaaaaaaaaaaaaaaaaggggggcccccccatataggaacccttccccccggaaattattccccccccggttcctgggggggtccccattttcctttagggggggccttaaaaaattggggataataaggggaataattttttcccggggaaaatttttttcccctcaaatttcccccaaaattttatgccccgagattaaaaggttaaacctcgggggtcccaaagggggg

SEQ ID NO: 2483 - DNA, 256 bp, Glycine max
  Clone ID: jC-gmfl02220050d11d1
cttacaaatatttataaatgaattgaattgaatcaccactgtcaaaagtatactacaatctaaaagctaaaactagcgaataaggcccaagtactatatatgtacaagaacaaattaatcccaaataacttaaaaaaatatataaaaaaacactgaataatttttttggatctatggatcagtattgagggatttcaatcttgggtatggtcaaattgaaacgggacttctcagcaaggttcttcgtcgatgacga

SEQ ID NO: 2484 - DNA, 616 bp, Glycine max
  Clone ID: jC-gmfl02220050d12a1
ttatgcacctctctaattttcctcgaacaactatactctctctatcgcactcactccctccgtcgcccgaacgcatctccgatcaaccaaccgccgcatttccagtgattagccactttgatcctcctgcagcgccgtcgtttcctcagatccgtggctgtaatgcgaaagtcgttggaggcgaagcagcagcatccgcggattaggaagatccttcttcccaattcgttatcctagttagggttagggtttcaataatcattcccaagaaatgttcaagcgaatcatgaagggagggcagaagaagccctccaagacggacccgagcgatccgtcgcccttggctccggcggcggcgggtgcggcagccgctccggcgctggtggttcctccgtcgtcgggcaccatagagcctctgcctctcttccgcgacgtggcggtctcggagcggcagaacctcttcatccggaagctccagatatgctgtcacgtgttggacttctccgacacgctgaaatccgttcgggagaaggaaatcacgagacagactctaatggagctcgtggagtcatccaatccggtcgagaagataccgagacttgccggaagagatgat

SEQ ID NO: 2485 - DNA, 503 bp, Glycine max
  Clone ID: jC-gmfl02220050d12d1
aaaggaaaaaaaataatcccatttctttgtagtagacgtttatttcaacaatgaaatccttttgtctaataatattcaaataatctaacatcaagggatgaaattgctctattgcttgcacgtatgcaatgctcaaacaaccttggtactatagtactaccaacaaaccaaactatgcagcattttaggtgcctccatcatatatattaggacaataaacggcccaaagtgctgtagcagaagcaatatgagttctttcgtacaaacgagtataatcacaaatgtgcatctaagatctatgaatatgagcaaagaactgcattttatgatgcacataaacagcatattggcatcttacactagcagtagtttctttctagggattgcgtgggttaatcctatactagttagtatacttgggaggcaactatgctgtacagtgcaatgtttaaaatatttctcatttggtatcttcattatcagattctatgcttcctttttct

SEQ ID NO: 2486 - DNA, 375 bp, Glycine max
  Clone ID: jC-gmfl02220050e01a1
gtgtggtaccctgacccgaactagttgccggcgccgcttcacctaccgcaacacccatgatcattcccgagccgaaccttgtagtgatctgtaatttcgtttttgaagatggagtaaggtgcgctaagaaagacttctgtctggcagatcgcccatagattgatgtgccatatctgcacgtgatgaagctgatgcagcgctattaatccagactagatctcgagggacacatttccgtggatgcactattcctggtggctgaccaggcgacggaaacgagatactcatgacatacctgaaccttccttacgaaataggccctgccacttgtgacaatcaggccgagcccgctggacgaccattctgcggcccacc

SEQ ID NO: 2487 - DNA, 554 bp, Glycine max
  Clone ID: jC-gmfl02220050e02a1
ggtggagatgactcaaacacaaatgcatgcctccttgctgagcatttcaggagtaaaaatatgaaaactcgtgtgattgggtgccctaaaaccattgatggtgatttgaaatgcaaagaagttcccacaagttttgggtttgatacagcatgcaagatatatgcagaaatgattggcaatgttatgatagatgctcgatcaactggaaaatattaccattttgttcggcttatgggacgtgcagcttcgcacattacactggaatgtgctttgcaaactcatccaaacattactattattggagaagaggttgctgccaagaagatgacactgaaggatgtcactgactacattgttaatatcatttctaaaagagctgaggataattataactatggggtcattcttatccctgaaggtctaattgattttattcctgaggtccaacaccttattgcagaactcaatgaaattctggcaaatgacgctgtggatgaaggagggctatggaagaagaaactcaccgatcagtcattaaagctttttgaatttta

SEQ ID NO: 2488 - DNA, 537 bp, Glycine max
  unsure (1)..(537): unsure at all n locations
  Clone ID: jC-gmfl02220050e02d1
actcatgtaaaaagaaaattttatttctccctctcactgtatttgtgacgcctaactatgtttggaaacacagtagatacatgggcaaccacgtccatttaccagaagatgcagaagcaatacctaccagctctgatctaactgtgaaattacgtcaacatgataccaaacatgctaaaaggcaaggaaaggaaacaaagaaaacaactgaaattttttgacattagatcatcagattcacttcgaaaagtgaatgcatccttaccaaccaagaagcaatacctttaagagagccatcctaatatatagaccattctttgcctgcctaaagtaagcagctcttggatctctatcaacttccactgtgatctcgtcaagtcttggaagtgggtgcataaccacagcatgtttttgcatcgcatctagaacatcttgatttacaatatacttgcctcttgcctcctcataaagttcaattttctctctaaatctttctttctgaatgcgagttngataaaccacatcgcacttagaagc

SEQ ID NO: 2489 - DNA, 554 bp, Glycine max
  Clone ID: jC-gmfl02220050e03a1
agccttcaatcatatagcattctaagaaatgaagagccctaccattttcattctctttctactttctgccttctacacctcactcctaccttcagccaccgctcaagtcgtggttgacatggaaggtaatgatcttcaaaatggtgggaaatattatgtgttgccagtaatagagtcatcatatggtggaataagagtagccgcaactggaaaagaaagatgccctctcactgttgtacaatctgccgatccgtatgataaggggattgcaacaattatttcaaccccatatcgagttcctgttatccgcgaaggctttcctttgaacattacgttcggtaattttgcagttatactgccttgtgtcccccttcgtactgagtggaccgtcgttaatggccaaccagaaggacccgcagttaaaattggttcgcccccaaatgcagaaaatggttggtttgaaattgagaaattggtaacttcgggctataagctcgtgttctgtacgctgcctgagcgtagctattgtcacgatattgggattcatgtcgatg

SEQ ID NO: 2490 - DNA, 543 bp, Glycine max
  unsure (1)..(543): unsure at all n locations
  Clone ID: jC-gmfl02220050e03d1
gatatacaggacaataaaagaagcaatgcattaaagctgaaagtagagtgtatgttcatcttcaaaggagtgtaaaagagggtaatatatattttacagaatttccgaaagagcagaaaaaaggaagtaaagacaagaatgacttgtgactcaaatcctggaagggatcataggaatagtgtcctgtaagtatgcactggcagcagcaactccacttccaagctttacaggatagcccacatctttcagtatcatctccacaccagctagacatcccaacagttgcaactcattcaagttgccaagatgtccaattctgaaaaccttcccagcaactttgttcagtccaagacctaagctcaaattgtatctcttccatgcccttctaactatttcagtactatcaatgtaagcaggaacaagaacagcagtcacagtgtcactgtaccactcttncttttgggtgcaattctttaaaaccccatgcctctacagcaagtctgggttgctttgcctaaacgactgtgtcttgcaatcacattt

SEQ ID NO: 2491 - DNA, 530 bp, Glycine max
  Clone ID: jC-gmfl02220050e04a1
cacacatccactactcaacacaaaaaatagtcttaattagttagtgtgtcaatttgtgcctcaaattgaaactagctatagatatggccaattcccttaataaccacctgtttgttgtagtatctattctttctctcttagccttttctagcaacgcacaactatctcccaccttctatgccaaaacttgccccaaccttcaaaccattgtgcgcagtgcaatgaggcaagctgttgctaaagaagccaggattggtgcctctattcttcgcttgttctttcatgattgctttgtaaatggctgtgatggatcaatcttattggacgacactgccaccttcactggcgagaaaaatgcaggacctaacagaaattcagcgaggggcttcgaagttattgataccattaaaaccaacgttgaagcttcttgcaatgccaccgtttcttgtgctgatatcctagcacttgccacaagagacggagttgtgctgctaggaggaccctcgtggagcgttccacttggaagaaga

SEQ ID NO: 2492 - DNA, 510 bp, Glycine max
  Clone ID: jC-gmfl02220050e04d1
ataatactctatttgtattatttggtacattaataacttttaagcaaataacaacataccctaagatacctttcaaaccttttgttttcctgaatcgcgccctcaaaccttatgttaacacttcctataagaaagacaaaagtaatggttaaaaaagtaagatttgcttgcataattacactatatataggagaaggaatttgctcatttttttctataatactcttaattaattactattttttttctataacatttaaatcttatttttataaaaatatatatatatataaatttgaagttaattaattattgtttttatagggtattttattgatgttgtttgctgaatggggtgatagaaaaaacagacatatctaattttcttggcttggtaactaactgagtaatcaatatatctcaagccaattttatcaatctgcaatacatatgttgaaagtgggtggaagtggattgtttatgaagaaaacaaaactttgcccaatattt

SEQ ID NO: 2493 - DNA, 607 bp, Glycine max
  Clone ID: jC-gmfl02220050e05a1
tctgagtattctgatcgctccctgagagagctcgtcgcggcggttgcagaagaagattgctagatgaagttcaacatcgcgaatcccaccactggatgccagaagaagctcgagatcgacgacgatctgaaactgcgagcattttgggacaagaggatctcacaggaggtcatcggagatgcactcggtgaggaatttaagggctatgtcttcaaaattaccggaggttgtgacaaacaaggatttccaatgaagcagggagtgctgactcctggtcgtgttagacttttgcttcacaggggaactccttgcttccgtggatatggaaggcgtaatggagagcgttggagaaagtctgttcgtgggtgcattgtcagcccagacctctctgttttgaacttggtaattgtgaagaaaggtgagaatgatttaccaggattgactgatgttgagaagcccaggatgagaggcccaaagagagctttcaaatccgtaaactgttcaacctgtctaaggaggatgatgttaggaagtatgtcaacacctaccgtcgtacatttacgacaaaagctgggaaaatgtgagcaaagcttcaagatacaagact

SEQ ID NO: 2494 - DNA, 505 bp, Glycine max
  Clone ID: jC-gmfl02220050e05d1
ggaaggaaatgtagtttatttaggtttactatttttttacccatacaatattacaataagatttcatattaagtaataattgcaaatacaatagaatctactgaattggtctttaaacaattctagccaaactcaattcatcgttatgttcttcagctgtggtcacaaacacattctatcatagtatgtaagcgttcttcgatccttttcttgtgccaataatacatccagtaccatgacctttggtatttatgcatgcaaaagcctcaagctaattcaagccaagcaccatgacaaacctcgacacaattagagagtttattatgccctacgtttttttccactccatgatgaaccaggccacgatagtttgggtacttgttccttactcttgttaactagtctttgtttgacttgttttttaagaataaggtttcgagcttgtttcttcttatcttctgccttcattttggagagactgggcctgtatatgatgagagttcga

SEQ ID NO: 2495 - DNA, 581 bp, Glycine max
  Clone ID: jC-gmfl02220050e06a1
ttagttcttgttattcattattcattctcagcttcttttcttctggggggcaaaaggggtcacttttcagatccgagattgagctcctttacccatcatcatcatggagctcctcgggtacctgaatcagggtcacccttctagaggaacaacacttgttattactctttcattggtgctttcgacacttgtgtccttctccactttcacacatgccttctcttcttctgcgtttccggaactgaatcctataaaacctaggcactcacgtcttctcaggagtgccgtgcaacatgaaactcctacatcacagctttctgaaatatggtcacctctggaaagccaaggatggaaaccttatgttgaatcaaataagccaacattaccagagaagtccgagggatatatccaggtctttcttgatggaagtttgaaccaacaaaggatggggatatgtgatgcaattggtgttgcaaagatactggatgctactctggtgatccataccttggattaaatcctgtatggcgagattcaagcttcttcatggatatatttgtagtggatcatttcattgatga

SEQ ID NO: 2496 - DNA, 293 bp, Glycine max
  Clone ID: jC-gmfl02220050e06d1
ggaaaaagaccccccaagggattttatttaaaaaatagccaaaaaaaaaaaagggcccaaactttgaaatctaggggataataatgggaaaggtttatagggaacctgaaacccaataaaaaccggaaacccaagccttaaacccatggacatttaacactacaattcccgcggggggacattgaaaaccccaaatcattgggaataaaagggggtttaacaatgctttaggaaacaccccttagaaacctgggttccaaaaaggcctcaaaaaatccaagcccctcctaaaa

SEQ ID NO: 2497 - DNA, 495 bp, Glycine max
  Clone ID: jC-gmfl02220050e07a1
agaatataaatttgtttattttgatagctttatcatatgaatttttatcatatgataaagctatcaaaataaacaaccacgctgaataaaaaaaaatgattctttgttacctattatcttttttcttaccacataaaaacccaaattgaattgtcgtaattttcaaacaaaacatcaatcaatatttcattcaaatctcaattcaaaattggatttagaattcttaatttctatattttttttttcttaaagtagtagttctagcggttgactcgcttttttcaaattgtctttcattattaagaaaaggtaacgaagataaaatacgagcttgttttatagcaattgttattaatcgttgttgttttaaggtcaatctatttacgcgtctggataatatttttccttgttcactaataaatcgactaattaaacccatgtttttataaataattcggtcccccgattggatcgggggccaacgcctacgaaaag

SEQ ID NO: 2498 - DNA, 442 bp, Glycine max
  unsure (1)..(442): unsure at all n locations
  Clone ID: jC-gmfl02220050e07d1
ggaactggcaaagatagtctcacatttatattcatgcatgtttatagtatttataaaatgaaagttgaactatggttcttgcggagaatgaattcaattaagtgttagaaaagtgcttgtatcacacgcattaacacctttctttcaacacattctccctcattggtaaaacccataattcttggcattgagtatgatactccttaatccaccaattggtgacagaatcatgagtaggaggccaaatataatgcagatccagttggtgatccaggataagctgaacttcttaggtttgtaaatagcaagccagataatacaggggagaaagtatgttgttggcgcaaatgcaaatcctccaaaaaatccgaggagggcaccaaagaaagggaacgtaatgcccacaaacatttgtaatgcaacatanacattgcgcacaaca

SEQ ID NO: 2499 - DNA, 530 bp, Glycine max
  Clone ID: jC-gmfl02220050e08a1
aaccttcaagtgctacaaagacgtcatgcgcatgttcttcctcgtcgtcggccccctccaactcatctcttacccttccatccagatgattgggatcaggacgggcttgccattaccttcgtggcgggagatcctctcgcagcttctggtgtactttctcgtagaggattacaccaattactggatccacaggtttctgcacaacgattgggggtacgagaagattcaccgcgtccaccacgagtaccatgcgcccattggattcgccgcgccctatgcccactgggccgagatcttgatcctcgggattccctcctttcttgggcctgccatggttcctggccacattatcaccttctggctctggatagccttgcgccagattgaagccattgacacgcacagcgggtatgactttcctaggagtatcacaaaatatatttcattttatggtggtgctgagtatcatgattaccatcattacgttggaagacaaagctcaagcaattttgcttcaggtttcacatact

SEQ ID NO: 2500 - DNA, 444 bp, Glycine max
  unsure (1)..(444): unsure at all n locations
  Clone ID: jC-gmfl02220050e08d1
aaaagtaaatatactgatgtcttttgttaggggacattgaatcagaaaactgtgcgaccaattttctcagccatgtatgatgaagaagcagagttggccatataacatgtattttaactttaagcataagtatgcttgagttatataagtggacattatccaccatctatacagaaaccatttagatcatgggacaagacatttgcaaaaggtgcctagttaatccaagatttctagataaaatgtaaaggctttcagctatttgatcaaaaactttgatggttgctctcttcgatttctgcaggctgcttttacgcttccaagcgcttgacaaatttggtcattgattttgttccatctttctttnttttccttttaaacttgtatggcttatatagcatacaccttcattgacagcattacattcttcagtcaagaattttc

SEQ ID NO: 2501 - DNA, 467 bp, Glycine max
  Clone ID: jC-gmfl02220050e09a1
ccatggcctccgtagcactcaccaccaccgcactcccctacctccgcctccgccgcaacaccgccgccaccctcaaacccaaccgccactcttccatttcactctcctcactcaaaccaaccctcaacgcttcaatttcctccttcccaaatttctcactaaaaaaaccaagcctagttttcaatcaaaaaccctcctctctaaccgtcagagcctccgcagcctccatcactccggcgacgggacggagcacaggttgggggcgtggctcatgctcacgtgctttcagaccttcgtcattacgtcggcgatgttcttgacggcgatggcggcgaatccgctgtgcgcgactcttactctgaattccattaatcaaactattgggtggttggattgtgctaaagccgcaattggtcctggcttggccgtcgtggtgttggtgcccgtgattttgaatggtatatatc

SEQ ID NO: 2502 - DNA, 461 bp, Glycine max
  Clone ID: jC-gmfl02220050e09d1
gagtaatagttgttcactagcatgctttcttggtgagtaattataggtatattatatatacaagattttacctatgattctaaagcatttgtgtttgttttctctttatacaaactatgaaagagaagacagtatacaaagttgatttatatttgaagatgccatatgattcaccctgtcattgaggtttggctgccagaatattactgaacttggattgagatctgatgaaagatcttatcctgtcccaaagtgagaaattggaagcgaaatatctgaccatcactgacttttttgaaccttctctgggaaattctaattccctgtcaataatagagtgcttcatactgtctagatcttcaagcaatggtaatgacacagaaccctgagactctaggtttctgatccacccgcgaagttggaaatttatgatctcaggaacttcatcatgagggcagtga

SEQ ID NO: 2503 - DNA, 446 bp, Glycine max
  unsure (1)..(446): unsure at all n locations
  Clone ID: jC-gmfl02220050e10a1
agaagaggttttcgtttggttaagcaagatggatttggaagcagagaaagagcatgaagctgcatttgcagtggcctcactctccctctctctccccaccattttccccttcgtccaacccaagaatatcccatcaaccacccttcaaccaaccaagctcaaagtcccaacccaagcctcatccctcacacacctttctctctccaccaccactcctcctccttccaaaacctccttcaaatccaccgtctccgccaaccccctccacgcccctctctccctcgctccccaccgcccccgcgacccttccaacgccgccgccctccgccgcgccgccgtcgtctggttccgcaacgacctccgnctcctcgacaatgagtgcctcaccgncgncaacaacgactccctctccgtcctccccgtctactgcttcgacccctccgact

SEQ ID NO: 2504 - DNA, 343 bp, Glycine max
  Clone ID: jC-gmfl02220050e10d1
acaggacaataaaagaagcaatgcattaaagctgaaagtagaaagtacgttcatcttcaaaggagtgtaaaagagggtaatatatattttacagaatttctgaaagagcagaaaaaggaagtaaagacaagaatgatttgtgactcaaatcctggaagggatcataggaatagtgttctgtaagtatgcactggcagcagcaactccacttccaagctttacaggataacccacatctttgagtatcatctctacaccagctagacatcccaacagttgcaactggaaaatatttaaagaattaacaatatcaaaggttgggaatgtcaatataaggttaatt

SEQ ID NO: 2505 - DNA, 440 bp, Glycine max
  Clone ID: jC-gmfl02220050e11a1
tcactctgttacggtgcaacctagcttcctccaaatccaatggcttcagagaagaaactttgggaacccaatgagggagataaaagtgcagaagctcgtcctcaatatctctgttggcgagagtggagatcgtcttaacagagccctctaggtgtcggaacaacttagtggccaaaccccagtgttttccaaagcaaggtacactgttcgttcctttgggattagaagaaatgagaagattgcatgctatgtcactgtcagaggtgacaaggctatgcaacttttggagagtggtttgaaggtgaaggaatatgaacttctcacaaggaacttcagtgatactggttgctttggctctggtaatcacgagcatatcgattttggaatccaagtattatcctttcaactggcatttaatgaatggatttctatgctgttct

SEQ ID NO: 2506 - DNA, 227 bp, Glycine max
  Clone ID: jC-gmfl02220050e11d1
tttctgtctttttttctcactcttttatattattagattaatttttgaaaataaattatctgcaccagcctggtgggtgacatgccaatttcttaatgaaagcatgcaatgcaattcatgggtaagtaggatggcaattttcttaatgaaaacatgcaatgagtgtatcatgatacgtatatgaattctggaattctcgagcctcagtttggacggttctacttctt

SEQ ID NO: 2507 - DNA, 114 bp, Glycine max
  Clone ID: jC-gmfl02220050e12a1
tttggttcgagctaatcaggcccggtgcagacaactactctgaaggagcaaactctatcgaggccaagcgttacactcccaagctggaaaaagtgtaccccaaactcttcctag

SEQ ID NO: 2508 - DNA, 445 bp, Glycine max
  Clone ID: jC-gmfl02220050e12d1
tgtcgtcctttttttttttttttttttttttttttttttttctttttttttttggtttttgtggttctttccttgttgtcttgccctttcttcttattgtcaaagaaacccctgcacgcctgaaaaaaaggaacagaccggggaaaagggacaccccaaaaaggggccgcccgggggggcccccgcaaaaaacaaaaagcgattgtcaaaacgctcaaactgcgggggaaaacaaacaggccggggggaaaaggcttgaaaaaccccttcgcaaaaaaaaacttcctcgggcccaaaagggcgggggggggctccaaccgaaaaactttccagggcccgggggcaaacaaaacgtgcttccaaagccgggggcaaagcgggcgagcttgccggggacaaaccccgccaaaacgggggaccccttcctcgggcaccaggggaaacc

SEQ ID NO: 2509 - DNA, 571 bp, Glycine max
  Clone ID: jC-gmfl02220050f01a1
attgtccctaaatggcggaaaccctgatccaaatcggcgtggttgggtgcgccgacatagcccggaaggtctcccgcgccatcacgctcgcccccaacgccgccctctgcgccgtggcgagccgctctcacgacaaggcagccgcattcgccgccgccaacggcttccctctctcagccaaagtgtacggctcctacgagtcccttctggaggaccccgacgtggacgccgtctacatgccactccccaccagcctccatcttcactgggccgtgctcgcggcccagaacaagaaacacttgcttctggaaaagcccgtcgcgctcgacgtggcccagttcgaccgcattctcgaggcctgtgaatccagtggggcgcagttcatggataacaccatgtgggtccataacccaaggactgctgccatggcccacttcctcaacgatgctcaacgttttggtaacctcaaatcggtatttattccattctgcttttcttatcgcaatgcagctagcaaatgctcctggactttagtcttttatcctacattttcttcacttcaactttattt

SEQ ID NO: 2510 - DNA, 564 bp, Glycine max
  Clone ID: jC-gmfl02220050f01d1
gtgcagcaaaaactaatttctcttataattatttatacagaaacttttcctatgagaacttgtaatagagttgaaacaaacagttacaacttaaaaggactagaatttcactccggaactcctgagattgcagatgatgatgactttgagtagcgttcaagcaatgatagtaccttggcagcttttctcctaaggtgtccatccccatatatattcatgccagtgagaccaattaaacgtgatctagctgttgttccatagtattctaccatttcctttgacacaaacaccttctccaacagtcctagagcttctgcctttagagaatcagttccccagttcaaaatgtccattatggaccttattgcattatattcatgcaagacacgagctcccctttgaggaaaatcttccaaaaccaatgtggagagtgtttgtattgcttcacaagcagttgcatgaacctccccatgtaacagctttatcaagccaggtaaagcctttgctttaaaagacaaaatgtggtgtcacactggatacactcccatgtgctgaacataacgg

SEQ ID NO: 2511 - DNA, 569 bp, Glycine max
  Clone ID: jC-gmfl02220050f02a1
aggaaagataagatgtcgtctctgggcacttccaaagggattctagaaattgccaagttcggcgtctatgtcaccgttcccatcattctcatgtacactttcgccaacaatcccagcaacctccgcaagttcatgggacataggtcatacattgaatatcccccagaggcagaaaagccaccatcaccggaggaacttagggaaatggcacgggagaaagctcaaggaagcagtggacagtaagagctccacttagaagatgggccttctacattaggtcatgcttattgtattcataacagtcaccaagatattgcaaatcatcattccgggttccaaaaactagaaacccttgtatatagtgatatccattggtcatttgttgaggctaattccttgtttaactttcctcaaccaaggaattgaatggatgatgctcattttctatcaactaggattttcttgattagatggtattttggctgtttatgaaagaaatggttgggaattgattaccttcccaatgtgtagttgaaaaatgagacccaatttttttaccctgtatgaat

SEQ ID NO: 2512 - DNA, 530 bp, Glycine max
  Clone ID: jC-gmfl02220050f02d1
aatatgaatgctttttcttatattaactcattttacatcaatatgaacaaaggaaaaaaagaagggcagaaccaaaaatatagttgcctaggcctgatgccaagttgccaacagaaacgtcagaaaagcttctgtagatgttaagatccaagtgtaataaattccaaactaacgaaattcactaaaagtggtggacctgctgcctatggacttttccttcactgttatctggaaaccagtgactaactttaggatttcaaatcagtaacacattctatttgtagatccactcgttggaacgagcacccgactgatccatatctataaaaatgcttactgccttccctatacgaggtcgttccttcgacttttctaggctgatccgaatatgagacacagctccccaacattttaagttgtttgcaatatcatcaagcctcaaaatatactcttcttcggtcaatgggaaggatctctgcttcatgtactttcacatgacattcatcgcacggagatttcttccatgaact

SEQ ID NO: 2513 - DNA, 322 bp, Glycine max
  Clone ID: jC-gmfl02220050f03a1
agcatatactcatctcaccacataagatattattaaccctaccatgtgcaaactcgtgctacaaactgcctttaacacttgacttggaccattacctaacgatccagtcgtgggtgacatggtatattctgaacttctaaacggtgggaaacaacacgcagctacagtccatcaattatgacatggcttgactcaagcttcagacaatggagcacagagatacgaggtaactggtggccaatgttgccatgagtgtggccaggagactgcgctagttatttcaagatcgtattgagaacgggtgatatggatcagttttact

SEQ ID NO: 2514 - DNA, 365 bp, Glycine max
  Clone ID: jC-gmfl02220050f03d1
gacgaaaataacaggcaattcttgccactaagattattgggacacttcattctgaagattaatccacacgcaaataagttatcaattaaagtttctaactcccttcactctctctctctctctctatatatatatatcatggtagttaagacgtatcatattcagtttccacctttaatttgcttagcttcattccacttctcaatgtttctaagtctggcgtacatcttatcgagacggttacgaagttgtcttaaatgagagcccttcaacggctaatttgatcgctcaagagtctcaaaaactaaaccgaattcgcaagatgtacgccagacttagcttcattccacttctcaatgtttcta

SEQ ID NO: 2515 - DNA, 541 bp, Glycine max
  Clone ID: jC-gmfl02220050f04a1
ctggctgcaaattccttgtggtatccagatttaacttcccaacaatttttaatgccacttatcatgtggaattgctgggtgaacatgacgccctttctttgttctgtcaccatgcttttggacagaaatcaatttctatgggtgctaatgtgagtttggtgaagcaggttgtggctgagtgtggaaggcttccactggctctgaaggtgattggagcttctttgcgagaccagaacgaaatgttttggttgagtgttaaaagcaggctctcccaaggccaaagcattggtgaaacctatgaaaccaatctgattgatagaatggcaattagtactaactacctgccagaaaagatcaaggagtgcttcttggacctgtgttcttttcctgaggatagaaagattcctctagaagttttaatcaatatgtgggttgaaatctatgacatcgatgaagctgaagcatatgccattgtggttgagctttcaaacaagaatcttctcaccttagtacaagaagcacgtgtcgggtgcatgtatag

SEQ ID NO: 2516 - DNA, 547 bp, Glycine max
  Clone ID: jC-gmfl02220050f04d1
aattgcaacatctgatcctctccattttccatggtacacagtcccaaatgtaccagaacccagctctcgcaactcttcaagatcttcattctttatgaactgcacagtactggtgtcaaattcccctgctacaaccacattcctcggttcattcttgtcatcctggtattcagactcctgtggtcgtatgttttccattatggcatccatgttcttattttcattgccctttagttgggaatgctcatatttttggtgaaagatacttgcttctgttttagttgctacaggtacatttttctgattttcttcaccaatatttaggtgggaatctgtgcgtcctgccaaaacaccaccagctggttgaggagcagatggctgagatttactatccccctcttgtacttttctcacagcagacgaaaaaccaagattatcctgatcaattagagatacattatcaaacccctctagagccaagttctgaaaatatgaccaacgtttaggctcatgattgtccatatttaagctcaaacctggtctatct

SEQ ID NO: 2517 - DNA, 544 bp, Glycine max
  Clone ID: jC-gmfl02220050f05a1
ctcgaagatcgagatatctatttagatctcagaaaaacagtgtttcatttcaattcattcagtcttattattattagggtttggcgattcagagagaaagagaaatgggagaacgaaaaggaatcccaattgctctggggctcttggcgatgctcctcttcttcattgcttcttcctcttcctctcacctcgttcgtgcttccgatgacgccgacgacgcgatcttctacgagtcattcgacgaggattttgacggacggtggattgtgtccgacaaggaggattacaacggtgtctggaagcatgctaagagtgatgggcatgatgattatggacttcttgttagtgaacaagcccggaaatatgctatagtcaaaaaacttgacgagcctgtcagtcttaaggatggaacagttgttcttcagtttgagactcgccttcagaatggcctcgaatgtggtggcgcatatattaaatatcttcgaccccaggagagcggatggaaaccacaggaatttgataacgaatctccatattctatcat

SEQ ID NO: 2518 - DNA, 557 bp, Glycine max
  Clone ID: jC-gmfl02220050f05d1
gccggcggcgtcgccatgccgccgacgctggcgaccgaggcgctcgacacggacgccggcagcgtggccgcgtggctgagcggcgaggcgagcggcgaagtgcgtggcgagacgcgcggcgaagaggaggcggcggcggcggcggcggcgtcgagcgaggcgcgcgcagagagctccaaggcctcgagcggcggcagcctaggactggcgagcgccgcggcggcactgctgcgcgctggggcagtgaggggcgcagacagcggcgaggcggagccggcgggctcgacgatcagtggagcgtcgtgcagcgtgctgttgttgcacacctgcggactctgctcggcagactcgaagccggacacgccatggctcgtcgagctcgacaccgtcgattcgcgtctctgctcgccgagcgcgcgcggcggcgcgtccgcaacagctggagacgcagcggcgctgctgctgggcgcgtcttgcggcggcgcaagcgccttctcgctgatcagcggcgaaggctcgaggccggacgccgggagcatgcctcgtcgacttggcgt

SEQ ID NO: 2519 - DNA, 441 bp, Glycine max
  Clone ID: jC-gmfl02220050f06a1
cagctttggaaaaaccaaccagccaacgggttttttttttttcacctcctgaaatttctttggaagaagcttgcacaaggtggtgtcacagagacaggtgttggcttggttatataggccttggagtgaaaattcaatattttgcatggaagccagagaaggtattagttctggggttacagtgataggggcagaagctccattagcttaccatgtggctccgaggagtgaagctccaaaccaggttcatgtccctgatggtgggggtggtgctgctgttacagttgcacctgttggtggctaacctgtgagtgaggggttggatggaacagttaataagaaactgtgtagaccgaggaaatttgggcctgatgggtctgtaactatggcatttgtcgccaatgccaatctcgtcttctgcttcgccttcgaattgacttt

SEQ ID NO: 2520 - DNA, 330 bp, Glycine max
  Clone ID: jC-gmfl02220050f06d1
ggagaaaaggacctggttacagtcgtttttcgttactgtacaagtctggtctatccagagcagagtcacaagcaagttcaaggggaaacttagtttagctagagtacatgcatgatacaaaatgagctttctataaacatactaaaattatgattgcagctctttttaacaggactagcaaaattatgcttatttgcaaacccgttagttccataagcatatcaataacttctggtttctttttctttttctataagtctagcaaaaaattggcacagactaagaagggtgatttcatttcacatggaaataggaccgcctaactctttg

SEQ ID NO: 2521 - DNA, 559 bp, Glycine max
  Clone ID: jC-gmfl02220050f07a1
aagaaatttaagtgaggagctagagaatgatgatgaagtctgctatgtgtgcagtggtggttgtagcacttcttcttctggcggaggtggggcccatggctgaggctgtgacatgcaccccaacagagtttgagtccgtgtcttccagcaatcacttccggtgctaaaccttccaatgcttgttgcacgaagctgaagcagcaaaaaccatgcttatgtggctacctcaaaaacgctagcttgaagcagtatgttaactctcctaatgcccgaaaaaccgttgcttcttgtgggattccctttccaacttgttaattaaataagccttcttataattaaagtgtgggatatatatatatatatagataaacagtttaatttatacacactctgatcctacaaagcatcttgacacaagcattcataggatttcaccattttatcgcaacattttaacatgaagcgggaataaaggaaatccttgttgaataattggataacgatgtttatactaatagtatggggtttaattaaacttatattaataattaccctatat

SEQ ID NO: 2522 - DNA, 433 bp, Glycine max
  Clone ID: jC-gmfl02220050f07d1
gggtcttaaacgtgctactgtgtagttatcaaattaaaatgcagcacacaaaatacattacatgcccagtagtggtctccagagtcaacaggtcagctgcgttcagatctccctcgccccaaacaagattatgatgagctacttggactttggtgaggtcgaggtgatgaatttggagatctggatcttgactgggatctgcaaaatttattaattaacaaaactcaattcaatatccacaatgatccacgatccaatattccacatcaaagttaccataaccaaaacgaagaaactaatccaccacaaatcttgagcagcatccaagtggaaaagcaattgaacccagtatcacacgtctatagtctcaacaagtgttaaaaattctattgtcaacagcacatgatatcttgatccaattatagggaagata

SEQ ID NO: 2523 - DNA, 500 bp, Glycine max
  Clone ID: jC-gmfl02220050f08a1
ggttcatcaatctcatcgccttcgattacccacttgtcacacaagatggtacgagatctgctgcatacgttttcgtacctgccgcgggatctgaatttcattgatcatacgagtgacattggatggaaagatcatcagcgtgcgaggccgatcatcgttgatccgggtttgtatatgaataagaagcaagatgtgttttggattacacagaggaggagtaggccaacggctttcaagcttttcacaggttcggcttggatggcactgtcaaaatctttcattgattactgcatatggggatgggacaacctaccttgaaccgtactcatgtactattcaaatttcatatcttcccctgaaggatacttccacacagttatttgcaatgcacaagagttcatgaacacaactgtgaacagtgatttacatttcatctcttgggacaattctcccaagcagcatcctcactaccttacagttgatgacatgaaagggatggt

SEQ ID NO: 2524 - DNA, 436 bp, Glycine max
  Clone ID: jC-gmfl02220050f08d1
gcaggcggcatcagaatctagttgaatacatgtatgtcatcaataatctattctccgcagtcgtggagcctgatcccacatcaatccacaattaaaccccaaaggcatccctctttgaacccaatcgctcatttcagctttgtcaccgcttataccagcatcccacgctacccacaattcccagccgcactcttaccgctcaaacaaccaccgtccccccaatatcacacagtcccacttcttcgtcccattccagtccttcagcctcagcagccttcttccacctctccaccggctcagtcacaggctcatactgcgcactgaatgcccctcgaaacgtgccgtagtgcatagcgatactcttcttgctcttcacatccctatgaatcgccagcgaatcttccggacttcagtgctgtcctgaccagatggtgcg

SEQ ID NO: 2525 - DNA, 523 bp, Glycine max
  Clone ID: jC-gmfl02220050f09a1
gtgaaaaccaaatttggggctttgcatcgcaagatttaccctttccaatcaaaattcttctgccttccccaaccaattgtctttctcactatcgatttgtaagtttctctctcagaatgcttatttcgttatcaattcatgtttttatttttctacgtttttattctgagacgagatctgtatctcttttgttaaaatatacttttcttcttgttttgttttctcgttccactaattgcaacgttcaatccctagatttatacgtcgattattcgattgattaattgttgattttcgtgcaattcgctgtttcgtattttagtataaccttgtcggtgacaatgatgcaaatgcgatatagcctatggtgattttttttaatttatttgtgacattgtagggtttggttggcattgtaattgattttgtttgtgaagatctgagtgaggggttaggcaaatgacgagtggtttggtgaatcaactagagcatttgcaccgagccattatgctcggggaacagt

SEQ ID NO: 2526 - DNA, 451 bp, Glycine max
  Clone ID: jC-gmfl02220050f09d1
ataataataatttactttattttcatacatttgattcaaacacaacaatatttccttgaggagaaaacaaaatatgtgtaaacactaatcatctcccgttgtaaataaatcaataagttaatttctcattcttgaattacttccaattccaaaggtagtcttgccgaagtcaatccactaggaatagtggaagtggatgagtgaaatggattaggaggaacagttaataggtcttcctctttactttccaacatttgtatgacagattttatggatggccggttcaatggctgccactgaatgcaccaaagtccaacaattgctagttttcttgcaattttaacatcaccttcatcctcaacatggatatgtacatctccatgaactaggtcatgcatccaatctgggtacaacacatggaaatcttctgcagaagacgtgtctacattct

SEQ ID NO: 2527 - DNA, 474 bp, Glycine max
  Clone ID: jC-gmfl02220050f10a1
cttggccggtcctccaggcacaggaaaaacccttttagcaaaagctacagcaggggagtctggtgtaccctttctttgtttatctggttctgatttcatggaaatgtttgttggtgttggaccatctagggtgagaaacttgtttcaggaagcaagacagtgttcacctagtatcatatttattgatgagattgatgcaattggtcgatcaagggggcgtggtggtttttctggtgcaaatgatgaacgtgaaagtactttaaatcagctgttggtggagatggatggttttggaaccacttctggagttgttgtgttggcaggaacaaataggcctgatatcttagacaaagctcttcttaggcctgggcgatttgaccgccagataacaattgacaaacctgatattaaaggtcgtgaccagatatttcagatctacttgaagaaaatcaaacttgatcacgagccttcata

SEQ ID NO: 2528 - DNA, 175 bp, Glycine max
  Clone ID: jC-gmfl02220050f10d1
aaacattatctttttgtaattaattgatcaattaaacatataccgttgatatgtgaggggcaactacacaagaattctgggataaaatacaaaaagtttgtacgtaatgattcccattcccaggagcaatatttcgcatggtaaagtcaaagtattaactacggaaaacctagat

SEQ ID NO: 2529 - DNA, 518 bp, Glycine max
  Clone ID: jC-gmfl02220050f11a1
acccccaccatcttggtcgttggtgcgggcgatcatggatcatcatcgtcaccctcatcacaccacccctctctccgagcccaccacccccaccacccctcgccccaccctcttcctctccacctccggcaaggcccttcttctcttcaactccaacaaatccctcctcctctccaactccagcaaacgcctcgacaccccgaggaaaaaatatgtcaagcaagtcaccggccgccataacgacaccgagctccacctcgccgcgcagcgcggcgacgcggcctccgtccgccagatcctcgccgagatcgactccatcatgatggggagcttcgagttcgacgccgaggttgccagtgtcaggtccgccatctttaatgaggtgaatgagctgggagaaaccgccctcttcaccgcagctgaaaagggccacctcgacgtcgtaaaggagcttcttcctcacaccagccacgacgcgctttcctctaaaaaccgctccggctttgacaccttgcaca

SEQ ID NO: 2530 - DNA, 565 bp, Glycine max
  Clone ID: jC-gmfl02220050f11d1
tcgcgatctatactaaaaaagggtatcctgagcaatttcaataatagggttcattgatattcctagtatagtagatgctatcacacatacaatcatacttaattcgatggaattgtttgatcttaaagggggccttcgataatttcgcacgtgaggagttatttcttggtttcgtccagtcattaataacttgattatttttaaataatagtagatagaaacaacactcgtaaggagtcctattgaaactaagaaatataagcctgcctgccatccacaccagaataaataaagttttccgaaaaaacctgatagtggaggaagacctcctaaggataagagacatagggctaaagagagagccaaataaggatctttcgcgtataatcctgcataatctcgaatgttatcagttccggtacgtagaccaaatgatacaatgcaagcaaaagttcctagattcatcgagatatagaacagcatataagttatcatgcttgcatatccaccatttgagtctccaacaattatatcaataattacatatccgatttgacctatggac

SEQ ID NO: 2531 - DNA, 598 bp, Glycine max
  Clone ID: jC-gmfl02220050f12a1
ctgaaacaaagaagtgaaaataacagcaaaaagtaggagctgcagcagctcccccgaagcttatctcagcggcagactctgaaagctgtttgagtagcctcaacccggagaatagcaccaatgggagaggaggaaaacaaaccagaggaacccatggcaaaggagaaaaacccagaggaagaagcaacccaagagaaaaaaccggagcaagagtccaaagaggaagttgctgctgctgctgctgctccgccaccgccaccgtcaccgccaccgcccgagattgtgctcaaagtgttcatgcattgcgagggttgcgcccgcaaggttcgtcgctccctcaaaggattcccaggtgtcgacgatgttgtcaccgattgcaaatctcacaaggtggtcgttaagggagagaaagcggatccgctcaaggttttggagagaatacagaggaagagtcacagacaggtcgagcttttttctccgatcccgaaacctcaagaggagaagaaggtccaagaggaagagaagcccaagcccaaccccgaagagaagaaagaagagcctcagattgtgacggttctgaaagttacatgcattgcga

SEQ ID NO: 2532 - DNA, 483 bp, Glycine max
  Clone ID: jC-gmfl02220050f12d1
tttcttttttttttttttttttttttttttttttttttttttttttttttttttggtttttgtttttttttttttttttttttttttttttttttttttttttttaaaaaaaaaaccccccccccaggggggggccctgtttgggaatccccccccaaagcccgggaaaaaaggggggttttttaacccaggggaaccccaggccccggggggggacccccaaagggaaaagggggaagggggggcggggggagaggtccccccccccctttttaacccaccccagggggtaaaaaccccccaaaccccgggtccgaaaaaaaccccccctttaaaaaaacccagattacagaaaacccccctttgggggggggggccccaattccccccccggggggtcccacaaagggggcaaagggacccccccggggacaaaggggggggccccttgggcccctttcccccggggggacccccttaccc

SEQ ID NO: 2533 - DNA, 566 bp, Glycine max
  Clone ID: jC-gmfl02220050g01a1
aaaaacgctgcaataatattctattttcaaagggaaacccaaaaactgaagcgcgaggaagctaaaagtagcaacgagggatgagagaacaagaggattggaggattacgacagcgctgttaacgttgttgttggtgtttgtttcttcttttccggcgttgagctacggagttgttcctcctcgtactctgctcaataagctgtctcagggcagttatctcaccactcaggagcaatggttcaatcaaaccctcgatcacttctctccctatgatcaccatcaattccgtcaacgttacttcgagtttctagactatttccggattcctgatggaccaattttcttggtaatcggtggtgaaggtccatgtaatgggataacaaatgactatattggtgtactggcaaagaagtttggagcagctatggttactcttgaacatcgctactatggaaagagttccccatttaattctttggagacagaaaatttgaaatatctttcattcaagcaggcactctttgattcggctgttttcgtcagtattatcacgattccttaaatg

SEQ ID NO: 2534 - DNA, 581 bp, Glycine max
  unsure (1)..(581): unsure at all n locations
  Clone ID: jC-gmfl02220050g01d1
gtctgcaaacttaataaataaatagcattaaaatttcatatggtacaacttcatgctgtctgataaggaaataaaaccaatacaataggccaaaactgcaagaattgccccacagacaaccctatattctcacgcaatatggtaagaaaaaacaattgaggaatagaacgagaagctcccacgccacaattccctaacctcctcttttggactcaatcgcactattaacactcataatatacacattctagagaaagttccctttccaatcacaattgactctgcattctcaaaactgatatagaacaccatgcaagaatgaatgatggaaaccatcttatggcaaaaagaatgggtacaaatatagagaccaccaaactggaaaaagcttgttcccaaaaagagcaagacaccaactgccaagccagatgctatgaagaaatgatggatatgcagcaaagcaatgacaactatgtagaaaggatagattgcaatgcangttgttgctgcggctgcacagatgaccaagtagaagcgagtgtacagggtggtaaagttngctggagcttgctgagtaaata

SEQ ID NO: 2535 - DNA, 563 bp, Glycine max
  Clone ID: jC-gmfl02220050g02a1
caacggtccctttccttaaaaacggctactttctctctctacaattcaaactctcatttcaaaccaaaaaactctcactttcttcattctctccacaaaatcaactcatttcctcttctcagcagcgacgacgacggaaaatcattcccaacacgatgcaatttgtagatcccttgcattgttcagatacaaagagccccaaaatgtccaaacctcaaaatgatccccttttgcaatcggaaacaacttgtggaacacttctctatgaacttcagataatatgggacgaagttggggaggctgagtctgacagagatagaatgctgtttgagcttgaacaagagtgtctagaagtataccgaaggaaggtagatctagcaaatcggtctagagctcaggtaaggcaggcaattgctgattgtgaggcagaacttgccgccatttgttcatcaatgggagagagaccagtgcatattcgtcaggctgatcaaaatgctggaagcctgaaggaagagcatgcaagaattcttccgcagttggaggagatgcacaagaggaaaatt

SEQ ID NO: 2536 - DNA, 566 bp, Glycine max
  Clone ID: jC-gmfl02220050g02d1
acaaccacaagaataccacatatatcttttctttttcatttttttttgcattgtaagaagtattaacagccaacacaaaattatatttgaaaattcagagagagagagagagagagagagaatgagagagcttgatcagctcagtcctaacacaaatgtacactacagcacgtacgtaacagaacagaacagaacagggttctatgttctacgttttatccttaattagtaagagcactccattctatgcactcgggccctcagaatcccgttatacaaagccattctgtttgctggcaatggcattccaccactttgtcttctgcagttgcttctttgctcattcctttctcttccatccttcacactatctgcaaatttgactttcttctttttcttgttctttgtctcccttttcttttcctctgaatacaagcaagagcgcaaggtgggtttgttagagtggtgaatttgaaatgaaggcctggagaaagcaacataaagcagggtggtggagagaagcatggcagtggtgagaagaatgccctgtgagatagaagccattt

SEQ ID NO: 2537 - DNA, 539 bp, Glycine max
  Clone ID: jC-gmfl02220050g03a1
gccattcgcatgaagactggtgcccaaagaatgtgcatggcatcgccttccattgatcattttgttgatgctttgaagcaaactgtcttggctaataagcgttgggttcctccaccgggcaaaggatccttgtaccttaggcctctgctcctaggaactggtccggttttgggtttggctcctgcacctgaatacacattcctcatatttgcttcccctgttcgcaactatttcaaggagggctctgctccactcaacttgtacgtggaggaaaactttgaccgtgcttctagccgcggcactggaaacgttaaaaccatttccaattatgcaccggtcttgatggcacaaattcaagccaagaaaagaggattttcggatgtgctataccttgattcagacaccaagaaaaatctcgaggaggtctcttcttgtaacatttttattgccaagggcaaatgcatctcaacacctgctactaatggaactattctttccggaattacccgaaatagtgtcattgaaattgctcgcgatca

SEQ ID NO: 2538 - DNA, 567 bp, Glycine max
  Clone ID: jC-gmfl02220050g03d1
caaataaattactttcctcaattaaaattctcaatccaaacacaatcttagtgtcacttacaaaattgacaagtaaaaatataccattactctgaaaatacaggatcaaaactggcaaaattgcaaatgacttgatatgccatatatgcttatatcccaaccaataccctacaggctatactttcaccgttgtaataagtaaacaagatacttccatctacgtaaatgattcaaacttggataattttggaaatatattgtaaagctaataacaatatcagctcttgaatctaatgcttctactgatagccgcattaattccagaggattctccaccataaggagcggtcggcctcttgatactctgaacctgccccttgcgattcttaacagctttttgatgcttgagcttgtaattctttctgggatacttttttgctttgttgcgattgcgggttagtcccctattcttctcgatctgagaagaaatatggcgctttccttctacagtctctggcaatgaagagactgaagagttcctgtaatagcaatcaatcttgagaagtc

SEQ ID NO: 2539 - DNA, 524 bp, Glycine max
  Clone ID: jC-gmfl02220050g04a1
gctacttcctactccaaccgcacttctgctccgcaattatcatgggcaaggtcaagatcggaatcaacggatttggaagaattggccgtttggtagccagagtggctctgcagagagacgatgttgaactcgttgccgttaacgaccctttcatcaccaccgattacatgacatacatgtttaaatacgacagtgttcatggacactggaagcatcacgatgtcaccgttaaggacgagaagacccttctcttcggtgacaagccagtcactatttttggacacagaaaccctgaagagatcccatgggggtcaactggagctgacatcattgctgagtccaccggagttttcaccgataaggacaaggtcgccgcacatttgaagggtggtgcaaagaaggttattatttctgccctcagtaaggatgcccccatgtttgttgttggtgtcaacgagcaccagtacaagccagagtttgatatattttccatgctagctgacaaccaacttgcttgcccactt

SEQ ID NO: 2540 - DNA, 497 bp, Glycine max
  Clone ID: jC-gmfl02220050g04d1
gtctataacaatttcattaaaacaaagagaatatgaatacattacactgagttaggagaataatagaccccccttaagataaattttcataacaaaccaagcaatacatcaatgaaacaaatcaatccaattcctcaacaaaagaaacaagccctccaaaaagctcaagcatctgtgtattctatctatttacaaaagcagcatgtatgtagttgtctaatgggtcactttttttttattttgatgatggtggtgtcttggggtgtgaagacttgcctgtaatggccttcttcactttggaaattgaatgcttcacctttgaccctacacctgataggatgccatgagattttttgtgtgaaactttcgtgtcggtgtcttgagagtctctggatatcacactcacactagatgatgggcttattttctcgaattcgtctcctgcttcgtcttctttgtgatgcccggttgagtgatttcggcctctggagtttccg

SEQ ID NO: 2541 - DNA, 507 bp, Glycine max
  Clone ID: jC-gmfl02220050g05a1
ataattttttttctccattagattaccaagctctgcaactttgcttctcaacatggagtatcgtctcctacccatttttactttactcaatattgcactggtggcaacccatgctgctttaccccctgaagtttactggaagtcggtgcttcctactacgccaatgccaaaagccatcactgatatcctttactctgattgggtggaagagaaaagcagctcagtgcatgttggaggtggaggcgtgaacgtgcatacaggaaaaggaggtggcagtggcaccactgtcaacgttggtggaaaaggaggcggaggcgtaaacgtgcatgcaggccacaagggaaagccagtgcatgtttcagttggctcaaagtctccatttgattacgtctacgccgccacggaaacttaattacacgatgaccccaacgtggcactcttcttctaggaaaaggacttgcattctggaacataggtggacttgcactttaccaggagttcatttaa

SEQ ID NO: 2542 - DNA, 592 bp, Glycine max
  Clone ID: jC-gmfl02220050g05d1
agttattccgatattcggacgcatcaacttgttatgaaatcacattgatagcctctactcgtgtcctagctcgtctaagagctagatttgcctcaattgtttgtctcttgccttccgccttattcaaattagcttctgctatttcaagagtttgctgtgcttcttgtggatcaatgtcactacccttttccgcatcatttactaaaacagtgatctcattattgtttattctagcaaaaccgcccatcagagccatcgttaaccattggtctttaagaagacgtattctcaaaatacctatatctacggctgtggcaataggcgcatgatttggtaatactccaatttgtccgctattagtagataaaatgatttccttcacttccgaatcccaaacaattcgattgggggtcagtacacaaagatttaaagtcatttcttcaaattgctctccatttctaagttcgtagctttcgcagtagcttcatcgatattacctaccaaataaaaggcttgttcaggaagaccatcctattcttcagaagaatcaatttaaacccttctaatgttctgtagactaacatatttcccc

SEQ ID NO: 2543 - DNA, 539 bp, Glycine max
  Clone ID: jC-gmfl02220050g06a1
gccgccttgatcctgtatataacgttgggagagaaatcaagatctgagaagtttcacctttcttcaacccctcttgctctattataatttaatatcttctagagattcttctcgtgccaacccatttatttttctcgcaggtttcatgtcaattctgtttgtgtccgaggtttgccaagttttgttttttattttctgaaatctcattaatatattgttcagacattcccattttgagattttatctgttaggaagaggtccttttgcttctgaatgagagtgtccaatgaaagtttggtccttgatgcataattaaattgttctattgagtggtggcaagtcaaaaaggtcttggctttttcgtaagagaatattgctttttttagtaagattatatatggtgttggtgctatatttaaattaaagaaccctgcaaggccctgtgtgcttcttggttcagcattgccattatcttcttcttcttcttcttgttcttcttctcatggctcttatgttaggctttgatccctggtcccat

SEQ ID NO: 2544 - DNA, 129 bp, Glycine max
  Clone ID: jC-gmfl02220050g06d1
atctcgcattaaaacagcactagattgtcatgatcatcaattaagtacaacaagaaagtttcaagagaaaacacaagccggactgcagcagcatatattcactaaaatactgatactagcacataattt

SEQ ID NO: 2545 - DNA, 565 bp, Glycine max
  Clone ID: jC-gmfl02220050g07a1
agatgcaactatttgtggctttgttttccaatttccactattctttttgaattttgcaattgagtaattgaaagtgctttgtcctttctcttgtcgagcgaatgaccttgaatttcccgcatatgtcacgggatagagcctgacgaaaactagcaaggagggaggttttcagtattttctggacaagctgcaggatgccttctgaaatcatggagaagaggggtgcttctgcctcatctcgctttttggatgacatttcctatgtttctgagaagaatactggattacgaaagccaaaatctatccatgaccattttctacaagggaagagtgaaatggcggcatcacctggcatcatttttaatacttcgtcaccccttgaaacaaattcaaaaacaggcttgtcaatttctcagactactctatctcgggaaattacagaagacctacattttggcagagaaacaggcaatacagatatgctgaaggattccaccacagaatcattgaattatcacaagagatcatggtctaatgtgtataggcagtcagcttctggctcata

SEQ ID NO: 2546 - DNA, 261 bp, Glycine max
  Clone ID: jC-gmfl02220050g07d1
gggggaaaaggaaggggtttttcaacttttgggaggaaaaaacctggaattttaaccccaaaggcaaccggaaaaaggttccaaaaaagccccttttttaggggccccgggaaaaaacaaaaatcccaaccccaaaaaaacctggggggaaatctggggggcgaaaaattattttaccccccggcgttttcccaatctccaaatttctacccaaaaaaagggtgggattttcgccggacccccaaaggggatccatttgcg

SEQ ID NO: 2547 - DNA, 493 bp, Glycine max
  Clone ID: jC-gmfl02220050g08a1
caacatctctatcgagtaaattaactatgaagcctaccctactattatccctttccttcctgcctctctttgctttcctggctctttcagaagatgttgaacaagttgtggacataagtggcaaccccattttcccaggtggcacatattacattatgccatcaacttggggcgctgccggtggtggattgaaactaggccggacaggaaactcaaactgcccagttactgttttgcaagattactcagaaatcttccgtggcacaccagtcaaattcagcatacctgggataagccctggaatcatctttacaggtactccacttgaaatcgagttcgcagagaaaccttattgtgctgaatcctccaaatgggtggcgtttgtggacaatgaaatccaaaaggcatgtgtgggtattggtggtcctgaaagtcatcctggtcaacaaacatttagtggcacatttagcattcagaaatataaatttggata

SEQ ID NO: 2548 - DNA, 377 bp, Glycine max
  Clone ID: jC-gmfl02220050g08d1
gaaacacaatggtacacgcaaacataaatatttaaaaatataatttgtcccgataaaacttcaattcacggtacaaaaacagttccgtacgatttttttgaagataaaccaaggtcaaaatactacaattttttgaaagggaagaaaataagaaaaagcaggtggcgaaaacagaactccatttggtaattaaaatattctgatcaggaagtagcatttcattataaacacgccaattgcattaggtccttaaacttcagaacttaaaagaaacgccaggccaggtataaaagactgatgcacttatgggggatctagtgccccatgtagggggcgatttcaccaccatactggccttttccagatccaccctggcc

SEQ ID NO: 2549 - DNA, 507 bp, Glycine max
  Clone ID: jC-gmfl02220050g09a1
ctcgcttccttctcttccttctctaactatatatattttctttttctctctgtttcttcctttttattttatgcttttttctccgatgtgactggcgtttgtttggtgtgtttttcgtgtgcgtcgaaccctctgcgttcgttaattttgttttgtgttttcggatcgacttgtttcgcgttcggttgcggggatcttcggtttaggtaaatgagtggtaaatgagtggtttttgagcagaagcagttaaaagagaaagggattcagcgaagatgacatcggttggtgtggcaccaacttcgggtttgagagaagccagtgggcatggagcagcaggtgttgatagattgccagaggagatgaacgatatgaaaattagggatgatagagaaatggaagccacagttgttgatggcaatggaacggagacaggacatatcattgtgactaccattgggggtagaaatggtcagcccaagcagactataagctacatggcagagcgtg

SEQ ID NO: 2550 - DNA, 487 bp, Glycine max
  unsure (1)..(487): unsure at all n locations
  Clone ID: jC-gmfl02220050g09d1
cccacggaaatctttgaaccatatgtcaagttatacacgcacaatttttttgaactttgacagaagaaatgcagtagcatcacacctataatttccttttcacaaaagggaaaaaaagccaaaatcactcgtgctaaatgatatagaagcaacaactaaaacaacagagtgacaaaagaatacaaaaaataggattaaattgaatcaccgcacttgccacatgcatctaactgttgaagggcagaaagaaagcagcgcatgctctgaaagaccaaatagtttcaaacacatgttctgaaagacctgatgaaatgacttgattaccaaaaattgtggcctatgcagcagccactgacggttcctttgctgtcaagtttgaaacagccaaatgaaatttttctctagttttagtacttgcaacatgtncagcctttgccaccttgctaaaagcactcgtaaaccatgctgttccagcagtcacatatct

SEQ ID NO: 2551 - DNA, 412 bp, Glycine max
  Clone ID: jC-gmfl02220050g10a1
gcaaagaagagtaatgaagcagtgttgaaggattggtcaaagaagtccaatcttaaggcagagagagttaattacacggctgaattcatagttgactctagttttggggagccaggagctattactgtgacaaacaaacaccagaaagaagtctttctggaaagcataacaattgaaggatttgctagtggaccggttcatttcccctgcaattcatgggtacaatcaagaaaagatcttcctggaaagaggattttcttttccaataagccttatttacccggggatacacctgctggacttagattattgagggagaaagagctgagaaatcttagaggtgatggcaaaggagttagaaacttatctgacagaatatatgactatgatatatacaatgatttggggaatc

SEQ ID NO: 2552 - DNA, 509 bp, Glycine max
  Clone ID: jC-gmfl02220050g10d1
aatacaattaaaagaaaatatacactatgatgaataatgttacatgaatgaaaaggacccaatactttccttcccatgcaaaccagaaatctctattggatgttgtttaaatgctagagccagtcatgatgattcacaccatgaaagaatacaagcatatatacatatgtcatatgtataccactaatgtatgtacatatacatatgcatatggactttcatatgatttttaccaaacaaaagaacagctaactaacaaaattgggtcatgagtctcgagaaaagccacatgacatcaagtgggtgattccgccagaagaagagtatgccaccagccgcatgcaacgtttttagctacacaaccttcgatggtaacttcagaagggatgttacggtctatcacgtccccaaggccaagctgtccatacttgttccatccccagcagaagacttttccattatctgctattagagcagtgtgacgagccccacaagatatcctctttaca

SEQ ID NO: 2553 - DNA, 556 bp, Glycine max
  unsure (1)..(556): unsure at all n locations
  Clone ID: jC-gmfl02220050g11a1
gcgacaatgtctggtgtcacttgttgttttttccctggtcagttaaactctgatctgcgaaagcttgcagtgaacctcattcccttcccgcggctccactttttcatggtgggatttgctcctttgacatctcgtggctctcagcaatacagagccttgagtgttccagagctcacccagcaaatgtgggattccaagaacatgatgtgtgctgctgaccctcgacacggccgctacctcactgcctcagccatgtttagaggaaagatgagcaccaaggaggtcgatgaacaaatgatcaatgtgcagaacaagaactcctcatactttgtggaatggattccccacaatgtgaaatccacagtctgtgacattcccccaaccggcttgaagatggcttcaacattcattggcaactctacctccattcaggagatgttccgtagagtgagtgagcaattcactgctatgttcaggaggaaggccttcttgcattggtataccggngaaggcatggacgagatggagttcactgaggctgagagcaacatgaacg

SEQ ID NO: 2554 - DNA, 525 bp, Glycine max
  Clone ID: jC-gmfl02220050g11d1
cacatgtgaagttggattcatctatattgcatcatccctcaaaaatagtactagtaaaactggcaatgaagttgttcatgaacagtataaaaatcgtcaaagaaaaattacagggtcgtcatatatctacacaacgcaggagggttgatagacttgctgcagcataaagtaggagatgatatttgtgcaagtgaacagaaattaatagacttcgacattccattgctctgctatcttcaattgcctcttgtactcagtccaatcaatgccatctttggcagccaatgacaccataatgtcatcaattcccttttccattccttttagtccacacatgtacacaaaagtgttatccttcttcagtaattcccaaagctgttatgcgtattgagccattcgggtttggatgtacatcttctcccctttctcgtatgtttgctctcgactcacagcgaattcaagcctgaagttttcaggacttttctcttgcatcttctcaaacttctccttgaaaacaatgagctg

SEQ ID NO: 2555 - DNA, 75 bp, Glycine max
  Clone ID: jC-gmfl02220050g12a1
ccctatcccataaaagggggaaaaagaagcattacaagcagaaaatatggcttttactctgctgtgactcatcta

SEQ ID NO: 2556 - DNA, 453 bp, Glycine max
  Clone ID: jC-gmfl02220050g12d1
gataaaagctgttacgtaatatttgaataattattagtatgtcagcataaaagcaatgattagggaggaaagatttttaaagccatgcattctatatagtcaatgaatctatgcaaagatcaatttaagatgatcaaatggattatgatgtcaagttatcttggacatggttctcatgcttatcttagttcccttatcggcaaggcacgtccaaagagcttttctacttcaccggcttccattttgagcccatcaagaatctccattccttcttttgataaccctcttaagaaattctcctcatcttcttggaatacttcgaacccttctgccaatttctgaaacaaggtggcctccgttttccccaccttctacacctcttcttctaactgttcaacttcccttacaatggtctattctacttcctctacctttctgttcagcctttccacc

SEQ ID NO: 2557 - DNA, 530 bp, Glycine max
  Clone ID: jC-gmfl02220050h01a1
agaggtctttcaagtatgcctgggtgcttgataagcttaaggctgagcgtgaaagaggaatcacaattgatattgccttgtggaagtttgaaaccaccaagtactattgcacagtcattgatgcccctggacacagggatttcatcaagaacatgatcactgggacatcccaagctgactgtgctgttcttatcattgattccactactggtggttttgaagctggaatttcaaaggatggacagactcgtgaacatgctctgctttcattcacccttggtgtgaaacagatgatttgttgctgtaacaagatggatgctactacaccaaagtactccaaggccaagtatgatgaaattgtgaaggaagtttcttcctatttgaagaaagtaggatacaaccctgacaagattccttttgttcctatatctggttttgagggagacaacatgattgagaggtccacaaaccttgactggtacaagggtcctactctgctagatgcacttgaccagatctctgagcccaag

SEQ ID NO: 2558 - DNA, 540 bp, Glycine max
  Clone ID: jC-gmfl02220050h01d1
acaaccacaagaataccacatatatcttttctttttcatttttttttgcattgtaagaagtattaacagccaacacaaaattatatttgaaaattcagagagagagagagagagagagagaatgagagagcttgatcagctcagtcctaacacaaatgtacactacagcacgtacgtaacagaacagaacagaacagggttctatgttctacgttttatccttaattagtcagagcactccattctatgcactcggtccctcagaatcccgttatacaaagccattctgtttgctggcaatggcattccaccactttgtcttctgcagttgcttctttgctcattcctttctcttgcatccttcacactatctgcaaatttcactttcttcttgttcttcttctgtgtctgccttttcttttcctctgaatacaagcaagagcgcaaggtgggtttgttagagtggtgaatttgaaatgaaggcctggagaaagcaacatatagcacggtggtggagagacgcatggcagtggtgagaag

SEQ ID NO: 2559 - DNA, 629 bp, Glycine max
  unsure (1)..(629): unsure at all n locations
  Clone ID: jC-gmfl02220050h02a1
caccgccgctgcacccaaatgcgccttcgtcaatagcctttaccgctccagcttcagtttgttgattgaagacaacaacttccagcgaagcagcgtaagtgttagtaaaagattttatttttctctctctctcttccttctaaacgccgcttccgcatctctcttccttttctaactatagattttatttttccctctgattcttcctttttattttatgtttttttctccgatgtgactggcgtttgttttgtgtgtttttcgtgtgcgccaaagcctttgcgttcgttaattttgttttgtgtattcggatcgagttgtttcacgttcggttacggggatcttcggtttaggtttgtttagggattttttgtttctttgtttatgttgtggatgagtttttcgttggatttgttgtgttctgtgagattgatggattttttctaatttatattccttcaatgttttttcttttttggcaaaatgaatattttatttatggacagaatagatttgcgattnttggctcttaaattcatgtttgaacggtggtgtgactttcctatttggttctatttttatgaagcctgttgactgcaatttgttcttgaaaaatataagggaatgtg

SEQ ID NO: 2560 - DNA, 484 bp, Glycine max
  Clone ID: jC-gmfl02220050h02d1
aaggttaaatttgtcacatttattcattatcatatatgcatcacctagtatcagctggattattcttaattaagagaaaactaagatccaatatcttacatgctatgtttgatgttcttgaattagaataatttcaccttgataactttcaaaatcctttaatgcaaattaccgaaataaaactctagttctagtacaaacaacacctagctataataattaggggttgataccatagagctttcgaatcccgtctatatcatcttgcgctagattcaccttactagttcgaggtggtatagaaggatacatgatggctcttaggtccgacgagtggcctaatccgagcaagtgcccgatctcgtgcactgtcacagattcaaggtcaaacgcacttgtcaccggtgatttggtgacatcgtcagacgccacccaatattcgtcggctggaaagtggcaccttccatcagtgggagcgaatgca

SEQ ID NO: 2561 - DNA, 496 bp, Glycine max
  Clone ID: jC-gmfl02220050h03a1
gagatggattgtttggtgatgccagtttcattgatccgtcgtcgttccacgggttcacggatgggttacatggcacttcctaaggaggagcccgtaaaggtggtggtgggaaaagagaagagggtgtttctggtggagcctttcatattgcaagagaacccgtttcagattttgatggatatctctatgaagaaggacccagccgggcacttcacgtcgaatcatagtcagagtgagaggagagtgatctttgtggatgtggatgacattttgttcgaacacatgctgtggctcatgcacaacgatgcttcttctttgttccagctcaatttgaaggagattattgacttctacactcacgatatctaaatgtaatcacaggtactctggtttataaatttcagatacggaaagaacacttactaatatatatatatatatatatatatatatatgtatatatatactattattatacgcacaccatggttgattt

SEQ ID NO: 2562 - DNA, 595 bp, Glycine max
  Clone ID: jC-gmfl02220050h04a1
ttcttatattcaggaaagtaagatcatctgcatcgccgacgcttccaacaataacaatggccgataatgcaacaacgcaaggaagcaacaccctattttctccttacaagatggccaaattcaacctctctcatagggtggtgttggctcctatgacaagatgcagagcgttgaactggattccacaggcagcgcttgctgaatactacgctcaaagatcaacaccaggtggatttctcatcagcgaaggcaccttgatctcccccactgctcctgggtttccccatgttcccgggatatattcagatgaacaagtggaggcgtggcgaaacatagtggatgccgtgcatgccaaaggcagcattatcttctgtcaactttggcatgttggccgtgcctctcatccagtgtatcaacctggtggagctccaccaatttcgtccaccagcaagcccatatcggcgaagtggaagattctgcttcccgatgggtcctatggtgtgtacccagagcctcgtgcacttagcacttctgagatacctgaaatagtgcagcattatcggcaagcaacaattaatgcatttcgagcagtttt

SEQ ID NO: 2563 - DNA, 306 bp, Glycine max
  Clone ID: jC-gmfl02220050h04d1
ggggaaaaaaaccggctcccttaatcgaaaaaaaagaggccagggccaacaggctaaaaccccccggggcccaaaaaccggggaaaatgcccccccccggacaaaaaaaactttgccctttttgaaaggggggaaaaaagaaaaacccgaaaaccgggggccccccaaaggagcccacgccccaaactatacgggggggcagagctgccacaaagggggccccctttaaaaaaaaacctccccccctgacaggttacgcccagggccccaaagcccccggcacaaaggccgcccccatagggggcc

SEQ ID NO: 2564 - DNA, 539 bp, Glycine max
  Clone ID: jC-gmfl02220050h05a1
ggaaaaagctaacaaattcgttaatttctagaaacctctcatcaaaagtgtctttgatccgtgagaacttaaactcagactcctaaaatagtttgatcactttcgcattgacctgtaaccttttctctccggttaccaaaaccgtaagttgctgaacatggacccgcaatcgccggttcgggcggaactggagcctccggttccgacgttctccccacggttcgcgctcacatccagttcgcagcggaaaatcgcgatcgcggtcgatctgagcgacgagagtgcctacgcggtacgctgggcggtgcagaactacctgcgaccgggcgacgccgtgatcctcctgcacgtgcgtcccacgagcgtcctctacggcgcggactggggctccgtggatctgagcgcggcggaggacggcggcgacgaggagtcgcggcggaagctggaggacgacttcgacaacttcacggcgacgaatgcgagcgacctggcgcagccgctggtggaggcgcagatacccgtcaagatctacattgtga

SEQ ID NO: 2565 - DNA, 526 bp, Glycine max
  Clone ID: jC-gmfl02220050h05d1
ctaatcttcgagatgatgcatttttccactcaacaccatgaccatggccaaacccagcgactcctcgtctattcatctcacctcaacctgcatccctctcaccccgatcttcacttcttccgccagatttaagcggagaagtcagaaacgtgagcgccaatgatcttcttcatttcctcctcaatctcctttgtcaagacaccgccagtgagcttttcgaggaaggccgaatgggtagatttcaattgctcggtgaatgacctttcccaagcgccaatcttgtcaacagggacattgtcgagcataccgttaacaccagcgtaaatcaaaggggccataacctcggtaggcataaggttgtactggggctgcttgagcaactcggtcaacctagaaccttggttcaagaggtatcgagtcgaagcgttcaagtcggaaccgaattgagcgaaagcagctacttctcggtactgagccaagtagagcttgagcgaaccagcgacggatttcatgagtttggtttggg

SEQ ID NO: 2566 - DNA, 521 bp, Glycine max
  unsure (1)..(521): unsure at all n locations
  Clone ID: jC-gmfl02220050h06a1
gttttgggcagatgcaagatcaaggacttcttacagtcattttggtgatgcagttactctggacacaacatacagaataaatcaatatggagtgccatttgctccattcactggggtaaaccatcatggtcagatgattttgtttggctgtgcacttcttttggatgattctgaagcttcttttgtgtggctttttaagacatttctgacagcgatgaatgaccgataccctgtctctatcactactgatcaagacagagccatacagacagccgtttcacaagtttttcctcaaacacgccactgtataagcaaatggcatgtcttgcgagaaggccatgaaaagttggcccatgtatgcaacatgcatccaaattttcagattgaactttataattgtattaatctgacggaaacaattgaggagtttgattcatcttggaattttatcatcaataaatatgaactcacanaaaatgattggcttcagtccttgtacagtgctcgtgctcaatgggttc

SEQ ID NO: 2567 - DNA, 452 bp, Glycine max
  Clone ID: jC-gmfl02220050h06d1
cattcgaattcattttatttatatattaatattatattcaaatgaaataaaaagatattaaaagatactaattataagaatttgaaagtgaaattataaagttattaaatgattaatcaatttttttctacctgttcctgtagtaaaaagagttccatctgttcttgaatagcttccttcaaaaggacttctgcttccccagtgaatgtcttggtagaagatatgatttctttgaattgaggtttattcgtgtttaagtaagcacgtaactcaacaagaaatttccttacctgtccaatttctaatgaatcaagataaccattcgttccagtataaatagttattatctgttcttccacggtaagaggagctgattgggattgtttaagcaactcgcgcaatcgttgacctcttgctaattgattttgagtagctttatcgagatcagaagc

SEQ ID NO: 2568 - DNA, 419 bp, Glycine max
  Clone ID: jC-gmfl02220050h07a1
caacatcgctatcgagggaattaactatgaagcctaccctactataatccctttcgttgctgcctgtatatgcttacctggctctgtcagaagacgctgaccaagatgaggacattggtgaccaccccattctgccagaagggacatattacattatgccatcaacttggggcgctgccggtgatggattgaaactaggcctgacgggaaactcactctgcccagatactgttttgggagattactcaaaagtcctccgtggcacaccagttaaattcatcatacctgggataagcactggaatcatctttacaggaactccacttgaaatcgagttcgcactgaaacctaattgtgctgcatcctacacatggatggcgtttgtggacaatgagatccaaaaggcatgtgtgggtatt

SEQ ID NO: 2569 - DNA, 329 bp, Glycine max
  Clone ID: jC-gmfl02220050h07d1
aaccccttgtatgaatttgtatgggggcaaaatagacgtggcaaattatattaagtttaataatgagaaagttaaaaggatgatgagctggcagtcccatagtacatatgtacacttggacctgtttttatgaagcaagatacaacctaagaatacacatacacaggtgcattcattcctggcatatgaaatgtatatacatgcagtataggatggatggatggataatgaattgcatatcatcatgattcatcaggctttggctccagaatgacgggtatcttctccttgggggcaccttttaacacctacacaatcaccttatcacc

SEQ ID NO: 2570 - DNA, 480 bp, Glycine max
  Clone ID: jC-gmfl02220050h08a1
tccatagttgcttcctcctcctcattctcctctattctcaccactcaatttctcactccctcttcattttcttctctctttctcaaaaccctcactttaaggtcctccacgccgtttcagcgtctttcttttgcgtcacaaccactgcgcaggctcatggctcgcgccaccctcggcctcactctcccagccaacaccgaatcccttaaggtttctttcgcggcaaaggagcttgacgtggcggaatggaaaggggaccttctcgccgctggcgtaacggagaaggacgtcgcgagaaacgtggaatcgagattcgagaacgcgattctgagcgcgttggactccaagctgggcgggttgttgggccaggtctcgttcgaagaggacttcagcggcaaacttgggcagtccacggttctaagaatcgcttccggactcggattcaagcgcgttgccttgcttggcctcggcgcctccgcg

SEQ ID NO: 2571 - DNA, 467 bp, Glycine max
  Clone ID: jC-gmfl02220050h08d1
ggccaaagtgaatctaattattcaaatatttccgtttaggcacactacaaatggtaagaagctgttgctgttgatatatctatcttctatacaaaacataacaaactggaaaataacactaaaaccctaagaaacaagaaatgtattgcaaaacgaaaaggcgacaactatgctattatcattattataagcctaagcacgttctccacggatgcggcgtgcgagttgaatgtccttgggcatgatggtcactctcttggcgtggatcgcacaaaggttggtgtcttcaaacaaacccaccaagtaagcctccgcagcttcctgaagcgcaagaaccgcgtgactctggaacctcaaatcagtcttgaagtcttgcgcgatttcacgaacaagacgctgaaaggggagcttgcggatcagaagctctgtgctcttttgggtatttcggatctcacgaagagcaacag

SEQ ID NO: 2572 - DNA, 524 bp, Glycine max
  Clone ID: jC-gmfl02220050h09a1
ttgttattggagatttcaattctttgtctttcaaactcctcaagttgggtttatgtgatgatggctctcaacatctcttctccagctgaagtcaagtccatttttttcgctgattccttcaagtctaactgcctcacagcaaaattctcaggtgggtttgcttttaagagaaaagagcgtagagcagcatctggaggacgggtttattgctcagtgcaggcaacaccaccaccaccagcctggccgggacgagcggttccggaacaaggtcgcaagacttgggatggaccaaaacccatttcaattgtggggagtactggttcaattggaactcagacactagatattgtggcagagaatccagataagtttaaagttgtggcacttgcagctggttcaaatgttactcttcttgcagaccaggtaaaaagatttaagcctcaacttggtgctgttagaaatgagtccctaattgctgaacttgaagaggccttgcatgatgttgaagaaaaacctgagatcat

SEQ ID NO: 2573 - DNA, 510 bp, Glycine max
  unsure (1)..(510): unsure at all n locations
  Clone ID: jC-gmfl02220050h09d1
atacaagtgtacgaaaatgtaaatcttatttaactcaaataataatggtatacaagttatgatatccaatgtagtattaattgtaatttgcatatttagtcaacctgctcaaagacaaggagagagctagaagagtaaagtgacggttagagtagaaataggaattataatcacacagtatatctgtaaagcctgtgtcattgtcaaatatttatactcttctgtaactagcagcacctttgaaaaatattgcaaatttagctttggacgggttctgcatcagctgttgattgcttgttaaattcactttctgtactacgagtatcatgcacggcaaccacattaaggcaatccttacttccttctgatataggttttacctcacctttcagctgttcatttgatctacacagaactccagaacttgaatggcttataacatcattgctgacagaatcgtctttagtagctgaattatctttntggtgttggtgctcacttaattaaatt

SEQ ID NO: 2574 - DNA, 464 bp, Glycine max
  Clone ID: jC-gmfl02220050h10a1
cgaaaagtacacaaagatcccatcttttcacgatttggagcagaacaacaattctgggtatcttcatatctgtgccaatgagaccatccatggggtggagttcaaggactaccctgttcccaagagtggtgttttggttgctgatatgttctcaaatttctgctccaagcctgtggatgtgtcaaggtttggggttatctatgctggggcccagaagaatgtggggccctctggtgtcaccattgtgatcatcagaaaggacctcattgggaatgcacagggtgtcacacctgtgatgtttgattacaagatccatgatgagaacgattcactctacaacacccctccttgctatgggatttacatgtgtgggttggtgtttgaggacttgttggagcaaggtgggttgggggaaggtgagaggaggaacaagatgaaagctgagattctttacatgcattgat

SEQ ID NO: 2575 - DNA, 388 bp, Glycine max
  Clone ID: jC-gmfl02220050h10d1
tttttttttttttttttttttttttttttttttttttttttttttttttttttttttttttttttttttttttttgggggggccttaaccaaaaggggccttaattttttaaaaaaattttcaagccccaaaatttttttttcggggccccccaaaaaattttgaccaaaaaaaagggggtttaccccccgaatttttaccccccttttaaccaaaaaggcaattttccccccccatttccggggttcccttggacccttggaccttaaaaaaaaaaaaaggttccccccctttttccgaattctcccccggttcccctttttgggcccctaaaaactttgggttttaccccggggcccttaacctggggcccccaaatttcccttct

SEQ ID NO: 2576 - DNA, 581 bp, Glycine max
  unsure (1)..(581): unsure at all n locations
  Clone ID: jC-gmfl02220050h11a1
aaagcagccatgggttttttcttgaaatgggtcaacttgtttgtcttttttcatttccttgctgcaacacccatcttctcagattcctcctccagctcaaatgcaatcgccaccaccaagttccttgatttagccaaggatcctcgggtttttgattggatggttggtatcaggaggaagattcatgagaatccagaactgggttatgaggaatttgagaccagtaagctgattagagctgaattggataaactgggcatctcatataaacacccagttgcagtcacgggtgttgttggcttcatagggactggacnttctccttttgatgcattaagagctgacatggatgctcttcctatgcaggaaatggtggagtgggagcacacgagtaaagtaccctgaaagatgcatgcatgcggtcatgatgctcatgttgccatgcttcttggtgctgcaaagatcctcaaagagcatgaaattgagatacgaggaactgttgttcttgttttcaaccagcagatgatgaggtggtagggctaagataattttagatgctgaagtcttgaaaacatttttgc

SEQ ID NO: 2577 - DNA, 214 bp, Glycine max
  Clone ID: jC-gmfl02220050h11d1
aatacactaatggcccatatgtcacctcttaatttacatataaaaaatgacactttttaacccactatttcaaaagggcactaataaccccaaaatttgaaacttttaggtttttgaagaaggaacgcatgctttgggtattgggggcaaaaacttccaacttcaatattaccggcaaaaggacaaccctgtcaagcaactggaattggggcaa

SEQ ID NO: 2578 - DNA, 552 bp, Glycine max
  unsure (1)..(552): unsure at all n locations
  Clone ID: jC-gmfl02220050h12a1
cttgatgtatgaaatgcctctatcagcttctgaaaaagctgagggctcaaaagggaaaacaaagtcaatacgtcaatgtggaaagtatgagagagaaattgtgaagagtggagcaaaaaatgcagaagcacctcttcctatgtctattttccttgttgctagtgtattgaaagataaaagtgcaaaactactccaagaagcacggggcttggatgatgttgtcaagattttgaatgacacaactggtaatatagatgcaaaaaagcttgcagtggggctatgaaacttcacaagaaatatttgaaaaaggccaagaaaccctagcaccaaatacatcgaaatacccaatgattcttttgtaatgtgttgtatggtagatgtgttgctccctgggagacaataatggagaacataggactttaaagaattgaaaaaaggaattcaaatatccaaccatcaaaatccctgagcaattgttgtatgtgaaatcatntttttccccttttgtatccataaaagaagtaagattgtatattatgaaatatgaaaata

SEQ ID NO: 2579 - DNA, 479 bp, Glycine max
  Clone ID: jC-gmfl02220050h12d1
aagaaaaaagaaagttctaattattaataaattatatctatatatatatatatacagatagatattctatatcttttatcttaattaatatttgacccctccttataatgtgttatagatttctttatttttaggaacttatccattccttttttaatgggcccgacaatccgaaagaattctgggggaggggtcatttcgcttttgatctaaaataaatagagcttcaagaaatgagagaattaagaatacccacgagaaacactaatccaatccataatgatgtaccggaaaatacaacatttttgttattcgaccaacctttaggagaagcaaatacaacaggtacactaatcaataaaataaatgaaatagcaattaatgcaaaaacagctaattggaaagcaatagtcatgtttctaatcctccaatttaccaacaaaagaactttaccatttgatcccccaaccccttgatcc

SEQ ID NO: 2580 - DNA, 462 bp, Glycine max
  Clone ID: jC-gmfl02220051a01a1
agttgatataagcgaagaaacatcaagcttggttattgcttcaaattctgcggcttttggtggcagcccgcttgttagtattaatttttttttcccttttgaatttccaattttgtctgtattctttccttggatattgcttaagaaaaatccttattagttattacccatcttttatttttctacacatggggagggacaccgtctattgatatgagaatcaatctagtgactatttgttctggttggccttgcatacatatgttcgcgtgtcttaggataataatcattaatgataaatggtagttgtcacgtgaaaaaaaaaaaatataataaaaaaacaaaaataaaaataaataaaaatttataaaaaattaaaaaaatatagataactcatctatttaataatatctactaccatttaatatatttctaactcaaaataaaaagggggcccccccc

SEQ ID NO: 2581 - DNA, 343 bp, Glycine max
  Clone ID: jC-gmfl02220051a01d1
aaaaaaaaaaccaaaaattggggccaaaaaaatcttccggaaaaattttcccaaagggccccgggaaaaccccattggccagttcccccccgaaaaaaacccccccttcttttccctggggggggcaaccccgccctgaaaagggggggttttccaaaacaatggggccccttaacccccctaaaaccttaagcccaaaagggcccccccccctggaaaagggaaatgcctcttcaaaaaaagaattttcccagggggggggcaaaattttttggcccaaccttaaagggaaaaaccccttttcccaaacccaagggggcccccattggttttccaaaggggg

SEQ ID NO: 2582 - DNA, 585 bp, Glycine max
  Clone ID: jC-gmfl02220051a02a1
tgctgttgttctctaggagaaaggtgccagatagagcctttaacataatggggatccttgtgttttgggtttggttccctctgttgatctcttcactaccaaattggggagaaagggtcatgtttgtgttggccagttttgctgtttgttcaatccagcaccttcaattttgtttgaaccatctcttagcagatgtgtatgagggcccaccaaatggcaatgactggtttgagaagcaaactggtggcacattggacatttcttgctcctcatggatggattggttctttggtggcttgcaattccagcttgagcaccatttgttcccaaggcttccaagggcacaattgaggaaaatctcacctttggtgattgatctttgcaagaagcacaatttgccttacaggagtttgacatttgttgaggccaatctttggactcttaagaccctcaggactgctgctcttcatgccaggaatctcagtaacccttcttcccagaatttgttgtgggaagcttttaacacttattgattgattttgtgaaaagatcgatgatcatcaatctagtttctctctctttttt

SEQ ID NO: 2583 - DNA, 576 bp, Glycine max
  unsure (1)..(576): unsure at all n locations
  Clone ID: jC-gmfl02220051a02d1
atatggaaattaaactctttaagattttttcctttgaaaactaaattacatgatggaacatcttgggaggccaaatttaagcaaaagaaaatcacgggtaggtaaacaaaaagcaaaattgatttgtgcctaggcacaaatccgtgctatctacttcatatctcgattcttcgacaaagccaaaagagatcatttgcaagcggatttttattacaacaaattagctgaagtggtagcatatagtagtcgttatctgcatcatcatcatcatcatgtaatgtagtagttttaaagtaactgttagcacatggatttgaggtggtctctgaaaaccttcaacattccttggaaagtaacaatccccgtcaaggttccatcctcttccacaacccacacgtaactcacacgatgtgccaatgcttgaatcatcacagcaactaaagagctccaacggtagcaaacaatggcttcagaccttctcccaacccttgcagagtaccctccaagcttncaattcttcccagagcaaaactcttcatcagaagaacaactangagaaaaagaagaccatgaagt

SEQ ID NO: 2584 - DNA, 598 bp, Glycine max
  Clone ID: jC-gmfl02220051a04a1
tttcggctcgaggttgatgtatactttcctcctcggaagagatcgcgtgtcaatgctccattcgtttttgatggagaatggttcgagcaaaagcagaaaacctctattgaagccttgccagatgagtgtctctttgagatctttagaaggttgcctgctggcgaagacaggagtgcatgtgcctgtgtttccaagcgctggcttatgcttctaagcagtatttgcaaaagtgaaatctctgttaacaaaaataccacagtagagaaccctgaaaaggagggtgatgatgtagaatttggaggtaagggatacctctctcgaagcttggaaggaaagaaggcaacagatgttagactggctgccatagctgttgggacttcatctcgaggaggattggggaagctctcaatccgtggaagcaacattgtttgtggggtgactagtcatggtctcaaggctgttgctcgtggatgcccttctttgaaggctctttctctatggaacgttgctaccgttggtgatgaaggccttattgagatggcaaatggatgtcaccaactagagatacttgatctttgcagtgccccgcattactgat

SEQ ID NO: 2585 - DNA, 478 bp, Glycine max
  Clone ID: jC-gmfl02220051a05a1
tggtcgattgatcaaagtaagagatggtggaactgattggggctggggtgttgctgtcaatgttgttaagaaaccttctggaggcggttatatagttgatactttacttcattgctcacctgtttcaaatgagaacagttttcggtctaaaccatgcccgccttgacctgtagagaaaggtgaaatgcatgtggcttctgttcaattaccattgatctctgccctcggtcaactgagggtatccataccttccgatcttcgacccttggaagcaaggcaaagtatattgcttgctgacaggagctgggcaaccgtttttcccagggtcttccaaagcttaaccctgtaaaggacatggacgtacgggactcagaaatagctgaactagtgaatcaagttgatgaacttgagataaaattgaccactcgtcctatgcataagcatcaagatatggatcaaattagatgctttgagagga

SEQ ID NO: 2586 - DNA, 218 bp, Glycine max
  Clone ID: jC-gmfl02220051a05d1
atcatctattttgtataccaacattgctaccggaaaaaaggccaaccaaggctgcaaggcccttaaaaaggccctcaacaaagaaaaccacatacacaaccaaccctaaacagaaccgaggcaagacaaactccaagaataaaagatacaaaagaagaaaaaaaaagcaataaaaccctccattcaaacccgattaaatatgagaaacgccaaagggg

SEQ ID NO: 2587 - DNA, 560 bp, Glycine max
  Clone ID: jC-gmfl02220051a06a1
ccaagttccaagatgaagatgattcactttcttttcctctttgctcttgtctcgttcacttcccatgcttctgtcaatgatttctgtgtagcagacctaaaaggtccagatagcccttcaggctatcagtgcaagccacctaacacagtcacagtggatgactttgtgttctctggctttgtagctggaaacaccacaaacactttcaatgctgcattaacctccgcatttgttactgattttccaggtgtgaatggtcttggtgtatctgcggcacggttagacatagccaaaggtggatcaatcccaatgcacacacaccctgctgccactgaacttctaataatggtggaaggtcaaatcactgctggttttatgaccccaactgcactttataccaagacactgaaacctggagatattatggtttttccacaaggacagttgcattttcaggttaattctggaaacggaaaaaccactgcttttctgcattcagtagtgcataccctggagcacaactacttgaccttctgttatttggcaacaccttgccttct

SEQ ID NO: 2588 - DNA, 295 bp, Glycine max
  Clone ID: jC-gmfl02220051a06d1
gccagttaaattttgaccattacttgggcacagaggcattcaaaccacctatttttcaagttgaccaattcgtgtccattactacgcttattactggactgcctgcgtgggaactcgagaactttttttggtcaagcccttagcttagccttggggatctgatcgagcttgacgaatgaggctcttaagccagcgtttcccttaccgagcttttttggggccatggggttctgattcaggcttaaacgggaacccttttcattgtacgacagcttctttcctggggtcgccttgg

SEQ ID NO: 2589 - DNA, 559 bp, Glycine max
  Clone ID: jC-gmfl02220051a07a1
cttcaagattcaggtactgcgtttcggaagcagacacagatggctcgtacgaagcaaaccgctcgtaagtccacaggaggaaaggctcctaggaagcagcttgcaaccaaggctgcacgtaagtctgcaccaactactggtggtgtgaagaagcctcaccgttatcgtcctggtaccgttgctcttcgtgagattaggaaataccagaagagtaccgagcttttgatccggaagctccccttccagaggctggttcgtgaaattgctcaggacttcaagactgatctgcgtttccagagccacgccgtgcttgcattgcaagaagctgctgaggcataccttgttgggctctttgaggacactaacctgtgtgccattcacgccaagcgtgtaaccattatgcccaaggatattcagctggcaagaaggattcgtggtgagccgtgcttgaattggtggtttggaagatgatgatgattggtggcttgctgtggtgttttgttattagattccttttatatctaaagatggtgttgtagggatggaggtttctgctggt

SEQ ID NO: 2590 - DNA, 501 bp, Glycine max
  Clone ID: jC-gmfl02220051a07d1
cattcgaattcattttatttatatattaatattatattcaaatgaaataaaaagatattaaaagatactaattataagaatttgaaagtgaaattataaagttattaaatgattaatcaatttttttctacctgttcctgtagtaaaaagagttccatctgttcttgaatagcttccttcaaaaggacttctgcttccccagtgaatgtcttggtagaagatatgatttctttgaattgaggtttattcgtgtttaagtaagcacgtaactcaacaagaaatttccttacctgtccaatttctaatgaatcaagataaccattcgttccagtataaatagttattatctgttcttccacggtaagaggagctgattgggattgtttaagcaactcgcgcaatcgttgacctcttgctaattgattttgagtagctttatcgagatcagaagcgaattgggcaaaagcttctaattctgcgaattgtgctaattccaattta

SEQ ID NO: 2591 - DNA, 465 bp, Glycine max
  Clone ID: jC-gmfl02220051a08a1
tctttctgcactcttgagtccttcccaagctcgtttcgttggaaattggaattcattctctccccgagtcagagtcatgtatggcggtgacgaagtatcagcaatagtgatagacctgggttcccacacttgcaaagccgggtacgcctggcgaagatgctcccaaggccgtctttccctctgttgttggtgcaattgatcaaatggacattgatggaactgctgatattaatgatgagaactctgacaaaaccaagggaaaatgcaaactttatgtaggatctcagtcactaggataccgcagagaccatatggaggtgctgtcacccttgaagaatggagttgttgttgactggaatattgcagattacatatgggatcatgctatgagggaatgcctcctagtcgaccctaaagaacgttcaatgctacttgccgaaccatgcttcaacactcaagaacaga

SEQ ID NO: 2592 - DNA, 439 bp, Glycine max
  Clone ID: jC-gmfl02220051a08d1
attgtctgactttttgctcagaaattggaacttcgattataagaaacaccaaatacaaagtcaccgaaaataaatattattccacacgatacaatttccataatcccaaaaaataaaatgccagattctgatatctaatttgatgcaaagtgccttaatcttccctcagcaatttgcctagttgttaattgagaaacaagcacattttctacttttactcgccactctgcaaaatttagtgaagacaaatgggattctttagtaaccacaagcatggaattccatgacctctagattgatgaaaattaatttcaaaacctcatttgtgaactaagaagtgacactatcttcggtctttggcttcttacttttaggttcttcatcgtcttcctgattgagagctccattaattgcttcatgacccaaaagagagacatgc

SEQ ID NO: 2593 - DNA, 551 bp, Glycine max
  Clone ID: jC-gmfl02220051a09a1
gggaagctctgcaagtccacgggcatgtagtgaaattagggatggggcacaaggatgcgtcgcgtaagttgtctaaggtcttcaccttcgccgctctctccccctttggcgacctcaactacgctcgtcttcttctctccaccaatcccactctcaactcttactactacaacaccctccttcgcgccttctcccaaacccccctccccacccctcccttccacgccctctcccttttcctctccatgccctccccacccgataacttcactttccctttcctcctcaaatgctgctctcgttccaaactccctcctcttggtaaacagctccacgctctcctcaccaaactcggcttcgccccggatctttatatccagaacgtcctccttcatatgtactccgagttcggcgacttgctcctggctcgctccctgtttgatagaatgccttacagagacgttgtttcctggacctccatgattggcggcctttgtaatcatgacttacccgttgaggccatcaatttgtttgagagaatgcttgcatgt

SEQ ID NO: 2594 - DNA, 451 bp, Glycine max
  Clone ID: jC-gmfl02220051a09d1
aaatgaaagtgtaaaattaatatttgaaccatcatattagcgacagtttatatgtcaaagtaaatgcaaagcatagatcatctcctgtacttttctgagaaactaaaagtgatttgaaagtaaaggtaattagcatgtatctctgcttaggtgtgctatatacagaagtaatggatcagacatcagagaaaaccactagtcacttggaatacgatatttgaaagagacttgcatgctccagcttcaccagtgcttcagttcaaaagcctacatttgtacatgctatatacatttcttgttcagctttctttggttcacattttaagaaaaccagcacctgaaagtattacctaagcatggaaaataggagacattgatgcttgccacagaagaaatgtcaaatggtgaacccatttaagctttataccccattaatcattgaagcctgaat

SEQ ID NO: 2595 - DNA, 569 bp, Glycine max
  Clone ID: jC-gmfl02220051a10a1
gcgctgaacaagacaagaaaactacaaagctatgggcaccatcatcgactcccatttcttggccttcactgcccttgtcactattgcctatcagtttttgtttttcgtcgtcactgcgctcctcaaattcgacaaagtcactgattttgctggaagtacgaatttcattataattgctgcattgaccctggtcatcaaaggctcctggtattttcgacagataatcttcactttgtttgttgggatatggggaattcgcctcggccttttcctcctattcagaattttgcagtggggagaggaccgacgctttgatgaaatgcgcagtaatttgggtagactggccatattttggatatttcaggctgtctgggtgtgggctgtgagtttacctgttacagtggttaatgcaagcgacagaaatcccttcctacaggttgttgatatagtagggtggattttgtgggctgtgggttttattgtggaaggtacagcagatcaacaaaagctgcatttcaaaggaacttcagaaaattgaaggaagtggtgtaatgttggactttggaaat

SEQ ID NO: 2596 - DNA, 309 bp, Glycine max
  Clone ID: jC-gmfl02220051a10d1
cggtctaagaaaaataatattcatcaatgattagaacgctgtacactgggaagaagaaacacatgagcccaaccatttaaaatttctttcccctttgcaacatttctcccagggaacaaacagaccaacaccaaccaagcataaggccccagctatcatcaatttccagctggataaataaataaacccaacatttttgtttgcaacaaaagttaaatttattaatagtagtaataatagtaacatattaaatactataatcactagccaatcaagacacacccctcttcgctcgagccgctcgagccg

SEQ ID NO: 2597 - DNA, 596 bp, Glycine max
  Clone ID: jC-gmfl02220051a11a1
tttggagaaaagtagtaatcctatctttaccccatcaaacaattgtcttctcaaaagaaaaatccagattctctgcattccacataacttgttagttcctttgcttccaagaccagtttcggattattgttcactcatctcattctcttgttaataatctctacacatattctctctctcaagtctaaaccatgcctgttgtgacagaacacatgaaatggagaagaccaagaaaccaatttaggaaccccatttcagaaaccgatgatccaatcactcaaatcccttccataatccaatcctctcacagcaaatccaccatctcctctctcttgtcttctttctccacctccggtgaaaccacacatgccagagaccaaaacagaaccaacaacaacaacaaaagcaacagaaaattctctgcagcaaccttcaggggcttcggctgcactgccggttcatcgcagaaggtgtcggtgccggcggtgattcgctcctcagcagattgagaagggaagaggaacagaaagaagaatcacagaaggaagaataacagtaacggttacagtggcaacaacacatgtgatgatgatgat

SEQ ID NO: 2598 - DNA, 409 bp, Glycine max
  Clone ID: jC-gmfl02220051a11d1
gcaattgaagtaaaaatgtaatgaacatcaagtcaaaataatttatacacttgagatggaacaaaatactaatagtattttgattgaggggaaaacaattccaaacaaaattacaagtaacttaatttaaaaacttgaacatgaatttctgaaactcttaaacttcaattaaatttcttttttggttatgtgggaaagcaagtaggtgccctctataagctgtgcttgttttttctggcacttttagtcatttctttggtgatggcatgactaagaaccccaatagggcaaaagaacatgcacagagaaactgaatgccgagtctctatctgattctctaatccatcaagaaaaacatgccttgcaagcaagagatccattaccaaaagggtgaatccaagctgatgct

SEQ ID NO: 2599 - DNA, 592 bp, Glycine max
  Clone ID: jC-gmfl02220051a12a1
atgtttttttccctcttccattctccaaagaattcaagatcatctcaagaattcccaaaccaatctgcgcaaggaggatcaagaagccacagcgtgccacctccattttcctctatgtcatttaatccccgtgatattgcaagcatgttcatgaacatcacaaaccctacaaatgcacagccgcaggggtcacattctcatcaggaaaggcaagaagatagcaatggtagtggaactagtgagcctgaaataagaattgggggaaatattagtgtaaacatggaggatatgccagaggatataacaggggccttacaatcaatgatggaaatgttatctggggctgcaccccctgggcaaccgcaagatcaaacaaatggaagaacagcaccaaactaagctatttcagcattctgagactgtaaagactcacaaaattgttaaatattttttttgcctgtttaagttttttgatagattacagcattaactaacaaaattctctctgtttacatcatatagagcttttgagtcactatcccttttggaagcccattatacaattgtcattcgtgcaatatccatactttta

SEQ ID NO: 2600 - DNA, 458 bp, Glycine max
  Clone ID: jC-gmfl02220051a12d1
cagtgattaaatacttcaatcaaaaattggtcagggatacaataacaaaacccaaatgggccatatagaaataccaaggtgaacaaaatctcatcccctgcctacaacgtcttgaaaggaatttagtacgtcatgggagccttcaatttattcttacaacaacatggtctctggattttcaatatagcctttgaatgcttttaaccattcggcaccaattgcaccatctataacacgatgatcacagctgagggtcacagacatgaaggaagcaaacttgaactcttcagcacctgaacccggaacgaccctcctctcagaagatccaacggcaagaatgccagcctgaggaggattgatgattgcacagaattgtctgacaccaaatggccctcccaggttagacactgtaaatgtacctccctcataatcttggggtttcaagctgttttctttgg

SEQ ID NO: 2601 - DNA, 575 bp, Glycine max
  Clone ID: jC-gmfl02220051b01a1
ggctattgaccacaaggccttacatgatacttttactgcttttggactcattctttcttgcaaaatagcaactgatgcttctggtctgtctaagggctatggatttgcatcaattggacaatgaataggctgcacagaatgctattgacaagtcaaatggcatgctgatcaatgataagcaggtctatgtaggccatttcctgcgaaagcaggatagagagaatgctctcagcctgacaaaattgaataatgtctatgtgaaaaacttatcagagtcaaccacagatgaagagttgatgataaattttggagaatatggtaccattactagtgctttaataatgagagatgctgatggtaaatcaaggtgttttggctttgtcaattttgaaaacccagacgatgctgccaaagctgttgagggacttaatgggaagaaatttgatgataaggaatggtatgttggaaaagcccaaaaaaaatctgaacgtgaacaagaactgaaaggacgatttgagcatagcataaaggaagctgcttgcaaatattcaagtttgaacttgatctcaagaact

SEQ ID NO: 2602 - DNA, 415 bp, Glycine max
  Clone ID: jC-gmfl02220051b01d1
gattgccgaaattcaaccatgttatattgagacaatgaatcaagtacacaactcacagcaaaaaggtttataagctgtaaaggtccatgtaaccataaacaaaaatagtctccaagactatagaaccattacattttagacaaattagtcttgttccacttgatcctacgtaaacacctactacaacgggtggggttactgctgcctaacatgtatcatattcactacaaacattttaataggagtagcctttgacgaacaactgcttcttggcttcctcagattcacccttaccggtgtactttccaagctgggcgagcgagttggacttggcacggaaaagaagtgcatcttgtgccggcttcacattctctgggcgggctccccatgtcttcaaggcaatgttttggagggc

SEQ ID NO: 2603 - DNA, 540 bp, Glycine max
  Clone ID: jC-gmfl02220051b02a1
taaaaatgaaaagaagcactcactcgtgaaccccacgcagtgttcgataatcaaatcttctttctttttcttccgcagtcccaaccttcatggattctcactcacacatcattgcttggggctctggtgaagatggtcagctaggaatcggaagcaacgaagagaaagaatgggtctgcctcgtcaaagccctccagccccaccgtattcgctccgtcgtcgccggcagcagaaactccctcgccatcgctgacgacggcaaattgttcacttggggttggaaccaaagggccacacttgggcaccctgctgagaccaagtctgagaacaagactgagaacactcccagccaggtcaaggctctttccagtgttaaaattgttcaggcggctattggggggtggcactggttggccgttgatgatcagggcagagcttatgcttggggtggaaatgaatacgggcagtgtggcgaagaacccgagcgcaaggatggcactggtagacctttaatgagagatatagagatccctcagcgct

SEQ ID NO: 2604 - DNA, 498 bp, Glycine max
  Clone ID: jC-gmfl02220051b02d1
gagagaacatttttttttgtttcatcatataaaatatatatgttctgaaagaacacatacaagtacacaaaaaaaagggggaaattcataaaaaaatacagaaaaaaaaaaacagaattgagtaagagggaaggaaacatagagaaaattttagcaatcagataataagaagccagtagtagtgcaaaagtcccttgccaagagtgttggaaccccttttagttaagcaggtaccttctcccccttgagtggcttcaccacttcccatgtgaagtcagggtcatctctgccaaagtgtccatatgcagcagtcttcaagaacctgccatttccacccctcttgagatcaaggttgatggagatcatgccaggcctgaagtcaaaactctccttcacaatgctgaggatttccttgtcagggatcttcccagtgccataagtgtcaacaaacacagacaagggctcaggcacaccaatggcatatgaaacttgcacaat

SEQ ID NO: 2605 - DNA, 546 bp, Glycine max
  unsure (1)..(546): unsure at all n locations
  Clone ID: jC-gmfl02220051b03a1
nnnttgagcagccatgccagcaattgcgatgaccggagcatctttccccacttattcacactatttttccagggccccaggagtaccagaacaaaagatgaatattggattgcttggcaatggtgcaccatcacagtcactgcatttaaactccaattggcctgttcctggagcagataagtacggtgtccagccactttccatatggctacctggtggaaattatggcactgtgcatcatcatgaaaattctaccaaccagaacctatctgttccaaagggatggcgcaatggggactggatctgtaactgtggcttccacaattactcatcccgctctcagtgtaaaaagtgcaatgcttttcctcctgcacttgggacaaagcggttagcttcagaagagttggtttatgattgggacaacaagagattgaatataggaactacaaatgatcagcatcaaatatatacaagtttagagcaagtggtagggacaggtgcagatccaaaacctggactcttncnctcttattccagcatgaactc

SEQ ID NO: 2606 - DNA, 390 bp, Glycine max
  Clone ID: jC-gmfl02220051b03d1
cctaacaaaagcataaattaaactatattacaagttttattttgcaatattcggatgagtccgtataggatacaaatattcacggacatcttaattcataaggcattacaataattaataaataccccaaagcataacaagttaaaaaagaaaaagagcattggaacctatggagattggagtttcaataagaaaaacatccgcctccttctggattctgaaacccaatgttctcaacggcaccaaccgtcttgaacattctcctcttgtgaatctcctccatcagtgatcgttgcagttgttgtctcctcaggtccacgaaggaacggatcctggttagcctgtgcattccatgacacctgtgagaatccattctcatgttgcataaac

SEQ ID NO: 2607 - DNA, 569 bp, Glycine max
  Clone ID: jC-gmfl02220051b04a1
taggatagtgctttgaaaatgggaaagtttagttcaagttacagtacttctgattttgttcactttggagttctacttccctttcttctgttatcacagttgttctttcaacttgcatggtgtggctccatagtaaagttccttcctggattagagggaccccttccttttgttcttgaaaccgggtatgtgggagtgggtgaatcagaggatgtgcaggcattctactacttcattgagtcagagaacaatccaaaggaggatcctctcatgctttggctcactggtggccctggttgctcagctttctctggccttgtcattgaaataggtccaattgcatttaaaaatgaggaatacaatgggagcctgcccaatttggtcttgaggccacactcatggacaaaggttagtagcattatatttgtagacttgcctgtttccacgggcttcacttatgccacaacagagtttgctactcaacgaagcgactggatacaagttcaccaagtccatcaatttcttaggaagtggttgattgaacattcaaattttttgtcactgatgtt

SEQ ID NO: 2608 - DNA, 450 bp, Glycine max
  Clone ID: jC-gmfl02220051b04d1
gaacacgaaacagagatcataatcaaaataaattgcaaattaatacatagtacacttcaaaatccagcatgcatttattagtatattcccataccctgcggctcaaaatttaaggacttacaaaacattaagaaacaagacccttttgcaattcacactgactgatacagatgcagatagccactcttaactatctagtatcctagctacaccgctgcaaagtagtctttgctaagtttagggtctggtttcatggacttctccccaggcttccacccagcagggcaaacttcatctgggttctcctgcacatactgtaaggcctggagagttctctttggctcgtaacacttttaccaattgccaagttgtaatggtagaatgctgaataaccccttccttgtcaataatgaacaaacctctcaatgcaattccctgatcaggaatgag

SEQ ID NO: 2609 - DNA, 519 bp, Glycine max
  Clone ID: jC-gmfl02220051b05a1
ccaagttccaagatgaagatgattcactttcttttcctctttgctcttgtctcgttcacttcccatgcttctgtcaatgatttctgtgtagcagacctaaaaggtccagatagcccttcaggctatcagtgcaagccacctaacacagtcacagtggatgactatgtgttctctggctttgtagctggaaacaccacaaacactttcaatgctgcattaacctccgcatttgttactgattttccaggtgtgaatggtcttggtgtatctgcggcacggttagacatagccaaaggtggatcaatcccaatgcacacacaccctgctgccactgaacttctaataatggtggaaggtcaaatcactgctggttttatgaccccaactgcactttataccaagacactgaaacctggagatattatggtttttccacaaggacagttgcattttcaggttaattctggaaacggataagccactggctttcttgcattcagtagtgcataccctggagca

SEQ ID NO: 2610 - DNA, 451 bp, Glycine max
  Clone ID: jC-gmfl02220051b05d1
aagaaactcgagggatacgttcttttagcgttttcaaattttccttaactaattcccccacatcatatgcacaaatacatgtcaaaataactacctatttgaattacagggtagatgaatgcactgaagccccttttaagctttggctgagatgaagcaccttaaaaaaatcctttctattcctcgtcatcatcgtcttcttcaggtgcctcttttagccattgaattaacttttgggcctgcttaacaaaaactttatctgcctcgtcagcatcttttaactcggcttcccaactcaaaatagcatcttcttctacaacatcttcattgtacaagtagtgcaaaatccttgtgaacaatggagcaaattccttagcagattcctcacatatttcttcaaatttaagtattacttcgatctgctcatctatgtcagtcagataggatgtaa

SEQ ID NO: 2611 - DNA, 540 bp, Glycine max
  Clone ID: jC-gmfl02220051b06a1
ttctaatgtctagttctgagagcacaaacgcgagaactagaacagcgtcatggttttctaccccattctttgttatcgttctcccggtggccgtggctgcgcttctctaccggctcgaaccattcaagccggttcttttgccggtccagctgggccggtccaccgtggcggttccggctcgtaacggccacatgcaagatggatcggaacgtgtgggtgagggacacttggagggcccggaagacttggcctacgacgctgcggcacgtgtcgtttataccgggtgtgaggatgggtggatcaagcgagtcacggtgaatgactcggtggttgactcggcggttgaagattgggtcaacacaggaggaaggccacttggactagttttgaagccgaatggagaactcatagttgctgatgcggaaaagggactgctgagagtgtcaagtgagaaggagattgagttgctggtagatgagtttgaggtggttaaattcaacctcacaatggtgttgatatagcagatgatggtacaattat

SEQ ID NO: 2612 - DNA, 291 bp, Glycine max
  Clone ID: jC-gmfl02220051b06d1
aggacaaaaggaaaaggccccaaatttaatttaaggggcccctttaacccaaaaattttagggaagacctcccaattttaaaaatattataaaaacatttaaaacttgggatattctttttgcccctaaaacattggaaattttaaaaagggtcccccccggtcccataaaaaattttagcccttggatcaacccaacctttaggaaccaaaatttttacttcccaaatttgctttgcccccaattcaagattggaaaaaaatccccccgtaaaaagcctccccgggagcc

SEQ ID NO: 2613 - DNA, 487 bp, Glycine max
  Clone ID: jC-gmfl02220051b07a1
gtgcaaaagaaaactcaagctcccagattctgttccaatgcctcccgtaccaatttcccccatcaaagttgggcacattgatgatgtccaagagctaagaaaaaccaagccaaggacaattcctcaaagatttgtacgagacttgacagaaagaccaacactcactacacctcttcccccaccacatagtgacatgccagtcattgatttctctaagcttagcaaagggaacaaagaggaagtcctcactgaacttttcaatcttgcaactgcttgtgaagagtggggattttttcaggtaattaatcatgaaattgacctcaatctgctggagagcatcgagaacctgagcagggagtttttcatgctacctttggaagagaaacagaaataccctatggctccaggaacagtccaagggtatggacatgcttttggtttctcagaggaccaaatactggactggtgcaacatgtttgctcttgga

SEQ ID NO: 2614 - DNA, 298 bp, Glycine max
  Clone ID: jC-gmfl02220051b07d1
agaaagggcaaaaacgtaacttttggaacccccaaacggggtaggcccctaaagggccctccaaatgaaccccagggcactcttttacatgggcacttttagccgggggtaactgggggggtcccattcatataaaagaaaaattttctcccggctaagggcagggataatgggattggatttgccctttttagcctccaaaaggggaaccgggtccgacagggagcagaaaattgtgggcatgattgggagttccgcaaaaatgggctcaaaatttttgggcccgaggtttggccca

SEQ ID NO: 2615 - DNA, 600 bp, Glycine max
  Clone ID: jC-gmfl02220051b08a1
gagatatgataaagacaataatttgtgggtcactattggaagattacctgaccgaatagtctcaatgaatggctgggggttagcctttcgtgcatgtggaaatcgcctaattgttattggtgggccaagagctttagatggaagggtaattgagatcaatgcttgtgtcccaagtgaaggtgtgccagagtggaacctgcttgctagcaggcaatcagggagctttgtgtataactgtgcagtgatgggatgctgaggcatttgcttttggtgaatagtgctatatggatttattctgaatggaattaacattcttcactttcaaggagagatgattctggctcttgggtaatcagcccacctttgggggtaaatatttactcctatttagagtaacagatacagttttagaaggttcacaaaactgagtcttttcattttaagttatcatgatgggttttcaaatgttggcacagtgacaggtgaataattagctcatgttgggttgcaatcacctttttcataagttcaattgaagtgttgcagaattgtaactggtctcaatctttgcctccttgctttctgtgcgcccccttttta

SEQ ID NO: 2616 - DNA, 599 bp, Glycine max
  Clone ID: jC-gmfl02220051b09a1
atgaattcttgttgggtgttcgagttctgggcaaatcaatacggaacactggatccaacaaggacatggtcgtgttggtctccgatggtgtgtctgattatgccaaaagcctactccgggctgatgggtggatagtggagatgattagtttactggctaatcctaatcgagtgcgtccaaagagattttggggtgtctacacaaagctcaaaatatttaacatgactgactacaagaaagttgtttaccttgatgcggacactattgtggttaaaaatattgatgatcttttcaagtgtgggaaattctgtgctaattttaagcattctgagaggttgaattcgggagtcatggttgtggagccatctgcaactctttttaatgacatgatgagcaaaataaaaactactgcatcttacactggaagcgatcaaggatttctcaattcatattactctggatttcccaatgcacatgtttttgagccaaatttgagcccagagatgtttagttccagacccattcctgaaatggagcgactatcaacactgtataatgctgatgttggtctttacattgcttgctaacaagtggatggt

SEQ ID NO: 2617 - DNA, 451 bp, Glycine max
  Clone ID: jC-gmfl02220051b09d1
aaacttctctacgcttaatacaacatatttaacccttataatgggtgtatatatgttaaaaacgtaaaaacatggtaaaaaaccgtgttgcataatacaaagcccaagcatatctcactgaacttggacatcaataaccttacgttcaaccttggtcttaggaatggtgatataaagcacaccatttttcaactctgccttaaccttgtccttctcgcaattatccggcagctttaaacgggtatcataggaactataggtcctgcttgaccaagaatcatctccaccatgttcttgttcacttttgtggccaccttttataacaagcatatcatcctccactgataccttaacatcttccttggcaagacccggcatgtcaaacctcattctgatttcatgttcttcatctttgatgtcccaaggggcacggaacttccctcctcctatg

SEQ ID NO: 2618 - DNA, 513 bp, Glycine max
  Clone ID: jC-gmfl02220051b10a1
ggaagaaggagtatacggcatcccattcgaggaatggccaggagaacccagactggaagtatgaacagacactgggacagagaattcaccaattgagccttcagaagcactgtccgagagaagttccattacagctgtgtgccatgccctgattgtaggaaaggggcttgtaggcgcggggacatgtgtgaatatgctcatggggtgtttgagtgctggctgcacccggctcagtatcggacacgcctctgcaaagatggtaccagttgcaatcgaagggtgtgtttttttgctcacactgcggaggagcttcgtccgctgtatgtgtccactggatctgctgtcccttcgtccaggtcatctgcctcggctcctaatgtcatggacatggctgctgcgatgagccttttgccgggctcgccttcttcggtctctgccatgtcgacatcccactttgggcaacccatgtccccatctgcaaatggcatgtcactgtcttctgcttgggcacag

SEQ ID NO: 2619 - DNA, 380 bp, Glycine max
  Clone ID: jC-gmfl02220051b10d1
gttgaatgttgtctggggtaaagtcacaggcatatagtagtatatagtacatacaagagagaaacatttagcgcggtaacaaatacatgatgagattcatagtatgatactattacacatgcggagggatgaagtggttggttctggatcaagaataataaaaagtagttagaagaaattttagaaaatgtcgagaatttcgaggatggagcgattgcaaaggggacaagagcctcgattaagccacagttccctggaacacaccctgcaaaaagtgtgtccacatgggatgaacgctgcgcctttcttcctttccatgcacacgcaggacaccgaatcattccccacaacattctcctctttctctttctccttctcct

SEQ ID NO: 2620 - DNA, 464 bp, Glycine max
  Clone ID: jC-gmfl02220051b11d1
ttttttttttttttttttttttttttttttttttttttttttttttttttttatttttttttttttttttttttttttttttttttttttttttttttcaccaggggaaaaagaaaaccctctagggggattaaaaaaaggccccgcacccccaaaaaaaaaaaaagaaaaagcgacaactaaaaaaaaaaaaaaaaaaagccccccccccttttaatatgccccacagggggaaaaaaaaaacaaaaaccggggaaaaagggaaaaaaaaaagcattgaaaaaaccccaatttttaaaaaaacccggccaagaccccctaggaacccccttaagggggggcaaaaaaaaaatttgggggggaggggggaatttggggaaattttcaaaaaaccggggccccgggacaagggggggggaaaaaagtggaccccccccggggggggccggggggggtatccccct

SEQ ID NO: 2621 - DNA, 583 bp, Glycine max
  Clone ID: jC-gmfl02220051b12a1
atcttatcttagctaccccatcacaacaaccacgatactatttctcatactctattaggcaaaaacaccaccaaatgggagaggaaaaggagcagcctaagaatgacaccgagaaaaagcccgaggaggtagcccccaagaaagaccacggacccatccctgtcgtttacaaactcgacttgcattgcgagggatgcgtcaagaagatcaaacgcacctgtcgccacttcgaaggtgtggaaaccgttaaggcggatctatcgtcgaacaaggtgactgttaccggtaaaatggacgccgagaagctgcgagataagattgccgagagaacaaagaagaaggttgatatcatatcagctccgccgaaaaaagaagccgccgttgcggaaaaaccgccggagaagaaggcagaagacaagaagcctgaggagaaaaaaccagaagaaaaacctaaagagagtacggtggttttgaagatcaaactacactgtgacggttgcattgcgaaaattcgaagaatcattcttaggttcaaaggtgttcaattggtgagcctcgacggaagccaggacttggtgacggt

SEQ ID NO: 2622 - DNA, 465 bp, Glycine max
  Clone ID: jC-gmfl02220051b12d1
ttctcctcttttttttttccttttcttctctttttctttttttctttttttttctctctcctcttccctctttttccttcccttccctacaccctaatccaccaacccgcccatgaaacccccaaacacaccccacccaccccacaaaaccccggccccaaaggcccacccccaaaacaaaacaaaaaaaaaaaggcacccccgggccagataacaaccccaagaccaggcccccaacccccaacaccccccacccccccacaacagcccccccccccccggcgggggggggaacccaaaaccccccgccccccacgacaatcccccacccgccccacccgccccccccccacccaccacccggccccctggcgcaaccacaggaccgcgaaccaactcccccgcggccgcacaccccaacaaaaccgggacccctgctggcacaaaaagcccagcggcccccac

SEQ ID NO: 2623 - DNA, 572 bp, Glycine max
  Clone ID: jC-gmfl02220051c01a1
aatggcttggcactcgttcctcttattagcgacggccattctcgccgttgtgtgctccgccgtgagcggttgctcgccatcggatagggcggcgctgctggccttccggaaggcgctgagcgagccctaccttggcctcttcaactcgtggacgggctccaactgctgcctcgactggtacggcatcagctgcgacgccaccaccggccgcgtcaccgacatcaacctccgcggggagtccgaagaccccatcttcgagaaagccggtcgctccggctacatgaccggaaaactctcagaggcgatctgcggcatcgacaccctcaccaccctcgtcgtcgctgattggaaagacattgccggggagatccccacctgcgtcaccgcgctttcctccctccgcatcctcgacctcatagggaacaagctctccggcgagatcccggccgacgtggggaaactctcacgtctaaccgtcctgaacctggccgacaacgccctatgcgggcaaattccagcgttcatcacccagctgggctcactcaaacacctggacctcagcaataatcagc

SEQ ID NO: 2624 - DNA, 405 bp, Glycine max
  Clone ID: jC-gmfl02220051c01d1
ggacaataatttattttatttcaagtccatatcgggtctacacatagacacaacataactcatgttgctagagtagttttctcacaaccatcgtgcacacaggccaaaacatctctgtagtctcttgaaatggtaaaggagtcgtagaccttttcatcactacttttcttgtactcaaacaagagatatgaatgattgaaagcagtcaatttgccaaacccatagtcaacgtccctataaagactccaaatagggggtgatggtgtgaagtctgacaggtgacttcccccttcaccaacaaccacatgaattgttccattcacagtgccagagtagtgatgcttttcttcattcacacattgattctgataaatggggcatactctttcatagttatggacatga

SEQ ID NO: 2625 - DNA, 573 bp, Glycine max
  Clone ID: jC-gmfl02220051c02a1
cttccttttctcttctctgtctaaggggtgccctgagatcacattgaacaatggtgaaggctgtggccgttcttggcagcagtgagggtgtcactggaactattcacttcgttcaggagggaagtggtccaaccaccgtaactggatctcttgctggacttaagcctggtctccatggcttccatgttcatgccttgggggacactaccaatggttgcctctcaactggatcacatttcaatcctaataacaaggagcatggtgcccctgaggatgagaatcgtcatgctggtgatcttgggaatgttaatgccggtgatgatggtactgacagcttcactattactgacagccagattcctctcactggaccaaacaacatcatatgaagggcggttgttgctcatgctgatcctgatgatcttgggaaaggtggtcatgagcttaacaaaactactggtaatgctgggggcagagtagcttgtggtattattggtctgcaaggatatactaatcacatgaagttgaaacttgctttatatttgtggataaatagcacccattaaacccgtt

SEQ ID NO: 2626 - DNA, 582 bp, Glycine max
  Clone ID: jC-gmfl02220051c02d1
aacaaataaaacagtagtcttcaattacttcaaccaaaaggtctaacaaactacacgattataagcttaaggcaagtaataaccaactaaaattcaagtttgcaaaactatgatttcttattataaagcccctaccctacattcggggaaacttcaaaaccactatttttcatccaaattattcaatgcaaaggggaagcaacatcattgcctcagatagttgtcgtcgtcattatctgtatattaacctccaccaccagaaccgtatttctttccgaacaagacgagctgtagcttatcataaccagcgagcactccagcacctgcaacagcacgtaatatgtttgcaccggcacctttaaagagtgacttagtaccctcttttgcgacaattatcttgaatgcttccaaagagctcttgtattttacagcttcttcagatgtcatcatcattcttctacgcacagtatcaatggggtaagaggccaagccggcacctattgtgatcccccatcccaagagaaactcgcaaagagctattctgcaatcaccaacaagaccactgttcagagatcttctttc

SEQ ID NO: 2627 - DNA, 427 bp, Glycine max
  Clone ID: jC-gmfl02220051c03a1
aaacatcacaactcaaatagtaaccactatttcagttaacactttgccatgccctaatggcagaaacgactgccaggggctaaatggaaccattttctctgctagcatgaacaacataagctttcgaatccccaccattgacatactaaaagcctattactaccatatcaacggggtatacgaacctggatttccaacatttccaccgtttatatttaacttcactggggattttttgcctataacactgaatacaccaaagcaagggactagggttaatgtgctgaactatggtgcaacagttgaaattgttttccaagggacaaaccttgttggcgggatagaccatcccatccatcttcatggctacagtttccatgttgttggatatgggctaaggcaatttaaccaaagcgtggatcccatg

SEQ ID NO: 2628 - DNA, 299 bp, Glycine max
  Clone ID: jC-gmfl02220051c03d1
aacacgataaaaggcaaaacaaaacacccaaaacaacaataaaaacacacgcaaactaacaacacaacaaaaaacccccacgaaataaaaagcaacaaagccccccaatagcaaagaaaggaaacccattcaagaaaatcgaacccatcacataaaaacacagacgggtcaaccttcataccaacggacccttatcaaaaaggaactaaataactcaaagcacgaactaatcaatatctgacaacagctgctggccaaacttatcacgaaatactctccataaagagccccaaaaaccc

SEQ ID NO: 2629 - DNA, 412 bp, Glycine max
  Clone ID: jC-gmfl02220051c04d1
aaatattccaggaagctaaaattgcctataaaatatgtctagggataatgtatatattcacataaggagtaaaattatatcatcccgcttagaattagaacccttctaaggactataggctattatagcaccaatgctacaaagggtcctaaaatttgattactgcaatatacaatacacattatatatatgcttttttttagtgaatgcatgtcttccatcttccttttggggaactagagatcaaaactgtgactgtggaaatggaacatgggatgatggcgttgtcttggcatactgtgtgacccgatttcttcagcaacacttgcctgaaatgttgaagggccacaaactatgatacccacattaaccaggccccatttctctgacactgattcaaaaaatcctttaa

SEQ ID NO: 2630 - DNA, 597 bp, Glycine max
  Clone ID: jC-gmfl02220051c05a1
gaactcttcgtaagttccggaatctacaccacccctaggctcttcgctccaaactccgaaccctaacctaacccaaccatcttcttcgcctcgagcacatcttaccctaattcgattattccccaatttcatcgaaccaatcaataaatcatatacacattgtttgtttaatttttgatgccgataaaaaatgccgccgaagcagcagcaatcgaaagctgatttagcgaagaagcagaagattgtagaggacaaaaccttcggtctcaagaacaagaacaagagcaaaaatgttcagaagtatgtccagaacctcaagcaatccgtgcagcccaggcccgatgccgccaaagtcgatgccaagaaaaagaaggaggaagataaggccaaggagaaggagctgaatgagttgttcaaaatcgctgttactcagcccacagtgccagttggtgctgatcccaagtccatattatgtgagtcttttaaagtggtgcagtgtgccaagggcttcagatgcaagttctcgcatgatttgaatgtcagaggaaaggggagaagattgcatttacagtgataagcgtgacgaggtaaacatgg

SEQ ID NO: 2631 - DNA, 461 bp, Glycine max
  Clone ID: jC-gmfl02220051c05d1
acaaaacgagaacagagtacatacattagaggatcagaatatcttctagcacagaagttaaaatttaacatgacattttacctgtttcagcaattcttaaagactacatagataaagtgcaacatacaacagcttaagggttaagacttaagactaaatattaaacaaagggatatgtagcttcttagtcatcagttcaccatcatctgtgctaactagtggagatatgtagcttggtactgatagccatttccaaagtagttgccaggattaggagagatgttataagttgcagaacccatgagaggagggcagtgattgtcagttggtgcagggtacatgtaaggtcggtcatacacgtattgaggatacctgtcagcaactctagcataagaagttatgtcagatagaatgttagtgacacgcgggccatattccacaccattagcacggcgtctttt

SEQ ID NO: 2632 - DNA, 519 bp, Glycine max
  Clone ID: jC-gmfl02220051c06a1
gttgtcccagacccaaaacctctaccagtccacattctcctactgcttgcccagcttcaaatcacttaacttctctgggtcgctaagacttgggcctgtggcccagcccataaggattaagtatacccctcttctcaagaatcctagaagatcttcactctattatgtcaacttggttgcaattagggttggtcggaaagttgtcaatattcctcctgaggcgttggcgttcaatgcggccaccggagccggcaccgtctttgattctggcacggtgttcacccggctagttgcacccgcgtacacagcggtacgggatgagttccagcgacgagtcgccatcgcagcaaaggcaaacctgacagtgacatccctaggaggctctgacacatgctacacagtcccaatagttgcacccaccataacattcatgttctcaagcatgaacgtgaccctgccagaggacaacattctcatacacagtactgcgggcagcaccacatgcttggccatggcttc

SEQ ID NO: 2633 - DNA, 486 bp, Glycine max
  Clone ID: jC-gmfl02220051c06d1
agcataaaaagttcaacatttactgaggtaagatggtttcacaaggatatttctcatagtacatggtgccttcctttgctgatcttaccattctttcctcagacatagtcactgaggtaagatggtttcacaattcttctgatgggctttgcttcctcttgtatccctggtttgctatttcgacccctacccctgctattatcttttgttccttattacttccctaacatgactagtggtaaagtagtcatttcaacacataccaaaatactaacaaactaggaaagttaaatcaaccacaaatatatattacatatataggaaattgcatatattaaatataaaacttgagcaggacaaagctgatgatgaagactgttcagatgaatgatatgaatatatcatatattctcgtagaagtatttcttgaagagttgcatatgtgctatttggaagtgcatggacacaataacggatccatcccct

SEQ ID NO: 2634 - DNA, 502 bp, Glycine max
  Clone ID: jC-gmfl02220051c07a1
ggctcgagctcctctctttgttctcttctttccacactctgtccctgtcgctgtgttatttcattttcccacactcccattcatcatcttcgttcttcttcttcgccctccatttcttatttttctttcttttcttttttcttaatttattatttattcatcttccgtttcttcgcattgtgctttcttcgattttttcgctgcgtccctcttagatccctctctggatcacagtgagaacagtgttgttgagtttgaataaattaatgaaggggtgttgatggatggtggatgtatggtgaagctggtgaggtacctcgaacttaaatgaagaaggaacgtgcatggccgcaattcataaggaatcttttgatcatggttggatcaagaagccggtcacagttgatgaggcctacttggattattgttctgctctccatattgtgtgcgactctgattgctgcctatgttaccctcctgctagcccttcttcgtgctccgt

SEQ ID NO: 2635 - DNA, 329 bp, Glycine max
  Clone ID: jC-gmfl02220051c07d1
atgatattgatgtgttactttacacaagaaaaccgtccaggacgggacccaaaaccaggggatcaaacaggacaagaaagcacccacaccaaaagggttataggaaaaacaaacgggacacccgccaaaacgaaaacccgggcaggggggaaaaccccttgggaaggcccggtaaaacaaatacacaggacaaattcaaaagggggacccagaacaagctaaaattaccacgagcctgcccaacctggaaccctgggaaaggggttccaagcccccactatcaaaccccaacccggccccggaaaagcaaatgcacccgcggggggaca

SEQ ID NO: 2636 - DNA, 514 bp, Glycine max
  unsure (1)..(514): unsure at all n locations
  Clone ID: jC-gmfl02220051c08a1
catacttagaaacagcaactatgtctctcatgcagcttactagctcccctgttggctcactggtccgtttcattgtaatatttgctttatggtacagaaccatggctttggccaagttgccaccaaacgcttcatcagttccagcagttttagcgtttggagattccatcgtggacccaggcaacaacaacaacataaaaacattgatcaagtgcaacttcccaccttatggaaaggattttcagggaggaaacccaacgggtcgattttgcaatggaaaaattccttctgacttaatagttgaacaattgggtattaaggagtatttgcctgcatatttggatccgaatctcaaatctagtgatcttgttaccggcgtctgctatgcctccggtgcttcaggatacgatcctttgacacccaaaataacgtcagttctatcngtatctactcaactagacatgttcagggaatacataggaaagctgaaaggcattgttggagagagcagaac

SEQ ID NO: 2637 - DNA, 424 bp, Glycine max
  Clone ID: jC-gmfl02220051c08d1
catcaacaagaatggtctcattcattctactttcaataagatcagtcacaacacatacaaatctttcatgattttagatgcacaaacagaccattagggacaaatatagatttgttcatgacccaaatctttcactatacagttaaaagcccaccactcggaatcatgtcattcgtaacactttattcaaaggtatgctgatatagatgcataccggatatcctattataaaaagcaccacccctcgactatatagtagttaggggacacattttccctcaaaaacttggaactgaggaacgtgatgctcaaaactccctttctggaaacatgataggagctacgagagaccacaagtccagcagagcagttgcccaggaagtgatgattcgaacccacacagaaggccaccccacgtcaacca

SEQ ID NO: 2638 - DNA, 552 bp, Glycine max
  Clone ID: jC-gmfl02220051c09a1
caatagtgtcccatcatttcaatttgaaaccatccctgatggtctctctgataaccctgatgttgatgccacacaagacgtagtttctttaagtgagtctactacaaggacttgtttaactcccttcaaaaatctcctttcaaaactcaatagtgcctcggatactcctcctgtgacttgcatagtttctgacggtggcatgtccttcactttggatgctgcccaagaattaggcatccctgacgtgattttgtcgacagctagtgcatgtgggtacatgtgttacatgaaatatccaagacttgttgatatgggcttaacacatctcaaagactcaagttacttagaaaattccatcgattgggtaccaggcatcaaagaaattcgattaaaggacttgcctagcttcatgagaaccacaaacccacaagatctcatgatgatggatttcatatatagccagtgtgagagagctcaaaaagcttcagcaatcattgtgaacacgtttgatgcattagagcatgacgttttggatgcattctcattcatatt

SEQ ID NO: 2639 - DNA, 465 bp, Glycine max
  Clone ID: jC-gmfl02220051c09d1
gcaagaacaatctgatcttctttattgtggctaaaagtgatatctcaaaaaacaaataatgtaatagtaacccaaagccaccaccagtgaaaaccacaagttctagatgagataaaacttaaaagaaagtcaacaaatagatctacgaaagttctttggcagcagcaataacagcttccttggtgataccaaactccttgtatatttttcctgctggagcacttgctccaaatcgatcaatgcctatggcctttccttggcttccaacaatcttttgccaaccaaatgttgatcctgcctcaatgctaactctaactgttaccgaagcagggagaacactctctttgtattcatctgactgctcatcaaaaagttcccagctaacaaaagaaacaactctaacagcttttccttccttccttagatcctcagcagcagcagcagcaatttccaactcagaaccag

SEQ ID NO: 2640 - DNA, 589 bp, Glycine max
  Clone ID: jC-gmfl02220051c10a1
gctttgaagtatgtgatgttgtgctgcacgctgatgctatccacagaggaggtggtcaaatcattcctactgccaggagagtcttctatgcttcccagattactgccaaacccaggcttcttgagcctgtctacctggttgaaatacaggcttctgaacaagctcttggtggaatctacagtgttcttaaccagaagcgtggacacgtgttcgaggaaatgcagaggccaggtaccccactatacaacatcaaggcatacctccctgtcatcgagtcctttggtttctcgagcacattgagggctgcaacatcaggccaggccttcccacaatgtgtgtttgatcactgggacatgatgtcttctgacccattggaggctggatcacaagctgcacagcttgtcactgacattcgcaagaggaagggcttgaaggaacagatgactcctctctccgagtttgaagacaagctttaaatttgtttcatgaattattttactttgaacttagtcgaatttattttctcttgtgaacaatgctactttagatttaatttctgttagttttggttgtggttttgcccgtgaat

SEQ ID NO: 2641 - DNA, 450 bp, Glycine max
  Clone ID: jC-gmfl02220051c10d1
aacacgaggaaccaaagttgctttttcaattcatatatgaaatttgacataatgttgcctttgggtatcaattatgaatatgaagcatgagagtcaaacatgctgtcgtttttcacctaagtctcaaacacacctctatcaagatgaaagcaacctactaacggaaataaatggatatctgagggatgtcgatgtcattatcctcatcatcctcgcatgccacaacaacgtccaaatggcgacggtacgcaagaatttcaaacttggctacttcccttgccagatctgcaacctttttgtccattcgatctttatgccgagggaacatgctattatagagcaggcaactcccacaagaaatactgtaagcattcaagccctttgccttcagccactctagaagttccctgagggtaggattgtctccgagaatccatctatcccaaaccg

SEQ ID NO: 2642 - DNA, 572 bp, Glycine max
  Clone ID: jC-gmfl02220051c11a1
gttgctggcattggcaagcaatctggtttctctctcctctctgcactgcaccccacaactcaaactgagcagtcacagacacaggttgtgtgtctttaaaatatctatgaactgttgttggcacttggcagataattattgcatctaacaacccataaagacggtgactatgagtaatctgcaaaattttaatgctatactctgtgtctctgaatgaccatcaagtgatccggtgcggttggaaagaaccttccgaattacaaagattgactacttgttattctcattggtggagttaatagttattttgtagatgcaaacgtctcagaaacacccaagttcagctggtgtccatttctatcaccagcctgtgcaaggcatttaccaaatgttgcaaagcaatctatgccatgatagcagcagccagggaacaagtgtttcttttgaaacctgcaaggagcaatactttactctagaatcatgcccagcacccactacttgtttcgtggattgtgatgattctccttcctatgccagtgtatcatctaaaaggactccattttcttcacagg

SEQ ID NO: 2643 - DNA, 600 bp, Glycine max
  Clone ID: jC-gmfl02220051c12a1
ccaccttgtattccccaaaattcacataattccccttctcttgccttttccctcagatttctcaccccttctctcttctgtgttgctacccttttcaggtactcttcctactaaattgaaggaaaaagttggtattataggaagttaatcactgctttgatgacttggtaagaaaacttgaactaacaatggtaagtttgagaaggcgcagacttttgggactgtgctcaggaaacagttcctttgtcacaccacttcctctatattgtgagaatctatctggttttgaaaattcaaaccagcaagctaaaactaagagtgaacagcctgggctttccgatgatgcaagcaacccagacagtaataatgctgtgcaagaagaaccgggatcatcaaatgcttctggttctagctcatcgaaagaacagcttattcaacaaattacaggaccttctattaaacgcagaaagcgacatagaagaaagaatttgcacaatcaagaacaatgcgtaatgagaggtgtctacttcaaaaatatgaagtggcaggcagcaattaaggttgacaagaaacagatccaccttaggactgtcgggtcac

SEQ ID NO: 2644 - DNA, 445 bp, Glycine max
  Clone ID: jC-gmfl02220051c12d1
atattattatataaagatagtctataatcactagaatttctatatatttatacttagtatataataattctagtgattatagctaagccaatatatatcataatataatatacccttttcttattcaaagaatttatggctatgccttatcatttttagtcaaagaaaagaaattatggaattgaaataactcactcagaacgccctttaaaagattacgcggtacgattgaatcaaataagcccttatggaataaatattcagctgcttgtgaaccttcaggtactgccttattcaatgtttgttcaattactcttttaccagcaaatgcaatataagcatttggttcggcaataatgatatcccccaacatgccaaaactagcagttacccccccagtagtgggagatgtaagtatggatacatagaataactttttattttt

SEQ ID NO: 2645 - DNA, 577 bp, Glycine max
  Clone ID: jC-gmfl02220051d01a1
tgagaaagttgcattttggtatttattggattcgttaaatggatattgaatccacagtgtagagctgagacacatttttcagtgtatacttcttgttacaatttttttttggtcttgttttccttcttgttacgttgtgtatttatgattctgaattgcctgtttttttaaacatcgtcagaggggctttgatcaacaatggctatcattaacattctcaaaggctatatttcttggaaatggtcttgttgctattttgtctgggctgtttggaaatgtacttgttgatacattggctcttggacctgtggccccctttgatgctgcttcatgttttcttgctattggtatggccatcatactatcttcatggtcagagaatttcggggatccttcagagaacaaggacttgcttacccaatttaggggtgctgctgtggccattgcttctgatgaaaagatagccttgctgggtgccatacagtctctctttgaggttcaatgtacacctcttgtgttctatggacttctgcattgagctcaaatgatgaagagatatcccatggttttatttttg

SEQ ID NO: 2646 - DNA, 525 bp, Glycine max
  Clone ID: jC-gmfl02220051d01d1
aaaaagtcaaatttcaatactttttttagtgtaaaacaacaaacttaagacctcatataaattacttaaactcgtctctagactgaccttagtagattcaaaattaatacaataattcccagcagaaattaatggagacatatatttccctttttgctgattgccatccgatactgagcgttgctagtaataagcatcaattaagaatctttgcagcagcaatttgagacgtgaattgcacaggtcccccaaaaaattgaaaatatcgataggatattatttttcatgaacgagaggagaatacacaggataccacatattgcttcgcacatactccacagcctgatcttttgacatatgggaaagttccttgggccccacatcaccatgtccttctgccagttcttcttcaactgctgctcgaagcacagcagccccgacctgtgccgtaacatctcgtatgctatcaacggatggatacacaattgctttcaagatatcttccgtcgccatgtatgaagcaag

SEQ ID NO: 2647 - DNA, 593 bp, Glycine max
  Clone ID: jC-gmfl02220051d02a1
ctcttcccagcgctcattctctctctctctctatctccgtgtttcattccaactgcaaaacaacaactcaattaagaaattcttctccggagccatggcagatctcaagtctacattcttgaacgtctattccgttctcaaatctgaacttctccacgaccccgccttcgagttctccgatgatgctcgccattgggtcgaccggatgctagactacaatgtgcctggaggaaagttgaaccggggactgtcagtcattgacagctacagattgttgaaagaaggacaggcattaaatgatgacgaaattttccttgctagtgctcttggttggtgtattgaatggcttcaggcatattttcttgttcttgatgacattatggataactctcacacacgccgcggccagccatgctggtttagagtgcccaaggttggaatgattgcagccaatgatggagttctactaagaaaccatattccacggatccttaggaagcacttcaggggaaagcctattacattgatcttcttgatttggttaatgaggttgagtctcagactgcttcaagacagatgatagatctgatcac

SEQ ID NO: 2648 - DNA, 373 bp, Glycine max
  Clone ID: jC-gmfl02220051d03a1
cacccgcacggaccctgcaaacacatagcatccaaggcctgctattgctcaaggcgagcactgacacctcacaagcacgccacgtagagatatggacgctggatgaccaacgccatatgatctgcattcaccgtgacgaaactatccaagctcatgccctctagccttagcgctggtcaccaagcactgtgcctgacgcacctccgttcatatgaacgggacgtgcccttggctgacacctgatggcaagacccatgtcactgacgagcctactacgacatgtgagccatggtgacaatccttgtccacactgagctcaattcccacagcatgacgacgactgcacacgagatgagactgcagtacgaacatg

SEQ ID NO: 2649 - DNA, 601 bp, Glycine max
  Clone ID: jC-gmfl02220051d03d1
cttgatagaacattataacatgcattattttattattttgatcacaaagtccatctagtagttatatatggctcctagtcttggcacaaagacaaagatcgttcttcttgtgttgggtgagtcctggcaatacttgaacatcaatgtcttcctttatcatcccttgtggcaattcccaatcaaaggaatgaagaagattagcacgaacaagttctaatatcacaactgccataggtaaacctgggcaacttctgcgacctgatccaaaaggaattagttggaaatcttgtccacgaaaatctacgtcgctatccaagaatctttcgggaataaactcttgaggatttttccaagattcgggatctctatgaataacccaagcattcacgtataatattgtcttagctggaattcgatagccatgtataatgcactcttcatttgatactcttggtacaagtagtgtggctggtgggtacaatctaaatgtctcctttatcattgccttgaataggaaagttttgaacatcatttcatctaagacatttttgtgcctccacatttctactactttctgactttctcatactctaggttttat

SEQ ID NO: 2650 - DNA, 542 bp, Glycine max
  Clone ID: jC-gmfl02220051d04a1
ggcatctggaagatgcgtacaggtaatccagttgatggctgtgcaatcttttggcgtaactcaaggttcaaactgttatacgaagaatgcattgagtttaataagctgggactcagggataatgttgctcaactatgtgtactagaattcattaatcaaaatggatctctcccatccagcttgacagggtctagtaaagttgtggtttgcaacattcatgtgctttacaatcctaacaggggagaaattaagcttggccaggttcgagtgctgcttgataaggctaaagccgtttctaaactctggaatgatgcccctgtagctatctgtggggattttaattgtactcccaagagtccattatataactttatatcagaacagaagttagatctgtccggaatagataggaataaggtatcaggacatgcttctgctacaattcatgcatctaagctctattatggtcctaattctagtgaaatatctgctaatggttcagttcaggcaacatccactgaaggttgacaagaagacattga

SEQ ID NO: 2651 - DNA, 410 bp, Glycine max
  Clone ID: jC-gmfl02220051d04d1
aatcaattcaaattaaaggattttatattaccaggtataaataatcaaactgtgtatgatccatagtttcttacaacttattgccaaattggagggatttattcgaaagacaacctaattttaaataaaatatgaccatataactataagcaacttctctaccaatttaagactgctttctgtatccaatatcctctccttcctataagactttttggttcttcttttctgtatcctacttcttggtctttcgattcttcttcggtcccggaacctccaacctaccaacagaacagccacaccttcctctgaggacaagaacagcccttccattggggggtgccatcttcttaagctcggcctcgagttcccggtgatgatcacaaaaaaccttatacagtcccttctta

SEQ ID NO: 2652 - DNA, 610 bp, Glycine max
  unsure (1)..(610): unsure at all n locations
  Clone ID: jC-gmfl02220051d05a1
agagcaaaggcttttcaacacaagaacttgtggctttgtctggagcccacactattggaagtaaaggttttggaagcccaatttcttttgacaattcatattataaggttcttttggagaagccgtggacgtcttcaggtggtatgccgagtatgattgggcttccttcagatcacgctcttgttgaggatgatgaatgcttaagatggattaaaaaatacgcagacagtgagaatctattctttgaagatttcaaaaatgcgtatgtcaagctggtgaattctggtgtgaggcggaatagcttataaattcaagagttgaatgttccaacttccactgaaggggcaacttgcatttttattgactttctaacagtgtttatgcacagttgccatgaagttttgggtgctttattattgatttgaacatcaagatctactaccccctaaaaatcaaccaacgaagtatgtgcatgcagggccaatanatctcatggaaaagtcgtttaagtgtgttttgattaagatttanacgactatttaacctaatttttttttgaatttaagatatgtaaatatatgattatatattctttcagatttatgtaaaa

SEQ ID NO: 2653 - DNA, 530 bp, Glycine max
  Clone ID: jC-gmfl02220051d05d1
aatatatgttgttatatactgatatttgtatatattcaactgtaaatgatagaatacagatagatctatctatatagataagaaaaatagatcattttacatgttaagttctttggttcgaagggtaacacacaagcgatcaatttgatctatttctttatttctgcgtgaattgtatgtttgcaacaacggggacaaaattttctcaattccaatcgactaggcgtattctgtcgattctttttagttatatatctagaaatacccgttgattccttattaacactctttttatcacaaccggtacattccaaaataacaattactcggatatctttacctttggccatgaacctcccttgggtttttaattcacttaactcttttggtttcggattataatctaagaaaaagaaaagaacgaaaaaacgaaaatataaattaagaattagaaatccaattttgaaagatttcgttccatttaagattaggattaatatagtacaaaaataatacaatgatctcgaact

SEQ ID NO: 2654 - DNA, 351 bp, Glycine max
  Clone ID: jC-gmfl02220051d06d1
acattcaaataaatatattgggtataaaatatgaaatttcactagatctacacttcaaggaaggctatacataggcacatgctatgactataagcgtcttcatgaagaatgctggatgcggggctacgtatatacataggccatggagagcctaatgtcagagctaaaggtgtccaatgaagatcagtttacgtgcgacatggtgatacaacaactgatccactgtggttataacttatactttagattcagcactatcgtcatgatgatgtcatgcaccaatttcctagtcactgatgccacatggatttgaggtgggctgtgataacctgtaacgttccttgcaaagtg

SEQ ID NO: 2655 - DNA, 586 bp, Glycine max
  unsure (1)..(586): unsure at all n locations
  Clone ID: jC-gmfl02220051d07a1
attcggctcgagatagcttcaatttataagaatggcactttctcctattcgttcttcttctttctcttcatcagctattgttgcattggctgtgttactgcttcttacagggacctcttcagctaacctctcaaagaacttctattccaagacatgtcccaacgttttcaacactgtaaaatctgtagttaaatctgctgttgtcagagaacctcgcattggggcatctattgttcgtctcttcttccatgactgctttgttcaaggctgtgatgggtcaatactacttgatgacactccaaccttccagggggagaaaactgcagctgctaacaacaattcagtgagaggctttgaagtaattgatgctatcaagtctgaggtcgagaaaatatgccctggtgtggtctcatgtgctgatatcttggacattgcttctcgtgactctgttgttcttcttggagggccattttggaaagttagacttggaagaagggattcagaactgccaactntactgctgctaacactggtgttattccaccttccacatctaacctcaccaaccttatcacaaggtttcgag

SEQ ID NO: 2656 - DNA, 480 bp, Glycine max
  Clone ID: jC-gmfl02220051d07d1
ggtgtaatcatccttttatatttccgtaaatgagttagtgaatagatacatgattatacaaaggctgtgtagcttaacccaatatgctagctacatcaccttctggcggtaaattagtgtaacaatgaaatggttcactcaattccatctcttggcatttttcacgcctttggacttctgttttgctgcctgaaaggcctgcatcttttgtttcttccgtgcctctttctcagccttggacatcttagatttggctttcactttaggagctttgctatcaagctcagcctcgcgttcaagttctctttccctagcatcaaaattcttctctaaataataatcgtaatcacctgcataatcctgtatggtgccatctttaatttctatcactctattaactatttgctttataaagtatcggtcatgagatactgtgataacagtgccctggtattcatttattgcttcctcgagcatttc

SEQ ID NO: 2657 - DNA, 552 bp, Glycine max
  unsure (1)..(552): unsure at all n locations
  Clone ID: jC-gmfl02220051d08a1
cagatgtccaagctcttatggaagctggtgatgtagatggggatgggcacctagattatggagagtttgtagccatttctgttcatctaagaaagatgggaaatgatgagcatcttcgcaaagccttccaattttttgatcagaacatacgtgagtatattgagattgaggagctgcgtagcgccttatctgatgatcttgacacaaacagtgaagaagttatcagtgcaattatgcatgatgtggacacagacaaggatggaaggataagttacgacgaatttgctacaatgatgaaggctggcacagattggagaaaagcatcaaggcagtattcgcgagagaggtttgccagtctgagcctaacgttgatgagggacgggtcattgcatttaaacaatgaaaaacaataacggtagatgactactttagaaatgccaatttttactttggaaaggaaaattcgataaagaagtctatttttttaatttaactctcttcattgtaattctnttctctaatacctccattttgggtgaaaaagatacgata

SEQ ID NO: 2658 - DNA, 482 bp, Glycine max
  Clone ID: jC-gmfl02220051d08d1
gaagatgaaggcatcttcgtggcccaggattttgtatacaaatatatcactatagcaagtaagcacctcaagtttgagataaaattttgaagcagtagtgcattcaggtcaaaaatgacagacaaggctggcaacccagtccctgtagacaaatatgaatatacaaaatgtagcaaagctaagatggcgaaaaactcacacatgttgagccggttatgtatgacacaacaactgttatgtcatcaagtttgccaccataataacggaacccagcctcttgagcagccgtagaaaatggtgtcggcctattcctgtccagtgctcgttgacgagccagtactgctatcttctgagcagttacttggggttctagtccagctctaactgaatgtaaaacaacttcagtgacctcatcattgtacagattgtcaaacaatccatctgttccagcaacgacaacatctcctggggcaacaggtatt

SEQ ID NO: 2659 - DNA, 605 bp, Glycine max
  Clone ID: jC-gmfl02220051d09a1
atcaattataagcatgggtttgtggaacacaacgaatgcagtgtcttgccgctttcacaagtttggtgatgaccaaaagaatctggtcttccaaggtgatgccacgtcttcttccaggggcatagaactcacaaagttagacggtggaggaaaaccagtgggtggcagtgtggggagagtgttatactcttctccagtgcacctttgggaaagctctacagtggtcgcaagctttgaaaccgacttcaccttttccatctcatcagactctactactccaggtgatggccttgccttcttcattgcaccatttgacactaaaatccctccaaactctggtgggagcaaccttggactcttcccatcagacaatgttgttgctgtcgagtttgacacctaccctaatcgtgataagggggatccagattatagacacattggtatcgatgtcaactctattgtctccaaggcaactgctaagtgggagtggcaaaatggcaaaatagccactgtacatatcagctataactctgcctctaagagactcactgttgctgctttctatcctgccactcaactgtgacacttttccatgatattgagct

SEQ ID NO: 2660 - DNA, 460 bp, Glycine max
  Clone ID: jC-gmfl02220051d09d1
attaaaaaaaatagtcattaattccttcatagatggatgtcttctataacgatttataaacatacattaataaaggaagagtaaaaagtaattctaatcagcggttacaaatttctacagtatattagttaattacacctttagccttttttcactggttcataagacgtatccctcaaccaaaaaaatacaaaggttgtgggggaactcttctttggttgccttttgttttttttaatgaaaactaaaagcctaattataataacaatatcaatcaacatgctgcagaaggattggcgaaggggttgaagaagtgaggcttaggggccatggagaatgatgtcttgggggaaccgacggcaccgttgacggcgctgacgacgagcctctctgaagaggggcacatggcgagtgttgcccgaggcataggcatgttcaacggctgagccagtttcagtgc

SEQ ID NO: 2661 - DNA, 91 bp, Glycine max
  Clone ID: jC-gmfl02220051d10a1
gctatgaggggtgaggggctgcgcggcccgctgtagttctccacagaggaggtcgtctaatattatctactgccaggagagtcttgtatgc

SEQ ID NO: 2662 - DNA, 434 bp, Glycine max
  Clone ID: jC-gmfl02220051d10d1
aacttgaacactctctttttgatattgatattaagagacacattggtagggcatacatacaaacagagagtacatgtttttagttgatcacgtaaaaaattacaaaagaacatacaaataacaaaataggaggaagaggagagaaacacacagagtaagagacgtggaaagttatggatattagacatattataagggcaacgctcaaaaaacttccagcatagagcagtggaatgaattacttaggccttctaccacttgaggggtttgaccacttcccatgtgaagtcagggtcttctcttccaaagtgtccataggcagcagtcttcaaaaacctgttatttacacccctcttgagatcaaggttgatggagatcataccaggcctgaaatcaaagttttccttcacaatgttgagaatttccttatcatg

SEQ ID NO: 2663 - DNA, 576 bp, Glycine max
  Clone ID: jC-gmfl02220051d11a1
catcaacaaggagttcccaattcagttgcatcacatgttgggcattttcacccagtgcagtcaatgtcacctgtgcaccagtggcaaaaccaacagtctgtgtcagagggttcacaggtacccgtacaggaacatccttcaacatctaatactgatcaaaatttgatgagatcagatgctaagtttagctatgaaatgtctgttaatggacaaactcttcatagagactatctggatgctcacattcagcaaggcgaggaggcacaaactgtgatttcttcaggaacaagtgaaacacaggtttctcagtcagtcgataagactcaatttgttgcttcccaacaagatcaaagcatgcaacaaatttcttcacagttctctgaggctttacgattgaactcttttgaaccaaatggtgaacataaggagcagaatttctgtgccattatctaataatgaaccagatgtccaagttttattggctgagcaagcaacttctgctggaaatgcattatctgtcacaagccattcagttaatcataatgaaatgatccagagcaatttcactggattctg

SEQ ID NO: 2664 - DNA, 448 bp, Glycine max
  Clone ID: jC-gmfl02220051d11d1
ataacattaactttaatttccatttaactgtaaagtaccgtgtgaagtattcatgccataatgtttttcttcttttgagggtcaagtcattatctatcctaattctgatgccggacgtcacattccacaaatatatattcacgccactgccattcatcatttcaattttcatccagtctatggcatggaatggaaacgggtctctatcgtcattaccagagactccatcagcaataatggtgcatcattatatgattatattgatgatgataaacattgtgtcttgcactctaatcttaacaaagctttatcctgttcttggagttggatccaaccaatcccgttatgcgttatcgtgtcccgtgttggcccccccacttgccagttgccaccaaagatatattccctgcaaaacaaacactagaaacaattattaatagcataaaaa

SEQ ID NO: 2665 - DNA, 583 bp, Glycine max
  Clone ID: jC-gmfl02220051d12a1
gaagcacacaagactctcttatcccttggaaaagtttcactcagatgttgctggcagaagctttcacaatgggcgttttattcagaggatgagagagaaggctgcctccctttccaatgtacgactggagcaaggaacagtcactttcctacttgaagagaagggggttattaaaggtgtgcactacaaaacgaaggatagtcaagaattatcagcttgtgcaccccttaccgttgtttgtgatggctgtttctcaaacttgcgccgatctctttgtaatcctaaggtagatgttccctctcatttcgctggcttaattttggagagttgtgaacttccttatgctaatcatggccatgtcatactgggagatccttcgccagttctgttctatcggataagtagttcagaaattcgttgtctggttgatgttcctggtcagaaggttccatctatttcgaatggtgaaatgacaaattatttgaagacagtggtagctccacagattccacctgagcttcatgactcattcgtagctgcagtggacaaaggccacattaggacaatgcccaacagaagcatg

SEQ ID NO: 2666 - DNA, 479 bp, Glycine max
  Clone ID: jC-gmfl02220051d12d1
tcgcgatctaggaacttaatttctaattaagttcaattctcatcagtaaaaaagtggtacacccaaaaatacagataattcgccagctttatgtgcaatttgtgtcccattcaaattatcttcaatacgagtcaagggaataaacccctgttctatggtttccagataaacgatactctcaaaagtactggtacgagtaaaaataccctcttctttaacttctgttattattctgatggagtgaagctcgttcataggtatttcgagaataatacgacgattttttccaggaaatccccaacgaacaaaacgtacctttttcccttttttattgaagatatcaaaaccaccacctatatcccaaaaaataatcgacccaaaataaaaactactaaagagacccgcgattccataaaaagccatcgtggccccttgtggaataaatggaaaataaataaagtccggaataaaagaaaaat

SEQ ID NO: 2667 - DNA, 544 bp, Glycine max
  Clone ID: jC-gmfl02220051e01a1
aacagcacatagcgggttactgtctgttgaagctaccatctctctctctctttcttagtgcctccttgccagaagttaaaatggcccaagaaactttcctattcacatctgaatcagtgaacgaggggcaccctgacaagctctgagaccagatctccgatgctgtgctcgatgcatgcttggagcaggaccctgacagctaggttgactgtgaaacctgcaccaagaccaacatggtgatggttttcggagagatcacaaccaaggccaacgtggactatgagaagattgtgcgtgacacatgcaggaacattggttatgtctctgatgatgtcggtcttgatgctgacaactgcaaggtcctcgtcaacattgagcaacagagtcctgatattgctcaaggtgcgcacggtcacctcacaaagaggcctgatgagatcggtgctggtgaccaaagtcatatgttccgctatgccactgacgagactcctgagctcatgcacttgagccatgttcttgccacgaagctcggtgccaagctcac

SEQ ID NO: 2668 - DNA, 552 bp, Glycine max
  Clone ID: jC-gmfl02220051e01d1
aatattaaacaataattttggcatcataaattcttccggaataattatacaaaagtgaccagggaaaacccgatctgccagttgcccactgaataaaaacacacatcatattactatgtgttgtcatacatgcattgtaatgagtggatattccaaagcaattggtccctttatccctccttaatccttatgccgtaaatggcaccatcccttgtaaattgtaattgcttcttcagaaatagaattatacaaaggtagttgcaatatctatttgccaaactataaatgtaaagacccttcttcccaatcctagtagtgtcccaattgtatttacaaaggtgggacaagatatgtatatacaagtacaaccatgtaacataatgtaacaataatcatactttggtctttactagtgcacattacagggagttattatgcactgaaacccctttgcagagaactccagggattggaaggaatactgacacacgcttgtgctgaagcctcagccatctggtcattctttatccctacatcgcagatgtttgcaag

SEQ ID NO: 2669 - DNA, 385 bp, Glycine max
  Clone ID: jC-gmfl02220051e02a1
catgggtcagaggatagagacgtgagttcgatgtagaacgtgtcgagataaggcttgaatgcggaatgaaagagtatcataaaatgggtacctcgattcactatacgtaccttatatatatcatggggatatctatctagattcttgacccgatcttatatgctgatccctattgcatgctagtatcaggagattgactataatggactacaatgactatatgtccatacctagcatataagaagtctagtgataatagataagccaagatatctcatactatgatatacccgtgcgttacatcaaagaagttctggctatgccttattattattagtcaacgaaatgaaacaatggaattgaaataactcactcagaacgccct

SEQ ID NO: 2670 - DNA, 503 bp, Glycine max
  Clone ID: jC-gmfl02220051e02d1
gttgcattaaaagtgtcgtttaaaagggctattgttaatacatgtgcttcatcacaaaactgaaatgagaaacattgattcataacctgcctgaaaattaagatactatcccagaaagatagttgacaaaactgataaaaacactcccctgaaatgaactcagtctaactaaacaatcgcctgagacttgctaaggatcactccctcatatttcacctggaaccacttcatagcatcctcctttgtgacacggtgctggattccaacacgggacttgcaccttcggcgacgtcccacacgatagccaggacgctccagaacaactaagaagtccattccataaataccagttgaaggatcatacttgattcccaaatcgatatgctcctgaatgccaaagcccaagcaaccagtatcactgaagttccttctgagaagttcatattccttcacctttaaaccactttccaacagatgcattgccttgtcacctctgacagtga

SEQ ID NO: 2671 - DNA, 567 bp, Glycine max
  Clone ID: jC-gmfl02220051e03a1
ccacattcaaatccaaatggccctttacattacactaataattggcctcctagtaaacaccctagtactctataaatagcatttgcatgcaccttagtcttcaccaaaatactcctcttggcatcttgtgttgtgtccctcttttaagctatttccttctcttaacacaattggttgtgccaattgccatagtcaccaaccaattaacaaaggtatatatatcatcatatcatcaccaaatgaaaaatattgggttgttttttcttgtggtggtggctacttttgtggtggcagccacagctggtagcttttaccaagactttgaaataacgtggggtggtgagcgtgccaaaatctatgagaatggaaaccttctcacactctcccttgacagagcctctggctctggctttcgttccaaaaaagagtacttgttcggaaaaattgacatgcagctcaagcttgtgcctggtaactctgctggaacagtaactgcctattatttatcttctctgtagcctactcatgacgaaatagactttgaagttttgggtaacttgagtggtg

SEQ ID NO: 2672 - DNA, 566 bp, Glycine max
  Clone ID: jC-gmfl02220051e03d1
ccaaaaggcttaaacctgccaataaagatgatcattaattagtactaattactaaacctgtctagagatatatatagacagaaatatcccaagcaacaattctagtaaaattaacctggcccagtaatattatttactagtatttatataatacaggctatatatacgtacatatatatagccaaaccaagtattaacccaaatttgcagaaaaagcaaagatggatccgctaattgattgatgtcagtggtaagcaggaaaagcattggctccaacaaagcatgtcctcttcacaaaacgacctttcattctaggccttttctctgcgttcaacttccttacttcatatcttatcttctttgcaaacaaacgagtccttctcttctctctataccttgacactcttgcttctcttccaccatctaggtgccctcttaagcttcttactttcccacctacaccactcaaacccaaggagaagtcataatcagaattgaacttaggtgggtttgaagttgtccatggagaagaaccttggctagaccgcagtaataacctcatcata

SEQ ID NO: 2673 - DNA, 574 bp, Glycine max
  Clone ID: jC-gmfl02220051e04a1
gcacggtggggacgaccatggttagagacgatctatgcatcaccgttcccagcttcttccggtgccctatatccctcgacgtcatgaaatcccctgtgagcctctgtaccggcgttacctacgaccgttccagcattcaacgctgggtttactacggggacatcacctgtcccgccaccatgcaggttctccaaaccagagatttcgttcccaaccgaaccttacagaggctcatccagatctggtctgactcggtcaccctccgagtggactcgcccgagtcacctacctccacccagtccgaatcagtcctctccaaggaccaaattctcgtcgccatcttcgagttgcagactcactgcgcgaaccgcttcgactcgctcgccaaaatcgcgcgtttcgcgcaagattccgaggagaacctcgattttctcgttagaaccggatgcttcgtgccggtgcttggttgctttctcgacaatgtcaatgacggcgtcgaaattctcggacaggtcgttacggcgtggattatgttgtcagaaaaatggaagattgcgagggctcgaaaatttga

SEQ ID NO: 2674 - DNA, 357 bp, Glycine max
  Clone ID: jC-gmfl02220051e04d1
ttttttttttttttttttttttttttttttttttttttttttttttttttttttttttttttttttttttattgagccattactcactcttttaatggtggcaagcttcaggcaaaccctcccggatgtctctggacccccacctcctttatcactgaacggtcatttacgggccttaacagaagaacccggctgtagaccccgcacccacaaagggcataatttatcccctaaaggcccccccaagaccctcgctcatttaaggccacacctagccctcacagccagacccccaaaacccccccggtaaaatggataaccccccccgaccaaaaattctaaaaacctggggtaccg

SEQ ID NO: 2675 - DNA, 551 bp, Glycine max
  Clone ID: jC-gmfl02220051e05a1
caaatcccgcatctttctccgtgttcttgtgcaagcaagaaagcacttaaccaaactctctgtttcagctttctctgttttttcggcacaaacagatttcggctgtttttaagtatggccataaagacaatggaactattgaaagggtgccgatcacaggaagagataatggaagtgctttctgcagtggcttcggatttgggggatgtgatcgatgatgtgaacaccttgcaggtgattccactgaatggtgcattgaccaatgaagtttttcagataaactggccaaccaaaaatgatggtgaggtcagaaaggttctgattcgtttatatggggaaggtgttgaagttttctttgacagggaagaagaaattcgaacctttgagtgcatttcaaagcatggtcagggtccacgccttcttggccgattcacctctggcagagttgatgagtttattcatgccagaactctatcagctgctgacctacgtgaccttgaagtttctgctatgatagcatctaagatgagagagttccataatcttcatat

SEQ ID NO: 2676 - DNA, 392 bp, Glycine max
  Clone ID: jC-gmfl02220051e05d1
cacgaaatgcttatcatctctttccatttccaagtacttttgcctttaatgagtggtaacaaccagatatgactatctcacagggaatcaattgaccattaaatgaaggggaggaaaaataaagaaaagaaaatgatgaaaagcagcaaagccaatatataagcactccagtcataaaacaacatagtacacggtaacaaacaacatatggtcccatctatccaggctcttgtatacatctcaaatgatgaagaatcacatcataaatcaattttcggagaaaaaccttccatcaataacagtctcactctgcatctggatattacctaattgattcatctgccagctctgatgaggggcaacatgttcgtgcgaaggagtgtagtgctcca

SEQ ID NO: 2677 - DNA, 464 bp, Glycine max
  Clone ID: jC-gmfl02220051e06a1
tgaaatgttgtcaccccttcttctatttctatgcctaactcttcctttgtttctgttgtccttcttcaaataccgtaaaaccttcaagaatccaccactttcaccaggtcctagaggccttcccataatagggaatctttaatcaacctagattagctcctttctcttcatgagcagctatggcatctctcaaagaaatatggtcctttattttcccttcaatttggattaaggccagccatagttgttttctctccaaaattggccaaagaggtaatgaaagacaatgaccttgagtgctgtggacgacctaaattactaggccaacagaaactaacctataatgggttagacatgggattttcctcatacgataggtattggagagaaatcagaaaaatttgtgttgtccatgttcttagcttcaaacgtgtccaaagctttacctcaattagacattttga

SEQ ID NO: 2678 - DNA, 312 bp, Glycine max
  Clone ID: jC-gmfl02220051e06d1
aaaatggggcaaataactgggtcaattttattaaaaagtcttccccccaatcgttaatccatacccaattttgtagcggtttaacaaacccccttcaatttgaaatttttagttcttttcattttacaaacttgggcatccctttttggcaaatctaattatttccacagtttaggtcctggggaaactgataagccatgaattatgcctgattttgatggatttggatgctaaaattcaactggtccatgcctcacgaaattgttagccggaattttgggcctgtaaattgcccaaactacctgatcagcc

SEQ ID NO: 2679 - DNA, 444 bp, Glycine max
  Clone ID: jC-gmfl02220051e07a1
ggctcgagatttatgtggagccagatcaaagtaccgagagcaaaggtgtattttggtacaacaataagttgtgatgattaatgtagccgaggcttctttgaactttcccttgtgactgtttagtatcatggttgcttattgggaataatttcgttgaaccctgatgttggtagtaagtatctagacagttgcatagcggttttgtttacagaataagatatagcctctctgaacagtttgattattgcaccatggtttgcaatcggtgcatgtcgaccaagtttctcaagactgtggagaagcttattcttgttccagttcttgaatccaagttgttaccgtattctgttattattgacttagaatccttaaccttttctgctgttatctcatgatcgtcactcgcaaatgaatcacatttcaaacttataaaaaaaaaaataa

SEQ ID NO: 2680 - DNA, 372 bp, Glycine max
  Clone ID: jC-gmfl02220051e07d1
cattatattggaagcaataaaagtcaaaatgattccaggaagcaccatccacttctcctttgccgtgacatgtctagatctcaagtcaagcaatgccactgctttgccatagggttcttctatggagaattcaacagctgttaggaaattcatttcatttccccgtttcccattgtgtctcagttcatagtctagctttcttccggggaaaattctcacccttttgttggcaccagtaagctcaaagagatgaccatcatttgtagatttgtttggaaggtgaaacaaccaaagattctccaaaatagaccatccattttccataaactcagcaagagtgcgagtttcaccagatttcatgaggccaacaac

SEQ ID NO: 2681 - DNA, 568 bp, Glycine max
  Clone ID: jC-gmfl02220051e08a1
ttcggctcgagcagtcatggatatgacagccgtacaacaatcttctccccggaaggacgtctttaccaagtggaatatgcaatggaggctattgggaatgctggtaccgcaatagggatcttatcaaaagatggggtagtgctggttggtgaaaagaaggtcacattcaaactgctccaaacctcaacttccaccgagaaaatgtacaagattgatgatcatgttgcatgcgctgtggctgggataatgtctgatgccaacatcctaatcaataccgcaagggtccaagcccaacgctacacatacgcctatcaagagcccatgccagttgagcagttagttcagtctctctgcgataccaagcaaggttacacccaattcggtggtcttcggccatttggagtttcgttcctatttgcaggatgggacataaactttggctttcagctttacatgagcgaccctagtggaaattatggtggctggaaagctggagccatttggtgcaataaccatgcagcacaatcaatactgaaacaggacttacaggatgacatcacatgagaag

SEQ ID NO: 2682 - DNA, 495 bp, Glycine max
  Clone ID: jC-gmfl02220051e08d1
gagacaaaaagtgagtatcgccattataattgctactgatataggttacaatatgagatgccaggaactaccatgacatatacttgtaagatatatcattggatatctgccaacatagtataacttacttctgccagaaattcgctttcctgctttagaattggcttaaaataaaaataaccgtagaagttaaatttcaattaaactaactacttctaccagaaattaaagaaataaaaaacattgcaaatgccctacttctattgaacacggttctattaccaaccattttttttaaatcatgacattaaaaacatttagcacttgcctatgtacctgagatggtactcactaaccttttctattacaaaagatattctaaggagaaaaaaagatagatggaagttataacaagagggaaaggttgttatgcattcttgagcactttctgtggatccctctgttgctagggagatttcaatggtccaataatgg

SEQ ID NO: 2683 - DNA, 560 bp, Glycine max
  Clone ID: jC-gmfl02220051e09a1
caaacgctttgcttggcagggtattgctaagttgccatttattgatgaagtgcgtcttcttgcagaagttcaaaagattgaaaacttgttaacaccagaggaaaagcgacggaatgctataatgttcgacttgctctttgtgaattcttgtcatcctctctctgcgtgcataagtacacttgacaacaagtgtaaaaacatgcccaacagtgaacgggctgtggtcaaggaaaaaatcaatcccaaagaaagggatacatgcagtggtggaatgaatggttacatatccttatgtggtggagaaccttgccctcctatctttaggtctcctgttgcaagcatggaagatatcatggacaatcatgttatatgtgcaatatacagactcccagatgcacatacacacattacccgaccacctcaaggagttaaatttccaaaaaagattgttggaattgaggatttaaaacctgaacctgttttgtggcatgaagattcaagcaggaaacaccatgctgaaaatgggaggaaaaaccctccaggatctatttttgtcggga

SEQ ID NO: 2684 - DNA, 427 bp, Glycine max
  Clone ID: jC-gmfl02220051e09d1
ggtgctggagctctttgagctctagatgaaattttaaagtttaatcgccaaaatgcttgccaacacaacttattctcatacttacatcaaactattctaacaagcataattaccaaaaccaagcaacgtacaattcctcttataacaatagagtaggacagggggataaattatctatttatttgacattaaagtgaacatcagtacagttgactttgtagcaccctgattacaggttcttcattcatttgactctgaatttgaaaccatacatgagtagctacatgtcttgctttggcttccggctcaattctgagtaatgaccacccattagctgcaaaatctgcttccacaaactttctgaagaatctgataaagccccacaaagcaaacttgggctacatgcagcttcataccaataatctga

SEQ ID NO: 2685 - DNA, 540 bp, Glycine max
  Clone ID: jC-gmfl02220051e10a1
gaaggtgcaagggctgctttgaacctgtctggaaccatgcttggatattacccgttgagagtgctaccttcaaaaactgctattgcccctgttaatccaacatttttgcccaggtctgaagatgaaagggagatgtgttcaagaacaattttattgcacaaatattgacaagaagcttactcaagccgatgtcaaacacttctttgaatctatttgtggagaggttcaacggttgaggcttcttggagattaccatcattcaactcgaattgcttttgttgagttcacagtggctgagagtgcaattgcagctctaagctgtagtggggtgattctgggttcactgcccataagggtaagtccatcgaagacaccagttcgatcacgtgctcctcgccctactatgcactgaatcaactttccatgtttctggggttgattgctgctgagatatatttacatatatatatatacatagaaacagctgtgttctaaggaacatgtggcatttagttggtacttttgtcctcatgtcttaca

SEQ ID NO: 2686 - DNA, 458 bp, Glycine max
  Clone ID: jC-gmfl02220051e10d1
aggacaaaaggaaaaggcaccaaattcaatttaagtggacactttaactcaaaattatagaggaagacagtccaatatgaaaaatatagtaaaatcatctcaaacttggcatcttctctttgcacctaagacattgagaattctaagaatgttacacgcaagtcccatcacaacttctagcacttggatcagcacaaccttcaggaacagaaatatttacttgccaagtttgctttgcctccaattcaagattggaagaaagttcccctgttaatagcatcctcgttagcatttccaagtgcagcctcgttcaagtacttgtcagccaattggactctcttgacattctcttgttcttggacaagcatgttaccatacgtcaagagcttctccagagtcatcttgggctgctcaaaggttggaggtccatcttttgagttcacaagcttcttcccaat

SEQ ID NO: 2687 - DNA, 573 bp, Glycine max
  Clone ID: jC-gmfl02220051e11a1
gagagagtgtagcacagagagaaagagagagagaagcattggttgttattaatggcggagggtaaggaagagagtaaatctagcgaggagagcgtgaagctgttcgtaggtcaagtgccgaagcgcatgtcggaagacgaaggtgcttgcaattgttcaaggagctcgctttggttgacgaggtcaacatcatcagagacaaagccactcgtgcctcccgaggttgttgctttgtaatttgtccgtccagggaagaagcggataaggcggtcaatgcatgtcataacaagaaaacgctccctggggtgagtgagtgggcttcggtcccgcacgcatcttcattctttgcttttcagaacgttcagagtggaatggatttttttttctttcttttaaccctctggtttatcaggaaaaagatgacatgattaatgcagagttcagccagaagaaaaattaagcctgaccaataattatttctcccaaagatggaatgaaatgttttgaatcctagtttggaatagcagaatgagtggctgcttctataaaagtcgctgatgctgaccaccacca

SEQ ID NO: 2688 - DNA, 343 bp, Glycine max
  Clone ID: jC-gmfl02220051e11d1
aaggaaaaaagggaaaggccccaaaataaattaaagggggcccctttaaccaaaaaatttaaagggagacccccccaaaagaaaaaaaaaaaaaaaaccttcaaaaagggggagtccttttttgcccccaaaaacttagaaaatgaaaaaaggggcccccccaggcccaaaaaaaatttcaaccctgggaacaaaaaaccctttagggacaaaaaattttccacgcccaaattggtttcccccccaatgaaaaaggggaaaaaggtcccccggaaaaaaccaacccggggggaattccaagggccgccccggtcaagcaccatgcacacaaacgggcctttta

SEQ ID NO: 2689 - DNA, 98 bp, Glycine max
  Clone ID: jC-gmfl02220051e12a1
gctaccttctcccaaatcccaagctacaacttactttagtgatggatgaaccaatttctctgtggtagccagacatatttgctaagaaattggttcat

SEQ ID NO: 2690 - DNA, 373 bp, Glycine max
  Clone ID: jC-gmfl02220051e12d1
aaaaaaaagggccaataacaaaaacaacaataaaaaaaaaacccaaggaggggcaaaaaagggccccgctaaaaaaaagaacccgatatacaaaggggggaaaacaaaagaaggattaggcattagggaaaaaaaaaatggcggcgggaaagttaaaaaaggggagacatcacaggggggaaccagggatgaacatgggggaacaccaagcaatacaagggggaaaaacaaaggggaaaagggggccccccaaatccccttaataaggggatctaggagggcccaaagggagagaaaaatttagaaccgggcacctcatatggatatataccgggcttccatgaaaaaggggaaactgcgcaaaaaaggggga

SEQ ID NO: 2691 - DNA, 547 bp, Glycine max
  Clone ID: jC-gmfl02220051f01a1
agctcctccagtgccacctgcaccgcccatagtggccatgctgccatcccctggcatgggccacctaatcccaatgatcgagttcgccaagcgagcggtgcgctaccataacctggccgtcaccttcgtcatccccactgacggcccaccttctaaagcccaaaaggccgtcttccaggccctcccggactccatttcccacaccttcctccctccggtcaatctctccgactttccaccgggcaccaaaattgaaaccctgatctcccacaccgtcctcctctccctcccttccctccgacaagccttccactccctctccttcacatacaccctcgccgccgtcgtcgtcgacctcttcgccaccgacgccttcgacgtcgccgccgaattcaatgccttcccctacgtcttctacccctccacagccaccgtactctccatcgccctgcaccttcccaccctcgacaagcaggtccagtgcgagttccgagacctccggaaccggtcaccaatcccgttgcattcttcttccgtcaggactttt

SEQ ID NO: 2692 - DNA, 567 bp, Glycine max
  Clone ID: jC-gmfl02220051f01d1
aaaattcaacttacttcttaaatacatggcttttcccaccatcgtgtggggataatgtataaatattatagtcatacagctgcagctttcagggaaagaaaatctgaaattttattggtataaaagtctggctgtatggagttgttagggctctgaagcatggccagtgtggtgacccctgagagcacaagaagagtttcgcaaccaacatggctcccaccatctataatttttcgtattctaaaaggttttcagagtcattcaattcttcaaaatcaaaaagagagtcatccagttccaacatccttgctttccactccacagctcaatggaatgctcattataaagccaccaaagaaactaacaaactgatggtacttgatttcacagccacatggcgtggaccttgcaaactcatggacccagttatccaagagtttgctggaaattacacagatgttgacttcatcaagattgatgtggaggagttaacggaagtgtctcaagcactccatgtctaccaattgccaacattcatactcgttaagaaaggcaagttgctgatag

SEQ ID NO: 2693 - DNA, 506 bp, Glycine max
  Clone ID: jC-gmfl02220051f02a1
gtcaactaccactggtcacttgatctacaagcttggaggtattgacaagcgtgtgattgagaggttcgagaaggaggctgccgagatgaacaagaggtcattcaagtatgcctgggtgctcgacaagctcaaagctgaacgtgaaagacgaattaccattgatattgctttgtggaagtttgaaaccaccaagtactactgcacggtcattgatgctcctggacatcgtgactttatcaagaacatgattactggtacctcccaggccgactgtgctgtccttattattgactccaccactggtggttttgaagctggtatttctaaggatggacagacccgtgagcatgctcttcttgctttcaccctaggtgtgaagcagatgatctgttgctgtaacaagatggatgccactaccctcaagtactctaaggctaggtatgatgaaatcgtgaaggaagtctcttcttacttgaagaacgttggttacaacccagacaagattc

SEQ ID NO: 2694 - DNA, 274 bp, Glycine max
  Clone ID: jC-gmfl02220051f02d1
aaaattaagaacatttaatatattatactttgtcaaaaatgtattgtcatcttttagtttttaactccttcattttcagtttttcacttggtcacatgaaacacacatcatatcatacaattactgttattgaatatcatgtcaagtagttcaacaaactttagcccaaaaggaatgtgggaagataacatttttttttgtgtgtacgccttggaacctatgatctcatgtattctatcccaagtttcccaccactaggccaacccagtgggtt

SEQ ID NO: 2695 - DNA, 600 bp, Glycine max
  unsure (1)..(600): unsure at all n locations
  Clone ID: jC-gmfl02220051f03a1
gttctcaacatcagctagctagccactcactcacaataaataaaataaaaagggttttacaaaatataaacaatatctagggtttctctttctcttttgcattctctctgaattcgtatgccatggagtcacccggtaacgagcatgtggtgggtggcgcagaacccaacgacgtcgttacgcccttttcccacagagaagaacctcacaattcccaacccctcaccggcgacggtgccagtcccggaaagatatttataggtggtttagcgagagaaacgaccattgcccaatttatcaagcactttggtaagtatggtgagatcacggattcagttatcatgaaggacaggaaaactgggcagcctcgtggattcgggtttataacatatgcggatccctctgtggtcgataaagtcattgaggaacctcatgtcatcaatggcaaacaagttgagattaagcggacgataccgaggggagctgttggctctaaggatttaggacanagaaaattttgtaggtgtattccttcaatgtgactgaagatgaattagagactccttacacgctaccgcgaaattaagatcaccaataatg

SEQ ID NO: 2696 - DNA, 596 bp, Glycine max
  Clone ID: jC-gmfl02220051f03d1
cacacaatcagaatacataagttgaataacttcaagagctatacattgctaatcaatacaaagaagaaaatccataacataaaatgtttgaacattggcattcataattgggaaaggtcaaccaatcctagtaccaaacctgcatttcacaattgtagcacttttcattctcaacctctctctgacatacattttttcgtcatcatcttcacttttaccacaaggataggagcccatacgcactgagccacctttcccttaactttcaccagaggagcttcccctgatcaaggagccacgacggttgccaccaacaatcacatctttgagtcgatatatgggagcaagcaccctgctcctcgcctcatcatttatactgatttgccatttaagttgtaaagctctttcctgctgccagcgttgaccaagcattacaagacccatcacagcagctgcaatgaagacagaccagaatgcatttgcctctttggcatgagcatataaggaggcagctctccgcttccaccaagcttcacaaggaagatctgaggagttgtattcattatctttgggaagagagtttgacaatgatagat

SEQ ID NO: 2697 - DNA, 556 bp, Glycine max
  Clone ID: jC-gmfl02220051f04a1
gagaaaggactcgaatagttggttattcatggaagacaccgcacaacaaatcaagcgtccttttggtgttcctgaaggaccagaattcactgttgggttggatgtacctttgagcgagttgaaggtggagcttcttaaagaaagtgtgtccatcattatgctgactggtttaggtggatcaggaaaaaccactttggctacaaagctttgttgggatgaacaagtcataggtaaattcaaggaaaatattttatttgtcaccttctcaaaaaagcctaagttgaagattattgtagaaagactatttgaacattgtggatatcaagtgcctgagtttcaaagcgatgaagatgcagtcaatcaattgggacttttgctgaggaaaatggatgcaagtcctatgttgctggtcctggatgatgtctggcctggctcagaagccttagttgagaaattaaagttcagatatcagattataaaattttggtgacttcaagaatagcattccatagaattggcactccattattttaaaacctcttgttcacaatgatgc

SEQ ID NO: 2698 - DNA, 461 bp, Glycine max
  unsure (1)..(461): unsure at all n locations
  Clone ID: jC-gmfl02220051f04d1
gaaagccaattttgactgcagaaaaaagttattattttctctatttgaactgcctattcaacagttaaagttacaacgtacaggaaaaccaattcaatttaatttctatctcctatttttctaattgatgaacgaattaaatgtaactcgagtcccctaacagtaagtcgagcatgtcattggaagtgaggagagttgttccaccaacaagcaactctatatcaggtcttccactttcacccaatgccttatgagcttcacgcacctcgagtccattaatgcccccaataacaaacaccaaaatgacattttgatcggcaagacttggtttggcctgaccaaggccaaatcttccaaacccacttttaaacaagcgccccacagtggaagaatgatattctaacccaggcacatcgtacttgcccaacacccttngtagtagcttataagtaatccttttc

SEQ ID NO: 2699 - DNA, 520 bp, Glycine max
  Clone ID: jC-gmfl02220051f05a1
aagaaaacaaaataataatctggaaaaaatataaaaatcgaaaatttggggaatttcaatttcaatttcagggattctattagggtttcgaatcgccaagagattctcaaaccctaatccctcaattcgccctcgtgatcttcgatatctgtgggacgaatcgattgttcggtggcatgtcggttgagatccaagaaaatgtccaatatgtatgatggcgtgtgacaattgggggaattttggtgtgggcgtttgttctgttgattttctatggaaggcagaacagaaaactccaatgacactacatgtcccaagaaatcaagatcactggatcttaaaagtctatataaatcaaaatggacagaaaacacggcaaagacgaacttaaagaggatcggcaatagtagtgggggtggtgatgagaagaggaagaaaaaaaaggctagaaaggaagtctctttaagtagcttagaaaatggtgatggtagcagggagttgaagttagggttgagtcaaagat

SEQ ID NO: 2700 - DNA, 292 bp, Glycine max
  Clone ID: jC-gmfl02220051f05d1
aatacgaacattcaagttcctaataccaaaatatttgccagacaattacatcgtgtaaaccaagggaatcttatccaacaagagtacaatggctaattacatttttgctggtatttgatagtttttgacatttgcagtccacgtgaaactgtaaacatctggtaaaccaatataataactcataaaaatgttataaaacttaggagttccagctagaagaaccaattaaaactgagctttacagcaagcacaatccctggtttggctcaaattatttcagcttcacagcttc

SEQ ID NO: 2701 - DNA, 533 bp, Glycine max
  Clone ID: jC-gmfl02220051f06a1
cgttcacataccacgtagaaacagttcaatcattcttagccctaagcagacttcacatactcatccacttagtggcagtgttgtctctctgttactaccgcatcacccacttcttcctccaacctccaacagcgccatggcttttcatgactgctgcggagcttcttctctcgctgctctggttcttcaaccaagccttccggtggcgaccggtgtcgcggagcgtcatgactgagaagctctcgagtgaggagaagctgccggggcttgacatcttcgtgtgcacgctcgatcccgagaaggagcccaccgtggaggtcattgacaccatcatctccgccgtgtccatggattaccccttcgacaagctttccgtctatctctccgacgacggcgggtgcgacgtgactctctatgggatccgagaggctgctgaattcgtcaaggagtgggttccgttctgtaaaaagtatggtgtgaagtcaaagtgtcccaaagtcttcttctcttccttcgcggatgaggatcaagag

SEQ ID NO: 2702 - DNA, 416 bp, Glycine max
  Clone ID: jC-gmfl02220051f06d1
caatcttatttctcagtattcacgtaccagatatccttacaggtgtgctatatataagatgaacgccagtattctattgctgctagtgccactgcatagcatagtagcaaacaactttactatggctcttactagttacaatcccttcagcctttacatacatgtaatcatttggaactttatttctacattctggtgacttatagcgacaaaggggtgtagcctagcaagtaatatccataaacatcaaccatctacttgtgtaaactctagagcatttgcatcgggatcacgtgcaaagattgctggtcttccagaatgactaaatgtgtaagggatccccgctttatcaaagattgctttcagcttggaaacattacgaatcgcaatacacgtgagacgatcttgaccaccat

SEQ ID NO: 2703 - DNA, 483 bp, Glycine max
  Clone ID: jC-gmfl02220051f07a1
gacaattcaacttaagagatcaatatggccaccaccactacccagcctccctctaatatctgctttttccttctgttgttgcttctagcacactttcatttgggcataagccaacttgagctgaattactactctaaaagctgcccaaaagctgaagagatcatcaaggaacaagtcacacaactatataacaagcatggaaacactgccgtttcgtgggtcagaaatctcttccacgattgcgtggttaagtcatgcgatgcatcattactgttagcgacggagagcgatgtagtgtcggagcagacattggatagaagttttgggatgagaaacttcaagttcgtaaacactatcaaagcagcggttgagaaagaatgccccttcacagtgtcatgcgctgacattgatgctctttctgccagagatgccattgctatagttgggaggacccaacattgaaatgaagacagggagaaagga

SEQ ID NO: 2704 - DNA, 488 bp, Glycine max
  Clone ID: jC-gmfl02220051f07d1
atacaaggtgtagtacaatataacaagtaagctaaatgttatacaattctgttgataggaggattataatgaaatcgggatttaatgcagatcaaaaagaaggaaagcaatggcatgatcatccccatcaatgaaacctgtatagaaggatacttcaatcaattatggtcatgaaagggtcacgtaggaggaatttctggtttttcggttaacatctttgagggtttcaacttccataccaacggatccttatcaaaaaggaactaagtatcttaagcaatgaactaatcaatatctggcaatggtgttttccaataattccatgagttgtagtcctcctgctcgaccaaagaagttggaggaaacatgtcattgacgagggtatgtaatgacgtatacgactttgcaccaatacggtgactaatagctacctcacccttacggttgataaataatattttgcccttcgggactccaatctttctgga

SEQ ID NO: 2705 - DNA, 467 bp, Glycine max
  Clone ID: jC-gmfl02220051f08a1
gtgctacaccagaaggaaacattccattccttgatctgtttgacataaatacaggtaaaaaaatggaacgaatctgggagagcgataaggagaagtattatgagactgttgttgctctaatgtctgatcaagaagaaggggatttgtatttagataaactgaagatactgacttctaaagagtcaaaaactgaaaacacccaatactactttgttagctggccagataaaaacatagttcaggttacaaatttccctcatccataccctcagcttgcatcattgcagaaagagatgatcagatatgaaagaaaagacggggttcaacttactgctacattatacctaccaccaggttacaatccatcaacagatggccctttgccatgcctggtttggtcttacccaggagaatttaagagcaaagatgctgctggacaagttcgtggttctccaaatgaatttgct

SEQ ID NO: 2706 - DNA, 456 bp, Glycine max
  Clone ID: jC-gmfl02220051f08d1
aagtacgtaaaaaaatgatactaggaaacccatatttgaacatccccaaccgtaagatctatcaaatatccccaaagcaagataagaaccacatcaacaacattggcccaagctatatccacacaatacagtgacaatttacaggaaaaaaacaaatacattttaaagcagaacattggttctgaaactatcaaatttactgggggcttccactgtatcaaaaccagacggaccaaccttagttgtcatcatttatccaactggtttcatcttctactagcttgtagatgctgaaatggctgaccctgatcttccactctcctttagtgggatcatatgataaaaattcagcaccttgggcctcagcctttctcttgagcatctccttggatttctcaatcttcggtccttctgtatactgatggccagtttttttgtcgaaacattttatgttga

SEQ ID NO: 2707 - DNA, 592 bp, Glycine max
  Clone ID: jC-gmfl02220051f09a1
cgagaatgggatccatatggacggtgttgttttgttttgcatcggttttcgcgatcgtttctgcagaacgaagcattgtgaaaatggaagtgccgagattcaatgtcaccagccgagagcctcaacagagtttcctcaccaaagctttgaatttcttatggcaatctggagaatcagggtaccaacacgtgtggccggatatggaatttggatgggaaattgtgttgggtacttttgttgggttttgtggtgccgcgtttggaagtgttggtggagtaggcggaggtggcatattcgtccctatgcttagcctaatcattggatttgatccaaaatcatccacagctatctcaaaatgtatgatcatgggtgcagctgtgtcaactgtttactacaaccttaagctaaggcatcctacgttgaatatgcccatcattgactatgatttggcacttctcattcaaccaatgctcatgcttggcatcagcattggagtggtccttaacgttgtatttcctgattggattgtgactatattgcttattggtctcttcttaggcacatcaacaaaagcattctttaaaggggttga

SEQ ID NO: 2708 - DNA, 462 bp, Glycine max
  Clone ID: jC-gmfl02220051f09d1
gaggaccatataccaaatcactatagctttggaaattaacacgaaaattagccgctaagaaaaccaaacttaaccaacaaagtaaactcatttggaaatgaacattgttcaagaacaattagatcaaagctcaatgcaacaccaaggatgccacaaaaccctcttattttgaaacctatcctatattaagcctctacaggagcaagagctcgcagctctcattgtaccttaatccactgttggctgaaacccaaccataataataatataaagcacaaacttcaaaggaacgaatgatttttgctcaagcatcatcaagagcaaggacaccagggagttgctttccctcaagaagctctaagctggcaccaccaccagtggagatgtggctcatcttgtctgcaagtccaaccttcttcacagcggcaacggagtcaccttcttcaatgatggttgtcactc

SEQ ID NO: 2709 - DNA, 522 bp, Glycine max
  unsure (1)..(522): unsure at all n locations
  Clone ID: jC-gmfl02220051f10a1
ctctgctccgcggcttatttggtgactaaatagggttttgcttgcagctgagatcgagaagaggacgcggcggtgaaagctaccggtgcatgcgatcacaatgggagggtcgcgagttcaagtcaacaagcctcacaagtcccgctttttttacaaatcttctcgcaatcttcataaaacctctgtcaaggacagactcgcaatcgcaaaatcagagcgcaatgtcggcaaaggagctcgtgcagctcgaattcagagaaataaaatgatacgagatcaaaaaagagctgctgttttgaaagaaaaacgagaactcagtgggtcgagaagtcctcctcgagtgatagttctcttcgccctctgtgcgtctgtggatttagaatcacttgctgatgatctcttgtcattattatctaaagatacgtgtgtggtgctgtcaggaaccgttgcttcttctgaatataggacangaattacggtactaaaagcaccccatggtgatctactatcatgcatggaaat

SEQ ID NO: 2710 - DNA, 619 bp, Glycine max
  Clone ID: jC-gmfl02220051f11a1
cttacctcttggcatgaccattcaaatgtcttcttttctcttagcttctcttgctgctttctttttcttctcctccttggagaagagttttgcctttcaagcagcaagaaaggaggacacagaaagcaacaatcttcatcaatatacttcatcttgttcacctcagctcactccttccttcatcttcttgcagctcttctaccaaaggtcccaaaacaaaagcatcattagaagtggtacacaaacatgggccatgctcccaactaaatgatcatgatggcaaagctaagtctacaacaccacacagtgacattctgaaccaagacaaagaaagggtgaagtacattaactcaaggctctctaagaacttgggccaagatagtagtgttgaggaattggactcagctaccctaccagccaaatctggtagccttattgggtctggaaattactttgtggttgtgggtcttgggacacccaagagggacttgtcactcatttttgacactggcagtgatctcacttggactcagtgtgaaccttgtgctcgttcttgctactagcagcaagatgtaatatttgatccattcagtctacatcatattccaatatacatgtc

SEQ ID NO: 2711 - DNA, 480 bp, Glycine max
  Clone ID: jC-gmfl02220051f11d1
tcgcgatctagactaaaaaagggtatcctgagcaatttcaataatagggttcattgatattcctagtatagtagatgctatcacacatacaatcatacttaattcgatggaattgtctgatcttaagggggcccttcgataatttcgcacgtgaggagttatttcttggtttcgtccagtcattaataacttgattatttttaaataatagtagatagaaacaacactcgtaaggagtcctattgaaactaagaaatataagcctgcctgccatccacaccagaataaataaagttttccgaaaaaacctgatagtggaggaagacctcctaaggataagagacatagggctaaagagagagccaaataaggatctttcgtgtataatcctgcataatcttgaatgttatcagttccggtacgtagaccaaatgatacaatgcaagcaaaagttcctagattcatcgagatatagaacag

SEQ ID NO: 2712 - DNA, 618 bp, Glycine max
  Clone ID: jC-gmfl02220051f12a1
atttatgcatgcttccaccattatttcttcttaatcttaattatattaacaattacaattaacatcatgcacctgtgactgtgattcaatattaatggtttgtcaagggtattaagaaatttgttccgttaaaaaaatatcatgtattagaaattgaggctaagaataatttataaaaacttttttaaaatcatctaaattattttaaggacaaaattgtgcatgaaagtaaaataaataaaaggcacaataccttaaatgtgtaagcctaataatatgaaggacgcgagtttagaacattgacactaggaaggctaagccatacatgtgagctgcaataccgcaagagcttctagcctctttacctttattgggaggtgttattctagtatactaaaagtgtctcacgtcttaccagaattgaagttaaaaaatttaaacacccttctttctttaaagacaaaaccattagaccttcatgagagttaatgtggacaacactacactcgagtgagattatatatttcttattgaaaataaaaaatactttaccaaataatatcatgctttaaatcttttaagatttaattacacatttaatctctataatttttaaat

SEQ ID NO: 2713 - DNA, 464 bp, Glycine max
  Clone ID: jC-gmfl02220051f12d1
aaaataataatatgaaaagaaaacattaactataacaatagtactagttaaaaaacaataaataaaaaaacttaaaattataaatataattttaaattaattatgaatttatttacataatttattaaaataatatataatttatattaaatatagaatatcttttatatataatttatttacattattattaatttttatatttaaaaaattatttcaaatatttgataataaaaatagttttgttttctttgttgttaaattaattaaattttttaatttttttttaaataaattgactgaatttttatttaatttttaaaaatactagattaattaattttatcttaatattttgattaattttaatattgaattaaattattaaaaaattaaatatttttaaatttagttgtttatttttaatttttataataattgaaatatttttttttatttgataa

SEQ ID NO: 2714 - DNA, 569 bp, Glycine max
  unsure (1)..(569): unsure at all n locations
  Clone ID: jC-gmfl02220051g01a1
atcaaactcttcttcttcgatttccattgcgaagcgttactttttcttcttctttctcttcattttcttcgctcttcgatcttcgtccggggactgctccgaataccaccaccaccactcgccgatggccacgatcggaggcttacacgactcccaaggctctcaaaacagcgtcgaaaccgaagccctcgctcgattcgccgtagacgaacacaacaagaagcagaattcgcttctggagtttgctagggtggttagggcacaggaacaggttgttgctggtaccctgcatcaccttactcttgaggctattgaggctggtgagaagaagctctatgaagccaaggtgtgggtgaaaccatggctgaatttcaaagaactccaagagttcaagcctgctggtgatgcaccatcgtttacctctgctgatcttggcgtcaaaaaggatggtcaccaaccaggatggcaatctgtgccaacacatgaccctcaagttcatgatgcagcatatcatgcgatcaagaccatncagcacacgtctaattcactagtaccctatgagcttcatg

SEQ ID NO: 2715 - DNA, 499 bp, Glycine max
  Clone ID: jC-gmfl02220051g01d1
aatatatcggtcttgtgattccccataatcaaatagtcttaatcctaaattacttgcaacaagcaaaaattttccaaccatatcaagctactgagacctaaatttgtggatacggtgaatactccaaagacatcaatgccaaagccagaaatctcgatacttccacatcttaatttgaaaatgtaaaaatgacaaaggaagagtgtacaggtaatttggtgtattgtttaagaaaccttgcctctaccatacaaagcattaagtccttaacggacacattctactgcagttgtttaacagttccaatgatgcttgctgtcctaccctaaagccccgtggacctactgtcccatgttagggggcggaggaggaagacggacaccctgaccctgcataggttgggaaggaaaaccttggggaggtggcattgatggaggtctagcacccatgttgaaacccgatgtcccacttgcaacagggggtggtggtggaatagatg

SEQ ID NO: 2716 - DNA, 636 bp, Glycine max
  unsure (1)..(636): unsure at all n locations
  Clone ID: jC-gmfl02220051g02a1
cttccattcacaaccttaaacctttctttcttgtaaactttattgattgattctgagaatagaactaagagggtatagacatggctagcgcaattgcagcttcttttttggttctgcttctggctttccccactgtatttggagctgaccatgaagttggtgacactagtggatgggccctcggagttaattacaacacctgggcctctgggaaaactttcacagttggtgacactttggtgttcaagtatgactccactcatcaagttgatgaggttgatgagagtggatacaacagctgcagctcaagcaacagcatcaagaactaccaagatggaaactccaagattgaattgacttcaccaggcaaaaggtacttcttgtgccccatttcaggccactgtgctggaggcatgaagctgcaaattaatgtggctgctgctagtgggacccccccaacaaccccaagtggcaccccaccaaccaccccatcaaacccttctncttcntctccctctgagtcaggatccaccaacaccactttaccaccaaagcctagtggagctgtactggtttcagtggcattggccctttggtggggtcttcttgtgtcaacattatgttggttcatggcta

SEQ ID NO: 2717 - DNA, 566 bp, Glycine max
  unsure (1)..(566): unsure at all n locations
  Clone ID: jC-gmfl02220051g02d1
cagaaattcagtacagtattattcagtgcagagaacaaatagggttatatattaaactcaacaaaaacaaataatatgagatgtttatgagaatttcatccacccaagaccgttgtgttccttaattaatggacaaaagctaaacttagctcaatttcttctatcccaagcatttgagtttcaagcacaggcaaatttccatcttatgaagtttattttgcacacatgtatcggagaatatactacctgttagcaacatatgaagaaaaagcgtgctatcagctatagctacagccatagcatcatattaatttttgggaccgatgtccttcagtgaacagatctgttcttctcccattgcagacataacagaaaccacaagatcttttccttcagaaaatccatctttaatctgagcaagcaatgcctcatcagtaggaagcttcagatcatccttggtatttccattatcagtcaacagactcacaaagccgtcttcagagatatcaataagctgatagtcagtgcgattcacatgtggaacatcacangtgtgggatgatgga

SEQ ID NO: 2718 - DNA, 635 bp, Glycine max
  Clone ID: jC-gmfl02220051g03a1
gttaccaatggctccctcatcaaactacatttctttccttttcctcactacgcttttgtttgctcttcaaatcactgctagagacagccagttcttcagcaaagtcacccatttcgacaaagacaatgccaaagtgacagaactttcccaacaaagaagcaccagaagtaaacaagccagagcaacaaccacctttcattcccgagactgaaaacagctatggcctatatggtcatcatgatgagtctaaccaagtcccctccaccaccccgacttcttaccacccctacaagaccaagtttgagaactccaacaacaagtactacaacaatgatgcctataacacaaggttctccgaaaccagttacaacaacaacaacaacaagtattacaacaaggattcttatgagggtaaccaatatgagttaagtgacacaaagtacacagaagaaggatacaacaacaagtatcacaactcctatcagaacaactacaacaacgatgctgccaatgacaaatacttctacaacaacaacaacaacaacaaaaattacaatgctcacaataacaggtacaatacttacaacaacaatgctgttagcaggtacaatggtgagaggcatggaatgagtgac

SEQ ID NO: 2719 - DNA, 590 bp, Glycine max
  unsure (1)..(590): unsure at all n locations
  Clone ID: jC-gmfl02220051g03d1
gagtataataatttgctccatttgataaatatgaacaattacactaataagcgatacataagtatgctacttacacttgaaagacagttagaattaaaaagaaaaaaaggcactggatatatccggagtggagggtgggagaaagaatctgaagaaatacaaaaagcctaggcttgaagaaatataaaaggtgggataattcactgggtagtttttctcccaaaatcttgaaactcataggtaaatacacaggcttgtggagaattaacaatgcggtagaaatataaaaaatttcagctcccttatctttcccttatctttcttcacatacatggttatccagctgcgaaaggcttggcgatgtaaagttccattccactcacaggagtgaaaatgatctatttagtgagaaaatttgtgttcaatttccaccatgtacaaaattttcttagaccgacaataaccactaaccactggcggaattaatctctgaccccaataagttgaaagacaatcatgatctctgacccaggattaanaagaaatacatggtcatccagcaacagaaacatgaacattatacctggaaa

SEQ ID NO: 2720 - DNA, 551 bp, Glycine max
  unsure (1)..(551): unsure at all n locations
  Clone ID: jC-gmfl02220051g04a1
ccagtcttctatcatcatcgaatccactccagcgttgttgcattgtagaaggcgatggccgcgcgagctctgttgaccagaaaaaccctagccaccgtgctccgcaacgacgcgaagcccataatcggagttggcataacaagcagcggctactcattcacgcgggttgcacgtgtacacgctacccgatctggattacgactatggcgcactggagccagccatcagcggcgacatcatgcagctgcaccaccagaagcaccaccagacttacatcaccaactacaacaaggccctcgagcagctccaagacgccatcgccaagaaagattcctccgccgtcgttaagctccagggcgccatcaagttcaacggcggaggtcatgtcaaccattctattttctggaaaaatctagctcctgttcgtgaaggatgtggtgaaccacccaagggttcactgggatgggctattgacacacattntggttcttttgaagcttaatacaaaagttaacgcagattgtgctgactacaggggtctggatggttgt

SEQ ID NO: 2721 - DNA, 297 bp, Glycine max
  Clone ID: jC-gmfl02220051g04d1
aaaaaaaggggtttggaaaagttcccccccagggggggaccaaacgggggggtttgatcaaaaatccaaacctccgaggggcaagggggggaaaccccgagggaaaaacaactatatgggcccggacggggaacaggcccaattgctccaacagaggccacatgaaaacggtcgtgcaaacgagaaactcccccttggaacccctgtgatttatcaaaacgcccaagggggggataaaaagattcacatggccagcatatgggggtggaaccctcccatttgtccctgtcaagaaaa

SEQ ID NO: 2722 - DNA, 530 bp, Glycine max
  Clone ID: jC-gmfl02220051g05a1
ctagactcttccttttctcttctctgtctaaggggtgccctgagatcacattgaacaatggtgaaggctgtggccgttcttggcagcagtgagggtgtcactggaactattcacttcgttcaggagggaagtggtccaaccaccgtaactggatctcttgctggtcttaagcctggtctccatggtttccatgtccatgccttgggggacactaccaatggttgcctctcaactggatcacatttcaatcctaataacaaggagcatggtgcccctgaggatgagaatcgtcatgctggtgatcttgggaatgttaatgtcggtgatgatggtactgtcagcttcactattactgacagccagattcctctcactggaccaaacaacatcataggaagggcggttgttgtccatgctgatcctgatgatcttgggaaaggtggtcatgagcttagcaaaactactggaaatgctggtggcagagtagcttgtggtatcattggtctgcagggataactaatcacatgaag

SEQ ID NO: 2723 - DNA, 339 bp, Glycine max
  Clone ID: jC-gmfl02220051g05d1
acgatattctgacgcattaactagtaaagaaataccattgatagccattactattggtctaactagtcacagagctcgataatgtctaaatgggtgggccataggcttagggtaacttcaaatactgtccgctgtttcaatagattattgcgcttcattgtggatcaatgatgctacaattttccgtataatttactaaaacagcgatctcattattgttcatcttagactaaacgctcattagatgcatcattgaccattgggctttaagaagacgtattataaaagtacctatgatatacagttgtggcaaaaggcgcaagaaatggtaatactcca

SEQ ID NO: 2724 - DNA, 601 bp, Glycine max
  Clone ID: jC-gmfl02220051g07a1
gtttctctaaatatgtaatgtgaaaaactacttaagaaagcgtagagactaggtactaggtaatcttggtgcattctataggtgttgtcccttgtgttcctttgtatttgttgtatggataatttcctcttcccttggtcaaatttttcctcttttctatctatttttttctattaaaaaaagatattccaacagtatatcctaattatcttgtatgtgtattcctcctgccctccctttcatttctattttatggattaccttcttgcaacatgcctctgttattggaaaattggttgttgatttacttgcagctgattactaatgtattttctttctgtcttctggactctacagcatcaatttgatgctggtaagtttactactttttttgataaatgttattatgtcttgggtaattggggttatttttatattgtgcatgcatatctgatcttgttctcctcccacccaaaaatcttctgtgtatgatcttgtttaaacaatattgtaaaatgttcacgcttattagtttcctttctctgagcggtttatgtgaccatctgcaacgaaagggaagatgatatgtagtgaagtaact

SEQ ID NO: 2725 - DNA, 402 bp, Glycine max
  Clone ID: jC-gmfl02220051g07d1
gggaaaaattaattgtgtttcattgaacatgttgcaataccatagttggcattagcggtcaaaacagccactatcacattgggctttagaaatgttgcaataccatagtggtcggataattgtttccatttcttttgctatcacggcctctattgcgcataccccaaagtggtcatgtatcattattcttctcacaaataataaaacgaaatcctggtatatggtgcttcagcgttggaagatcttgacaacaatatacaaagagacaatcaactcaccagttgcttgctataagaaatatcataaaacctatcttgacttttcttttcttacgtgccacagaaattgtagaccaagatgtcactgttgtttcaaaagggaatccatggcctctgccacttt

SEQ ID NO: 2726 - DNA, 585 bp, Glycine max
  Clone ID: jC-gmfl02220051g08a1
gaagcctcctctgcctcgcaatcatcggcattgtcgtcgccgccgtcggaggtcagtctccagcggcggctcccaccacttcctcggcatccccagccacagccccttctaaacctaaaccaaaatcacctgcgccagttgcttctcccacttcatctcctccagcttcatcccccaatgctgcaaccgcaacccctcccgtttcgtctcccacggtagcatctcctccgtctaaagctgctgctccagctccagcaaccactcctccggtggccacacctcccgcggccactcctcctgcggctacacctcctgctgtgacaccagtgagctcgccgccagcgccagttccggtgagttctccaccagcgcctgttccggtgagctctccccctgcactggcaccgacaactccggcacccgtggtagcacccagcgctgaggttcccgctcccgctcccaagtcgaagaagaagacgaagaagagtaagaagcacactgcaccagcaccgtcgccggcattgcttggccctcccgctcctacggtaggagctcctggatcaagccaggatgcgtcggcttctg

SEQ ID NO: 2727 - DNA, 463 bp, Glycine max
  Clone ID: jC-gmfl02220051g08d1
cgcaatggataaaagcaccaaaatgcaattatagaagcacaaattttttagggtaatgaattacagaaaatgtcatgctgtgtattttgaccaaaaattgtgcgtgctcctacaaatcattttactatttagtcatataagggagaaagggaaacagtatgtggtggataatatcagggccatcataacctacacaactctgaacaactcttcataaatatcactgacttaaaatgcaattaggccttcgatttcttccctttggcttcattagatggttggctcttgaaaggcaggaaagtctttccacccatgaatggtctgaggacttctggtatctctaccccatcttccttctggttgttctccagtatgcagcaaatggtcctcttagtagccgttagagtagagtttaacaagtgaacatattgcttcatctgctcattgctctttttctgaccat

SEQ ID NO: 2728 - DNA, 490 bp, Glycine max
  Clone ID: jC-gmfl02220051g09a1
atttcttcattgttttgctctaaaaatggagagagattttctgggtctgagctcaaaagaaccattggctatgatgaaggaagagatgaatattgatattggaagcaaagacacaggtttcacaaatggagcagtggtaaaatggcccttcatgaacaaagtatatgtccatcctcttttgatgtcattcaatcctcctcaggtgaattctgtgaaccatcctcatggtatgaagatgttttcagttcccaatcaagcaatttcagtttccatgggacatccatccctaaagaatcattttgcaactgttggtcagaatatgaatgttgctactgtgaagcaaccactactcggaggaatacctgttacggtgcctcattcagttcatcccattgttggtgctgttgctggaatgaccgaaacacgcgtgaaaccatccgtacctgctcctaaacttacaatcttctatgcgggcactgtgaaatgtctt

SEQ ID NO: 2729 - DNA, 394 bp, Glycine max
  Clone ID: jC-gmfl02220051g09d1
attaagctgtaaaggggcatttaaccataaacaaaaatagtctccaagactataaaaacattacattttagacaaattagtcttcccacttatcgtccgtcaacacctactgtaactgctggggttgctgcctaacaagtatcatattcactgcaaacattttagtaggagtagcttttgacgaacaactccttcttggcttcctcggattcacccttaccagggtacttcccaagctgagcgagtgagttggacttggcacggaatgcgagtgcatcttgtgctgcctttacgttctctgggcgggcttcccatgttttcaaggcagtgttttggagggctttggcatacgaaaatgacacgtgccacgggtttggagattggttcatggcat

SEQ ID NO: 2730 - DNA, 584 bp, Glycine max
  Clone ID: jC-gmfl02220051g10a1
cttctttctgccacttctcttctatataataacacccacttctttggttcaacttcccttcaattcatcacataataacaacactataaacattgattttggctctttgttgcagcgagaccaaaatgtctttcactgcaaccaagtttttaatcttctcctctccctctcacttccaccacccccagatccaatgacaagcctctctctttctccttcgatcactccaaacccaacccttcttcctccttccttggatccactcgcaagcttcttcgcttcaatgctctcgctaggcctcatgctcaccctcgtgcttcttcttcccctgctgctgctgttcttctcgaacgaacctccaatctgcttgtcacaaaagaggaagggttggaactctatgaagacatgatattagggaggtttttttgaggacaagtgcgctgagatgtattataggggcaaaatgtttggttttgttcacttgtacaatggccaagaggctgtgtcaactgggttcatcaagcttctgaagaaagaagattctgtagtgagcacctacagagaacatgttcatgcattgagta

SEQ ID NO: 2731 - DNA, 462 bp, Glycine max
  Clone ID: jC-gmfl02220051g10d1
aagtgatgaaagttgataaatatatggaattacaagtaccttaattgagaagaacatggtgacacttcagtattgcatgccacgactatatctttggttctaattacatcagtgactcaaaaagaaaaagataattaaaaacggctgattagagagactccacatcatccacctattccgtgtccatcatttcctttgtcaacgagcatttgatttatgacgaaactctgggattcatagagtaagattatagcatgttttgttttcaagctggcaaacatattactgtctagagcgctttaagtacaccaatacgctaatgctcgttagaacaacaacacctgcaaaaataccagaacggagacgcaatgtactggttttctgtatagtggctgtaccaggttgcagttttgatggtttggttgaattgggaaactccaaatccaactttaaagccttcag

SEQ ID NO: 2732 - DNA, 525 bp, Glycine max
  Clone ID: jC-gmfl02220051g11a1
tgcagattgaacgaagtgttgccactcctcaagtgatgaagaagtacttcattgggagtgtgctgagtgggggagggagtgttccagaaacaaatgcatctgctgagacttggatccaaatggtgaatgggatccaaaatggatcttttgctaccccgtcttgggattccaatgatttatggaatagatgcagttcatggccacaataatgtctacaaggcaaccatttttcctcacaatgttgggctaggagttaccagggatccaatgctgataaagaagattggagatgcaactgcccttgaagttagagctactggaattcaatatgtgtttgctccatgcattgcggtctgcagagatcctagatggggacgttgctatgaaagctatagtgaggaccctaagattgttcaagcaatgactgaaattattcctggtttgcaaggagacatcagtgacaatttcagaaagggggttccctttgtcgctggaaagaacaaggttgcagcttgtgcttaacac

SEQ ID NO: 2733 - DNA, 466 bp, Glycine max
  Clone ID: jC-gmfl02220051g11d1
aaggattaccaaagatttgtaagttggtttaaaagtagcagacaaaaatgttaccaatacgtatgcaagtatttatttggcataaatagtgttaataattatgtggtatatgaatatctagttgcaaggcatagccaactaatctcagaatgaagaaaaaatgacaaatcttggaggctgaaacacatgaattgaattgatggattatatgaagattctaggagcacctgttcatcattgatctgtgaagtgatcaatcaactttaggcctagcagcttgaagcatctcaacaatgagagtcttcacatcctttctatcttctgcacatcgagggaaaggtacacgaagcttgaaagtatcaccctgataaccagccttaacattgaaaccaagactatccaaatctagtatgaaggcaaagtccactggaactgaggtccaatgctgcacaatcactttgttatc

SEQ ID NO: 2734 - DNA, 567 bp, Glycine max
  Clone ID: jC-gmfl02220051g12a1
aaagcaaaagcaagcagctagctaggggaaatagaaaagcaaaggaagaaaagaaaaacatgaaagaaagaaagaaaagaaaagaaaagcaataaagaaagggaaaaaaagaagaagagagaaaacaaagacaaaaggttttcaaaaactccatgattattcaaattctctaaaaaacagtaccaagcagtagtagtgttccctctacttaatcaacccacaggagaggacctctacaaagaccctgtttaggcttgggttggaacaacatcaaaaaagagaaagcaaactttcttttctcttttgtagatcgagatcgtagaaattaagaaaggcatgaatagaggtgttttgcaaagctcaccggtgcaacaaatgatggccagaaaccctaacaactggtggaacatcaacaccatgcgccctcctcctccttcttaagcttctgcacctttcttctccactccttccaactttctaactccttataaccccacttctcttcctcttccttcttggcatgacaacaatcaagagctacccgagtcatggagccagctactcatg

SEQ ID NO: 2735 - DNA, 412 bp, Glycine max
  Clone ID: jC-gmfl02220051g12d1
cttactcaattccatattttttttccttttcattatattggggggaagcaaaattggtaggaaatatttccaggaaaatgtgttcaggaaacaactctattacactcctattgaagcctatattaaccaacacttgagttaatttgtttttaaaagaacgagaacactgttctatgacaattacattttttgaaattcatgaaactttttgccaatgatttttatgatcataccacagtggctatgccactgtatcttggtcttgttctgtcagtctcaggtgaaaggccctgttccatggacttcctctcctttcaattttcttacaggtctaattgagtgtcaggttgttgctatagatgaccaactgctccacctctattactaagggcggacgtttcctatcaatagc

SEQ ID NO: 2736 - DNA, 518 bp, Glycine max
  Clone ID: jC-gmfl02220051h01a1
taagaagcttaaagctgtgtctcgagtgagtgagacagacccagatggtggcaatcttcgccctcatattgtctatctcatggaccttggtatggatattgagcagattacgagtatcacacgactatctccatcatttgcctactatagcttggacggtcaaattcacccagtggttgagttttttcttgaacttggagtgccaaaagagaacattcttactatcctcactaaaagacctcaattatgtggaatcagtctatctgaaaatcttaaacccaccatgaagttctttgaatctttgggtgttgacaaaaaccaatggccaaaggtgatctatcgcttcccagcactgctaacttatagcaggccgaaagtgatggaaagcatagattttctccttgaattaggcctctcagaagagagtataggtaagattttaactcgctgccccaacattgttagttacagcgtataggacaatcttcgacccacgctaagtactttcattcttgggg

SEQ ID NO: 2737 - DNA, 567 bp, Glycine max
  unsure (1)..(567): unsure at all n locations
  Clone ID: jC-gmfl02220051h01d1
gcatgtaataaaggtatcatagcatatagcatagcataggtatttcatacattgttcttttgaggagcacatgcagcaattcagtcttactacatgattctctttatttagaaaacaaagttttaccaattaaacaaactgatcagctaggctttgcaccttagacaaactgattaaggtactcatccacagtgatgtatttcacatcaggatatagagctgaagcttccactccaaaagaagactcaatttcaaagttagtatgatccccctttacataagaagagtggttaattgacaggatcacattcacgggtggtgcggactcttcaatttgcttcaggagttgttcttctggaacatagattctttcaagagttttaccaatctttccctcccagagagtaacaagctcattaaacgacaaggtattagctggtggtctaatgtagagaattttgttcaaggttcttggatcatccacagaattgattgtataagttccaatatcctcttccttggtaaaacagctttgggggtttcatctnctaggataataactctgtc

SEQ ID NO: 2738 - DNA, 561 bp, Glycine max
  unsure (1)..(561): unsure at all n locations
  Clone ID: jC-gmfl02220051h02a1
ncttcggctcgagagagaatcagaatcacttgtcctcctcttccactataaatacgctcacaagtcacaattctccctcatctcacaatggtttctcattactatcttgcctctcttcttctgctactgctgctcaacccacacaccaccctgggagcgcaaaaccttatgctaccctaccataacggcgccctcctcaaaggaaccattaccgttaacctcttatggtacggcagcttcaccccaatccaacgctccataatcctcgacttcattaactcgttaagttccaccgcgggggccccacttccctccgtagcatcgtggtggaagaccacggacaagtacagggggggatccactacaatcgtcctagggaaacaaatcctagaacaaacttattccctcggaaactacctcaacggaacacaactagtctctctctcctcacgcttcgaccacctcaacgccatcaacgtcgttctcacatctagcgacgtangggttgacggcttctgcaggagccgatgtgggacccacgggtccattactaacgggcag

SEQ ID NO: 2739 - DNA, 323 bp, Glycine max
  Clone ID: jC-gmfl02220051h02d1
ggggcccccaaaaaaaacccccccccttttctctggcgcaaaaaaaaaatggggggaaaaacagggtccccccggaggggcccccccttaaaaaaccccccaaaaaaaaaaacccccaaaaccaaaaaacccaaaaagggggccccttcaaaaaaacccccccccccctttttttgcggcgcgcacttggtgcaccccactaaaaccccccaaaaaaaatagatacgtgcgccaaaaaacccccccgtgaagcgctccaaaaaaagcccccccccccacgggggcccaaccaccccctccgggaaaaacccaccctctggggg

SEQ ID NO: 2740 - DNA, 514 bp, Glycine max
  Clone ID: jC-gmfl02220051h03a1
tttggtcatatgttagggaagaggcttctcatggaaggaaagcacctattgatcctttcactcgagaaagttgcaagccatctgcatctcaaggagtcccactcggagggatggggagtggcagcatatcaagaggatttaaaagtgagttccgacaatggcaaattattcctagcttatgtgaagcgtcaccagtcatggccaatcagttctctatttttataagtagagagggaggaaacaaaaattttgcatcagttttggctcctggccagcatgaaggtttaggatctagcaggaaacctgatgatcagggcatatcatcatggggttggaatctaagtggccagcactcaacctaccacgctttgtttccaagagcttggacagtttatgatggtgagccagacccagaactaaaaatatcgtgtcggcagatatcaccattcgtacccacataatatagagaaagcagtctaccagctgctggttttgttatacgttggtgaacact

SEQ ID NO: 2741 - DNA, 544 bp, Glycine max
  Clone ID: jC-gmfl02220051h04a1
tttttatattaaatattttaatttatattcttaattaacgaaggcattatgacaactaattttgtgtgtgtgaatttatagatacgttacccaagcatatgctatcaggttcaagtcatatgttaatatttaaaattaagatattaagacggttaagaaagaaagcaattactactaggaattaaaataactcaaaatcaagacaagtaaaacttgtggactgcatgcaggttttttttcgtatatatagattgcatattatttatgtacttgtacaccaaaagcataattatctagactttatattattaaaaaaagtaatagtatgcaaggaagaatttaattttaaatgaattgaagagatattttcctgacaagattaaaaagattaaattaaaaatatttttttggcaaaaatttctaatcattttaaatttttttctttctttcttactctcaagtttataggtgagaatggattacgtgatcgttgtacattccattgttcaagtaagtgtggttttttatttaagtgtcgaaattt

SEQ ID NO: 2742 - DNA, 520 bp, Glycine max
  Clone ID: jC-gmfl02220051h04d1
gaattgtgtttattataaataagaattaattaataatacatggtgtctgatgtacgtaacagaaggtaaaagtaatagatgcatgcatgtaactttggaatgactgagttcagtcatcaattatcataggtgcggcactcatcagtctctggattgtccttgcagtaattttcgagcgggtcagactgcttctgcttctccctggcgtggctcgccgccgcgctcagctcctccacctcgtcccaggccgtcgcgcattccgcgtcaccgccgtctcccgagcacgcctcctccgcgctctttatgctctcctctaccttctccgatatcttctccggcgtcgcccgaacgggccgggtcttcaccaaaccaggccacttttgaatgggcctcgacagagctggaaacctcacggcctgggccttttgtgctgagtctattcccttagcattagcaaataccctggtaaggcgttgaaagacttacaccaccagctattgtacccatctttcttcatttt

SEQ ID NO: 2743 - DNA, 609 bp, Glycine max
  Clone ID: jC-gmfl02220051h05a1
gtttatgttcagtgaaaaggctggcttgatgccactcccattggtagatgtcacatgaatactcagtactatcagtgccaacatttccatctttcttcttccagcctttgctttgtcttggttggtatagaagtgacaatccaaccgcactcttaacgtggataatgatttcatttttgaatattgataacctagtcccctggagtagtgttaatattctttttggcagtgaacacacagtccactgtcaagttacctagttaatgaagtgaagggttataatttgatccaaaggaatctgccaaggtgcagatgatgtggagtttttatgttcttccttttggtaagtttcagttcttggaggagtcaaatgctgaactgcgttttaaggttggagtgtctattgattggatcagtatagttggatttggttcagagagttcttcaaggattcaagtgaccattcaatgctattggtttctatttactgcttgaggctgtcaagtccccagtgccaccttataagtatattgtggattctcgtatatacactagttttgatgtgttctcctcttggagtaatgctgattgagctgcattaatcgattt

SEQ ID NO: 2744 - DNA, 441 bp, Glycine max
  Clone ID: jC-gmfl02220051h05d1
aaaaggaaaaggcaccaaattcaatttaagtggacactgtaactcaaaattatagaggaagacggtccaatatgaaaaatatagtaagatcatctcaaacttagcatcttctctttgcacctaagacattgagaatgctaagaatgttacacgcaagttccatcacaacttctagcacttggattagtacaacaaccttcacgaacagaaatatttacttgccaagtttgctttgcctccaattcaagactggaagaaagttcccctctgaatagcatcctcgttagcatttccaagagcagcctcgttcaagtacttgtcagccaattggactctcttgacattctcttgttcttggacaagcatgttaccatacagcaagagcttctccagagtcatcttgggctgctcaaaggttggaggtccatcttttgagttcac

SEQ ID NO: 2745 - DNA, 597 bp, Glycine max
  Clone ID: jC-gmfl02220051h06a1
ggcatgaccattcaaatgtcttcttttctcttagcttctcttgctgttttctttttcttctcctccttggagaagagttttgcctttcaagcagcaagaaaggaggacacagaaagcaacaatcttcatcaatatactcatcttggtcacctcagctcactccttccttcatcttcttgcagctcttctaccaaaggtcccaaaacaaaagcatcattagaagtggtacacaaacatgggccatgctcccaactaaatgatcatgatggcaaagctaagtctacaacaccacacagtgacattctgaaccaagacaaagaaagggtgaagtacattaactcaaggctctctaagaacttgggccaagatagtagtgttgaggaattggactcagctaccctaccagccaaatctggtagccttattgggtcttgaaattactttgtggttgtgggtcttgcgacacccagagggacttgtcactcattttgacactggcagtgatctacttggactcagtgtgaaccttgtgctcgtcttgctacagcagcaagatgaatatttgatccatcccgtctacatatattcaatttacat

SEQ ID NO: 2746 - DNA, 311 bp, Glycine max
  Clone ID: jC-gmfl02220051h06d1
attgaattccttagaaaacgaaatatacaaattacgaccacgggcatgcgaacccctaaagtgactaaacggccaacaaaaatcatgcaacggggcgctgatgaaaaaacgagcgaaggggaaaaccaaggggcacccgaacgggaccacccgagccgcagccaccgtcttgggagcggacgcgaacccaaagaggcccggcccaaccgcccttaaaagaagcacgccccgcccgaggggcacagggggcccccccagctgggggagattaaacccgaccattgggggcgagtcccctggggggaacccga

SEQ ID NO: 2747 - DNA, 524 bp, Glycine max
  Clone ID: jC-gmfl02220051h07a1
ggaaaattactatgattctggctggcacatgggcaccagcaactgggctcaatgcagtgatcattcttcttcttcttcctttgcagtgcctacacaacaaatactccctcatcatgtcactgacgctgcctctcttcaatttggtgagtttcactcatggtcacttcccattgaaggggctgcagaagagagagcaataagtgcttccaagagtcacaggcaagctgagaaaaggcgcagagacaggatcaatgcacagcttgcaactcttagaaaacttattcccaagtctgataagatggacaaggcagctttactagggagtgtgatagaccaagtgaaagatctaaagcgaaaagccatggatgttagcagagccttcacagttccaactgaaatcgatgaagtatcaattcatcatgaccatgttcttcaagatgaaagctgcactgtaaaagtgaacaaattgaaggacaatattgtgatcaaggcttttgtttgctgcgatgatcgaccagaacttt

SEQ ID NO: 2748 - DNA, 284 bp, Glycine max
  Clone ID: jC-gmfl02220051h07d1
gatcgccacccttacggcatagggatttgacatcttatataaccagaaaaaatgcgatatattttctgtgaccacatccatagacaccagttgctaacaccagcccgactagaaactatacgccataagccagggattgaacaaaccaacataaaggcttacaaaaggaactttgcttaaatagaaacaacaggctgccagcaccaaaagctagttctatggcccaatatccctcacggcgcaaatctgctcctcacccatagcagacatgacagacacaacaa

SEQ ID NO: 2749 - DNA, 596 bp, Glycine max
  Clone ID: jC-gmfl02220051h08a1
tccgcgaggagagagaaagtgcaagaattggaagagagagagagagagaggtttggtttgtgatgtggtagctttgaagatctagttcactgttgctcattttagtgtgtatctaatcgaagacgagggggttccgatgtcttctctcagtagggaattggtgttcctgatcttgcagtttctcgatgaggaaaagttcaaggagactgtgcacaagcttgagcaggagtcagggtttttctttaacatgaaatattttgaggatgaagtgcacaatggcaattgggatgaggtggagaaatacctctttggtttcacaaaggtggatgataataggtattccatgaagatattttttgagataaggaagcagaagtatctggaggctttagataagcatgaccggtccaaggctgtagaaatattagtgaaggatttgaaagtgtttgctacatttaatgaagaattgttcaaggaaatcacacagcttcttacattggaaaatttcacggaaaatgagcaattgtctaagtatggtgatacaaaatctgcacgagcaatcatgttggttgagcttaaaagctaattgaagcgaa

SEQ ID NO: 2750 - DNA, 399 bp, Glycine max
  Clone ID: jC-gmfl02220051h08d1
tttctttttttttttttggtctttttgattttttttttttttacattttcgttttggtgcactacaaacgcctacatacaggtgcagtagataaatctctaaaatataccaaacataacacacaggaaaatagcgcctaagaccctaacagacacgacacgtaagggagacgtaaaggacacatcaatgctactatcagacatatacccctcaacacgatctcaccacgggctgctggcgaaccggacgaccaagcgcaggagggccaatctctagcccaggatcatactacgggccgagactacaaacaaacccacccccctaggcaacgcagcatcctgtagccccagaacctcgacactctcgaaccactaatcaaacgaagcgcacagcccaaag

SEQ ID NO: 2751 - DNA, 566 bp, Glycine max
  Clone ID: jC-gmfl02220051h09a1
cgtatttgttgtttcagtgctgtgatggggaaggtcgcggtgggagctgcggttgtctgcgccgccgccgtctgcgctacggcggcactggtggtgcgccaccgcatgattagttcccggaagtggagtcgcgccatggcgatactgaaggagtttgaggacaagtgtgggaccccaattgtgaagcttagacaagtggctgatgccatggatgttgagatgcacgcaggtctcgcatctgaaggtggtagcaagctcaatatgttgatcagttttgtcgataatctcccaactggggatgaggaaggactctattatgcactggatcttggaggcacaaacttccgtgtccttcgtgtacatttaggcgggaaagacaaaggtgttatcggccaggagtttgaagaagtttcaattcctccaaatttgatgactggctcttcagaagcattgtttgattttatagcagcagctcttgcaagtttgttggttcagaacctgaaggttttcatcctccccctggcagacaaagagaactgggtttacattctattcccaatgaggca

SEQ ID NO: 2752 - DNA, 459 bp, Glycine max
  Clone ID: jC-gmfl02220051h09d1
agcaactaaaatagtactatcatacgagttatagtgtgattatacatatgatgtgcaaacaaatcaatcaaatttcaaatacacactatacataatcaacatttagatacgcatgccttactgcatcataattctgaattcttcaatgcttagcacaccattcccattcaaattaaactgtttgatcatggctttgcactcatcaatggacttggactctcccatcttcttaagcatacttttcaagctcttgggggttataaacccacaccctttagtgtcatacatctcaaaagccaccttcaagtcattcaacttctgatcctctcccccagcttccataagagcaatcaaatccttcaaactcagcaacccatcttcatcagaatccaatgccgtaattgccatttcagatttcttcatcaaaagctccccacccattattcgaagcccgtgctt

SEQ ID NO: 2753 - DNA, 611 bp, Glycine max
  Clone ID: jC-gmfl02220051h10a1
cggagacgttcacttcgacgacgtcgccgcaaagccttgcggcgttcacttccgcggcgaaacgcggcgaggcgcgctccgagccaccgtgaatctccgaaagccgaaaacgttgagcggtattctgaatttcgggtgttccacatcggatgcaagttggaggagctggaatccgagttcgctccacaggaactcgtccttcgcttgctgctccgccgagacaacgccgcatgttcagcacctcgcaacctccaccttctcgattgaccagactaattttggtggcgagaggttgaagctgttttcggggtcatgttacctaccacatccggataaggaggacacaggtggagaggatgcacattttatttgcacagatgaacaagcaattggtgttgcagatggtgtaagtggctgggcagatgttggtgttaatgctggactctttgctcgagaactcatgtctcattctgttagagcaattgaagaggaacccaaaaattctattaatccggctagggttttagagaaagctcactcatgtacaaaggccaagggttcatcaacagcttggatcattacccttactgacacgggactacatgccatta

SEQ ID NO: 2754 - DNA, 465 bp, Glycine max
  Clone ID: jC-gmfl02220051h10d1
agaataataaaaataattagaagcatgaatttcacttaatagtaatttaactagaatacttatcaattgagacccaaaaaaatagaaacacttttagccaaattgctaagctaaaacaaacacgaactctaacactcgggggccctattccaactagtggcgccccaacaaattacactaccccactccaaatcaacatataagaaaaagaaccattattctatccctttgaatgtggctcatcgtgcactccaaattcaaattcccacgtgcacatccacgtacccaatggacacacatgcattttcacagccttcacgaatcacaacaacatcaagagaactcaagtgaaggcttttgacgaaaccaatgaataatcgtggccacttgctcagcctcatgtttgtcgtgtattgtaggatttgcagttcggacacttttgagccacaaaatggaactgaacgt

SEQ ID NO: 2755 - DNA, 556 bp, Glycine max
  Clone ID: jC-gmfl02220051h11a1
cttgcggcagcgcaggtgtccctattacctgacttcttaattctcccgcttcttcttcttcttcttcttccgtccagtgcttgttctcttctcaagatagaatagaagggttgttcgattcgatgacgactcgaattgcgcccggtgtgggaacccaatttgctgggtcaacacgccgccgagaggaatcaagacgccactgcttatgtcggcaatctcgaccctcagataagtgaggagttgttatgggaattgtttgttcaggctggtccagttgttaatgtctatgttccaaaggatagagtcaccaaccaacatcagggttatggatttgttgaattccgcagtgaagaagatgctgactatgccatcaaggtgcttaacatgattaagctttatggcaaacccatccgtgtcaataaggcatcccaagataaaaagagcttggatgttggggcaaatcttttcattggcaatctagatcctgatgtagatgacaaccttaaccaaattcaggacttatacatgagtgtcaccaaattatacccggagtcgt

SEQ ID NO: 2756 - DNA, 347 bp, Glycine max
  Clone ID: jC-gmfl02220051h11d1
gtcacagcattcaaagaatcttccaactcctttcctctttcattagccgcttgcagtgtagtttcgagggttgaggctcgtgcttgaattgcctcaagttctgatgtcagattagatacatcatcaaggtatttattggcctgcgcttctgaagcgttacgcttctcatctaatgtgcttatttgttgttcaagttcctgaattctgtatttctctgcttctagtaacaactccaactcactcacctttttatcagtatcttccaatttggagtgagaactctggattaaatcttccagttctcggctacgctgatggttcatactggctcggtctttatgctcagc

SEQ ID NO: 2757 - DNA, 594 bp, Glycine max
  Clone ID: jC-gmfl02220051h12a1
ggctatctcatcttaccacttccaggttttgcaaaggcttcagagcttgaacaacttcactcatcataggtctggagcctttgcaaaaccttaaagatatggctatctcatcttaccacttccaggttgcgcgagtagatcgtactatggccatgcctaaaaatggtatgcaagcacagttagcatctttatcaaggaagggtcaaccagtgaggatcttgtcaagtccaaaaggtcctcatggttctccatatcatcactatatcaagtcaccgaaacctaatggataagaatcatgtttctctctttgatttgcttctctattcattcagttccctcacaacttaggctatcaacagaacagaaactgtttgtgttttgaaaattgctctgaaacatgaggaattactagagttttctgaccttatctcatctcaaataaggttggggggaccatgagacagttcactggattttaaagtttagcggtgaccaagttgaccaaacttgaatagaaaactagaacacagttttcacatgtggaatttggtactgtggagttgctatactttttctaccatttcacatgctttc

SEQ ID NO: 2758 - DNA, 461 bp, Glycine max
  Clone ID: jC-gmfl02220051h12d1
ggcaaaatctaaaaaagtagattatgatagtgaagaaacaacataatacaaccataactctactcatctaacaaaacaggaaatcacatcctcctcatagaatgactactacaattatatttgtgaggaaggttatctaaatctatacagggatactgctagctgagaatcttcgttttgctatcaaaaactgccattcccattttcagtgaattgcccaaatctgtgaagaaatttattgccggtatggtacgacggaacattgagcaagatactcaattgaccatcaccgtaaggcattcacgaatgccgtcaatgaatcaacatctctcttttctgaagggtacttaattggttgagaagagtgcttggggaagagaagtattgtggggaagcttcccaactgcagttcactctttgcatattccttctgctctccatcggctctgaattttgcaacc

SEQ ID NO: 2759 - DNA, 523 bp, Glycine max
  Clone ID: jC-gmfl02220052a01a1
agcagcccttgcaatctcaatcttctcttctttgttcaggatacccatttcgctaatcttctcaactggccctttcttgttccaaagtttcaagctcttctctctcacccgttgcgggtggtggtgaatggtctaaaaactctcactttcgcttccgttactatgagaaatcctaataagcgtgatcatggactcaataacttgcaggtgcctgctgctgctgtaaacgcaccagatccactcgctggggtcatatttgaacccttgcaagagctaaagaaggaatatcttgctgtcccaattgcacacaaagagtgcttggctcggccgatctatgctgacgagttcgaatctgcaatcaacgagcagatcaatgtggaatacagcgtttgctatgtgtaccattccttgcatgcgtacttcgacagagacaacatagctctcaagggacttgccaagttcttcaaggaatcacgtgaagaagagagagagcatgctgagaagcttatacagtatcagaaca

SEQ ID NO: 2760 - DNA, 288 bp, Glycine max
  Clone ID: jC-gmfl02220052a01d1
gataaatataaattgattcaatacgtgaaacactgcctgtacaaagcacatcaatttgtgccgcctaccaatatgtcccatcacataaatgattgcgtgacattaatactacggtcatcatcccgcgggctacgtgctcagactcacaggcgtgggccataaggctaaccgggcatgactaccggggaactaatctactatgcccgcacctgtattgaatggcacaaggatgtacttatgctcaagctttacgccaggatcgcaacgtcctatactactacaccatgc

SEQ ID NO: 2761 - DNA, 566 bp, Glycine max
  Clone ID: jC-gmfl02220052a02a1
cgactgcggctatgtgattacaagaatgctgcacctcatgtagacaatctggatgctgccatgaagattgatatgcagcaaacacaacgtatacaagagctagtgaaggagctcaatactttagaccaaagtctctcccgatctgaccttcactacagggataggacagcattatctaaaaagcaaactatgattcaggagcaactgcaaaacatgactggattgagttcaattgggcaggaatcactgcaaccagtatattttgggaatgtcagaaggataataggagataagcttcagttagcacctgctcctattgatggtgaatggctttctaaaagtgctgtctatgcattagttgatctaatagtagttgtgtttgggcgcccaaaaggactttttaaggagtgtgcaaaacgcatacagtctgggatgaatataatccaagatgagttactgaagcttggaattactgatggtgttagagaagtggatttacaacactcttctatttggatggctggtgtgtacttaatgctactaatttagttttttgaaaacaaagt

SEQ ID NO: 2762 - DNA, 262 bp, Glycine max
  Clone ID: jC-gmfl02220052a02d1
attaataaaatggggaaaagattacatgtataaagcataaaagtttgtaaaacaattcaaaaagtcccatcacaaacaacatagaagggcacttaatactccagacaaccacccacttgaaacaggtggacatacttacaaacctaggcaataagcaaaaccggaattgtcttcgggggaactaatgaacaagaactacatactggattgataaggaaaaggctttacagaggtgtaccccagctgcccggatcactgggtc

SEQ ID NO: 2763 - DNA, 543 bp, Glycine max
  unsure (1)..(543): unsure at all n locations
  Clone ID: jC-gmfl02220052a03a1
ctagctattcattaattattagctcataatggaagtggaaagaatacaaaccttgtctttgaaccagctcaaggagcttccaccccagttcatccgtccagccaatgaaaggccagagaacaccaaagccatagaaggtgtcattgtgcctctcatctcactgtctcagtcacatcatcttttggtgaaggaaatagctgaagctgcttctgagtggggatttttcgtcataaccgaccatggtatgtcacaaacattgatccaacgtttgcaagaggttggtaaggagttctttgccctccctcaagaagagaaagaggcttatgcaaatgactcttccgaaggtaagtttgagggatatggcacaaaaatgaccaaaaaccttgaagaaaaggtggagtgggttgattatttttttcatctaatggctcctccttctaaggtcaactatgacatgtggccgaaacacccttcttcctacagggaagtgacacangaatacaacaaggagatgttaaaggtaacaaacaaggttttggagct

SEQ ID NO: 2764 - DNA, 452 bp, Glycine max
  Clone ID: jC-gmfl02220052a03d1
agataagatttttttttttacagcattagatatgaattatttattctacactgttcggcatcaatacaatttgattccttttatcatgtcagcacctcaaccgatgatgatctcaccaattatatttcagcaataaaaaaaaagcctaataaaatatttttttttcataaatttattctaaaatctaaaaatgtcatggaggggctgtggcatatcctacatgcaaatatgcttcctcttacattcttactcatcgcttctatcataaataggacacaccctcctaatttcgttgttcctatcataaataggacttttctcaagtagaaggaggaacttcccaattctttggcacaggcccaaaatcatagattatttctctgtggcaagaccatacaagttttatagcctctggtgttccaattcctgcacctctagcatcaccagcgggt

SEQ ID NO: 2765 - DNA, 567 bp, Glycine max
  Clone ID: jC-gmfl02220052a04a1
gtagcaatcagagactgaagacgagcttccccttgcgccgaagggccaccgatggttgaaaccgagatggatgcagaaactgttgcaaatgtggttccaccaaaggagactccaaatagtgtttccatttctcatcattcctcacaccctcccttaatgagaggattatttcatccatgaccaggagatctgttgctgcacacccatggcatgaccttgagataggacctggtgctccaattatcttcaattgtgtgattgagattgggaaagggagcaaggtgaaatatgaactggacaaaaagtcggggcttatcaagatcgaccgcgtgctttactcatcagttgtttatcctcacaactatgggtttatccctcgtactatttgtgaggacagtgatcccctggatgtcttgattattatgcaggagccggttcttccaagttgctttcttcgggccaaagcaattggtctcatgcccatgattgatcaaggggagaaagatgataaaattattgctgtctgtgctgatgatcctgagtttagacattacaatgatttcaaag

SEQ ID NO: 2766 - DNA, 347 bp, Glycine max
  Clone ID: jC-gmfl02220052a04d1
atagattatatttttttttacatcattagatctgaattatgaataatgcactgtgctgcattaatacaatccgaaggctttaaaaatgtcaacaccttaacccctgatgaacacccccttgatacttcagcgatacaaagaacttctaacaggttctttaatgtttattacgcccttttaaaatgtaaatacgacctggagggcatgcggcatggcctacgtgacactctgctctctgacacattcttacccatggctgctatcgtaacacggacccacactgctactattgctggcgccattatacattggactatcgtcatgttcacggacgtacttgccaattc

SEQ ID NO: 2767 - DNA, 569 bp, Glycine max
  Clone ID: jC-gmfl02220052a05a1
atttgatacctaatgatcattgcttaactttgttacccttggtggactcttccaataaagactacacagaatgtgaaggtgggatgatcaatgcttctgatgtagctgagaaggaggacttacaagatggagttttgatgaacaatgacccagtttctgctgctttggatcaaactattacaaattgtgttgtttctgctcctttgatgaacaatgaaaatgttgcttcttctggttgttctcatgttacttctgatcaagaggacctctcatgtaaaccgttgtctaacatggatggatcttggggtccaggatttgatggtcgtttggaggatggtaacacattatcaaagcatgaagttctgaatggcattgaaatttccaagagtgaggggcaattctgtccatttgacgatgctcgagtatccaatgttattagtcctctacgatcacctggtagacctgaagttgttgatgaggaagcttaagcctttcaagaactgaaggaagcagagactttaaaccatgtatctcttgaagctgtgcagcccgctgaatcaatcctttag

SEQ ID NO: 2768 - DNA, 425 bp, Glycine max
  Clone ID: jC-gmfl02220052a05d1
atattgatacatattgaagttcacaacttatagcaaaaggtttattaagctgtaaaggtgcatttaaccataaacaaaaattgtctccaagactttaaaaacattacattatagacaaattagtcttccacttcatcgtccgtcaacacctactgtaactgctggtgttgctgcctaacaagtatcatattcactgcaaacatcttagtaggagtagcttttgacgaacaactccttcttggcttcctcggattcaccctcaccagtgtacttcccaagctgagcgagtgagttggacttggcacggaatgcgagtgcatcttgagctgccttcacgttctctgggcggcctccccatgtctgcaaggcaatgtttaggagggctctggcatacgagaatgacacgtgccacgggtttggagatt

SEQ ID NO: 2769 - DNA, 557 bp, Glycine max
  Clone ID: jC-gmfl02220052a06a1
gaattcagcaacaagggtaagacactagtctttcaattttctgttaagcacgaacagaagcttgactgtggtggtggctacatgaagttgctcagtggggatgttgatcagaagaaatttggcggggatactccttacagtatttatggttgggcccatatatctgcggttacagtaccaagaaagttcacgctattcttacctacaataacacaaaccacttgataaagaaggatgttccttgtgagactgaccaacttactcatgtttacacatttatcctccgtccggatgcaacctacagcatcctgattgataatgtggagaagcaaactggtagtctctactctgattgggatcttctccctccaaagacaatcaaggatcctgaggctaaaaaaccagaagattgggatgacaaagaatattttcctgatcctgaagataagaaaccagaggggtatgatgacatcccaaaagagctcccagaccccgaagccaagaagcctgaagattgggatgatgaggaagatggtgagtggacaccccctaccatt

SEQ ID NO: 2770 - DNA, 510 bp, Glycine max
  Clone ID: jC-gmfl02220052a07a1
ctttgcaccatactcagtgtttaacaaactactccttgtttatgcctctttatgactacatgctatggcaccacagacaaagcttacgataaattacacgagtcagcattaaaacaagaggaagaaatccctaatgttgtacacctaacacatctcacgacccctgaatccatatatcatctcaggcttggatttgcttacttggcttctaagccttacacgtcaaaatggtacctttgtttgatgtggccagtaacagcttggtccatgatcctcacatgggtttatggccgtacatttattgaggaggggaatcgttttgacaaactgaagttgcaaacttgggcaatacccaagtacagtctccaatacttcatgcaatcacaaaaagtggctatcaacacaatgatagaggaagcaatactcgatgctgacagaaaaggcatataagttttgagcttaggcctaaggaatcaaggagaggacctttacatctatggaggactatat

SEQ ID NO: 2771 - DNA, 565 bp, Glycine max
  Clone ID: jC-gmfl02220052a07d1
gatcaatgatatttgtataattcacaaaatttatattgtaaattttttcttagttggacttagacctttcaacaatagacctaacatccaccttgattatcaacaccaattgtatttaccatgccttgtcatctaacaataaccttccaaatcctgctatccaaaaaaatgtggggttttaggaaaagcaattatgtgtcatttttgtgatgaccatgacctggctgaaaatttgtgtcacccctttaaacgaaagttttatttgctagtgttagcagccttgtacattcttggttaacgacgataataaggaagattttccgacttcatcttctttgatcatccgattcttgggattcaacattgttggggggatattatgcaaccccataagtcctctgttagatgatttaatttcaatctgtgtagagaaaagtgctgaaacggggcgatgatcagagaacttgctttcactccgaaaatagtgaagttgctccactcctttaccataccatagaattctatcacaccatgctggagatcttagatttttcccggatctact

SEQ ID NO: 2772 - DNA, 559 bp, Glycine max
  Clone ID: jC-gmfl02220052a08a1
tccgtatcgtagcaaaacgcacgagttaggggcggcgatgggaggttcatcggaggatttctcggtggtggtgctggcgtcggacctcggcgtcgatgcgcgacctttcctcgaacacgatcaacagcaagaagaagagaattggcacgactgttcccagtacctctcccccgacgaggacttctccgatctcgatcagttgcaattcctccgcctccaaggctccgacaagaactccaatcgcattctccgcatcgtcggcaagtactttcccgcaactgttgtgagtgcggagcggctcaagcggtatgtgttcaacaaaatttgcagtgagttgcctgaggggcccttctgtattgcttacatgcacagcaccgttcagaaggaggataattcccctggcatcaccatcttgaggtggatctatgaagaacttcctgctgatttcaaggacaggcttcagactgtgtatttcgtccaccctggctttcggtcccggctagtcatcgctactcttggccgcttattctagagtggagggtaactcatctatcaatgc

SEQ ID NO: 2773 - DNA, 369 bp, Glycine max
  Clone ID: jC-gmfl02220052a08d1
tgatcgatcggtattcccggtacatcagctactcctcgtcggacgaccctttattttcaatttcatatatgaacattgttgcctccttatttcttgaatatgtggaattggaatgccccgaggaattccgatctcattcactttggcttcaggataggcctactaagaaaacaaataattccccttcatatatgaacatttttgcctccttattactcgccaatgtggaattggaattccccgaggaatcccgaactcatttcctttggcttcaggatacgcctaataagataacaaataattccaattcatatatgaacatttgtgcctccttatttcttgaaaatgtggaattggaactccccgaag

SEQ ID NO: 2774 - DNA, 568 bp, Glycine max
  Clone ID: jC-gmfl02220052a09a1
atggcgaagcgaaacgctgtcgttgcggcactcgcggcgttggtgctactcgcggcgagtgtggcggtggatgctcaggagaactcggacgtgaagacgctggtgaagtacaagcacgggaagaagtactgcgacaaaggatgggaatgtaagggctggtcaatttactgttgtaacctcaccattaccgattatttccagacctaccagttcgagaatctgttctccaagcggaactcgccggtggcgcacgcggtcggattttgggactaccactccttcatcgccgccgccgcgctttttgagccggaagggttcggcaccaccgggaacaagacgatgcagatgatggagatcgccgccttcttcggacacgtcggcagcaagacctcttgtggttatggagtggccactggaagacctttggcctggggtctttgttacaatcatgaaatgagtcctatgcagtcatactgtgatgactactttaaactcacatacccctgtactcctggtgctgactactatggacgtggagccatttccattttctggaactacaactatg

SEQ ID NO: 2775 - DNA, 383 bp, Glycine max
  Clone ID: jC-gmfl02220052a09d1
aaatgaaaattcgtatagaaatatgcgggaagctttaaaattagcttttggattaaacatgggaatccaggggaacatttttagccttcaaagggtcatagccctcatacccttccaagggatttgacaaagcaaacttggcaacaaactcggggggggaggacctgcaaacaaaatacctcacagttgggataaccagcctcagcaagaacaaatgggaccgccgcaagaaaccccccatcccaaacactggtttggccaccgaccccaaaccgaacacctttcattcggttacccccccctttgagaacaaaaactgggttaaaaaaaacaagaagttgggctttaaaacaatttttacgggcagacccatttttcccttt

SEQ ID NO: 2776 - DNA, 568 bp, Glycine max
  Clone ID: jC-gmfl02220052a10a1
atggcgaaccgaaacgctgtcagagcggaagtcgcggattgggtgctactaacggttagtgcggcactgaatgctaaagagcaacttggacgtatatgactctggttaagtgcaagcacagcaagaatgactgggactcaggatgtgaatgtaacggctgatcagatttactgtgggacctgagcattacctgatattatcatacctaccagtgggagaatctggtctccaagcggtactcgacggtggcgcacgcggtcagattttgggactaccactccttcattgccgtcgacgagctttttgagccggaagggttcagcaccaccgggaacaagacgaagcatatgatggagatcgccgtcttcttcggacacgtcggcaacaagacctcttgtggatatggaatggccactggaggacctttggcctgtggtctttgctacaatcatgaaatgagtcctatgcagacatactgtgatgactacttcaactcacatacccctggactcctggtgctgactactatggacgtggagcctttcccatgttttggaactacaactat

SEQ ID NO: 2777 - DNA, 529 bp, Glycine max
  Clone ID: jC-gmfl02220052a10d1
aaatggataactcgcgtaataagtcttaatagatagtggaacataaccgcgtagacaagtttgtatttacatgctcagatgtggaccttaagcttcgcccaattaaacgaaaaatatgttacacgcaaatgttgcagccataaacactagagatatacacatacaaaaagctgaaactgacaggaactactttcaagaagacctgaatgaaactgaatctccatgaataagagaaggcagaaaaaatctgcttattgtattctcacactatttgcatcaggtatcttccatgcaaaagtagaaacaaatccatgtagcagcaaaatgttgtgtacaacaactcacgtgatcaacatatcttgcattaagtgatatccaattggatttctatggcatgccatgatgccaaaagatagctttttgcaaatcataatatgggcttcactaagtctatccacccaacatagtaaaacaagaacagaagctatgagacaacagagaactgcttctgttgcttcgcatcataaca

SEQ ID NO: 2778 - DNA, 552 bp, Glycine max
  Clone ID: jC-gmfl02220052a11a1
aaatcttaaaaatattcagtgaagatcaacctcaatggcatctcttggcgtgcgaccagttcttccccctccattaacttccatctccgacccacctcctcttttcgatggcaccaccaggttgtacatcagttattcttgcccctatgcacaacgtgtgtggatcgctaggaactacaaggggctacaagataagatcaattcggtccctattaaccttcaagacaggccagcttggtataaggagaaagtctaccctgaaaataaggtgccatccttggagcacaatggcaaggtgttgggagaaagtcttgatttgatcaaatatgtagatgcaaactttgaagggacacctttgcttcccagtgatcctgccaagaaagagttcggtgagcaattgatatcccatgttgatacattcagcaaagacctgttcgtttcatttgacggggatgctgtacagcacgccagtcccgcttttgaatacttggagaatgctcttggtaatttgatgatgggccattcttgcttggccaattcagttggtgatat

SEQ ID NO: 2779 - DNA, 381 bp, Glycine max
  Clone ID: jC-gmfl02220052a11d1
aagaaatcaattatgaacttgaacctttatttgttcaccggggttggagttcaaaactgcacaaaggagacttgatctcaaaaaatgagaaaaggaaaacaaaaatcacatttaaaggatgctcttcttttcactggtgggggctcttttcaataatagctattaacttcagggatcaatgccttcaattttggcttccacttctgaatacaactggctgagcttctcaatattatcttctgaaggttcccaaaaaccacgtccattggcttccaagaatgtctgcaccagtttcctgaaggagtttggattaatgctcatgagcttgttcagaatttgctcattttgaatgaaaactgtgttggcttttttataccccca

SEQ ID NO: 2780 - DNA, 408 bp, Glycine max
  Clone ID: jC-gmfl02220052a12a1
ttgacattccagatgtaccaatggaggaggattaatttattgtggttttacattgtggagtgttttctgttagaggcagtagcagtaacaattggctacacggggactaaataaaacttctttgtccctgaacgaaagttgtccatccaattttttagggataatttcataatgtctcccttttttgttcgatatgtatgaaaccctgttgggcatgctaaatgccctgttctctttgggctctctgttgcaaaccatctgacacagacttgggtgtatttctggccaactcacaggctataacctttgacactctggcacactgttgtatggtctgtattatgttcacgtcaaagagatcttttatattactgactaaaaaaaaaaaattatttctacattaataat

SEQ ID NO: 2781 - DNA, 386 bp, Glycine max
  Clone ID: jC-gmfl02220052a12d1
aaatcacaaaagcaccaacattatataatatttttgcaagaacattatatagtcactgaattgatcgaccaggaaacaacagaaggaattcagcatttctaaagtttaccactccctaatggtggtcaaaagcaccaacatgctcatttcatttcctaaacgttgtgcttcatatctccccaagataaatctgcttgtcactgctgcaagatccaataataggctcattgggatgaaaaacacactcattaacagatccattgtgaccgggaagcttatacaagatgcggcgagaagtggtatcccagatgtaaaccattcgatcagaactaccagctgttaccttgcttccatcaggagaccaaccacacttcaacaagttcttt

SEQ ID NO: 2782 - DNA, 539 bp, Glycine max
  Clone ID: jC-gmfl02220052b01a1
cgcgatttcaagccaaagaacaaggatcagaatcgtttaatcaagttgaggaagatggcactagtctccggaggaagatcaacactgaaccctaacgcccctctttacattcccgccgcgttccgccaagtggaggatttttctccagaatggtggcagctggtgacgacactgacatggtaccatgactactggctaagccagcagcacgatgatggagccttctatggcgaggatgggtttgatggcaatgatgtggttgatttgcttcctgattcgttcgattttgatgctggtgaagatctttttgaagagtttattcgatcttctgaatcccaagaagaaactggacccaaaggaactgcatgagcttttagagatgaacccttttaaaagaagctaccaacctaagagactggacccaaggccttagctttaggtcatttagctgatatgtttggatcatgttgttatccgtagcttcaacttcctgtaacttcttgataggcaaggattcaaacttccaatctatccttctc

SEQ ID NO: 2783 - DNA, 209 bp, Glycine max
  Clone ID: jC-gmfl02220052b01d1
atacaggtaataggttaaacactacatgcctaaagcacatcaatttgcgaagccaaccaaaatgacggatcacaaaactgattgaatgattttaatactacagtcttcctctggaaacttgcgtgctcatacttatatccccagaccaaaagtgtaacctgactaacctagcactgaacttatgaactttccctgaataccgtattgat

SEQ ID NO: 2784 - DNA, 603 bp, Glycine max
  Clone ID: jC-gmfl02220052b02a1
gaatagctggtcgacacgccagccagatccacaaatcggaaagaatcagagcgccgtcaaaaaccgccgtccacggcggtgaaactcgccttcgaatccagagcctctctcggttcctcactcttctcacatcgagcgcaacgccaaaaaatcgaatttcacgatggaagagttggagcagtggaaggaacaactttctcacttcgctaacctagctttggatcgtcttctcgaggttcctccgaatcagctctacgcagctgctgcaatcgtgattttcacaacgctgcttcttctctcaattcggttgttcaagcgtgcgaagtcaaacactgttgtgttggccgggctcagcgggagtggaaaaactgttatcttctatcagcttagggatggctctactcatcagggtactgttacatcaatggagcctaatgaaggcacttttattcttcacaacgagaaaacaaggaagggcaagattaaacctgttcatgttcgtgatgttcctgggcattctcggcttcgaccccaactggatgagtacttggcctcagcagctgggataggttttgtcgtagatgcttttgactttttaccaac

SEQ ID NO: 2785 - DNA, 95 bp, Glycine max
  Clone ID: jC-gmfl02220052b02d1
attaatattaatatagtcaatatgttatagactgactgttcaaagaacatcaatttatgtcaatcttccaattcgtactatcactaaaatgattg

SEQ ID NO: 2786 - DNA, 524 bp, Glycine max
  unsure (1)..(524): unsure at all n locations
  Clone ID: jC-gmfl02220052b03a1
gcaagattagaacagcatgtcgagagaggggttgcagatggccttcttattagttgtgtgtcttcttgttgcaatctttgggcccttattatggatgctggaactggttttacagctcaagtttacaagttgtcaacctttttcttgcacaaggaatggattatggagcagtgggataaaaacttttacatcacttctattgcagggagcaacaatggcagctctcttgtggtgatgtcaaaaggtacgcagtatactcaacaatcttacaaagtgagtgaatctttccccttcaaatggataaacaagaagtggagagaaggttttcatgtcacttcaatggctactgctggaagtcgctggggtgttgttatgtctcgaaatgctggattcagtaaacaggtggttgaacttgattttctctatccaagtgagggcattcataaacgttggngataaaggttataggattacagcaaccgcagctacattgcatcaatctgctcttatattaagtattccga

SEQ ID NO: 2787 - DNA, 341 bp, Glycine max
  Clone ID: jC-gmfl02220052b03d1
aaacaacatttgtttttttacggtagtaaagatgaagtagctgttctacactgggccggatcaaccccatatgattccttttatcatgtcaacgccacgtccgatgatgagcccaccaattgtgttctacctaggaaccataggcctcggaacctgtttctcagaagtaaattattctgaaaaataccgctgtcatggcaggggctgtgccatatgctacgtgcacatatgcgaggctctgacacttcgtacgaatatactactattatgcaataggacacacactgctaatgccattggtcctatcataaatcggactttacgcaaggtgaaggacgaac

SEQ ID NO: 2788 - DNA, 489 bp, Glycine max
  Clone ID: jC-gmfl02220052b04a1
aaaatatctcttccatacgagtagggaggcaaagtgtatgtgcctcccaaatcctactcttgtgaccacaagccttcacttgactctctctctgtctctgtgtctggtctctctctctctgtctctatgttgacacccttttttctgttctcagaccggaccatgcaagcaagtatattacactactcactcactgagaccgtgggtactaacatcgccaccgttaccgacgctcaggccaagggcgcccgcgggcgtggccgtgcctacgtgaccttgctagccggaaacggcgactatgtgaaaggagtcggtggcttggccaaaggtgtgatgaaggtgaaaagcgtgtaccctctggtgggtgcagtgttacccgatgttgcgaacatcaccgaaacatggtgaccttccaaggtcgcattgctagagaaggtgaacccgtgtaccctgctgagaatcagacgcataccgccatggcatattacg

SEQ ID NO: 2789 - DNA, 406 bp, Glycine max
  Clone ID: jC-gmfl02220052b04d1
gaacagttaataaagatgtttatattatcgcagcatgtataagattcaatcataacaacacaagaccggcaccagaaaattattaaacaaacaaagcaacaggcacatacggtagagggggaatatatcacacactctcacaactgatcacaagacgtaggaacagcagaaacggactccttatcaggatcatggtgcaccaagaagtgctgaagtcgagcattgcccaaattcgaacagccactaaaagcacccaaggccgatgaagccactatcccatcggaggacccactcatgtggttgtcagcatgaagctcggaaaaacggcgctcgaaatggaaaacaagctacggaaacgccagtagaggagaccctgatggcaaggtgaaccagagatccaaccgtg

SEQ ID NO: 2790 - DNA, 313 bp, Glycine max
  Clone ID: jC-gmfl02220052b05a1
gtcatcaagagtatgatacacctgaaatttgttgatatgtatgatactgtagtcttgacatgttataggtaaatatatgatgtccatgaatgaatggcttgttataaaaaaaaaaaaaaaaaaaaaaaaaaaaaaaaaaaaaatctacctaacatccacaactcaaaacttctccacacacaccaaataaactaaaaaaaccctacacaaaaaaactaaacaaaaaaaaaaaaaaaaaaaaaaaaaaaaaaaaaaaagggcccccccccaccttcacccccccccccccccaaatataattccccccccaccc

SEQ ID NO: 2791 - DNA, 233 bp, Glycine max
  Clone ID: jC-gmfl02220052b05d1
attgatacatatttaagttcacaactcataggacaaggtaaataaagctgaaaaggagcatataaccatgaacaaaaatggactactagactctaagaacagcacataaaagacaaaaaaggcgtcaaattaatcaaacggaaacaccaactgcaactgctgaagtggcagacaaacaaggatcagaaccactgcaaacaacacagcaagaagagacctggacaaacaactcc

SEQ ID NO: 2792 - DNA, 596 bp, Glycine max
  Clone ID: jC-gmfl02220052b06a1
gcgtgaggttcgttactaattacaagctcaccaaggaagacattgattatatcaaaaataatttgtctgtttcatgtgaggatggctttctggactatcttagaggaattgactgttctgatgttgagttctatgctattcccaaaggatcagttgtttttcttaaggtgcccctattgagaattgaaggtccaattgccgttgttcaattgctggaaacaccttttgtctatctaattaattttgcatcattagtttctactaatgctgcaaggcatcgttttgttgctggaaaaccaaaaactctacttgagtttggactacgaagggctcaggggcctgatggtggagtgggtgcatcaaagtacagttacattgggggatttgatgcaacaaggttcgttgcttttttaataccttaggttgctattgtataacttcactttttcatatggcacaccaatagcaacgttgcagcaggaatgttatttgggattccccttcgtgacactcattcccatgcattcgttagctcatttatgcgatcgaattcactacgtggcaattttgctgagacccatcaaagtgagcttgcc

SEQ ID NO: 2793 - DNA, 540 bp, Glycine max
  Clone ID: jC-gmfl02220052b07a1
gttctggtgatgcttccactggctctagtaggagtttaaatgctctggctagtgcctacagtggtggacaggggagagtcaacaatggtgatagattacagaatcgtggctctgctcgggcagctcctgtttggcttgaaactggtgacgcagttgcaaatatgtattctgagctgcgggaggaggctcgtgatcatgcacgtttgcgtaatgcatattttgagcaggcacggcaagcctaccttgttggcaacaaggcccttgcaaaggagctaagtgttaaggggcaactgcacaacgtgcatatgaaagcagcacatggaaaagctcaagaatctatttatcgccagaggaatcctgttgctccagagaatggaagagggccccaaagaatgatagacctacatggtctgcacgttagtgaagcgattcacgtgcttgaacacgaactgagtgtgctacgaagcacagcctgagcccccgagcagcgtttgcaggtttacatctgtgttggcactggtcaccatactcggggctccc

SEQ ID NO: 2794 - DNA, 441 bp, Glycine max
  Clone ID: jC-gmfl02220052b07d1
atcagaaaaatagtctaccatactgaagaaacaaagatacatttaccataacatgcactttaatttaatttaaaagtaagcatttaacatagccacatgaacccaattgcagtaaagagaaatgcaaaattaggggtaatccctaatgtcttggataagcttggagactcaagtcttacaaatttaacaaaattaacatattatcataaccaaaacaaaagaaggcattactgaaactctccaatcacaaacaaaaaaagatggcaatccactcagtctcccttcttcctaaaggagcatccctcggttagccttgcccggccaccggttggttgacacaagacagtctggcagtttccgcatacaacaacagtctgagagtggctaaagacagtggttatgttgaagcaaccctggcacttaacattcatgaagaaagag

SEQ ID NO: 2795 - DNA, 570 bp, Glycine max
  Clone ID: jC-gmfl02220052b08a1
cggtgtcgttttctgggaccattttagagagaaaaagagagagagagagttgtgttgtgatgcggaaacgttgatcccaaatgcacccgtacaaccggctaccgagcagcgggcactcgacgccgtcaccgacgccgtctccgctccggtcgccgaggctccgccacgcagggcggtccaaggccgggcggttctctccgagccgggggagcggtcggaccgccgcgcagcggctcagctggatgttcctctctgttctgcttcgacgacagggcgtttttctcttcgctcctctcatttacatctccggaatgctcctctacatgggaacggcgtcgttcgacgtcgttccggtaattaaacaccgtcccgcgcctggctccgtctaccggagccctcagctcttcgccaagctccgtctcgacatggattccgataattcctccggcgatgcgatatctacaatatggaagtatccctatagaggtggtgagtggtagccatgtgtgaacggatcttagaagacctacctgattaaaaggcacatatatgtggaggctaatgtggctt

SEQ ID NO: 2796 - DNA, 339 bp, Glycine max
  Clone ID: jC-gmfl02220052b08d1
gggccaaatattttacccaaaaggatgtaaaaggaaataaaccatgaatttaacatctggcgaactgacgcaatttagcagggggtacgtttaaaaccgaaaaaacaaaatttccctttagaggggcactaatactacctaaattattaccaggacaactaggggtttgatgctctaggggaaatctgataacctggctgggccaacaccattctgattgagcctttagccgtcaattacctaatagccttccttggccgggaacccttaatccttaaacgggctgagagaatggcaggagtaatgaccctgtattcgggtgcctcatagagggacttg

SEQ ID NO: 2797 - DNA, 587 bp, Glycine max
  Clone ID: jC-gmfl02220052b09a1
aaggcgaaagactttaggtttggaattgggaattagggttgttcgcgtcacgaagatgatcgaggtggtgttgaacgatcgattggggaagaaggtgcgcgtgaagtgcaacgacgatgacaccatcggcgacctgaagaagctggtggcggctcagacgggcacaagagccgacaagatccgtatccagaagtggtacaccatatacaaggatcacatcactctcaaggattacgagatccacgacggcatgggtctcgaactctactacaactaaacacaaggtgtgttttatgcatgatatattactatgatctgggaatgggatgaggcgccaaatgtaattttgacttgcgaaagtccctatgatttgaataatgtacatccccgaatgatattgggtattacataccgatgacaccctaagttgctttgttatatataacctatctgatgacttgttgctaagctttattaatctgatcggtggaagtgtttgatcatgtccaattgctatattaattatttgatcttcgctactttaatctaattcactctcaatggatgttagagcttacgacatgaat

SEQ ID NO: 2798 - DNA, 546 bp, Glycine max
  Clone ID: jC-gmfl02220052b09d1
caaggtaagaattttattgcacaatgagaaggcagagaaaattgatggttctgtttctcagtacaagttttagaatgaaaaatgaagcaacaagtgtttgtagtggtagtagtagtagtagtaagcatacaaaactacaatggcatggtacatacatataataattgaattaccaattcagaatttgatggctctcacttccacttgttggcaacaatgtcagccaaatccacaaccctttgggagtagccccactcattgtcataccaagcaatcaccttaaccatgtcatctcccatgaccatggtcaacgatgagtcaacggttgaggacacatcagtgcacctgaagtcaacagacacaagtggctcatcacacacagagaggattccctggagctcattgtctgcactctctctgaatgctgcattcacttcttctgcaaggtcttctttgagacctgaacaacgaggtccaccactgagacgtttggtgttggcacacggagtgcaatgccatagagtttgcccttgagggttgggagga

SEQ ID NO: 2799 - DNA, 540 bp, Glycine max
  Clone ID: jC-gmfl02220052b10a1
cacaaatcaattaactgaatgtttagagagagaaagaggagaaggagtagtgatgaggtgatcatagagcatattataagagagtgaaaactaatggaggttggcctcaagaaggagaacatggggtttgaggaaactgagttaaggcttggactgcctggaaacggaggcactgaagaagtgctcatcaggaagaggggtttctctgagactgaaactggtcatgaagatgagtctgccaccactgtggatttgatgcttaatctttcttctaaggaggccgcaaccactgctgctgctgctgcagatccaactgataagcacaagactttgcctaaggagaagacccttctgccagcagatcctgctaagccttcagccaagacgcaggtggtgggttggccacctgtgcggtccttccggaagaacatgttggctgtgcaaaagagcgttggagaagagagcgagaagaacagcagccctaatgcaagctttgtcaaagttagcatggatcgagcaccttaccttcgcaaagtggac

SEQ ID NO: 2800 - DNA, 510 bp, Glycine max
  Clone ID: jC-gmfl02220052b10d1
gtacggtgagagacctttctatgatcacatgacaacaacgtgtagtagtgtacctatctacattctacaatagctgtacacatgctactactactactaggaacaggtcaacacacatgcaccgttggatcgtcgtcgtcatcatcacatagcaaaataccaaagcaaacggtggagccaacacatgcgtttccagcttcaatgtttctttctttcttactttggcctagctaagctaacttgatcaataatcgtatgtgtgtggtcgcacaggcacactcatggaccttgagtctcgtgctaccgtgcaaatgcgaatgggcggcgcgcgtggattttatgtgacatggttttaaattacgattgtggtcgcatggtgagtcagaaaatcttaagagcaattgcggatcgtaatttaaaaccatcatgatgtgctcaaaaggacttgttgggccagtacatgaacatgtcctgcagcggcgacaacatctgattattgccctggaattg

SEQ ID NO: 2801 - DNA, 581 bp, Glycine max
  Clone ID: jC-gmfl02220052b11a1
cccgtcttcagggtcgcatcctaagagtcattttgttctactgtagatcatcagagcgaccaaagcatcagtggcctgtgaaccagaagctcttcactttggatgttatgtaccttcatgataaacctggaccagataactgcccccaggaggtttacgatacactggtggaggcacttgaacatgttagtgaatatgagggttatatcttggagagtggacaggggttggcacgtgttctattccgtcatgtgctgatactattgtcacatcctcagcagcgttgcatccaagagtatgttgacataccaaagtcaattgcaaagaagcctccccaggtggagcctatggctactgaagatagtgctcccatatcaagccaataatactatgagttgggaagtggatggcagttgcatgtggtcaacctctttaggggaatggaatatgatcataattcagcaatgttcaagttggaggttagtgtcactaggttgacaagggaatgattgtactagcgtaacagtttctgaaatggattcgattctacaccctctttcgtctaagctgatccattacta

SEQ ID NO: 2802 - DNA, 524 bp, Glycine max
  Clone ID: jC-gmfl02220052b11d1
gcataacatccacatgatttttaattaaaaataaaaaatacacaattttgttgcaggaatgagagggcaacccttgggactataatcttgagaagccacttcggcttccaaaatagtatcccgacttccagagcaaaacacaaggctaataatacaacttgaataacaagatacatgcaggcagaagaaaaatgtttctagtatgtcacgatagaccaaataaaatttttattgctgactagtgacttgtgtgctaagggttctaagtgcgtacataatccctatggctgcataaacatcccctaccggaatcacaaattcacatcagttggaggagtgtatactagcacatacttactagttacataacagcagagtattcaaccactgttcgttcatagatgcatatcaaatcaacaaccttgaaggtcacgccacctgagataaactaaccctgcccgataatgagcgtatgccccagccaccaccaatatatgaaacaattggtgactgtgtcccgcaat

SEQ ID NO: 2803 - DNA, 546 bp, Glycine max
  unsure (1)..(546): unsure at all n locations
  Clone ID: jC-gmfl02220052b12a1
gccagcgccaaagctggccacccaactttccttttggtgagggagtccactctctccaaccccgcaaaatcacccctcatcgacaatttcaaaggcctcggtgtcaatcttgttttaggagatctatacgatcaccaaagtttggtgagtgctataaagcaggtcgatgtggtaatttctactgtaggacacctgcagctagctgatcaagataagatcatttctgcaattaaagaagcaggaaatgttaagaagttctatccatctgagtttggaaatgatgtggaccggactcatgcagttgaaccagccaagtctgcatttgcaacaaaggccaaagttcgccgagctattgaggctgaaggaattcccttcacttatgtgtcaagcaacttctttgctggttacttcctgcccaacttgtcacagcctggagccacagctgcccccagagacagagttattatcctaagagatggaaaccncacagctgtttttaacatggaagaggatattggcacttataccatcaattctgtggatgat

SEQ ID NO: 2804 - DNA, 385 bp, Glycine max
  Clone ID: jC-gmfl02220052b12d1
cattcgaattcattttatttatatattaatattatattcaaatgaaataaaaagatattaaaagatactaattataagaatttgaaagtgaaattataaagttattaaatgattaatcaatttttttctacctgttcctgtagtaaaaagagttccatctgttcttgaatagcttccttcaaaaggacttctgcttccccagtgaatgtcttggtagaagatatgatttctttgaattgaggtttattcgtgtttaagtaagcacgtaactcaacaagaaatttccttacctgtccaatttctaatgaatcaagataaccattcgttccagtataaatagttattatctgttcttccacggtaagaggagctgattgggattgtt

SEQ ID NO: 2805 - DNA, 547 bp, Glycine max
  Clone ID: jC-gmfl02220052c01a1
taatgatcaaaatcacaaggaaatgaaagagcaagaaaattggaatatggatcaccctttaagagatgaagctaacaaaaaaatgttgatatgatgtgcaatctgagagcaaacccaagccaaaactgagaggctccctcttcatccattctcagcctcaaggagattcttcggtgggaaaaatccaagaggtttgaaattcgaaggcagggaagatggattatttcactgcaccaggaagaaaccatctctttgctccagggccggttaacattccggaccagatcatccgggccatgaacagaaacaatgaggactaccgttctccagcaattccagctatgacaaaaactttgcttgaggatgtcaagaagattttcaagaccactactggaaccccatttctcatccctacaactggtactggtgcttgggagagtgctctcacaaacacactgtctcctggggatcgaattgcatcgttcctgattggccaattcagcttgctttggattgatcagcagcaacgcctgaagttcaatgttga

SEQ ID NO: 2806 - DNA, 481 bp, Glycine max
  Clone ID: jC-gmfl02220052c01d1
aaaaccgaaaagatagattgattttttatatgataataattactaaaaaaaatcaccaagtttgagaagactgggtattatataacatcatcatggttaatcattgatcatcccctgaaccattcaaattcgtccatatagcaattccgcttgtccctacagccaaaacaatcaccactattgccatcacttgatcttttgactttgatatcccatgcatgtccctgagaacaattgcagcagggaagatgaatgaggtggaaacaatggctgtggatcccaagaactgtacaaaataccatatgtctgggatggtcacagcgaccaagtatgtgagggctagcaaagtcaaagtgagtgacacaaatcttggggtgtctgatgcaaggggaggcttatttctgtttgagaaaattagttcatctatgttggccctcagggaataggtcacgattgggaacacaagtgctagatggagtgc

SEQ ID NO: 2807 - DNA, 528 bp, Glycine max
  Clone ID: jC-gmfl02220052c02a1
cgctgaaatagattttttttttttgggtataatattgattgtagtagtatttattttatcttctgatattatatttccaattttgctgtcaaaacattattagcgatcaatttgaaattgatacagagctgagagcatcaaggaatcgaagaatagaagattcatttctttttctttttgatatggaagctgatgtttctattatttttgttgcgttttcaaaaccctaaattggagaaatcccaatttctccttctgtctttctgctttggatgtttttcaaccaaaaaattgtgcttttcaaatcttttgctctgatgggtacttcaaatcttctcttgatattctctctgatgagcctgtgtgctatggcggcttccaaggtggtgcttattgggaataatatcactctctcctttgatgatattgaagctaattttgccccaacagtcaaaggttctggaaaatatggggtcttatatttggcagaaacactggatgcctgtgcagaattgaccaattaagttg

SEQ ID NO: 2808 - DNA, 445 bp, Glycine max
  Clone ID: jC-gmfl02220052c02d1
ggatgacaaagtagtttcattgatatctaaacacctacttagaggttaaatattagattctcaaaaataaaagtaaaatcgagcccagcatgctatggctatatgacagcaaagacacgcagcataagggtgatttagtggacaacttatcggtccttttggccatttaccaatctattaaataaaacaacgggctactgccaaaccagtacataaatttttggggtccacattggaagcgcacgaagatgttacagaacaaaaaaaataatcatacttcggccataagaaatccaaaactatatatacacattaactcaacttggacaaaaaaatattttaacgaagttcagaaacgaaaggaaaatggccaaggtgtaaaattgaatttatttcggacacgaattacaaatgtcaccttcggtctcctagatagaatgtcgga

SEQ ID NO: 2809 - DNA, 511 bp, Glycine max
  Clone ID: jC-gmfl02220052c03a1
gttctctcaccgtgaaagagagagagaggttaggctatggctgatgagagcgttgttgagtccccagtgaagaggcagagagatgatggtgaagaaaatggtgtctctgtttccatggacgcggagggtggcaaagaccctcttagtaacggtttatcatctgtgattcctgggtggttctctgaaatcagtgcaatgtggcctggagaggctcactccttgaaggtggaaaagattttgtttcaaggaaagtcagaataccaaaatgtcatggtcttccagtcatcaacatatggcaaggttcttgttttggatggagtaattcagctaacagaaagggatgaatgtgcctaccaagaaatgatcactcatctttctctttgctctattccaaaccctaaaaaggttttggttatcggtggaggtgatggaggggtcatacgagaagttgcacgccatttttcagttgaaaagatagacatttgtgaaattgacaagatggtttgtgatg

SEQ ID NO: 2810 - DNA, 404 bp, Glycine max
  Clone ID: jC-gmfl02220052c03d1
actaggatctattcttacatagcattcccttgtaaagcattgggtaacgtaccacattattgctcaattggtacatgagtgtttcaaaataatctggattcactgctaaaagaatacttgtttaatactttgtgctcatgaataaaatgtacgtgcgttaaataatgagatgctagctaaaaatgactatcatgcacttatctacgaattggaactaggcgagactataacaaaggatgcctggacacagcctgggagagtgcttaaagctgccacctggcgaaatgaaagccaagcaatactatcatcattagtcaagccatgaacaaggacgttagcacaattcttccgacaaccgtcgtgatatggctcactgaaccgcccatcaggaccactaacgtaat

SEQ ID NO: 2811 - DNA, 558 bp, Glycine max
  unsure (1)..(558): unsure at all n locations
  Clone ID: jC-gmfl02220052c04a1
tggtagtttggtacacaacttcacatgttcttacagtttgcgtccgcaaaccaaaaaggctagctagggtttgagatcagatcagggtgtaagaaaaatcagtaatcagcaatcacttattaacctagaaattgttatccgtttgtttcccatgcaagaaatgttacacagcaacacattcatcattcacctcctttcgtgacaaatcgctcttaccgattaacaaaatctcgtgtaccagagtcaccaccgacatgggttcgggttcggtccactggaacgtattcgacggcgtgaagataatcacggcgacgccggaggcgctcatggcggagatcgactccgcgatctcgaatctggaatactcacgtgccaccgctctcctggaggccgacgagggatacgacgcgcacatggccgacgaaacctacaaggcgggctgcgccgncctggccgtcggcaagctcgacgaggctctccgatctctgaacctttttttctcgaagtgcccccccgattagaccgccgttttctctaaacttaacttgctcattaccc

SEQ ID NO: 2812 - DNA, 276 bp, Glycine max
  Clone ID: jC-gmfl02220052c05d1
gactaggtcattgttattgctacccatatacgggtacatgaatggcatcgaagaacgagttcacaatggattttactgaaatagcgacatactcatgtaccatatttggcaaaaagggcacataagtgaatcaggttctggatgtgtaaacgggagtatcaaaaggttgcattttaactctagaaccactgaacagcaataagggagtcttgcgaaacaccgggagccccgagtatagttaccaagaccgacacataagtaaaactgctaactctg

SEQ ID NO: 2813 - DNA, 585 bp, Glycine max
  unsure (1)..(585): unsure at all n locations
  Clone ID: jC-gmfl02220052c06a1
gctgggtggagctttacgcaatcccattacactctctttctctccatttccttctattctctattattatatccttttctatttttatttttctcattgcattctctaatctttaatctctattctctacccattcatattcatccccggtttttctctgacactgtcgcataacactctttgaaccaccgcaactaaagtaacaaccccatgtcctgaacctcacttttcttctcgccaaagcttccaattttcgatttttcccttgttttcagagaaatatcaacaccccagaaaataaaattgagagaatagaagaaaaccttttctgggttaatttggtaatttcctttttcttctttcatgggtaacataggaagcagcggctccaacagccgccggagacacggcggcggcggcggcagcggtaggcggattcacccgcctccgccgcaggtgatgccgacgtcggaggtcacggtcaaccaattcgtgtatcctccgcncgcacgccgtatcacaacttccccggtactacccggcgccgaccaccatgccgcgccgttgccgcgccgacgaccacca

SEQ ID NO: 2814 - DNA, 248 bp, Glycine max
  Clone ID: jC-gmfl02220052c06d1
gattagataatttttttttattccaatttacagggactacaagaagatcgaatcgtgggcatacaaatgtttttccaactaatgccccatcctagatgacctacattggtctatgggacgaaggagctatacattcttagtagttagtatgaatagctatcaacggctgcttcagacctagatattgacataccttatattaagatgcttgcaacacattgggttatacacttttcccgacccgtacc

SEQ ID NO: 2815 - DNA, 600 bp, Glycine max
  Clone ID: jC-gmfl02220052c07a1
tggtgcctcgcatgtaattaaattataattggctttatagtttcgtaatttaaacaaaaaggcaatcgctacaattgactgcatgttttagatatttgttcacagtatggtgttatggtttcgtaagtaaaatggtttatttactcgtatgtatacagtttaatgtttttgtgattagaattgaattgaaagtcgcttactattaaatgattcgttaaatatcgtaatcactatacaatctccttcaaaagagatcaatgtagctagctcgctcttgactgtatgatggtttacacccatgtatactgtgacgtattttatattttcatgatttggattgaatttgaagcttcttacaattaaatgactcgttcaatatattgtagtcaggatacaaatctacttcgttcaccataattttgattgatttaattaactattatgttcactataattttgattaatttaattaactattaatctttgagaatagcaataattattaatattggtttcgagtttttaacttggtcaataagatgctgcaaagtttatttatgctcaacatacatttgctattgatcaacctatgtctgattt

SEQ ID NO: 2816 - DNA, 126 bp, Glycine max
  Clone ID: jC-gmfl02220052c07d1
atgcatgtaactgttctttggtttttgttacgggatacggtgtccattatttgttgagcacgaccgatcactattataaacagtgtcaaatgagatttcgcgcggtgacgcttacttgtctgtgac

SEQ ID NO: 2817 - DNA, 546 bp, Glycine max
  unsure (1)..(546): unsure at all n locations
  Clone ID: jC-gmfl02220052c08a1
gtgtctcatggattcggagtgagtaaaagaaagcaagcattgcgccatagtacctcatagtgattaataaaccttcactcgtcccatttggatttggattttggatttggatttggatttgaatccgtaatggcacccaacaacaacagaacaaagggatcccattttccgcttctggccttcctcttcctctgcctcctcgcgcccctcctcttctttttcttcgcatcgccccttcacgatcaaggtgatgactcagctgtttcgagcgaaaaggttgccagatcgaaagaatggcaggcattgcaggatcttaaattgcttttttcaaaagaggttcttgatgttattgtgtccaacacaaatgatgtggggcctttgagccttgagaatnttagaaaaaataatctgtctgcttcatggagagttgctggattaaggacttcaaatgctatgaatcagctcaaccaaccagcagacaatgttagagaagagaagcacaatgggaaggaaagaagattttcagttgatcgtgctcagtggact

SEQ ID NO: 2818 - DNA, 240 bp, Glycine max
  Clone ID: jC-gmfl02220052c08d1
aagcatgaaacggtacgaagtacgaggttggggaacattgtgtacataatctgtagagcaccaccattctctacgttaaagactattaaatgaccttgcagccgtcgacacggatttttaggggacactatatggaggagtaggaataggcgacgcaggtgacggggccagatcggagtatggtgaagaacaaccctggaggatcaccggtcacggcttaccagtgcaatgaacttctgc

SEQ ID NO: 2819 - DNA, 501 bp, Glycine max
  Clone ID: jC-gmfl02220052c09a1
ggaatgcagccccaatcgggcggtaaattccgtccaaggctaaatactggcgagagaccgatagcgaaacagagagtggtttcagtgagtgatcggtgttcacttgatccttcataagtcgtcatcatcatcatcatcatcaccgttgattgaagaagatgccgatcagaaacatcgccatcggaaggcctgaagaggctactcaccccgacacgttgaaggcggggttggctgagttcatctccaccttgatcttcgtgttcgccggttcaggttccggcatcgcctacaacaagctcaccgacaacggcgccgacactcccgccggcctcatctccgcttccatcgcccatgctttcgccctcttcgtcgccgtcttcgtcggcgccaacatctccggcggccacgtcaaccccgccgtcaccttcggcgccttcgtgggccgcaacatcaccttactccgcggcattcgctacgtcatcgcccagctcctcggctcca

SEQ ID NO: 2820 - DNA, 320 bp, Glycine max
  Clone ID: jC-gmfl02220052c09d1
gggttatatgttctcattcaatcaagtgacacattagcacatacgatcaatatgctgggaacaaacaccctaacgagcataataggatcatcatacaacccggacatctcgtccagcgtccactgggcttatctagcaatgatgcgtacacacctcttagcatatcagatgtggcacatgatcaggaatcacttgtgggggacaacctctcgggctaagaagccacttcaggcttgcaagagttatgggcacttgggaacgcctttaggaccccgcattgtgcaacagggactaggaccacccacgctaaaaagcggggc

SEQ ID NO: 2821 - DNA, 521 bp, Glycine max
  Clone ID: jC-gmfl02220052c10a1
gtcggttaaggagtgccaccttcaccacaagggaaagaagcacaagctctggagacgcatcttctggggaatagtgatcttcgccttcatcgtgttactgacagttcttataatctgggcaatcctaaagccttcaaaaccaaccttcatcctccaagacgtcaccgtttacggcttcaatgccaccatccccaacttcctcacctcaagttttcaggtcacgctttcctcgcgcaaccccaacgacaaaatcggaatctactacgaccgtctcaacacctacgtaacttaccggaaccagcaggtcacgtaccgaacctcaatcccaccctcgtaccaaggtcacaaggaagaggatgtgtggtccccgtttgtctacggcactaatgtccccgtcgcaccctacaacttcgttggcctcagtcaagaccagaccaacggcaacgtcctcgtcctcgttaagattgacggtaaggtacgatggaaagttggctccttcgtctctgctcactacaacctca

SEQ ID NO: 2822 - DNA, 526 bp, Glycine max
  Clone ID: jC-gmfl02220052c10d1
atgtaaaatgtaaccatacaataaacttataaattatcacatactatcattctcgatgataaaaaaataataataataataatactatcatcatcctaaccggtcaaaaacaaaattaataacaaatattaattaattaattaattaattaattaactaactaactaaaagcttgctctctttagggaagtaatagtaacggaagaacccaagggagaagttcccacttgaatctcgaaggaatcatagcgaagaaagaactccacaacgaaaagcctcgaaaccaaggtgacgaagtcttttccggcgcattgcttgttcccaagtgttggagactcagtctcaggcccattggaccacagcacgtgcttgaggagcttctccccttccttcccgacgaacctgtccccgacaaactcctcggccctctcgaagatcctaggatccttcgtcgcgaatggttggtacccgaacagcatctacccttgcttcacctgaaacgcgtggtcgtggctctcaatgatca

SEQ ID NO: 2823 - DNA, 585 bp, Glycine max
  Clone ID: jC-gmfl02220052c11a1
ggttaatgtgtgctttagaagggaaatatctggtctgtgaagatgatcatatgtcaatggatcaatgctccaaagaacctgatgaacttcagtgcgtccagttttcatgttctgtccctgtgatgaatggaagaggatttattgagattgaggaccagggtttgagtagcagcttttttcctttcattgatgtggaggaggatgtttgctcagaaatctgtacacttgagcctcttctagaattaagtgaaactgatccagatattgaaggggcaggaaaaatcaaagccaaaaatcaagccatggattttattcatgaaatgggttggcttcttcacagaagccagttgaaattaaggatggtttctagtgtggatctcttttcattgaaacggttcaagtggcttattgagttttccatggatcatgattggtgtgcagcagtgagaaaactgttgaacctactgtttgatggaacttgtaatacaggagatcatccttcctcgaatcttgcgctttcagagatgggtctccttcacaaagctgtaatgagaaatagcatgctttaatggaggtgctttgaga

SEQ ID NO: 2824 - DNA, 497 bp, Glycine max
  unsure (1)..(497): unsure at all n locations
  Clone ID: jC-gmfl02220052c11d1
acaatataataataactttcaaataataattcgaatccaaagataatatacaaaccttaatttaaaaaaaaaaaacggacacaagaaccaacatctcctgtcagtattcacataacataaaaagacattcaatatgccgtgagcacttggtaactggcgtagaaaacatacgttacaacaagagggtcaataataaacttgatacctactccgggccttgcattggaaccatcatatgtcgaccctgagaattcgggtaagtaacattttgtgagaaagaaccttgatgagcaagctgagcattaggacttggctgaacatctctcttagcagatgagtctccacccttggcagagcccttcgtatcaccctccatctctcggtatctagtgaggtaaattttaagaggatccatataatcctcgaaaccgagagtgngccatcgccagagcaaatcatcggcgttaatagtctttctcttttctctctgacactta

SEQ ID NO: 2825 - DNA, 516 bp, Glycine max
  Clone ID: jC-gmfl02220052c12a1
ttcgtcttcttcgtctttactcttttcttcaccgaagcgaaaaagaaaaggcttgacttgagagaaatagagcttcgaatcgaaactcagaattagaaaaaaacacaaatcacaatcacaatggcaaggtacgaccgagcaatcaccgttttctcccccgacggccacctcttccaggtcgagtatgccctcgaagccgtccgcaagggcaacgccgccgtcggcgtccgcggcaccgacaacgtcgtcctcggcgtcgagaagaaatccaccgccaagctccaagactccaggtcggtgaggaagattgtgaatctggacaaccacattgcgctggcatgcgcggggctgaaggccgacgcacgtgtgctcataaacagggcacgtgtggagtgccagagccacaggctcaccgtggaggatcccgtcacggttgagtacataacgcggtacattgctgggctccagcagaagtacacgcagagccgccgcgtgcgaccctttgggcttcgactc

SEQ ID NO: 2826 - DNA, 416 bp, Glycine max
  Clone ID: jC-gmfl02220052c12d1
accaacataatttaccttgttattatagtgataaacagaaatgtgactaaattgcaggtacttgtctgaagatagcatatatctttttctaaaagcagataaaaatagacaatgaattgcaggtttaacagattaagcagctgctccaacagctacaccacccttgagcctggatttaccatacagggtttcttcaaaccggattatctcattcttggacccataagcaacttgagttctgtcatcaatgttactgatgactttgtctagcacagactgatgaccatcactgctgtaacctccagctttttcaatcaagaaccccaaaggagctaccttaaacaacagtctcagtttggctttggctgatggtgatgacacgttggtgaagattcccttttcttttacaataatct

SEQ ID NO: 2827 - DNA, 548 bp, Glycine max
  Clone ID: jC-gmfl02220052d01a1
attctttgagggaatttgacataaaagtagccactgccccaacgatcccatttcccttgacttctctacgtgaagctccttgttttgcataggagctagttgaaatgtccgagggaaatgcagggaaaggaaagaaaatcgccatcattggtgtctcaaccttattgttggtggctatggttgtggcggtcacaattggggtcaatctcaatgagaatggttccaacaatgatatagaggacaacaagaaagatcatgttgcttcttccataaaagccgtccaaaccctttgtcatcccacaaattatgagaaagaatgcgaggaaagccttatagctggggctggaaataccacagatccaaaagaacttatcaaaattttcttcaacatcaccattacaaaaattggtgataaactcaaagaaactaatattttgcatgaggttgaggaggaacccagaagccagatggcacttgacacttgcaagcaactcatgggatcttctatcggggcaataacacggtcactcgatggaataaatgagttt

SEQ ID NO: 2828 - DNA, 207 bp, Glycine max
  Clone ID: jC-gmfl02220052d01d1
gtcttagggtgtcaaactagtatcattgctatatcaacacctacatatgggttacagcttctgtcccaatcattaacacagtagataaaccgagcctgccttagagctttcataacttcggcgcgcaacatgatggtgcaaaactgtacaacttatgcggtccttgaggccgcatactaccatacattagaagctagcggtctggtg

SEQ ID NO: 2829 - DNA, 575 bp, Glycine max
  Clone ID: jC-gmfl02220052d02a1
ctcaacaaccctttccctgatacccctaagcagcctagtgatgagaaaaggcctaccagtggtggtggtcaacaacaacaacaacaaggctttgatgatgcagatggagacacaaattaccaacaaaaccaaagccagaatctttctctctccaagtctgcttgtagcagcacttccgagacaagcaagggctcaggcttgtccctctcaaggtctgagatccgtgtgaaccgtgtgaaggcaagggagagggcaagggagagagcagcataagagaaggagaaggagaaagagaaagagagtgattttaacattgcacaccaccatcaccaccacaatgtgaacaacatgtctcacactgcttccttcactgagcttctcactggtgggattgggagcacggtaacagttaaccccaacacaacaacaacaacaacaacaacagcaacaagtcctaatggatcatcggttcatcagatccatgagggtcatgatcatgaagctaatctattcaacaagggaagtcaacaacagcaacagcaacaacattacctttggtctcaacagtgacacct

SEQ ID NO: 2830 - DNA, 450 bp, Glycine max
  Clone ID: jC-gmfl02220052d02d1
ggaacttaaaaatatattttattcacaagacacacacatgcattattttttcaaacacataacataatatatataatagatgtctgccttgcatggcaagcgtctcagctcttaatttgcagatgaaacacatacatatagcaagcccctatagcactagtatgggtcttattccatagttacgtatagtacatatagctagcaagctagctttattattatgacccaatcttattccatagtggtacatatagctagcatttattattatgacccattcataaaactacctctaataattgtaactaataacttcttgcccttaagatattatttcaagattcacacatcatacatatcacataacacttctgagatgcgtgttcacccttcatgtcatacctcattcatttacaggcaggccacaattaaatttcagggatccacttg

SEQ ID NO: 2831 - DNA, 544 bp, Glycine max
  Clone ID: jC-gmfl02220052d03a1
agctcgtcgcgttcgtctctctctctctgagctcgatttattgggctcttcgaattcggttcccgatttccgacgagttctatcattcacttcaatcttcggaaatgcctctcagactcgaaatcaagcgaaagcttgcgcaaagatcagagagagtaaagtctgtggatctacatccaacagaaccatggattctagcaagtttgtactctggaactgtctgtatctggaactaccaatctcagaccatggccaagtcttttgaggttactgagttaccagttaggtcagccaagtttattgcacgcaaacagtgggttgttgcaggggcagatgatatgtttattcgtgtatataattacaacacaatggataaagttaaagtatttgaggcacatacagattacattaggggtgtggcagttcatcctacccttccatatgtgttgtcatcatctgatgacatgctcataaagctttgggattgggaaaagggctggatctgtacccagaattttgagggacattctcattatgtcatgca

SEQ ID NO: 2832 - DNA, 251 bp, Glycine max
  Clone ID: jC-gmfl02220052d03d1
cgaggaccaatagtcaaatagcatttccttgtaaaaccaagggtattctaccaaacaattgaactactggtacatgattgtttggaaatatagtgccttcactgatcacagaaaactgttacaatgctatgtgctcaagcacatgctgtacgtgcatgaaatattgagtagcaatataaatctgactatcatgctcttatgaacgaattggaactatggacattcgatcgcaaaggatgactggactcagc

SEQ ID NO: 2833 - DNA, 602 bp, Glycine max
  Clone ID: jC-gmfl02220052d04a1
ggctcgagctttttttttctttccctctcacaacaccacttcacaccaaaactcaacttaaagcttcggtttatttccatctctaaaaacgtatctttccatttttttgacatgttcatactttccctggtcctcgaccaccaccctctttagccgttcaaaaataatcgtagaagaagaagaagaagcataagaaagagaagatctttgatgacccactttgctaaaaaagagaagatgatgatgatgctggccacaactggcacaccttgctgctcctaggaactttgtaacacaccacaccacactacactacactgcactgcacttatcccgtgtccgaatcctcatgtgaatcacgaacacccgggattttcgggtacctcaaactccttcactcaattttctcatcaccatgccctcgagtcattacaccaccaccaacaacaacctcaacaacaagactaggaaacgaggttgttcctcatcttcctcttcctctttggtcagaagataccgtttcaagagagccattttggttgggaagaaagaaggtcaagttctccagttcccatgtgaaagactaacacaagttcttcttc

SEQ ID NO: 2834 - DNA, 580 bp, Glycine max
  Clone ID: jC-gmfl02220052d05a1
atttattcccttctaaactgcttgatctgcatgtggtatggcacacctctgatatctgctgataatttgttggttacaactgttaattcaattggagctgtctttcaatttgtgtacataatcatcttcctgatgtatgctgagaaagccaaaaaggtgagaatgattggattatcgctggcagttcttggcatatttgcaatcatattagttggaagcttgcaaatagatgacattataatgcggcggttctttgtgggattcttgagctgtgcctctctcatttcaatgtttgcctctccattgtttataattaaattggtcattcagacaaagagtgttgaattcatgccgttttatctctcactttccaccttcctaatgagcacctctttcttactttatggattattcaacgatgatgcctttatttatgtgccaaatgggataggaaccatattgggattgatacagttgatattatacttctatttcgagggtaaatctagagtgaactccagagaacctttgatagtgtcatatgcatgatcagttctgctgaaaagactggagtgacaac

SEQ ID NO: 2835 - DNA, 242 bp, Glycine max
  Clone ID: jC-gmfl02220052d05d1
gaagctagaattcttattgataccaatttagggggacatcttgatgatagaattacggatttacattttacatgatagctgatccaacatatccattgacatagaatgcaccaagggacttgcaattcatcatagtcaatactaatataatatctaacaactaatggattaaaccttgctatgcacatagcagattagcaaatgcttgcaacgcatcatggtattcactaattataatacat

SEQ ID NO: 2836 - DNA, 528 bp, Glycine max
  Clone ID: jC-gmfl02220052d06a1
gtgcttttgatcttggagcattacttcaattcatatacaccaaagacacatactatcttcataagcaaaggactcaaagtaatagttttctacaaaaaaattgaagtttggggggggatctacatctctatgggattatcactttccttactctcatcagcctgggaagaaatcgttagacattcactatttggtctgtctttgaacttcacttttggttccaaagatggggctatgattttgagatcaggtagcttcaagataagagaatcagaaactacttcaaagggtgcctctaccaccaacttttcaagcaaattgacggattgcaggcccgaacacatggtcctcgaaccaaacctttcgtgcattaaagatatggagatcatggaatcaaagagcagtgaacaacaattgcagcaccagcctgtccctgttctctctctgcctaaagaagtggttttctcttcgccaagaccgggtagtgagcttgatgctgcggctactaagcttcataagtctacaaga

SEQ ID NO: 2837 - DNA, 191 bp, Glycine max
  Clone ID: jC-gmfl02220052d06d1
gaatctataattcttattgattcccatttagggggacatcaagatgatagaatcgcggatttacaatttacttgatagcaaatcccacatactcattgacataaaatgcaccaagggactttcaattaatcatagccacaacttctataaaaagtaaaaaattttgcattaaaactctctaagcatatagc

SEQ ID NO: 2838 - DNA, 518 bp, Glycine max
  Clone ID: jC-gmfl02220052d07a1
caagagtggtggatccgttttccgcagcaaacactcttctgagttctgagctagcgaggttgcaatggcgattatctccgatttcaacgaagaggagcagaaacccactcactcttcaccaccgcaaccccaatcctcttcctcttcctcttcctcttcgttcagtgctgcttttgaccggtcaaaccctatcgcttttctggagagagtcttccagttcgtctccgaacacagcgactttctggcgacggagagcgccgagaaggagatagcgttgctggtgcgcgccgccgggaagaagaagagggagtttctcaagtcggagagagaaaaggccgagaagaagaagagagaggacctcaaggcctcggaggagagggaaaaatccgacaagaggctgaaggaagagaaggaacccaaagccgaagacaccagcaaagacgaaagcacctgccaagttccaaacaaaggtaatggcttagatttagagaaatactcttggactcaatcacttcaag

SEQ ID NO: 2839 - DNA, 434 bp, Glycine max
  Clone ID: jC-gmfl02220052d07d1
tttttctttttttttacaaactttcaaattatacactgcctccaactcactgtacggagtagcgggggcgacatgagattataccatataataataatctgacacaaactgacaagtagttatagacggcgatcaagacaatttggtgcatgggctggtggagcctcagctagagcagatcacacaacataggccccaaagccgatcgtgataagggcagtgcagatgacacgcaaagcctcataaccatatatgagcaatcctgactgctcaaagacaagagagctctatgctatgccccagagcaaccgggggccacagccaagacaaattccgtctgcccaaaatgcgcgtgctcgggaagagaggcccggccaatgtctggagtgccaccagggaagaacaagatgacaatcccatatattcactgaatg

SEQ ID NO: 2840 - DNA, 467 bp, Glycine max
  Clone ID: jC-gmfl02220052d08a1
taaaatgttgttccacaatctatccacataccgactgaaaaaaaaaaactcagtttgtgggtttattatactttgattgattaattaattattagttagttagttacgtcggttaatcaactggaagcagtgtcactactgtgtttcggaaagttcgagatggtgaggcttctcggccaggggacgtttgccaaagtgtattacgggaagcaaataagcacgggccagaacgtggcaatcaaagtgatcaacacacagcaagcgacaaaagaatgaatgatggaacagatcaaatgtgaaatttccgtgatgcgtttggtgcgacacccaaacgtggtggaaatcaaggaagtgatggccacaaagacaaaaatcttcttcgtcatggaatacgtgcgtggcggggaactctttggcaagtctccaaaggcaaactcaacgaagatttcgcccgcacgtattttcag

SEQ ID NO: 2841 - DNA, 507 bp, Glycine max
  Clone ID: jC-gmfl02220052d08d1
attcattatcatatatgcatcacctagtatcagctggtttattcttaattaagagaaaactaaaatacaatatcttacatgctatttttgttgttcttgaattagaataatttcacctcgataactttcaaaatcctttaatgcaaattaccgaaataaaactctagttctagtacaaacaacacctagctataataattaggggttgataccatagagctttcgaatcccgtctatatcatcttgcgctagattcaccttcctagttcgaggtggtatagaaggatacatgatggctcttaggtccgacgagtggcctaatccgagcaagtgcccgatctcgtgcactgccacagatttaaggtcaaacgcacttgtcaccggcgatttggtgacatcgccagacgccacccaatattcgtcggcgtcaaagtggcacctgccatcagtgggagcgaatgcatggcccaatattccacctggaccatcaaaaggatacggatcacc

SEQ ID NO: 2842 - DNA, 130 bp, Glycine max
  Clone ID: jC-gmfl02220052d09a1
atggaattagaccatgacccagaacagtgaagcttggatcagacctctaattttatgtgttagtgccccttttttatggctaaaaaaaaaaaaaaaaaaaaaaaaaaaaaaaaataaaaaataccttcat

SEQ ID NO: 2843 - DNA, 442 bp, Glycine max
  Clone ID: jC-gmfl02220052d09d1
gccaaaaaattaattcaaactatattaaaccagggaaacaaaaaaaaaaaaaggtttatgatacaccatcaactatatctaaaagcaacctttttcgagtacaacaaaataaaattactatacatagttaaaacgaggtcaggtgcggtaagaataaaaatacataattcctgccttcctgtgagaattctaatagccaaatagcctctattttaatatgatcttcaaggaaccttgaatccccaacaaccaaatgataatctcatttgttagttaaaattccatgtactgaaagggtggagggcttgttttggtcttagaaccactaagcccacggatctccacttttttccattcttgcacaagggcacagcagcaacacatcaaatgagagaggaaatcatcaataaatccccctgtgatgttcaacattttccgaagc

SEQ ID NO: 2844 - DNA, 143 bp, Glycine max
  Clone ID: jC-gmfl02220052d10a1
atggaattagaccatgagccatatagtgaattttggatcagtcctctaattttatgtgttagtgccccttttttatggctaaaaaaaaaaaaaaaaaactaaaaaaataatataaaacatgaagaaaaaatataaaacacagt

SEQ ID NO: 2845 - DNA, 501 bp, Glycine max
  unsure (1)..(501): unsure at all n locations
  Clone ID: jC-gmfl02220052d10d1
atggtaagaagaaaaacactgtaatgtatggctgaaaatccaatattaagatttgattctgtatgaaaatgaaaatgaaaatgaaaataaagcggcacacagggctagctagctaggcaataggcaataggcatgtagaaggatccatcatactaggagggaagaggccttggcggaggagggagtagctgatggaggtttggaggagtctgattgtggttgggcagcggcggagcaatgaaggggtgttcgagcaacctggaagcagaccagcggcgagagggatcgcgctgaagacagcgcaagatgaagtccttgaagtgaggggaagcagaaggaggagcctcgggaggctgagacatacaaatggcgcacatgagactggcccaatcgccctgcctnccaaccgcgaaggggaaccttcccatgtagaactccagtatgctaaccccaaagctccatatgtcccctgcgtacgcgtcgtattgcccgtcgttatgt

SEQ ID NO: 2846 - DNA, 533 bp, Glycine max
  Clone ID: jC-gmfl02220052d11a1
aaatcagtctctaatatttttctcactgtcttgtctctccagagaactgtatagagagagatggcagctgcaacatctggtgctgtgttaaatgggttgggatcttccttcttgagtggaggaaacaggagccaaacccttctggccactgctattggaggcaaagttggtgctgctgctgttactgttagtcctagaagactcattgtggtagctgctgctgcaccaaagaagtcatggctccctggtgtcagaggtggtggcaacctcgtcgacccagaatggcttgatggatcgctaccaggtgactatggctttgacccactaggccttgggaaggacccagcattcctcaaatggtacagagaagctgagctgattcatgggagatgggcaatggctgcagttctaggaatctttgtgggccatgcatggagtggagtttcatggtttgaagctggagctgatccaaatgcacttgctcctttctcctttggtactcttctgggaaacccattgattctcatggggtg

SEQ ID NO: 2847 - DNA, 287 bp, Glycine max
  Clone ID: jC-gmfl02220052d11d1
aaagttgccaaagcttttatttattgcaaagcagagcaacccttattaagaccaaaaactggttcgtttcttacaattttaaataacagttcactttaagaattcatctatctctggttttgcaacaaggtttactaaaaacaatgttcaccctcaaaatgaaaatagaaaaagaggggaaaagaaaacataggttaacttaaaagaattctaagctattgattgcccccgcaaaaatttttggctaacggcgaacttggggtagactttacggggaaataaccttt

SEQ ID NO: 2848 - DNA, 505 bp, Glycine max
  Clone ID: jC-gmfl02220052d12a1
ggcaccgccacgccgttcaactgcgtctcccaagccgattaccctgactactacttccgcattaccaacagcgaacacatgactgatctcaaagaaaagttcaagcgcatgtgtgaaaagtccatgataaagaagcgatacatgcacctgacggaggagtttctgaaagagaacccgaacatgtgcgagtacatggcgccatcgctggacgtgagacaagacgtagtggtgatggaggtgccgaagctgggaaaacaagccgcaacgaaagcgattaatgagtggggtcaaccaaagtcaaagatcacacaccttgtgttctgcaccacttcaggcgtggacatgcccggagcagattaccagctcacgaagcttctcggcctgaggccctccgtgaagcgcctcatgatgtatcagcagggctgcttcgtcggcggcaccgtacttcgtcttgcgaaggacctcgcccagaacaacaagggtgcgagggtgctcgttgtctgct

SEQ ID NO: 2849 - DNA, 433 bp, Glycine max
  Clone ID: jC-gmfl02220052d12d1
cacaaggaagaaaagattatttgcttactaatcaattatttagacatcaaaattcaaaacaaataatttagagcttctagtgcagtaaaccaccttaagcaccacgaagtgccttaaaaaactatataaaatacattaggaacatcagggcttccgattcaaacatgaacaaccagcagatacataagaaatccttagcagctaattaaaaataaccagataccgctatttagttgctgtatataatccaactcttcacttgaaacatttaggtgaatactactacagccatatgttgaccacctcattctttgccatctgctgctcgaagtgagcctagttgaactggggcttgagtctgcaccactttggaagacccatacactgatatatcaataccttgagccttctccttctcgatctgctccttaat

SEQ ID NO: 2850 - DNA, 526 bp, Glycine max
  Clone ID: jC-gmfl02220052e01a1
gttcaaaatgcaggcttcagtattggaaatatataacgagaccctcagggatttgttatcatcaaatcggtcaagtggtattgactcaacacgaatagaaaacggtgttcctgtttctggaaagcagccatacactattatgcacgatgtcaacggaaacacacatgtttcagacctcactataaagaacgtttctagtgcaagtgagatttcatctcttctgcaacaggcagcacaaagcaggtctgtaggaagaacacacatgaatgaacagtcatcacgaagtcactttgtctttactttgcgtatatctgggaccaattcgaacactgaccaacaagtgcaaggtgtgttaaacctgattgatttggctggaagtgaaagactgtccaggagtggggcaaccggtgaccggttgaaagaaactcaggctatcaacaaatgtctctcctctctgagtgatgtcatatttgctttggcaagaaacaggagcatgtaccctttatgaatcaaaattgacatacct

SEQ ID NO: 2851 - DNA, 366 bp, Glycine max
  Clone ID: jC-gmfl02220052e01d1
aaaccttgaaactggattgacaatttatatgatactaatttgttaaaatatgaaccagacaccatattactggggattctaccccaccagtatggaattttacagcccattccatgatccttatcattatgatacacactgcagccacgtttagcacttctgaaatctgttttactattcttgtcaccttggagaagaaagataaatagctgactgagcatgatcacggaaccaatatcacgatggatgatgctcgatgttgttatcgagctcgtgcatctttgcgcccagaaccttgtccacttgcttgcgatggttcccaagacgaaatgtgggatggcctgcacctgaaactcctgcgccaca

SEQ ID NO: 2852 - DNA, 509 bp, Glycine max
  Clone ID: jC-gmfl02220052e02a1
caattactactttctctctctttgtaacttgtaagcatggagtcctcaaagatctatgcttacctcttcctttgcatgctcttactctcctccgccactcccattctcggttgtggctactgtggcaaaccccccaaaaagcacaagcctgggaaaaacaccaaagacacccacagtacccgatgttaagccaccagtcacaatccctcccattgttaagccaccagtcacaatccctcccattgttaatccaccagtcacaatccctcccattgttaatccaccagtcacaatccctcccattgttaatccaccagtgacagttccacccgttgtgcttccaccaatagtgaagcccccgggttttctccctccaattcttaacccaccaagtacaccaacaccgtccccggggaagggagggaacactccatgttcaccaccaaagtcttctgcacaggctacatgccccattgacacgctcaaactaggtgcttgtgtggatcttc

SEQ ID NO: 2853 - DNA, 385 bp, Glycine max
  Clone ID: jC-gmfl02220052e02d1
agtaattgcacattttataaagtatattattgctgtatctgtccatatatacaaccctcactccaacaattatgtcttagtggtacgcaccatcaccatttgacatctaaattggttcctatcacatatttactgatcttcgaaaaaatatgtaacccacaaataagcatgttaatcagaagcaaacgcttcttaggccgaatcatacatatgccagaccaccctgaatcagtccccaggtccatttagagtctgcttgtgactacattggcatactttctcatagaccttatcgtgactggaccaaatgcatggattgacattttcaactggagaaccaaccacactctttagaagactaatactggcagcccttgtcatgcaa

SEQ ID NO: 2854 - DNA, 582 bp, Glycine max
  Clone ID: jC-gmfl02220052e03a1
aagaactgataataatgtgtttgtatatgggcattttcactaaattttatagtgcagctctgctacttctgtaatcaaaagtttcctgcggcttaattgatatctcgctattttcagctggaataaaaaaggaacttgctgcagctaggaagatgatagctgataggcgtgatcaagagaaaaaagcatatcaagagaaaaaagcatatagcaagatgttccaataacactctggttaatccacatactcaccaggtgcgactttggaagtgcaaaagtcttggtgaaaggcgaaccaaatatatcatagatatgttctagatattatagagcacctgagcttatatttggagcaactgaatatactacagctaggtgtattggttgagcttatgcttggacaggtaggtgattgatgaggggagctcctttgattctgtggtttaatatatgtaaaaataaatttgtttttattgttatttttccaacccttgttccctggtgagaagtgagttgatcaacttgctgagaacatcaaagtaatctttatgattattttctttgttggtactggtatgtctg

SEQ ID NO: 2855 - DNA, 455 bp, Glycine max
  Clone ID: jC-gmfl02220052e03d1
gaacaaataaaacagtagtcttcaattacttcaaccaaaaggtctaacaaactacacgattataagcttaaggcaagtaataaccaactaaaattcaagtttgcaaaactatgatttcttattataaagcccctaccctacattcggggaaacttcaaaaccactatttttcatccaaattattcaatgcaaaggggaagcaacatcattgcctcagatagttgtcgtcgtcattatctgtatattaacctccaccaccagaaccgtatttctttccgaacaagacgagctgtagcttatcataaccagcgagcactccagcacctgtaacagcacgtaatatgtttgcaccggcacctttaaagagtgacttagtaccctcttttgcgacaattatcttgaatgcttccaaagagctcttgtattttacagcttctccagatgtcatcatcatt

SEQ ID NO: 2856 - DNA, 596 bp, Glycine max
  unsure (1)..(596): unsure at all n locations
  Clone ID: jC-gmfl02220052e04a1
gctatctgcttcctcgtagtacttcattgagagagacatggacactgtactaagtactacgctgctactcatgttggcatgctccatcgtgcatgttcttcgttcactacaagcaagaatgagaagaaaatcaaactacaatcttccaccaggaccctctcttctcaccatcattagaaactctaaacaactctataaaaagccacagcagacaatggccaagcttgccaaaacctatggccccataatgcgtttcaccataggccaatcaaccaccatagtaatctcctcaatagaagccacccaagaggttctccaaacccatgactcattattctcggacagaacaaaccccgacatcacaacctcgtacaaccacaaccgttacagcttggtttttctccctgtctcacccctctggcaagaactaagaaaaatctgccacggaaacttgttttcggcaaagacccttgacgcaagcacggaccttaggcgcatgataatgnaagagcttcttaccgatatncgcccaagagcctcaacggcgaagtgtggacattggaagacagccttcatgcatgcattaatttttatcg

SEQ ID NO: 2857 - DNA, 371 bp, Glycine max
  Clone ID: jC-gmfl02220052e04d1
acgaaaaggaggggttatataggaaaccaacaatgtttcacgtaggagatcagattctacattatccctagaaacatactagtagataacaaaaccatcatgctgtcaacctgaatcacgaatctactgacacgagctaatacagcattttaaactacatgctgccgcaaagtgactatgggacccagtccactctatacactacaggctaactgctttaactctaattaagagagaagtgtctgacccaagtagccatagtggatgacatgcaattgagcagtgcctggagtgaggttgtatctaggtgtttactatcactggactccccgacgatcgttgccgttgcatctgcatgtactcgagctaca

SEQ ID NO: 2858 - DNA, 568 bp, Glycine max
  Clone ID: jC-gmfl02220052e05a1
aaattctcgacgaagcaaccctgaccataaccacactctctcaagtcccaagaaagaaccctgtcacctagctagctatcaaactaccgattcatagcactcttctcttcctcacttatgcgaaacgcaaacatggttctcgatctccttttccttatggcaatcttctccgccatgaccactccgtcaacctccgcgatcgacaccttcatcttcggcggctgctcccaggccaagttcacgccgggttccgcctacgaaaacaccgtcaactccctcctaacctcgctggtcaactctgcggccttcgccaactacaacaacttcaccgttccagcctcttccgacaccgtctacggcctcttccagtgccgtggcgacctccccaacgaccagtgctcgcgctgcgtctcgcgtgcggtcacccagctcggcaccctctgctttgcctcctgcggcggtgccttgcagctcgacggctgtttcgtcaagtacgacaacaccaccttcattggggttgaggacaagaccttggtcagcaagaaaatgtggcccgtcgttgggttga

SEQ ID NO: 2859 - DNA, 451 bp, Glycine max
  Clone ID: jC-gmfl02220052e05d1
aaactgatattaatcaaatttcatattcaaaagcacatacatactataaacactttttacattgccaattaatattagctgccaagccaacaacaaaagcaaactaaccttaaaaaatcatgggtgctcaagcaatggtaactttaacagtttttgattttaggggaggaggaagcttctcaacaaccacagtgagaaccccattttcgcatttagctgtaatggctgacacattagcattctcaggcaaacgaaacttcctctgcaaattctgaggccctctcctcttcaacctaaaatactggcacccttacatcctatccatcttgacgcttcctcttcccattgcttcttataacaagagtgatcctatctttaaccgttacctacaaaacaaattcacacatgccaatgcaccataacattaatggaggggaagaaaagaatattg

SEQ ID NO: 2860 - DNA, 592 bp, Glycine max
  Clone ID: jC-gmfl02220052e06a1
attttgagcacaatggcctcgacacaatgctttttgcaccaccacgccctcaccactccagctagagcttcaacacagcgcctagttgtgagcaccaaaccaaaccacattgtttgcaaggcagcacagaagcaggttactgtccaagagggtgaggacactactactggccttgtctctcgcaggttggccctcactgtgctcattggtgctgctgctgttggctctaaggtggcacctgctgatgcagtctatggagaagctgccaatgtgtttggaaaaccaaagacaaacacagacttcctttcatacaatgggaatggattcaaactctcaattccctcaaagtggaacccaagcaaagaggttgagtacccaggtcaggttcttagatatgaggacaattttgattcaaccagcaatgttgctgtcatggtcactgcaactgacaagaagtccatcactgactatggttcacctgaggagttcctatctcacgtggattacttgcttggaaaacaagccttttttgccaaactgatgctgacggtggtttgattccatgctgtgcaactgcaatatcttgagagtc

SEQ ID NO: 2861 - DNA, 517 bp, Glycine max
  Clone ID: jC-gmfl02220052e06d1
gggcgaattcaaaatcaaattctcattaatgcagctataagagtagacaataagattgatagactttaatatttacaagttattttacatttcaaaaattcagattttcctttcggtgaaagaatcactgttaattagaaaacaaaggtcaaaagctttcccagtaccttgggaagttggttttgaacttcagaaatggagactcctagattacattgatgcccatgtttgccgacatttgacagcttcatggcgaacagctctctttgaatcgtcaagacactttgatattgctcgtagaacctgtgtcctcataggatagatacgggcgtggggcaactcagacaaggcaacaagacattgaatagctgtctctcgaacaagctgcaaaagtaggtgaggagacatcaaccattaacattattgtggactttgattggccttgttaaaggagaaagaacagaggcttattgcacttattgacataaatggaggatatttgatttcctctaaatca

SEQ ID NO: 2862 - DNA, 522 bp, Glycine max
  Clone ID: jC-gmfl02220052e07a1
caaaccctccctccctctcaaactgtcacccctttccgtacgtccattcaaacatttcctctttcttatattcttctttttctctcttcactttcaaacacaaaccctaattcactttctaccaattcattcgcaaacaccttttccaatttccaacacacaccaaccatgggctacgaagacaatccgtatcgtgacgaggacggagagcccttgatggactacgacgacattcaatccgatcgcgagccatctcccgagcctcgccgccaggacgacgatttcgatgaggacgtcgacgagtggcgcggccgtgatcggtcgcagacgccggtctatgacaccgatccgtcgcggtcgaagccgcggaagaggctgatcaagaagagcgacgccgggaagcaggcggtggagccggagcttgaggatgaggacgtggaggggtatgttccggaggcgatgttcgacgaggcggacactggaaggaagaggaagaaggtgaaggagggtgggagtgggaag

SEQ ID NO: 2863 - DNA, 507 bp, Glycine max
  Clone ID: jC-gmfl02220052e08a1
ttatggtcccatttactctgttcgagaacgacttcaaatatatatatcagatgcaggagtacttgcagtatgctatggccttttctgtcttgccatggcaaaagggcttgcctgggtggtgtgtgtttatggagttccattgcttgtggtcaatggatttttggtgtagattacatttttgcagcacactcaccctgcattgccacactacacttgctctgagtgggactggatgagaggagctttagcaacagtggatagagattatggaatcctgaacaaggtcttccataatattacagacactcatgtagctcatcacttggtctccacaatgccacattatcatgcaatggaagcgacaaaggcaataaagcccatcttgggagagtattatcggtttgatgggactccatttgtcaaggcaatgtggatagaggcaagagagtgtatttatgtggagccagatcaaagtactcagagcaaaggtgtactttggtacaacaa

SEQ ID NO: 2864 - DNA, 628 bp, Glycine max
  Clone ID: jC-gmfl02220052e09a1
ctcattgctgttcaccattttcaattcattcctgtgttagattccaagtggtttggtttggtttgacataaataaacctttcaagatctcagaggggcagaagatcaaagccaagacaacacactcttatatataaaagagtgtctctgataatttgatctttgtttcttctctttctctcctttgagatttttcagcaccccaccaaggttttgtccgaaaagcttgaatttttcgcctaccctttacaatgatctcttcattgagacaacctgttgtagggatcagtggttctgatcttcttttgaggcaaagacatgcaaccctaattaaggcaaggtcctttttaccctctttgtcaagagaaaagggtcaaagatctcttgtttcagttcaaaagccacttcacattgctgcttctcttggtgttggaaattttgtgtcagtgaagagtgatgatgacaaaaggggtgatttggtgaagtgtgaggcctatgaagcagacagatcagaggctgagggtgcaagcacaccatcagaagctgcaaagaaggtgaaaattgtgatatattttgaacctggtgggcttgaatgtgggttccatattataacagaggtttgatgctac

SEQ ID NO: 2865 - DNA, 490 bp, Glycine max
  Clone ID: jC-gmfl02220052e09d1
ctctcaaatttttagttctgcgatttacacttaataatttcacatccgtttcgtgatgccaaattgcaagatttatatattcaagcatcaccatgccgtggagacaatttcaaacttattgtaaatttagatagaaacatactgcagaggtagaaactcttgatttgcttgataagtctgctaaaaacattttatcgatgtaaaacttaagctaggaccatggtttcaactgttgggggttgaatcttttgctgttggttgccatcttcaatctcccaaatttcaggtaacgcttctttgatattatgaatgctgttcagggcatgatcagctccagggaccaaatctgaatggcccactaaaacagtgttaagtccagttatttttgcactttcaacatttctaacactgtcatcaaagaaaattgttttctttggatccacattagcaatccgaatagcagcttcaaaggctttcacagatggtttac

SEQ ID NO: 2866 - DNA, 523 bp, Glycine max
  Clone ID: jC-gmfl02220052e10a1
aagaaagcaagaatttgaaggaagaggggatatgaatacaaggagctagttgtctatttgcaataacataacatcatcaagcaggatcatcgatccaaccttagtattcaacccagagagatttgtagtaattattactacaacaacttaaaacaatggcaggaggaggttatgtagattcgggaaatgcaaagcaatttgaagggaaggtcactgcattcgtattggttacatgctttgtggcagccatgggaggcttactcttcggttatgatcttggaataaccggaggagtgacttccatggaaccatttctcatcaaattctttcccggtgtctataaacaaatgcaagatgatgtcggccatagaagccaatattgcaaatttgacaacgagctccttacactatttacctcttctctgtatcttgctgctttagtagcttctttctttgcttcttccaccacaaggatgatgggacgcaaggccttcatgtttttaggaggtttgcttttacttgt

SEQ ID NO: 2867 - DNA, 394 bp, Glycine max
  Clone ID: jC-gmfl02220052e10d1
acacattcgggactttggttgatttgcattttgactagcctctaaattcatttatctacaaaaaaccccaggggacaagccgagagcaccaaggggggcctgcccttgaccagcctcaagggacacaatcagcatgggccacataaggggcctgccatgccacaggtgagccaatatcaatcttccgagctaaatcggtatccggaatgccaactccatcctcgatagtgccggccaagctgaaagggacaaacaaggcgcctggtgggaagacttgcgcaccagcggcattggcaaaggcctcagatgttcttgaccatggagtgggccattccactgactgtgacccccgggcggggaaatgcacccctttgtagcttgcaacccactccat

SEQ ID NO: 2868 - DNA, 387 bp, Glycine max
  Clone ID: jC-gmfl02220052e11d1
attaccaatttacctatggcaactatgttggggaaaaaaagacgtgaaaagtgtccaacatgatgctaatagtaaaaatgataacgaataggagctcatcttatacatacatagatgttagacaacacacatttgagttaccccaccggatatatttggaacgtctacaaaggcctgactaaaatattgcatgtaacaaagtacttccatagtgaatgtacctgacatggctatccctatttaaaattgctccgtgactgcatgctttctatgcgccggacatacctggtactatcataagaacgcggtctggaaagatgcctatgtggctgtggttccacccttggctggtttctcagtgatctacggacgattatttccttcaca

SEQ ID NO: 2869 - DNA, 533 bp, Glycine max
  Clone ID: jC-gmfl02220052e12a1
taatgcatcaggttggcaacttgattcaagaatgatgacactacttaattcttattgttccatttatcttaatacttagttgttacatcctcacagaattattttattagggtttcattagtacataccctatagaaatcgtgttaagaaatcaatagtagaatctactaaagaaaaatataagcatttcttgtttgtgaattgagttataaccattagaggcttaattattctttgatttttgttgttatggacctgtgtgtttagaaggctatgacttttgatcttcatttatgaatgtcattgatttgggggtttttttagcatttatatatgtgtagtataaattgtttaacacatgtcttaaatcttcagcattgtggttttggcccttttgggccactatccataattgatatctatgctatttatctcaaattcgtgatccttgttcgctgtttcctttcctttgattttcaactgtttttttttctgatcatgaatggaactctgagatacctctttttctgcaa

SEQ ID NO: 2870 - DNA, 375 bp, Glycine max
  Clone ID: jC-gmfl02220052e12d1
aacgataatgatttttatgagctgaccagttaaacaactaccatgtcaagaaacataagtaaattgaaactaatggaatacaaaaacattgggcccctattgggacccctttggaaaaacttggcccctagtttaccggaaaataaaatccgtagctttatgggttgacttttcccttaaacaatttcaaaaaatcaaaaataaaattttacagcttgggaaaaatacctgaaactggaattttcactttataacatactttaatacaaaagggttttactctaaaagggatgatgaaaatttggaaatttaaagccgctaaggaaaacaggtgtctccagttacaaaaattttgattcacttgagctgactttg

SEQ ID NO: 2871 - DNA, 552 bp, Glycine max
  unsure (1)..(552): unsure at all n locations
  Clone ID: jC-gmfl02220052f01a1
aagagggtttggcactagtaaatggcactgcagtaggatctggcttggcttccgtggtcctttttgaggcaaacttacttgtcattctttctgaagtcttgtctgcaatttttgctgaagttatgcaaggaaaaccagagttcaccgaccacttgactcataaattgaagcaccaccctggccaaattgaggctgcagctatcatggaacatatattagatggaagctcatattgtaaggcagcacggaagttacatgagattgatccacttcaaaagcctaaacaagataggtatgctcttagaacatcacctcaatggcttggaccacaaattgaagtaattaggcatgcaacacagatgattgaaagggagataaactctgtaaatgataaccccttgattgatgtttcaaggaataaggcactacatggngggaatttacaaggtaccccaattggtgtttcaatggataacacccgtttagccattgcatcaatcgggaaacttatgtatgcccattctctgaacttgtaatgacttctacaacaat

SEQ ID NO: 2872 - DNA, 431 bp, Glycine max
  Clone ID: jC-gmfl02220052f01d1
ggattattaatactaactttatttaaggtagcagtagctagcatgatttttatgatgagaagagtccagcgtacaaactccaaattaaaatcagaaaacataaagatctcaacaggattccactgagagaagagaagcagcatcatcagtcatcatccatacccaccaataatccaacaccgtgtggatcaccatgtctaggagagttgtccggagtcagcaacaacaacgggcttggaggtcttaccggagctggaacccaccttctcgatgtccttcacgacgtcaaggccctccaccacctgcccgaaaaccacgtgctttccgtcgagccactccgtcttaacggtgcagatgaagaactgagacccgttcgtgccaggtcccgcgtttcgcatcgatagaatgccgggacccgtgtgcttctttat

SEQ ID NO: 2873 - DNA, 574 bp, Glycine max
  Clone ID: jC-gmfl02220052f02a1
acaaggcagaaagcaagctcatcctataggtttaaaaatggcagcagcctcctccatggctctctcttgcccatccttggctggcaaggccgtgaagctgggcccatcagcccccgaagtcgggagggtcagcatgaggaagaccggcaccaagcaggcctactccggaagcccatggtacggaccagaccgcgtcaagtacttgggcccattctctggcgagcccccgtcctacctcactggcgagttcccaggtgactacggctgggacactgctgggctttcggccgacccagaaaccttcgccagaaaccgtgagctcgaagagatccactccaggtgggccatgctcggggccttgggctgcgtcttccccgaactgttgtcccgcaacggggtcaaagttggagaagctgtgtggttcaaggccgggtcccagatcttcagcgagggtgggctgcactacttgggcaacccaagccttggccacgcccagagcatgctcgccatctgggccacccaagttttccaatgggtgctgttgaaggttatcgaattgctggtgggccccctc

SEQ ID NO: 2874 - DNA, 411 bp, Glycine max
  Clone ID: jC-gmfl02220052f02d1
atcaagcatgtaacttcttaacgttcaccaccaagaagctggcaacatagacacaaaggagtaaattcagcccatagtaaaacgcagcctccatgttcatcatttcatttccctatacaaattctgttagacatgacaaccttagcagaacatttagtaccagttccaggagaacactttttggaccccttataccctactatgaagatttctttgcctatcatgacatttgaagctgtgggaatgccattactaccccagagatggagaagagtaatagcatcatccacgcaggaaatggttttttgatatacctgactttcttcaaccccttgactcttctgatgtcttctccattggattctaatttcttttccaaaactggccttgaactcttgtcgggagacgtat

SEQ ID NO: 2875 - DNA, 218 bp, Glycine max
  Clone ID: jC-gmfl02220052f03a1
aaattatttggcatttgcttagcttaggcataaagttttgaattcttattttgcttacagatcagatcttcttgtattcttttattcttcttttttttatgaagagtttgtacagtatttttaattcatgtctcgtgtgttggaattaaagtagatgtgaaatgaagcttgagaatccaatgttttggtttaaatgaatgcatctgatctgaggtccc

SEQ ID NO: 2876 - DNA, 277 bp, Glycine max
  Clone ID: jC-gmfl02220052f03d1
cataatctatccaagccaaaaaattttcgggccctaaattagaaatttggccaactaatgccggctcttacaattccttcaggggcccttcccttctggttgaatatgactttacccccaaacgaaaggaccatttcaggcttaccccccaggaagggtatacggcaaatacccctttacctcaatttcgtcgaccccaatttttcggccagatctttagccccctgtacatgggatgcctttgtcccccgacccggttgaagctacagcctaattc

SEQ ID NO: 2877 - DNA, 602 bp, Glycine max
  Clone ID: jC-gmfl02220052f04a1
ggcccattctagcaagagtgaacgtgaaagacacggaaaacgtaacggaggaagcattgatcactacaatgagaaaggctatcaatttctattcctctattcaagcccatgatggccactggccagcagaatctgctggccctttgtttttccttcaacctttggtaatggcactctatattacagggtccctaaatgatgttttaggaccagaacaccagaaggaaattattcgttatttgtataatcatcagaacgaagatggaggttggggattgcatatagagagtcacagcacaatgtttgggtcagcgttgagctacattgccttgagaattcttggagaagggcctgaagatggtgaagacagggcaatggctagaggcagaaaatggatcctcgaccacggtggtttggaagctattccatcctggggaaagttctgggtcacggtacttggagtttatgagtggtcaggctgcaacccactttcaccagagatatggcttttgcccaagtacgcccccattcatccagggaaaatggtatgctactgtcgcttaattacatgcccatgtcatacttatttgggaagagatttg

SEQ ID NO: 2878 - DNA, 431 bp, Glycine max
  Clone ID: jC-gmfl02220052f04d1
gaacgcaaacaaagagggaaataaatccctacgagggacacatggcaattgaaacactgaaggtataaaagcccaaggggtcaaaaccataagctaagacggccaactgaggataagcttgacggagctggagctccagacgtaacgacacccggacagaataatactgacactcactggaacgactcttccatgcttacctcactacagcacgtaacaggcgatctaggtgaaccacagatactaagactttccgaattctcaggtggacaacggaacgcgacattgcaaggcctgaaacgatacatcctacacgacagtatactttctgatccctaaagcttgtgtgcaagaccgacgagcttgcaccatacgcatgaactgtgacactcaactgaccttggaagaaacatgcgggtaccctctgaacc

SEQ ID NO: 2879 - DNA, 117 bp, Glycine max
  Clone ID: jC-gmfl02220052f05a1
gtcgggatcctataattatgctcccaacatggggaaagaccatttataataacgatactcgagatgtgtatgtaatctttattcccctgtaaacgaataatccttttgatcttgtct

SEQ ID NO: 2880 - DNA, 363 bp, Glycine max
  Clone ID: jC-gmfl02220052f05d1
gacataaacaatgaaagtcatattgaattaacaatactaaaatgaacataatcatgatcattcatgggaaagtttacaagatgctgacctgaacagatcatgttatggagatgaccatccaaatctgaatgcacctgcgttgagtaaggctcggagacattcatatgaaggatgaacaggcaccgacttaataggtacatggggaaccgtccgcttggatccttgataatgcaaaacggtttgatcattggagggaggcacagacttaagatgagcttcatgaaccaatggagaatgaggctggggaacagggctgtcgtctaacacgggtacatgctatgattttccggacggtgaggacca

SEQ ID NO: 2881 - DNA, 539 bp, Glycine max
  Clone ID: jC-gmfl02220052f06a1
caacattattgttttgaaaattcatatattcgatctcattctgtgcccttttctctgtgtttaccaaacaacaagtctcttcccttagtaaaaaaatatccttctttcttcttctgaatatcaatcttgcattaatccatggcagccaaaacatccaccaacggcacccatcattctctacccgagtacattccaaaccgcattcctgacccacattatgtccgcatcctggacaccacgcttcgcgatggcgagcaagcccctggagctgccatgacgtccgatcagaagctccaaattgctcgccagctcgcaaagcttggtgtggatgtcatcgaatggggctttccttcagcgtcacaggaagacttcaacgctgtcaagatgatagcgcaagaagttggcaacaactgtgacgctgatggttatgttcctgtcattgcggccctatgtaggtgcaatgagagggacataacgagagcctgggaggctctcaagtatgcccagaggcccaggcttatgcctttcatagcagtgag

SEQ ID NO: 2882 - DNA, 542 bp, Glycine max
  Clone ID: jC-gmfl02220052f06d1
caccaaaacagtatttcattgcaaaattttacattactttttacaatttgtcttaccgccctagtaccaagcaaacgagtatgttctttgctttgattattgaaatgaggtactaaccataccgtaagtacaccacccaagtgctgatcaagccaatcatccacaatcttgtgcttccaagatcaagcaaaggttcatttggtttgaaaccaagattgctttgctatcacatcctcagtacccatggcaacggacatccaactgatcaggtacaatggatgttccaatgtgtggccttgcaacgcttaccgctcttcaaactcaagcgatcatgtcttcagaggtagtactcaagcaagccttagcactgccactgctagcaatgcggcggctctgaagtaaacttctcttaggctcttgtcgaccttttgaatcatttgctcatctttcagtccaagctttcctgcattctggttcatgcagacaattgtatcccttagcttattaacttgccaagaaagccaaacagcccaaatccaaac

SEQ ID NO: 2883 - DNA, 500 bp, Glycine max
  Clone ID: jC-gmfl02220052f07a1
acttgaagcattgcattctgttatttaattccactacgtatacgcacattctcctgaaagacaacaatggcaccaacagccaagactctgacttacctggcccaggagaaaaccctagaatcgagcttcgttcgggacgaggaggagcgtcccaaggttgcctacaacgaattcagcgacgagatcccagtgatttctcttgccggaatcgacgaggtggatggacgcagaagagagatttgtgagaagatcgtggaggcttgcgagaattggggtatattccaggttgttgatcacggcgtggatcaacaactcgtggccgagatgacccgtctcgccaaagagttctttgctttgccaccggacgagaagcttcgttttgatatgtccggcgccaaaaagggtggattcattgtctgcagccatctccaaggagaatcggtgcaggactggagagaaatagtgacatactcttcgtacccaacaagagagagggacta

SEQ ID NO: 2884 - DNA, 436 bp, Glycine max
  Clone ID: jC-gmfl02220052f07d1
gaataaaacacccaaattggtgaaatttgcaatttaggtacacaattgttcaagtatccatcagacaagaggaggctgaaccagccacattattctatgagtcctattaaaattaagcacttgactaagataatgacaaaagaagcacagtgcatacaaaaaccaaggggtgaaatattgatcatgaaactaagcagtatgagaaggttggtgctcttcctggactacttcatgttgctcttgctcttgctgtggtttttctccttgccaggtccaaacaatgtccttaaacgctggtcttatatcctgtttaaaaagcttctggtactccatggtgtcaccattggactttctaagttccaccatatggaaggtggggtaatctcaaaaatcttagcatcaacacccaaagctgcttatctgccttccttggaac

SEQ ID NO: 2885 - DNA, 443 bp, Glycine max
  Clone ID: jC-gmfl02220052f08a1
ctatggtcccatttactctgttctagaacgactttacatatatacataagatgcaggagtacttgcagtatgctatggccttatctgtcttgccatgggaaaagggctagcctgggtggagcgagtttatggcgttccattgcttgtggtcactggattctcgacgtcgaatacatttacgcaatacacttaccctgcattgccacactacacttgctgtaagtgggactggttgagaggagctttagcaacagtggatatagattatggaatactgcacaaggtcttacataatattacagacactcatgtcgctaatcacttgtgactccacattgccacattatcatgcaatggatgcgacaaaggcaatataccccatcttgtgagcgtctcctcggagcagatgggactacatttgtcaaggcgatgaggacagaggc

SEQ ID NO: 2886 - DNA, 508 bp, Glycine max
  Clone ID: jC-gmfl02220052f09a1
cacgtagacgtagaatggaactgaacacagacgtagctgcaagcactgacgaagaatgagagagtcctgaaattcacacacaaacacaacagtcttctcctttctcttcacacattccatatgcgagcatgattctatttaatacccatactacgtgaaacactagacacacatgattgggtcttggaggaatctttcatcatgtggtggttacagccctatgttcctcgtaatcctcagtgtcgtcgtacgttcacgattctgtggctcctgtacaaaacgggattgatgcacaccataagaatacgcttcccaagggtcgtggattggttccacgtgtaccagctcctgacagtacccgaatttacactaaaccaatatgcagccgaataacctttagcgcaagacactctctatctgcattccgtaccttgaatagatgacgctgactacaccagtctcataaccgctaatgaccatagcgacatcggtctgcgccttgacccga

SEQ ID NO: 2887 - DNA, 417 bp, Glycine max
  Clone ID: jC-gmfl02220052f09d1
acgaaataaagaaacttgttttattgaattgattaacgaactttacagcgtgattgctcatagcgggccttctcttccgctattatttacaagccactgcccaaaaatatatatcatgaaacacaaaagcctatcttagacgtggaagcagagcttgataaactctcctgcggtagtaatgagcttcgcagtcaccattaggatttggggtacaagaaattttttggggaggtggttgtgtttagatgactgttccactaggaattaaagcatccttgattactgtgacaatcccactttttatgaaatacccatctgtttcccttgcagcttcttggacattgtcactgttaataatcttgacattttccccaattcgagcattcttgtcaataattgcccttttgatatgagagt

SEQ ID NO: 2888 - DNA, 525 bp, Glycine max
  Clone ID: jC-gmfl02220052f10a1
gcaacatcatgcaatttttaattgcttccatcaagaaggatagacaaatggaagctctcgtggaaaagctatgtcatcggtttagtggtgttacagatgttagacaatgggaatatatatcttattgtctctctcagttatcgtttactgaaaaagggatgaaaaaactaatagagttatttaagtcctatgaacatgtcttgtcagaggattctgttatggaccatttcaggaacatactgaacaagggaaagaagtttgcaaaacttgaacttaaagcttgcattgaagagtttgaggataagctgaataagtttcacacagataaaaaggaacaggaagttactgctcgaaatgctcaaatccatcaacagaagattggcagcagggaaggttttaccgtgactataaattctgaagatcacttgtcatctaattcttcttcagatgaaacagaaggtgaaataattgatgcttacactgaagaggcaactatgcctctaaatgagagatcacgatctaaac

SEQ ID NO: 2889 - DNA, 506 bp, Glycine max
  Clone ID: jC-gmfl02220052f10d1
acgaaataaagaaacttgttttattgaattgattaacgaactttacagcgtgattgctcatagcgggccttctcttccgctattatttacaagccactgcccaaaaatatatatcatgaaacacaaaagcctatcttagacgtggaagcagagcttgataaactctcctgcggtagtaatgagcttcgcagtcaccattaggatttggggtacaagaaattttttggggaggtggttgtgtttagatgactgttccactaggaattaaagcatccttgattactgtgacaatcccactttttatgaaatacccatctgtttcccttgcagcttcttggacattgtcactgttaataatcttgacattttccccaattcgagcattcttgtcaataattgcccttttgatatgagagttcctgcctataccaattgggacactgcctttggcagccagaaacctcttatcagcctccgtctcgtaataatctggccccattaataac

SEQ ID NO: 2890 - DNA, 500 bp, Glycine max
  Clone ID: jC-gmfl02220052f11a1
ttccattctctctgtgtatttccctacctctcccttcaagatgcagatcttcgtcaagaccctcaccggcaagaccatcacccttgaggtggaaagctctgacaccatcgacaacgtcaaggccaagatccaggacaaggaaggaatccccccggaccagcaacgtctcattttcgccggaaagcaacttgaggacggccgtacccttgctgactacaacattcagaaggagagtactcttcacctcgtcctccgtcttcgtggtggcatgcagatcttcgttaagacactcaccggcaagaccataaccctagaggttgaaagctccgacaccatcgataacgtcaaggccaagatccaggacaaggagggtatccccccggaccagcaacgtctcatcttcgccggaaagcagctcgaggacggccgcaccctcgccgactacaacattcagaaggaatcaacccttcacctcgtcctacggtctcgtggtggcatgc

SEQ ID NO: 2891 - DNA, 449 bp, Glycine max
  Clone ID: jC-gmfl02220052f11d1
agcatatacaatgctattttataactgatatttgaagcgggagcattaatacaggccattatgtaactatgaactatcaatatacgatcgttaataagtccgaggtacacacacttaaggccatggtacacttatgtgatcaacaacaacttcccccttattggatacattatgccaaaaccaggtaggagcattttccgtaatacaaaaacccttatctttggcatgatttatcaattctggcatcaggatacgctctaaactctgatgcatgacaaggaggtagccaccaggggccatattgatatgcaaacaatgccacaatcggataggatgcactattcgcgtgaccacacatgttctgacacaattacctcttgaagaagccatgttcaccccagctctgaacccatgaatttcttatgagccaatttgggacacccttttta

SEQ ID NO: 2892 - DNA, 498 bp, Glycine max
  Clone ID: jC-gmfl02220052f12a1
cttcccttccctcacgatctgtggaagacaccaatcttctctccacgcccttcttgggtaaccgtctgaagtgcagcaatggcagatggattgcattcgcagcatccatcggtagttcagaagttatctggacagtcttatcttgtgtccaggcttgctcctaatcactccagaaactgttctaccactggtagttacttcaatggaggtttgcagtcttcaggtttggttccagtcacggcacacgcgccggctgagaaaggggtgtctggatttttgttggatttcctgatgggcggagtgtcggcggctgtgtccaagacagctgcggctccaatcgaacgagttaagttgctcatccaaaaccaggatgaaatgatcaagagtggtcggttgtctgaaccatacaaaggaattggcgattgtttcactcgaaccatgaaggatgaaggggtgattgctctttggagaagaaacactgctaatgttatcagatac

SEQ ID NO: 2893 - DNA, 466 bp, Glycine max
  Clone ID: jC-gmfl02220052f12d1
aaggagcaaggagtactaaaataataatagggccaacgaacatcatgaattataaagtaacaagagattgaagaaaacaatggtaataaatttaattttagcccctcgacagggtccaatactgacactcaatgatacaatagtactatgtaacagcagcactgaagcctaagcctctgctctagaagaacaatacatgggcagcccagctcatggctcatcatccaatgaccttattcaagcacctgatggttgcagctccactgtggacctaagatacagctggaccaggagacatggaatgctggcttgatcccggagctcctaccggaggaacggtagggccaagcaatgacggcgactgtgctggtgcagtgagcttcatactctattttgtctacttctttgacttgtgagcggctgccggaacctgagcgctgtgtgctaccacgggtgcgggagacgt

SEQ ID NO: 2894 - DNA, 490 bp, Glycine max
  unsure (1)..(490): unsure at all n locations
  Clone ID: jC-gmfl02220052g01a1
gacaagagcacaagcacaacacaacacaacacaacatcctccaggaacgggaatcccacgccgcttgtaactccatctcggtgtttgattctctgcttcttccttcattccccttcggaatcgatcgatccatcttcctcttccaatggcaacccctaccgacaataataacaaccctgcacaggaaaaccctaacaaaaccctagaccccaccgaaccagatccaatccctgccactgaggacgccaccgccactaagggctccgacgccaaggaccccgccgacgccgacgccgacgccataacttctccgccgcccgattccggaaacgacgctccgctctccgatattcagaagaagatgcgccgcgccgagcgattcggcatttccgtccagttgtccgagaaagagaagcgcaattcccgagccgaaagatttggcactgtctccgcatcgcanggatcagagccatcaaaatcggaggatctg

SEQ ID NO: 2895 - DNA, 514 bp, Glycine max
  Clone ID: jC-gmfl02220052g01d1
cattaaaaaaatatttcttataatgccgtgttcaactcaaggcaattacacctctcatgccacggtcatactattcaaaacaatttttacaagacaccaatatgtatatatatagctgaagaccccacaccctaaactaaattactgtgtgacttgcacttcagcaatttcattaattgatcgtcgccatatccttctaggagacgtacttctcttcacagaataaaattttggttcttccaactgaatttctagattggacaaatctaatgttagcttttgcttaatgaaagcatccaaatcaaagtcactttttccatttgcatcatcatcatcctcgtcttcactagaagaatcaactctgtttttatttgttcccgcaatgttcctcaaagaatccagtggcatgttgtacgaatttgggttcagcttgaggattctctttaaactgtcaatagccgggtctaaaatacctaggaatcccataacccatgaagcatcatctacaacttct

SEQ ID NO: 2896 - DNA, 556 bp, Glycine max
  unsure (1)..(556): unsure at all n locations
  Clone ID: jC-gmfl02220052g02a1
ccagtgttgttacttgtgagacttgttctgcatttggtgcttcattgtcgcctccagatccaactaactgcgttcaaccggacccagaaaaagaccctttttgcccaccaccccccttcaaagactacgagctccctccacacgatgacaagacattaccccttcgaattagaccagctgctcatttggtcactgatgattacatagccaagtacgaggaagccgtgaggcgcatgcaagaccttccacctgatgatcctcgcagtttcatgcaacaggccaatgtccaccgtgcctactgcgatggtcgcggctatactcaaaagggcttcgctgactacaagcttgacgttcacggctcctggatattctttccttggcaccgctggtatctctatttctatgagaaaatcttggggaagatgatcggtgaccccactttcgctcttccgttttggaactgggacaatcccgncggcatgagaatccctcccattttcacagacaaaagttcgcctctctacgacgaacacaggaatagcgatcatgtaaatgc

SEQ ID NO: 2897 - DNA, 424 bp, Glycine max
  Clone ID: jC-gmfl02220052g02d1
cattaaaaaaatatttcttataatgccgtgttcaactcaaggcaattacacctctcatgccacggtcatactattcaaaacaatttttacaagacaccaatatgtatatatatagctgaagaccccacaccctaaactaaattactgtgtgacttgcacttcagcaatttcattaattgatcgtcgccatatccttctaggagacgtacttctcttcacagaataaaattttggttcttccaactgaatttctagattggacaaatctaatgttagcttttgcttaatgaaagcatccaaatcaaagtcactttttccatttgcatcatcatcatcctcgtcttcactagaagaatcaactctgattttatttgttcccgcaatgttcctcaaagaatccagtggcatgttgtacgaatttggg

SEQ ID NO: 2898 - DNA, 528 bp, Glycine max
  Clone ID: jC-gmfl02220052g03a1
atgatgcattcatcgcatatctgaggaagatcaatgaccttcccactgcaaagtcttatgccacaaggaccatccttttcttgaaagatgatggcaccttaaagccattggccatcgaattaagtttgccacatcctaggggagatgagtttggtgccgttagtagagtcgtcttgcccgcagaccaaggtgctgaaagtacaatttggctaattgccaaggcatatgttgttgtcaatgactcctgctatcatcaactcatgagccactggttaaatactcatgctgtgattgaaccatttgtcatagcaacaaacaggcatcttagtgtgctccaccctatttataaacttttgttgcctcactatcgtgacaccatgaacatcaatggactcgcaagacaatcactcatcaatgcaagtggcattattgagcaatcatttctgcctgggccatttgctgtggagatgtcttcggcagtttacaaggggtgggttttcactgatcaagcccttcctgcggatctta

SEQ ID NO: 2899 - DNA, 451 bp, Glycine max
  Clone ID: jC-gmfl02220052g03d1
aaagaaatcagataagatagcacaattacatttcacaaggaaaggaactggtcaacaacattacaaatcaggcacattacattaataagaggaaaccgaacccaacaaccccgcatcaaaactctgtgtggaccctcccctccttccagctaaggcttaggttttccccttacagaagcaatctaagttctgaccatttcaggccaagtatacttaactactatatgacatgtagacgtttacaataaacaaaggctattttgcctgaggaaataagatccatcagtagcaacagagaatcaaaaggtatacatattttgatggatcaactgcagccatccagcaccccaagtctcagtccaggttcagcttgaaactacactggtcaagccacagaacatgctaaattagacaaaaataatggcgccacttttgattaacttatcaacta

SEQ ID NO: 2900 - DNA, 583 bp, Glycine max
  Clone ID: jC-gmfl02220052g04a1
ggacgagaaagtagacacagccatgtccactactggtactgttctggcttccactccaacacaaaggctattaggcaaagtggcattggttactggtggagcgtctggaattggagaaagcattgtgcgcctcttccatatccatggtgctaaaatatgtatagctgatgtgcaagacaaccttggaaagcaggtctgtcagtctcttggtgatgaagcaaatgttgtttttgtccattgtgatgttacagtagaggatgatgtttcccatgcagtggacttcactgtgggtaaatttggcacccttcacatcatagtcaacaatgccggaatttctggatcaccttgttccgatatccgcaatgcagacttatcagaattcgataaggtgtttagtgtaaatacgaagggagtgttccacgggatgaaacacgctgctcgaattatgatcccgaagaagaagggctcaatcatttctttatgcagtgtagcaagtgccataggtggcttaagaccgcatgcatacacagggttcaagtatgctgtattggggcttacaaagaatggtgcagcttaattgggg

SEQ ID NO: 2901 - DNA, 452 bp, Glycine max
  Clone ID: jC-gmfl02220052g04d1
aaagaattcatataagatagcacaattacattttacaaggaaaggaactggtcaacaacattacaaatcaggcacattacattaataagaggaaaccgaacccaacaacctcccataaaaactctgtgtggacccttccctccttccagctaaggctttggttttccccttacagaagcaatctaagttctgaccatttcaggccaagtatacttaactactatatgacatgtagacgtttacaataaacaaaggctattttgcctgaggaaataagatccatcagtcgcaccatagaattaaacgtgtttacatattttgatggatcaactgcagccattcagcaccacaagtcttattccaggttctgctcgaaacttcactggtcaggccacagaacatgctaaattacacaaaaaataatggcgccactttagattaacttatcaact

SEQ ID NO: 2902 - DNA, 587 bp, Glycine max
  Clone ID: jC-gmfl02220052g05a1
atgaaaatgggttcttctttgtggactttgtgtctaattttggcttcactagcctcttctgcattctgtgcctttccacggaggccagtggatgttccattcggcagaaactacgttcccacttgggcttttgatcacatcaaatacttcaatggaggttctgagattcaacttcatcttgacaagtacactggtactggcttccagtccaaagggtcatacttgtttggtcacttcagcatgaacataaagatggttcctggcgattcagctggcacagtcactgctttttatttatcttctcaaaatgcggagcacgatgagatagattttgagttcttggggaacagaacaggacaaccttacattttgcaaacaaatgtgttcaccggaggcaagggtgacagagagcaaagaatctttctctggtttgatccaacaaaagcataccacagatactctgtgctgtggaacatgtatcaaattgtgttcctagtggataacatcccaataagggtgttcaaaaacctaaagggctttggagtgaagttcccctttgaccaacccatgaaggtgtacaacagctt

SEQ ID NO: 2903 - DNA, 163 bp, Glycine max
  Clone ID: jC-gmfl02220052g05d1
cccctatataacttgatagattattgaccatcaaaagcaagaccgaacacgatacaggacaaatggcaattacatatcggttcacccgaggctcaacgtcgctggggtataccatgcagggtctgtgtacactttgacagctatatacgatgcggaagccgaa

SEQ ID NO: 2904 - DNA, 592 bp, Glycine max
  Clone ID: jC-gmfl02220052g06a1
ttttctcttctcactgcatcgcttcaggttcttctgaaaagatgtctcgcgtgtatgttggtaacttggattcacgagtcactgagagagatctcgaagacgaattccgcgttttcggagttattcggagtgtttgggttgcacgtagaccacctggttatgcttttattgactttgatgaccgcagagacgcacaggatgctatccgtgaattggatgggttttcctcaactagctagctaagtcttctttttggcctatggggcaagcagatgctgctctctctttcttctacttctgccttggcctgcagtcatggttttttcttggttgtgtcttcgtcaaagtctgctgctttgtacagattgactacttctactactactgcatgttaagagaatttagaatgtgaacacaggggatttgcactgctatcgcgagctacacttctgttgcattatgggttcgtttatgagatatgtgcttctacacttaacctatggggaccatgtgcgtgcttgccttgtgctgtatatgttccctgtgggccatttgcgtgctcccattagttgttagcgcccatggacttctg

SEQ ID NO: 2905 - DNA, 278 bp, Glycine max
  Clone ID: jC-gmfl02220052g06d1
agctgcgtagccgtattgccgggtcgccgcgctccgtcgagggcggccgccctttttttttttttttccccttttttacacaataaattaatgtccatcaaaagcgggacctaataggaaactggaccattggctcccacatatctgttcacccaagactctaactgcgcgggagtatacctgcaggtatgtgcacactccgacagcctcatacgacgcggacggcgataccaccagcacgcgctgatgctcatagagacatagcatctttggctatg

SEQ ID NO: 2906 - DNA, 514 bp, Glycine max
  unsure (1)..(514): unsure at all n locations
  Clone ID: jC-gmfl02220052g07a1
cagcgagtgagtgagcgagccaggtagggttttcggtgttcccctctttgtgttcgttcgcgacgatggggtccatccccgatccaggcgagttgagcgagttgactcagccgagcttcgacgagttccagcgccaaacctctctcatgaccagctgcaccctcctctggaaggagctctccgaccacttctcctccctcgagcaagacctcaaccacaaatccgaagccctcaagcgcaagattcacaccctcgacaactccacctcggactccctccgcctcctcgaccaccgcgaaacctctctcgacgccactctccagatcgccctccgcacgctcgacacgcgccgcaccgctgctctctccgccctcctccacgacgctgacgacacctnccccgacggcgaggtcgatgacaccgccggcctcgtcctcaagctcaagtccttctgcctncgcatggacgcgttcggcttcttcgccttcgtcagcgccaagaagaaggagctgga

SEQ ID NO: 2907 - DNA, 467 bp, Glycine max
  Clone ID: jC-gmfl02220052g07d1
gaataaaacacccaaattggtgaaatttgcaatttaggtacacaattgttcaagtatccatcagacaagaggaggctgaaccagccacattattctatgagtcctattaaaattaagcacttgactaagataatgacaaaagaagcacagtgcatacaaaaaccaaggggtgaaatattgatcatgaaactaagcagtatgagaaggttggtgctcttcctggactacttcatgttgctcttgctcttgctgtggtttttctccttgccaggtccaaacaatgtccttaagcgctggtcttatatcctgtttaaaaagcttctggtactccatggtgtcaccattggactttctaagttccaccatatggaaggtggggtaatctcaaaaatctcagcatcaacacccaaagttcctttcctgccttccttggaaccttccaatttgagcaagccttcatcttttct

SEQ ID NO: 2908 - DNA, 494 bp, Glycine max
  Clone ID: jC-gmfl02220052g08a1
cagaaagcaagctcatcctagagttttaaaaatggcagcagcctcctccatggctctctcttccccatccttggctggcaaggccgtgaagctgggcccatcagcccccgaagtcgggagggtcagcatgaggaagaccgtcaccaagcaggcctcctccggaagcccatggtacggcccagaccgcgtcaagtacttgggcccattctctggcgagcccccgtcctacctcactggcgagttcccaggtgactacggctgggacactgctgggctttcggccgacccagaaaccttcgccagaaaccgtgagctcgaagtgatccactccaggtgggccatgctcggggccttgggctgcgtcttccccgaactgttgtcccgcaacggggtcaagtttggagaagctgtgtggttcaaggccgggtcccagatcttcagcgagggtgggctggactacttgggcaacccaagccttgtccacgcccagagca

SEQ ID NO: 2909 - DNA, 510 bp, Glycine max
  Clone ID: jC-gmfl02220052g08d1
ggctgcttaagataatgacaaaaggctatatatgcatattatctaaacttgtacagttcatatcagtcactttatgtgttaatattgtagctgccatgaaacttgcagaaaaagttatcacgaaaacaaactggttgcacgataagtagctctccaaattacacagacaaataaacctaacaattgtcccacatgtcatactcatagtccaaaagcacatattcctcaagatgaattgtgaaaataccagtttgagcttgcaagaaacattgtatgcatctgatgagaattcaacccaagttcaatcttctatttgataaaatgaccatgagcatgatagagctgtgataaggagcagctttcacttggcattagttactatcagcaaaactgaaactcacctgcaaggctcatgtagaggatgaatcggaggcaacggcctcttgtcttggccttctgcgtcagggggagggccatctctccgtctctcataccttctactctcattct

SEQ ID NO: 2910 - DNA, 572 bp, Glycine max
  unsure (1)..(572): unsure at all n locations
  Clone ID: jC-gmfl02220052g09a1
caacttccttgtgcagccaccattattgttgttattggagatttcaattctttgtctttcaaactcctcaagttgggtttatgtgatgatggctctcaacatctcttctccagctgaagtcaagtccatttttttcgctgattccttcaagtctaactgcctcacagcaaaattctcaggtgggtttgcttttaagagaaaagagcgtagagcagcatctggaggacgggtttattgctcagtgcaggcaacaccaccaccaccagcctggccgggacgagcggttccggaacaaggtcgcaagacttgggatggaccaaaacccatttcaattgtggggagtactggttcaattggaactcagacactagatattgtggcagagaatccagataagtttaaagttgtggcacttgcagctggttcaaatgttactcttcttgcagaccaggtaaaaagatttaagcctcaacttgttgctgttagaaatgagttcctaattgctgaacttgaagaggcctngcatgatgtcgaagaanaacctgagatcatccctggagagcanggaatca

SEQ ID NO: 2911 - DNA, 578 bp, Glycine max
  Clone ID: jC-gmfl02220052g09d1
tgccgtagctaattgcgtttcgacacgctcactcgtcgtcaggtacgccctttgtcgtcctttttttttttttttatttttttgtagttgtttttgcaactttttatcgaaagggcattcttacctaattcaaaggcaaaacctaaagttaacactaagaaaaataaaagcatttttattaaaccaaatataccgttagcgtacgcacttacaacataagggtatactaatagtatttctaaattaaatcataagaataataaagcaaatatgaaaaatgatatactgaattcacttctattttgtcctaaaaatgaatgatatccacactcgaaagcactgtctttttcttcgtatgggttatgtggggcaaagattaaatttacagctaataatattattgctaatataggtatagaatgtagaaaaaatgtttgactcgtcatgtaagctttaaataatataagactaagaatactaactatattaaatcattctcctggtatatatataaataatctaagtaaaagagtttaaacggaaatagtgctactgaccgcactgtatattgcaatatt

SEQ ID NO: 2912 - DNA, 550 bp, Glycine max
  Clone ID: jC-gmfl02220052g10a1
gttggatcaagaagccggccacagttgaggaggcctacttggattattgttctgctttccatagtgtgtgtgtttctgattgctgcctatgtttaccccccgcctagcccttcttcgtgctccgtcttttcctcacatggttgcggtagtagtgcttttgaactgcctccagctgctcatacccgcgaattgactgatgcggaggttcagtctcgggttgtcattaatgagatcctgaactattatcctgtgcaaaccaagaaacctaaagttgcttttttgtttttgactccgggctcgttgcctttcgagaagctctggcacatgttctttcagggtcatgagggaaaattctctgtttatgtacattcatcaaaggaaaaaccaatacatgtcagccccttctttgttggccgagacattcacagtgaaccggtaggctggggaaaaatttctatggctgaggcagaacggagactctcggcacatgcacttttagaccctgataaccaacattttgtcttattggctgaaagtcgtatacctgtgc

SEQ ID NO: 2913 - DNA, 74 bp, Glycine max
  Clone ID: jC-gmfl02220052g10d1
gtggcaggaaaaataccatcacagggccatccaaactacaatttgcaaacaagcatttacaaaatggtggacac

SEQ ID NO: 2914 - DNA, 512 bp, Glycine max
  Clone ID: jC-gmfl02220052g11a1
atcccctcccactctttctctctcttcactttccaacgttggctttctctcgcgttttccaattccccccaaatctcacgcctagggtttctatcgcaaaccctccctacctccaaccaggtcgcgtgcaaagggatttcgaagcttcggaagaaaaaaatgaaacctgttttctgtggaaacctggatttcgacgcgcgtcaatctgacgtggagaggctcttcagaagatacggcaaagttgatagagttgacatgaaatccgggtttgcttttgtctacatggaagatgaacgtgatgctgagtatgcaatcagaaggcttgatagaacagaatttggtagaaagggtcgccggattcgtgttgagtggactaagcaagaacgtgacagtagatgatcaggtggtgattccagaaaatcttcatctaattcaagaccatccaaaactgtgtctgttataaattttgatcctggtcatgccaggacacgggatctggagagacattttga

SEQ ID NO: 2915 - DNA, 447 bp, Glycine max
  Clone ID: jC-gmfl02220052g11d1
agcaaagacaatgctatcttataactgatatttgaagcgggagcatcaatacactacaatatgtaactatgaactatcaatatatgatcgttattatgtctgtgatacacacaattaaggccataatatacttatgtgatttacaacaacttctagcttattctatacatcatgccaacccaactaggagcaattttcatcatacaattacacttatctttaatcatcattcatcaatactggcatcagcaatacgctctaaactctgaagcatgacaaggtggtagtcaccagggaccatattgttatgcaatctatgccacaattggataagatgcacaagttgcaacaccacacatgttcttacccaattccatcttgcagtagccattttcaccccagctttctacccatgaattgtttatgagccaatatgggacaccattt

SEQ ID NO: 2916 - DNA, 532 bp, Glycine max
  Clone ID: jC-gmfl02220052g12a1
caagttctcaaatcactctttttcttcacccttctgatctgctaattctcaaggtattcaaaattgggtggttttcgattgaactgtgatgtccaagccactgctaggcatagcggaagaggaaggtcaaagcaatgtcactttgttggtttcttcctcagccaccatggaaagtgtgtgcctgaatagctcaaaactgaaagagcgcaactacatggggttatctgattgttcatctgtggacagctccgcgccgtccttctcagatgagactaagagcaatctgaaccttaaggctactgagctcagactggggcttacggggtcgcaatctcccgaacgagattcagatctttgcttgagaagttcgattcagtttgatgaaaagccactgtttgctttgcatcctgcaactgatgaacaccattcctcatcaaagcctgctgttttgggaaacacaagagggttctcaaatgtcatgagtggattcgccgatgagaaattgcttgttagttccgaagtccacacaata

SEQ ID NO: 2917 - DNA, 429 bp, Glycine max
  Clone ID: jC-gmfl02220052g12d1
ggagcaaggagtactaaaataataatagtgtcaacaaacatcatcaattataaagtaataagagattgaagaaaacaatggtaataaatttaattttagccccccgacagggtccaaaaaagacaataaatgatacaataatactatgtaacagcagcaatgaagcctcagcctcttctctagaagaacaaaacaagggtagcccagctcaaggctaagcatccaatgaccttcttcaagcacctgatggtttcagctccactctcgtcctcagatacagctggaccaggagacatggaatcctggcttgatcccggagctcctaccggaggagcgggagggccaagcaatgacggcgacggtgctggtgcagtgtgcttcttactcttctttgtcttcttctttgacttgggagcgggtgccggaacc

SEQ ID NO: 2918 - DNA, 561 bp, Glycine max
  Clone ID: jC-gmfl02220052h01a1
cagattttcatgctcctcctttcattaaattaaagaacagtttctaggtatggaaactctttcatatgggtcagcaccatgctgccaagttgtgaactcaaagtggaaattagttgaaaagagtttgagttcacgtcaatcaagagtttcctctataggaaaacttggagtttattacacaggtactatttctgcatgtgcgcctgtgagattttatgagatgggtactagggtgcagctaagaagctcaaaaagattcaatttcaaggtttgtagtggaagttatgatgatggttatgtgattggtgaagaggaagcaagggatatttcagggttagaggagcctgtaacaaccaaggttctgattccaggtctgcctgatgattcaaaaggtgaatctggtgctccaataagtagttgtttctggggatgaaaacctaaactcaatgtgcactatgagaaggctcggtgcgaaaacgtcaatgatttgcctcgtgttctcttttaccaggttttggcgttgctctttccatatgagaaagcacttaaggatttgggcgt

SEQ ID NO: 2919 - DNA, 495 bp, Glycine max
  Clone ID: jC-gmfl02220052h01d1
cattaaaaaaatatttcttataatgccgtgttcaactcaaggcaattacacctctcatgccacggtcatactattcaaaacaatttttacaagacaccaatatgtatatatatagctgaagaccccacaccctaaactaaattactgtgtgacttgcacttcagcaatttcattaattgatcgtcgccatatccttctaggagacgtacttctcttcacagaataaaattttggttcttccaactgaatttctagattggacaaatctaatgttagcttttgcttaatgaaagcatccaaatcaaagtcactttttccatttgcatcatcatcatcctcgtcttcactagaagaatcaactctgtttttatttgttcccgcaatgttcctcaaagaatccagtggcatgttgtacgaatttgggttcagcttgaggattctcttaaactgtcatagccgggtctaaatacctaggaatccatacccatgaagcat

SEQ ID NO: 2920 - DNA, 564 bp, Glycine max
  unsure (1)..(564): unsure at all n locations
  Clone ID: jC-gmfl02220052h02a1
agcaaatattgcctattcggcaatatggcggaaaatggttcaattgagctgaacaagtttgtgttgttttgtttgttgttgctaatacaagtggcagtttctgaaatcatttttgaagagcgatttgatgatggatggcgaagtaggtgggtgaaatatgactggaaaagcagtgagggcaaagcaggttcattcaagcacacagctggaaaatgggctggtgatccagatgacaaaggtattcaaacatccagtgatgccaaacactttgccatctctgcaaaaataccagaattcacaaacaagaacagaacattggtccttcagtattctgtaaaatttgagcaagagattgaatgtggtggagggtacatcaagcttctctctggatttgttaatcaaaagaagtttggtggggatacaccatatattttaatgtttggaccagatttatgtggcacggatacaaagaagcttcatgtgatactttnctaccacggtcaaaattaccccataaagaaagacctgcaatgtgaaactgacaggttaactcatttctacaca

SEQ ID NO: 2921 - DNA, 408 bp, Glycine max
  Clone ID: jC-gmfl02220052h02d1
aacagataaaatgttcaattaaataataattcttaaaatggcgagtttaacggaaggcaatgacgcctctcatgccacggtcatactattcagaacaaggtttacccgacaccataatgtgtatatatagctgtagacccctcgccctaaatctaaagttactgcgggactggcactttaccaattgaattaattgatcgtcgccatatccttttcggcgacgtacttcacttcgcagaatgaaatgctggatcttccaactgaatctgtagaacggacatatctaaggccagctttcgcttgatgaacgtatcccaatcgaagatactgtaggcattgtgattagcctcatgctggacgaccctagatgactcaaccctgcatgtatttgttcctgccgtgttcctt

SEQ ID NO: 2922 - DNA, 549 bp, Glycine max
  Clone ID: jC-gmfl02220052h03a1
aactgctccttgtcctgtcacaggaactgaaaaacatcatgcttctgatacttcaaggctattgatacttgacagtgattgccagcacaatgtagggactactgctataaagattggtgaacctgaaggaacagcacatgatcaagttattcaggaatgtgcaaaagagactggtgtgcctcaagttctatgtgcatcatctgataaacagagtgatggtgttacagtttctttagataaggatggcacggatactgagcatgagaatcctgacgagtcttcctcagaaaaattaggaggtggaagccttttccaaactgacaaggacagaaatcaagttgaggcttgtgctaatcagaacacccaagtttctgaggtgataaatggtggtccgaataatacattgactactgctgaagatctaaatgagaataatgcatctaaagatgaaagaaggtcaactcctgaggtaaattcagtgattgatttgtccaaaaaggatgttgcagatgatgttggcaagatgcaaccggatcctgttactgaaac

SEQ ID NO: 2923 - DNA, 295 bp, Glycine max
  Clone ID: jC-gmfl02220052h04a1
gtttgtggccctggaccagtactaccctgccttctccagttcgagttctatacttctctcgctaggcagcaatgcatatgagagaataaggactttgagaaactcttctggaaatggaatttcttttgaactgtgattgcaatcatagaagggcaccattgagcttaaattgctgattatgtatggcggtgattgcaaatatttctttcatggaggggaatatttagtgtcaagcattgattttggatcttttatatgtatttaagggaaggggaaaaccaaacaagtagtattt

SEQ ID NO: 2924 - DNA, 81 bp, Glycine max
  Clone ID: jC-gmfl02220052h04d1
attaaatataggggaaattaaacctaaattacaaccaatcccacaaaataaattcaacaatataaacctaaactaccaacc

SEQ ID NO: 2925 - DNA, 602 bp, Glycine max
  Clone ID: jC-gmfl02220052h05a1
aagccaaaagaacaacatggacattgatctttctcctcaggtgcccaagaaagtttacggtgccaatggtggctcctactacgcatggaccccctccgaccttcccatgctccaccaaggcaacattggtgccgctaagccttgctcttaaccaaaaacgcctttgctcttcctcgttactctgactcttccaaagtcgcttatgttcttcaaggtagtggagtggctggaatagtgtcgcctgaatcagaagagaaggttgatgcaataaagaagggcgatgccttggcactcccctttggtgttgtgacctggtggtataacaaggaagaaactgagctggttgatctgttccttggggacactttcaaggctcacaaggctggagaattcactgactttattctgactggttccaatggaatcttcactgggctttttcaccgagttatgtgggcaagggcttggggactttggaagagagtcatgtcaagaccctttgttggaaaactaaccagcccaagggattgtgcagctggaatgaaacatcaacctttccgaacctaaaccggagcaccgaaatggcatggacttgaactgtg

SEQ ID NO: 2926 - DNA, 416 bp, Glycine max
  Clone ID: jC-gmfl02220052h05d1
aatctaaattaaaattctggcgacaaaataagatattcaggattcctccatatggaagtttgaatttgcattgtacattaaaaaaaaaaaaaaaaaactatcagaaaggagaaagggagaaagaaagggaaagggtcaatcgaagtcgcacaacgaagtgccttgttccttgccagtctttagtttcgttgccaaggagggaaggcgtcatgctttatatgttgtgaatgccaggcagcagaacgataagcctttgacctaatacaaataatgaatgcctccattaagctcactgacccttgataactcgggaatgttaattctttcccacccttattgggggggagttctgggcttaaaaggtatgttgccaaaaccacatttccctttttttttaaaaagaattaaattttttg

SEQ ID NO: 2927 - DNA, 585 bp, Glycine max
  Clone ID: jC-gmfl02220052h06a1
agcgtttccttgcgcggagcttcattcagctcaagagagatggcgaacgaagagttgggtagttggactgatctgctacattcttccaccaagcttctcgaacaagctgctccttctgctcagttccctccacttcagaggaacttagatcaactggaagcattatccaagaagcttaaatccaagacagtaaggactgaagcaccttctcaatctattgctgcaacaaggctccttgctcgtgaggggataaatgcagagcagcttgcaagggatctgaagtcatttgaactgaagacaacttttgaggatgtttttcctgttgaggcaacaagcgttgaagagtatctgcagcaggttcatgaaatggcgatggtctctgctgtccaagaagctcagaaggataatctcaggagtttcaatgattatatgatgaaagtattagaggaggatcggcaaaaagaaaagcgtgattttcttcagagtttaagtcgaatttcaacattacctacgacaaacattgctgctaacagcaatgtgggtacccctaccggtcaaattgtgtctggatcttctacttcacaa

SEQ ID NO: 2928 - DNA, 477 bp, Glycine max
  Clone ID: jC-gmfl02220052h06d1
agagtaatcatgaacgattaaaattaactattaaggagggtcataaggagaatagataatgaagcatacaaagtatcatctcacatacacatctcgtctcatcataaaaggatcgtgatttttagctccagttcatatctcaggtctgggctcataatttccgcagctcaagccaccaagggcgagtgcaagacaaacttcttccacattgcggatgcttcgtgcgccaaagaaagtgagcaccgcttatgccttcttccccttgacaacaatcttgccgtgctcgcacttgagactgatctcctcgccgaaggtgtagtagccgtactcgtgctctggctctggctctggtttgggcgtaggcttgggctcgggctggtgctcgacgggtgggggtgggtgaggagcacgggtaggcttgtgctccggtggtggaagtgggtgtggcacacgagtgggcttgtgctctgtggtggt

SEQ ID NO: 2929 - DNA, 514 bp, Glycine max
  Clone ID: jC-gmfl02220052h07a1
gtgaaactatctttggagaccgcaacggcttcaggaacgaagcgatttggaagactgagtcagagactctgaatgaatcggttggagagataagtcataagagatccttgacagaatcccttgttcattccgaaaccgctacaaaatcatgggtggcaacggcaaacacaggtggaaattcagcttccaccgttccttcacccatcctcccaaggaattcacctgccccatttccggctcactaatgtccgaccctgtcgtcgtagcttcgggccaaaccttcgaacgactcgccgttcaactctgcagagacctcaacttctcccccaagctagacgacggcacccgacccgacttctgaaccctaatccccaacctcgccatcaaaacgacaatccttcactggtgcgacaacgcccgcacccaacacccgcgccctcccgattacgcctccctccagcgcctcgtcttagagcaaaaagaacatgaccgcgttagggttttcgaaatggag

SEQ ID NO: 2930 - DNA, 552 bp, Glycine max
  Clone ID: jC-gmfl02220052h07d1
gatctcttgttcttgtaatatatttataaaaatttttcttattaacatgaattttttctgggtatttgtgataaatttttcgtttattcttttgaattaatgaaagacctatggtttgatacataaaaaattgtttattgttttttctagacaggcgaactggttcgataacaaatatttcttttttcataaatttgttatttttctttttccttaagcctagaagaattaaattcttctgattttgaatcatcataatatctagacctagttctcctctttgaatagaggctattgtaatttctcttaaattttttaatctaatcaggagacaatatactttgacattgttaaatattctttgacctaagaaattattccaatttaaatgtaaaatcaaaaaatttcttaataagaaattaagttctgcctccatctatgtcttgtctttctttttctttatacccttactattcttttactgtctgatcctacataatcggtttccatatctttttcttggcttgagatagatgattcaagattccgttg

SEQ ID NO: 2931 - DNA, 567 bp, Glycine max
  Clone ID: jC-gmfl02220052h08a1
aaacgaagatagaatgtgcacagccctaaagacgaattaccagcttagcgaggagatcggtcgcggtcgtttcggcaccatcttccgctgcttccacccactctccaacgaaccctacgcctgcaaactcatcgacaaatccctcctccatgactccaccgaccgcgactgcctccagaacgaacccaaattcatgaccctcctttcacctcacccaaacatccttcaaatcttccatgttttcgaggacgaccaatatctctccatagtaatggatctctgccaaccccacacgcttttcgaccgcatggtcgatggtcccatccaggagtcccaagccgccgccctcatgaagaaccttctggaagctgtcgcgcactgccaccgcctcggcgtggcccaccgcgacattaaacccgacaatattctgttcgattcggcggacaatcttaaactggcggacttcggtttcgcggagtggtttggggatgggaggagcatgagccgcgtggtggggacgccgtattacgtggcgcccgaggttctgttggggagggagtacgatga

SEQ ID NO: 2932 - DNA, 559 bp, Glycine max
  Clone ID: jC-gmfl02220052h08d1
tctttttttttttttttttttttttttttttttttttttttttttacattagtaaacaaatttattgcataaaaagatacgtgcgtgtttggaaaaaaattcaatttttgttaagttgaagggaaatatccaaatacatgtcttattcttttaaataatccatatttgtagcaatgaaataaattcctccccaaaataaaaaatgattgggattacaaatatttatgatccatattcactttaaagggccagaaatgccttgcttacgtatcattaaaaagtgcattaacctaaataccgccgtaagaagaggtaatacaaaagtatgcaaactattaaaacgagttaaggtagattgtcccacactggaacttccgcgtaataactttaccaaagacgatcctattacaggaatagcgtcgggtacgcctgttacaattttgactgcccaataaccaatttgatcccaaggtaaggaataaccggtttcaccaaaagatgcagtcaatacagccaaaacttcacccggaacccaagttaattcgcgaggttttttaaa

SEQ ID NO: 2933 - DNA, 422 bp, Glycine max
  Clone ID: jC-gmfl02220052h09d1
agttcctgcggataacccatcatagggtctaccatccaacaactcgcacccctgagcaacccaaccgagcctcacagggcttcccaaaatgggtgggcaaaactcaaccccttttcatcttgatggcctgaagccccagtatttgccacccaatgatcgctagactgtgggggtttattgtcaagggactgctatcttgcttagtatcaatcccaatctctggcatccattatcccttgaaatgaccgagccttcggcaggagtcttcgaggataacccggacctcacattgaggctgggacaggggctcctgtcgggcggcctacttgaactgagctcctaacaatgagcctgcttactggcaccgggtacagctcgcattgagaacggaccggccccttttttgaccgacaagtcccctt

SEQ ID NO: 2934 - DNA, 530 bp, Glycine max
  Clone ID: jC-gmfl02220052h10a1
gttgagtttcttcttctgttgcgttgtgtgtgagtgtgggcacggtaagatgcagaccattgctaggcgcttagggcagcaatcgctgaggccatcgacgtcgctcaagtccatctatccaatttccgatcaccattatggaatggatcacgagcgttacgtttctaccctcgccaccaagggagttggtcacctcgttcgtaagggcactggtggacgatcctccgtcagtggcattattgctacagtatttggggcaactggattcttaggtcgttatgttgtccaacaacttgctaaaatgggatctcaagtcctagttcctttccgaggctctgaagataatccccgtcatctcaaattgatgggggatttgggacagattgtacccatgaaatacaatccaagggatgaaagttcagtaaaagctgtgatggctaaggccaatgttgttatcaaccttattggaagggattatgagacaagaaactacagctttgaagaagtgcactatcacatggctgagcaac

SEQ ID NO: 2935 - DNA, 478 bp, Glycine max
  Clone ID: jC-gmfl02220052h10d1
acatatataactaaagaatcttgttttgttctattatttgttattttataatattctaatgaatctttattttcctttttattattagttattagaatattttttattattagaaagaataaatagaattggcaaaaataaaaaaaaaattcaataaaatcaaaattatcgcgggcgaatatttactcttttattatcaatcaaattcagatgtaatgtagggcacaactcctaaaaaaaggattgctttttggtttcttccgccatcccacctaatgaatcattaagatttgtttttaataaaatcttaagtatttgcaggtttcgtcgttcccatcacttctcgattaatggttaggtctgaattcgacaatggagcctttctcatatcttaaaattaataatctttttttttttcgaatattgatttggtttttcgtgaatcaatattctcagtttttatcgattcagagctctt

SEQ ID NO: 2936 - DNA, 515 bp, Glycine max
  Clone ID: jC-gmfl02220052h11a1
gtgctgcttctgatgggaaaacagagatctcttacatgcagcaaactgctcaatctgttgcaggaactttagctgaatccggcacaactaaaaatgtatctagctggagtcaggtttcagaagggaataatgggtatccagagcatatgatttttgatcctcagtatcctggttggtattatgacacaattgcccaagaatggcgttcattggaaacttacaattcaaccatccagtcttctagtcttggacttgaaaatgggcatgcttctgccaatactttctcgcccaatgataatagtttgtatagcgaatacagccaaactgataattatggaatacagggaattgatagtcagcctgtagatggcagctggagtggtttgtatggcactaaccatcagcagggttttgacatgtacacaactgggtctgtcactactagaggggataatataacttcgggtggcaaccaacacattaatcattcttatggttcaagtatttctgcaaac

SEQ ID NO: 2937 - DNA, 386 bp, Glycine max
  Clone ID: jC-gmfl02220052h11d1
caaaaaaattactacgtaaatagcatataacgagaagagatgcacatagctggggtggggaattttcctacgttttctatattctttaagaaaaaaaacaatgggagcccaattcataacctgaatctctgattttacattgaaaattattacgattacacaatagacacatccaaaagtagaaactgatcaatcctttggtgaggggattgaaatgaaaattacatagacatattaagcagtgggaagaaccttattaacaatctcctggctaagagctgcaatctgggaatcaagggacttgatggtttcttccttttgattctccaagctagacagagccttctgcagctcagcctcgactttcttcctcccctcagcaatct

SEQ ID NO: 2938 - DNA, 509 bp, Glycine max
  unsure (1)..(509): unsure at all n locations
  Clone ID: jC-gmfl02220052h12a1
gaaatcagaaaaatttgtgttgtccatgtccttagctccaaacgtgtccaaagctttacctcaataagacattttgaggtcaagcagatgataaaaaaaatatctaggcatgcctcatcttcaaaagttacaaatttaaatgaagtgcttatatctcttattagtactattgtatgtagaattgttttggggagaaggtatgaagaggagggatctgaaggtagcagattccataagttgttcaatgagtgtgaagctatgttgggtaacttctttgtttcagattatattcctttcatgggttggattgataaactcaggggactggatgcacgtcttgaacgcaatttcaaggagatggataagttctaccaagaagccattgatgaacacatgaattctaagaaaaagactccagaggaagaggatttagttgatgtcttacttcaactgaaagagaacaacacgtntcccatagatctcaccaatgtaacatcaaagcagtgctc

SEQ ID NO: 2939 - DNA, 477 bp, Glycine max
  Clone ID: jC-gmfl02220052h12d1
aaacagtaagtcttagttgtaatcataattaaccttaaaaaataaacaataatcataaaaaatataatattttaatttattggtagaatttaaaactacaacatatataattaaattagaagtacactttaaaataaatgatatgatttttaattttttaatccatattcttaaaataataaagaagatgaaggtgaatagatcttaaacaataggtgatggcgacgctgggtggtgctgaacacacgcggtgatggtggtggtgaatgcatgacatggttgaggaggcagagaaagagttgggcggacatgaagaagaagcataagcggaagtgaaacgtagaaagaaaatcgtatctctcttcttaagtttttagttgacaaatatcatacacttgggttggaatcactcaaacctaacttcccaaaaaaaaaaaaacattataatttcataattgaaaatcagacgaaaagaat

SEQ ID NO: 2940 - DNA, 91 bp, Glycine max
  Clone ID: jC-gmfl02220053a01a1
ctctagccgattttgctcgtttttgagctcgtttttttcagcgccggcgttatcttggccgttctaccaatcctaaatttgattacttggg

SEQ ID NO: 2941 - DNA, 425 bp, Glycine max
  Clone ID: jC-gmfl02220053a01d1
cttagaaagccggcccggaacgggcggcgggggaaccccttgaagggtttggcatttggttgaattggccccgggcaaaaatgggggcccccctggggggacccactaccggacagttttgagcaagggcccggggatccctgggggggaaaatcgaacaaacgggaggggaaagaacccctatggggtaaaaggccaacaggaacaactccgggaaaggcccattggccccactccaaaaatacgggggaaaaatcggggatggcccccccaatttaaaaccccgggcccaaaaggggatggcccaagttaaacggtgtacccaaaaggttttaaaagcccaaagccggggtattgcccggacggggcaaattttaaaacgccaaaagaaaccaaaccgggccaaccccgaacgggaaaacaaa

SEQ ID NO: 2942 - DNA, 542 bp, Glycine max
  Clone ID: jC-gmfl02220053a02a1
ctcgagccgattcggctcgaggtaaatcttcacagtggtgtcacaagaactatgtaaactaccttgccatgagaaaggttcttgaagttagagaacaactcagaagaattgcaaagaggataggcttagtcttaaaatcttgcgaaagtaatatgcaggtggtcagaaaagcagtcactgctggctttttgctaatgcgtgccatctagaggcatacaggcataacgggatgtataagacgttaagaggataacaggaagtttatattcatccattgtcagtgccattcagagtaaatccaaagtgggttatttacacttctcttgtatcaactgatcgacaatacatgcgtaatgtcataaccgtagatacctcatggctattggaagctgctcctcacttctatcagctacagcaatctaatcatcttcttcgctgattcgccgtaagctaattaactgtgtctgatgcgaagcaaagaaattgtttatatgtcaaatttcaggtcaagtagaacatgataaccagtggtgttaggactt

SEQ ID NO: 2943 - DNA, 479 bp, Glycine max
  Clone ID: jC-gmfl02220053a02d1
gccttaaaatgtaagattattgaaacggtcactttctggttgaaacttgcaacagaaggaccagagagcaccaaaagttggtggaaaggatttaaacacgtcaatacattttttggtgaccaaccaccataccatcttcatctattaaaaatatacaatactgctatatactaataagctacagttaaaaataaagaatacttacagtaatgtacctatactatcatttctttgtacttaaattatatgatttgtatatatcaagcggatataccattataccccccgtgtcaaaattctgcttcgcatgaaggtttcttaagtttctaggctatgctcagaataatgaatgattggaacatgaatcagttttgctcagaaaaactttgaggcttactgctggcaaacgccaaccatatgatggtaccagtcacattgaagaagatcgatggtgcaaatagtgatatactccatgaatg

SEQ ID NO: 2944 - DNA, 506 bp, Glycine max
  Clone ID: jC-gmfl02220053a03a1
cttgagtaaaaatggaaattgcataaagggcagtgtttttcttgagacgctttctttatattaaagtcgtatattttaatgcatgctgtcgagcttttgttactttgtgacaaatggagggtccttagttctgtttctctttcttctctctgtgctttcaaccaagttctcaaatcactcttcttcttcacccttctgatctgctaattctcaaggtattcaaaattgggtggttttcgattgaactgtgatgtccaagccactgctaggcatagcggaagaggaaggtcaaagcaatgtcactttgctggtttcttcctcagccaccatggaaagtgtgtgcctgaatagctcaaaactgaaagagcgcaactacatggggttatctgattgttcatctgtggacagcttcgcgccgtccttctcagatgagactaagagcaatctgaacctcaaggctactgagctcagactggggcttccggagtcgcaatctcccgaacgag

SEQ ID NO: 2945 - DNA, 531 bp, Glycine max
  unsure (1)..(531): unsure at all n locations
  Clone ID: jC-gmfl02220053a03d1
gcaagcagtaacattgtactgtaaagataagtatttaaataatcttagctgtctgctaccaatatgttttgagggtttaaaaaaaaaacaaaaatacccgaatcatatattatatggtcgggttcaatccaaaatttcagacattttaatacaatcttaagaacctggcataccttaacccagctacaaatttaaaaataatactacagtttaggggagagcaataaaatccatcctacttcaacacacagttctgctaataagccccgttaggaagcaccttgaattgcagcagcaggttgcatggctatatcctgattctgtctcacagcaaatccatggccaccataaccctgatgaccaccataatggcctccattggaatcagatctccaatgcttatttcctggactgcgaccccaagaaagacccactgtctgcttnccattactgtcccattcaatccctgaatgcttnctcagcattctttctgtcagcaaattgaacaaattcacaccctttaccaactgg

SEQ ID NO: 2946 - DNA, 576 bp, Glycine max
  Clone ID: jC-gmfl02220053a04a1
aaaatattattaagatgatcaacattattggagcacttgttctactctttgcatttctcttcctcagttgtgtgtatgcacaagacacaacaacccttgtgcctgcaatcataacttttggtgattctgctgtggatgtagggaacaatgactatcttcccacccttttcaaggctgattaccctccttatgggagggactttgttaaccaccaacctactgggaggttttgcaatggcaaattagctactgatttcactgctgacacattgggtttcaagacctatgctccagcatatcttagcccacatgcatcaaggaaaaacctacttattggagcaaactttgcttcagctgcatctggttatgatgaaaatgctgctactttgaatcacgcgattccgttgtcccaacagctgagttatttcaaggaataccaaggcaagctggccaaggtagctggcagtaaaaaagcagcctcaatcatcaatgatgcgttgtatgtgctcaatgctggaagcagtgactttgtgcaaattattatgtaattcttggatcacaaattttcacttctga

SEQ ID NO: 2947 - DNA, 453 bp, Glycine max
  Clone ID: jC-gmfl02220053a04d1
aaataaattgaaaaagtgatagttgcacactggtttatttatttatttatacatgcaaaagtagtcaaaataattgacatacttgtctacatcaaaagttgacgaggaaaagtaaacctgcgtagctagctagctgtcccatgtacacttttatttaaaaattgaaacataaaaaaatcttgaaacgaagcagctaatagaatccattatttatatataacaataaactactatatacacatacaatgtattctagtttagtcccctaaaacacgagcaagttattctgggtgtcgtagcccaacttcttcaaattcggctggactgcaaatcgaatcataggtggcggtccacaagtcaatgccaaggtatcaggagatgcatttggaatatgctccgtcaggatactttcagtgatgaatcccacactgtattcccacccttctcttatgc

SEQ ID NO: 2948 - DNA, 508 bp, Glycine max
  Clone ID: jC-gmfl02220053a06a1
ggctcgagaatttacaaacccatccccgacctcgtatttgtttttccaagcatggacctttccatcaacacacgcaccccttacacgctgcatcatcatcgctccgccggttgagatgttcccgccgccgccgcagacgaccctcccctccctgccggatctactcctcacggccctctccgtctgcttcctagtctcgtcctcgaagccccacatcggcggctccacccgctgccccttcccgcgtcgcttcctcaaaatccccgccatgtccctcacaaacacaacaacgtcgaaatcctcgaaaaacaacaatctcaacaacaccctccttcctccgcgccgtcacagcttcgcgtccccgcagtcgctctcggagtggctgaagccgcggctcccttccgagtcgttcgcctcgtggggcgtgaagccgggcaccaagaacgtgcacaacctctggctcgagctctcccagggggaaaccttcctcgctgactccaccccttcg

SEQ ID NO: 2949 - DNA, 590 bp, Glycine max
  Clone ID: jC-gmfl02220053a06d1
agttgataactcttggaactttacatagtgatcagtagaataatactcaaatccaagttcgtttggtcacttttaatgacaacatactgataaagaacctgtcaggtaatctacatgtctcctctcctgtacaattccatccaccttcagtttctgcaggtaaaatacaagcaattcttccctcaccaaaagagaaactcaaatgacaattttgtattgaagccagctatacaactcgaacccatgttccaccacacattggacatccataagcccagcggctgatccaccaaatctcccggtcattttgactgggaagattggtggaagctggtgaggcaaaagcacaagtctgccgcagacatcttatacacttgtaccagatcccttcaaggccagttttccacaatgcagtaacaacatctcttcgagatcccattataccaaggtatgctcccaggcccacagaagtgttcaacccaaaagctgcatctcgttcagacatcctgcgcttccttggccataagccattggctccatagtagacatcacaattttccaatgagctggaatcaagtggatttaaacta

SEQ ID NO: 2950 - DNA, 486 bp, Glycine max
  Clone ID: jC-gmfl02220053a07a1
tatttttggtatacctgcttctggtgagtaagacagtgaagccagaaacaggagataaggcatggcaaggcacccaactccaatcttgaatcactctgcactctgcactctgcacaatgcttttcctcttcgtccctgctctcaaccttaaacccataacacccaatgacctgtttgtttgataagcctattcctcacctcaccgtcgctacttcgagaaacccatctccgccgacctcaactcatcttccttcaagaaacctgagcagcctctgctgccgcaacatcaagtctaccagcccttccgccctcccccgtcttccctaccctcgcaattcggcaccctcgacatcgccggccgaatcgacatgctcgccaaccgcctcggtctttggtacgagtacgcgcccttaatcaattccctaatccgcgaaggcttctcctctccgacaatcgaagaaaccaccggcatattcggcgtcgagc

SEQ ID NO: 2951 - DNA, 539 bp, Glycine max
  Clone ID: jC-gmfl02220053a07d1
caataaaaattttaaacataaatattattctgtgtcgacccggagctaagatatagttttgattggtaatcttgtgaccaataaaatccacctttaaaaggcaaagcataaatacatgagtgtctaattttaccattgatttaaaaacaaaatttgcaccatcttataagaaatatggaacgcctgtcctgggccctctcatctgattgttctcctctgtttcggtgaaaaatttaacttctctttccatattttcattgaaactcagaatagaagctacatttccacatcggtaacagtaattaggtgcataccatacagttacaaggcctttatcttggaacatatacttaaggccttcctgaacgagttggtgcgctcgacaaacaagatcaaggttatttatgtgattgaactccgaactgaccctggatccaaaaagccaacctgctccacggggactgactgccatgtttcattatcttcaggatcactccacattagatcacagaaaggaccctcatgaggaatttcacagt

SEQ ID NO: 2952 - DNA, 443 bp, Glycine max
  Clone ID: jC-gmfl02220053a08a1
tgcttcgggaaatatgaagaatttttattaatctaggaggagccaaaggttggtgagtgtagcggtgatgggtaacaagatccctctatatggaagtggtgctagcctaagtagcacaacgggtgtgcccactgtgtctgtgctattgaacctcaactttgtgctacgatctagggcttatgtgctcgggaaattggtgaagcctaaatactacaaaaccattcaatgttccataactttggatccaaaaaagctcaatgctgcgatttccctgaagaaatcttgcacatatgattgatacatgtgacggagagcaagtgggaattatttgaaaaataataataataataaaaatattgttttatgattaatgtgttcttttgatgtgaggaaagaaatggtccagccagagagcagtgtgccaaggacgcgtttttgggact

SEQ ID NO: 2953 - DNA, 510 bp, Glycine max
  Clone ID: jC-gmfl02220053a08d1
cggaagctcgcctgtcgacgagctcacagtcggcgccgccctttttttttttttttttttttttttttttttttttttttttttttttttttttttttttgggggtttggggttttttttatttttttaatttctgattttttacaccaatctttggggagaactgtaggaacaatcataacaaaacaaaaggaaaaagcccccaccgaacaaatgagggggcggccggccaccaacaaggggggggggaggggcccggttaaaaaaaaggggcggagcccccccccctgaggggttcttctggcccccccaaacaagggggggcccaaaaagggccccccccccaccccccaccacggtaaaggggggggggggcccccccccccccccccaagaagaatgttccccggcgggggggggggcggccccaaaaaagggggggggaaaccccccccaaaaaaagaggcccggggggactaacaaaaccacccccggaaaaaaaaagggggg

SEQ ID NO: 2954 - DNA, 588 bp, Glycine max
  Clone ID: jC-gmfl02220053a09a1
ccttattttatctattctctctctttcttttgtgttctaagcagctagaagcaatggagaggaaaagaagccatgcctctttcaccatgtttgcaatgcttgttggagtgatctctcagagccttgtcattcctgtagtatccaccactgttgaagatcagaagaactactacaccccagatccacatgctggaagtcccccctcaggctcacacagtagtactcctccatctcatggccatggaagctctccaccctcacatcatcacagtagtccaagtactccatcaacaccctcaggtggaaactgtggatcatcacctccacaacatcatgatccaacaacaccctcaactccatcaacaccatcaaacccttcctcaggtggatactatggaggtagccccccaacacctgtcactgtgagcccaccaactactccagttgaccctggaacccctagtatcccctcaccaccactcattccttccccatcttcctttactggcacatgcaactattggagggatcattcagcattcatctggtgaatccttggctggtggggaaccctaagaagtgcatttg

SEQ ID NO: 2955 - DNA, 410 bp, Glycine max
  Clone ID: jC-gmfl02220053a09d1
aggtattccgatattcggacgcctcaacttgttatgaaatcacattgatagcctctactcgtgtcctagctcgtctaagagctagatttgcctcaattggttgtctcttgccttccgccttattcaaattagcttctgctatttcaagagtttgctgtgcttcttggggatcaatggcactacccttttccgcatcatttactaaaacagggatctcattattgtttattctagcaaaaccgcccatcagagccatcgttaaccattggtctttaagaagacgtattctcaaaatacctatatctacgggtgtggcaataggcgcatgatttggtaatactccaatttgtccgctattagtagataaaatgatttccttcacttccgaatcccaaacaattcgattgggg

SEQ ID NO: 2956 - DNA, 554 bp, Glycine max
  unsure (1)..(554): unsure at all n locations
  Clone ID: jC-gmfl02220053a10a1
gaagaataaggggaagtccatttcacttgcaatccaagcaaaagtgaatgttcaaagaagggaaggtttgagtttgactgggggcagaagtttgacaggccagaaagagcatcctgatgttaaatccaaccaaccaatgaaggcaagtgttcagaaaaatttacacaagaaatcttctggtgctcttagacagaataatctgaaacagaattattcaattgacaaagacaaattaccatcaaagccattggttaccaattcaaacagtaggaaagttctgactggggattcctcttatggacgccatagaagctctagtaataaatccaatgcaaaacctaaagttggatccagaaagtcagccatggaggtgacagatagtgaaaaggaggtcttgtataccagcacaaacagttttcctagaaagaaaaggtctacagacaaggactggaatgatagggttgtggataatttgttcattgaaaaaatgcagaagcctgcttagtctaacctagtgagttataagcanaatagttggactgaagaagtcaaaa

SEQ ID NO: 2957 - DNA, 482 bp, Glycine max
  Clone ID: jC-gmfl02220053a10d1
atgaaaaagagaatatggtatcaataagtttaagattaattataaaaaaatatacagattagtgacaaatttaacatcactagattaactacacttcttaattcttgtgcagatgccctacatataggacccagagggagtacataactatgatgcgcgatgctttttaggcgagaaattcagcttcaaccactttgatctgatcttatctattagtagacatactcatatattagccactttttgatagagcaccagccgcaaaaagaagattccttcgagaaaaccgcaatgagtaaactggagtagatttggttggtagagttttcagcgatctaagtctgttagcactcccacctttttcttcagccctagaaaccttggtgctcgtatttacatcccacaattttacagtgcaatcagcagatccagatgctatcacagaaccttcagaactgatagcgagggaccagacacatgat

SEQ ID NO: 2958 - DNA, 390 bp, Glycine max
  Clone ID: jC-gmfl02220053a11a1
agcttccaattgctgttatacaatttgtttaacccttcctctaccaaatttgctcaaaaatcccgcttgggtcttgaaccgttgtaaaaatatggtaccttattgagtggagatattataactgagaacatggtcgaaagctctttggtttctccttcaccaccgaatcctacggagggtgaggggaaacgcaagcccttgcgatctccacttgctgctttatggctgggaagtaacgagaggacgcataagctgactatcttggcttgaggaaaattatctatctggtccaattctgcgcgaaaggtgcaattttataacaggaaggtgtttgtgcagcatgaggagacaataagcagttattaggtcaactttgatatcaagcaatcc

SEQ ID NO: 2959 - DNA, 522 bp, Glycine max
  Clone ID: jC-gmfl02220053a11d1
gcaagaagccaagagcaatcccttttcaattaacactattacattgggggtatataatgaagctgattatgatgcttgcagcatcaataaagcagtatataatatatacagattttttgcaaattagaggatccaaacaaacaagctaatcaaacaattttgaaagaatatatttttttcttgctttgtaagaatatagctcctctattccctgttcatggtaaccttatctagattacatctgttgaccttgacagtggcacaaaatctatgaggaagctggcattggaactcgaagtacttgttgcagaaagcgtgctgcaagacgttgagtgatcccacccataacacgctccccaagtctgcgtgcttcaggttgctgaagaacctgtagtataggtagtaaaagatctggatcataatcattagaggatcgcagaagttcccatatcctaattacttgatctctaagctctatcaagttttgcatttcaatttctgacgttataatgggtccatttg

SEQ ID NO: 2960 - DNA, 573 bp, Glycine max
  unsure (1)..(573): unsure at all n locations
  Clone ID: jC-gmfl02220053a12a1
caaaaggcctcatcacttgaatggttagctatatatatatatatacttctgtgcctcaaaattgagctgagttgtatacctgcaatgggtgttttgtggtggaagctgttttttgctgctcttgctgggattctcttctcaacccaacattgtgcttcccaaaaagttccgaactacacatttatgcacaatgcaacaacagcaccagacgtatcatactacgactacatcgtaattggcggcggcaccgcagggtgccctttagctgcaacactgtcccaaaattacagcgtattgctccttgaacgtggtgggtcgccctacggcaaccctaacatctccgacttagctgctttcggtgctgccctctccgacaccttccctacctcccccgctcagcgtttcatctccgaagacggtgtcatcaactcaagagcccgcgttctaggtggtggaagttgcttgaacgctggctttacactcgcgctagccctcaatatgtaagggaagcggngtgggatggaagggcagtgaatgaatcctacgaatgggtggagacgatagtggcgtttg

SEQ ID NO: 2961 - DNA, 401 bp, Glycine max
  Clone ID: jC-gmfl02220053a12d1
gtggaaatgtatgtgtctcattggggttttaggctgaatcttattatgatgcttgcggcatcaataaagctattttttatatatacagattttttgcaaaagagaggagcccccccatccattctcatcgcacaattttgaaagactaccttcttttgttgctaggaaagaatatagctactctattccctgaacatggaaaccttaactagaatacatctgatgaccctgacagtggcacaaaatctatgaggaagctggcattggaacccgaagttcttgttgccgaaagccctctgctagacgttgagagatcccaccgatgacacgctccccaagcctgcgggggtcatgatgctgaagaacctgccctacaagtaggaaaagaactgcatcataat

SEQ ID NO: 2962 - DNA, 502 bp, Glycine max
  Clone ID: jC-gmfl02220053b01a1
cgacgtcctcgcttcgccgcatggagatgagacgctcaaggaactcgtgctggacacgctcatggagttcgtaaaggtctccaatggcggcgccttccactcttctctgtaccacaagcttctttgtagtattgtttactctactagtccccctacttttttggtggatttactggcgtcgaagtatttcaagtatatcgatgtccggtattttacgtttataagtctaaaaaagctcgctagtactttggagggaaaagatgtctcagatgataaaattgcaaatgctgatggttccagtgaaagtcaaatgagctcaaatatggaatgtgtcatccacaacatgtattacactatatcacatgttcccccacatcaaggctcggataatacatctgaattggaaatgtggagcagctcagaaagtgaccataagcagctttatggagataagggtgctgatgataagccacagaagttccagaagccctaacaaaatgta

SEQ ID NO: 2963 - DNA, 394 bp, Glycine max
  unsure (1)..(394): unsure at all n locations
  Clone ID: jC-gmfl02220053b01d1
aaacaaaagaaatagtctatccccactcatttataataattcagttttatgaacagtacttgtttctactaaactgcaaaagtcaagaaatggtgctttttgagatgacatcaaaggatattccattttgttgaagtctttcctggagatcagttggaccaaagatgatcccaggagggtaaactcctccttttggaaggttgtcacgttggcagagaagaacaagagcacactgaataagaattattggtgtggtcagatatccaacttcaggtcccataacccttgttacaatctccatgtcaggttttgtgtttccctgtgaagcaatgctcccatcactataaccatgtccaacaaaccacatcttgaaggaagcactttccacctnctc

SEQ ID NO: 2964 - DNA, 514 bp, Glycine max
  Clone ID: jC-gmfl02220053b02a1
aacattcacatattaacctgtgaaacctctgatctgagacttctcacccattttcctaaacctctaattaagccaccaattagaagaggcaattttctcaagtcagagagagaagaacatctttgtatcagtgttgcatccactctctgatgggtgtagtgaggggggtgatattggatgaatcagtactcttggctgaaagtgatgatgataaaactgtatctttactccgaccaggagctgagtctctcatccaaacactcgttctatccagaacgcatagtggaattgctcatggtgttggcctttcagatgacaaggtgagtgttcttaaaaaatttgctagtttgaactcacttgattgctttatcttaaatgatcatgtaagtgaggttatggctggatggagtaatgctgatgatggcagtgttattatttatctgatttctaataagaaggagttcttacctaaattaagcagctataattggctggatgttgtctgaatgttgga

SEQ ID NO: 2965 - DNA, 336 bp, Glycine max
  Clone ID: jC-gmfl02220053b02d1
gggaaaggcccaaattccaagggtttgaaaaaaccttaaataaacccggaatggccaaaaaaaaccctaaaaatccaaaagggtccaaaacccccccaaaaaaaaaacccccaagggttaagggcccaaggggttttcaaaaaccccaatctcccccccctcgaaaaatcctgaaaatgggggcccaacaaaaccggtgccccctgggagggaaccctgacccaaccgaaaaaccctggccctttcgctaacgggggaaccctttccaaacccgggaaaaacctcaaatcccggttcccaaaaaaaaacccccccaaaggcgaacccgcctttctt

SEQ ID NO: 2966 - DNA, 575 bp, Glycine max
  Clone ID: jC-gmfl02220053b03a1
ggaaaaatcaggcacaacaatctaaaggcaaagtctggaatttgttcaagcttcgctttctcacacctccaactctgtttcttcccttgccagatcgctcctccccgcacctcgtcgtcttaagcttcatccttccaacaagctctacttcccttagccgggcaagcaggctaagagtgccgtcaggattaaaaacaccagcaaatccaatgtagctttcaagtttcaaacaaatgcacccaagagctgtttcatgcgacctcctgggggaattctagcacctggcgagagtataattgcaactgtgttcaagtttatagagcatccactgaataatgaaaagccacaaaaaactggagtcaaatttaaaatcacgagcttgaaggtcaaaggaccaattgattatgtccctgaaatgtttgatgagctgaaggatcaagtaacagtggagcagattttgcaagttgtttttctggatccagagcgtagctgtcctgctttggaaaaactgaagcctcagcttgctgaagctgatgcctgctgtgttgaggcacgtaagagagccccagaagatg

SEQ ID NO: 2967 - DNA, 324 bp, Glycine max
  Clone ID: jC-gmfl02220053b04a1
gtaaaaattacgctcatcattctaagggcgaagatcggcatttgctcacgctaagaggaatcacaccgtctacttatggttcttcacttggcagatcgatggtccccacacctcgctgcttgaggctgattgctttcaccaagctttactttccttagccgggcaagcaggctagaagtgccgtcaggattaaacagaccatggagaccaatgtagcgttctagttgcagacggacgcacccaagagcatgtatgtgcgacctcctgaacgaagattaacgcctggcgagcgtttcattgcaactgtgttcaagtatatagggc

SEQ ID NO: 2968 - DNA, 540 bp, Glycine max
  Clone ID: jC-gmfl02220053b05a1
attgtgccctccctctttctagctatttccctctcttaacacaattaacaaagatatatcatatcatatcaactccaaatgatgaaaaatattgggttgtttcttcttgtggtggtggctacttttgtggtggcagccacagctggtagcttttaccaagactttgaaataacatggggtggtgagcgtgccaaaatctatgaaaatggaaatcttctcaccctctccctagacagagcctctggctctggctttcgttccaaaaaagaatacttgttcggaaaaattgacatgcagctcaagctcgtgcctggtaactctgctggaacagtcactgcctattatttatcttctctggggcctactcatgacgaaatagacttcgagtttttgggtaacttgagtggtgatccttatactctccacacgaacgtattcagccaagggaaagggaacagagaacaacagtttcatctatggttcgaccccaccaaggacttccacacatactccgtccaatggaatccttgcagcatcata

SEQ ID NO: 2969 - DNA, 401 bp, Glycine max
  Clone ID: jC-gmfl02220053b05d1
aaaccaaaacagcaaacaagttcaggggagaaattgaacataacagacatgacatacaagaacccttgaaaaaagacacgcttaaaacaagaacccttggaaaaaaaacacgcttaaaaaccaccgcgaaggcgaaggacgagatgcaagggggattccttctgaatattggaatctgccaagggacgaccatcttccagttgcttcccagcaaaaataagcctctggtgatcagggggaatgccctccttggcctgaatctttgccttcacattatcaatgggatcagaactttcaacctccaaagttatggtttttccagtcaaagtcttaacaaagatttgcgtgccaccacgaagccgcaacaccaagggcaggggagattccttctggatgttata

SEQ ID NO: 2970 - DNA, 559 bp, Glycine max
  unsure (1)..(559): unsure at all n locations
  Clone ID: jC-gmfl02220053b06a1
cattagcaaaagcaagaagaactagtctaagcagaaatggcctcttcagtgatggcatctgtggccctcaaacctgcccctttcactgttgagaagtcctcagttagaggccttccctccctctcaaggaactcctcttcattcagagttgtggccagtggtggcaagaagatcaagactgacaagccttatggaattaatggtggcatggctttgagggaaggagttgatgcatctggcaggaaaggaaagggaaagggcgtttaccagtttgtagacaaatacggtgctaatgtcgatggttacagtcctatctacgacaccaaggactggtctccaaccggtgatgtctacgctggcggtacgactggcttggctatctgggctgtgactctacttggtcttcttgctggtggtgcacttcttgtctacaacacaagtgctttggcgcaataaactctgcanatcgatgtttaagctcaaacttagtccatgttactatctaaaaatgaagaattattcatgaagtactttgtggatacgtgttccttctgttcta

SEQ ID NO: 2971 - DNA, 553 bp, Glycine max
  Clone ID: jC-gmfl02220053b06d1
atacaaactgttctacacatgtatcttcaaaatcattgtataaaattcagaccctttacttatttataaacataagcctgatattgaccaccaaagtaaactagtttgttttgtttatcttgtcaaaagagagcttccttctttgataagaacaaacacactgccaccatcgccccttgagatacgcaattcttcgtcgaggtatgtggtgagtaaccaggactgagcattgctgttggaaattgggatcttcaagggaggcctacttgaaattgttttcactaccgatgtggctgtgtcttggacagaggtaaggatgcctttgaaaagtgtaaggtcaatcttttgacccagaaattccacattttccggtatctctaatgagtccgtaagctgtggagtgccaattatgccttcctcaaactttatctgcacacgttttggacttcgaacatcaaatttggcattagtactaattgaggtggtggccaaaggaccagcgaactgaacagagttttggacggtaaaattcagcgagtcaataatctgggat

SEQ ID NO: 2972 - DNA, 466 bp, Glycine max
  Clone ID: jC-gmfl02220053b07a1
tatttttggaatacttgttactggtgagtaagacagggaaaccagaaacaggagataaggtaaggcaatgcacgcaactccaatcttgaatcactctgcactctgcactctgcacaatgcttttcctctccgtccctactttcaacctcaaacccataacacccaatgacctctttctctcatcagcctctccctcacctcaccgtcgctacttcgagaaacccatctccgccgtcctcaactcatcttccttcaagaaacctgagcagcctctgctgccgcagcatcaagtctaccagcccttgcgccctcccccgtcttcccttcccttgcaattcggcacccttgacatcgccggccgaatcgacatactcgccaaccgcctcggtctgtggtacgagtacgcgcccttaatcaattccctaatccgcgaaggcttctccccttcgacaatcgaagaaaccac

SEQ ID NO: 2973 - DNA, 540 bp, Glycine max
  Clone ID: jC-gmfl02220053b08a1
gaacagtcagatgatgaggacattgagggagagacatctatgaatgacaacacagaccctgctgatgtaaaacgagtaaggaggatgctatccaatagggagtcagcccgtcgctctagaagaagaaagcaggctcatttaactgacctagaaacacaggtttctcaattaagaggtgaaaattctaccttgttaaagcgccttactgatgttagtcagaaatacagcgactctgctgttgacaacagagttttaaaagctgatgttgaaacattaagagcaaaggtgaagatggctgaagagaccgtcaaaagaattactgggttgaacccaatgcctcatgccatgtctgatatatcatcattgggcctgccatcatttgatggaagaagcccttcagacacttcagctgatgcatctgttcctgtgcaagatgatccacatcatcacttctatcaacccacattgaataatcctattcccagtcatgatccgatagtcaacaatggtttggggggcatttcttcaattgaaaatgtg

SEQ ID NO: 2974 - DNA, 543 bp, Glycine max
  Clone ID: jC-gmfl02220053b08d1
gaacatcaaatacacatgacaagttgaagagtaacattattattgatttgtgtgagttaattatgagctcacatgtattccaatacgatggaaaatatcataacatgaatctatataaattcatgatgctattatttattcttaatatgtatggtatataactcatcatcttaaatggtagccatctcgctgctacaaatgtaacaacctagtagggtctttggccaacatagttgccaggaggagcatagttgcaagtgatgaaagtgcctccattatcacatgctactttggcacatccaagacgcacagagtctctccaaacaacctgagtgtaatgcagacactctccaccaacacaggaattagaattgtagtcatagttagacttctcatcaacccacaatttcactgcatctgtgccacttaggtcaccagtgctcatagcaagattctccccgtattggccaccaccaccagagtggatcagttgacaatcacctttacgttgattagcatagttctgtgcaaaagcagcaaccg

SEQ ID NO: 2975 - DNA, 503 bp, Glycine max
  Clone ID: jC-gmfl02220053b09a1
ttccttttcttgaaacttccctctttccttaaaggattccctcctaatttggtgggattatcccaagtttcagctgctaccactcatcagcattgccatttcctgtttcactcaccacatggaaaagcttattcgcatgttccctttgcttcttcttcttcttctgttccccacttttgccttcgctggccatgactatggccaagctctgagcaagagccttctcttctttgaagcccagagatctggctaccttccccacaaccagagagtcacatggagagcacattctggtttgcaagatggcaaagcaagcggggtggatctagttggagggtactatgatgcaggggacaatgtgaagttcgggttacccatggcgtttaccgttacgatgatgtcgtggagcatcattgaatacggcaaacaaatggctgctagtggtgaacttggtcacgccatggaagccgttaagtggggtaccgactactttatcaaagctc

SEQ ID NO: 2976 - DNA, 522 bp, Glycine max
  Clone ID: jC-gmfl02220053b09d1
gacacagtgaagttggattcatctatattgcatcatccctcaaaaatagtactagtaaaactggcaatgaagttgttcatgaacagtataaaaatcgtcaaagaaaaattacagggtcgtcatatatctacacaacgcaggagggttgatagacttgctgcagcataaagtaggagatgatatttgtgcaagtgaacagaaattaatagacttcgacattccattgctctgctttcttcaattgcctcttgtactcagtccaatcaatgccatctttggcagccaatgacaccataatgtcatcaattcccttttccattccttttagtccacacatgtacacaaaagtgttatccttcttcagtaattcccaaagctcttctgcgtattgagccattcgggtttggatgtacatcttctcccctttctcgtttgtttgctctcgactcacagcgaagtcaagcctgaagttttcaggacttttctcttgcatcttctcaaactcctccttgtaaagcaatg

SEQ ID NO: 2977 - DNA, 490 bp, Glycine max
  unsure (1)..(490): unsure at all n locations
  Clone ID: jC-gmfl02220053b10a1
atcttttgttccaaacaaaaacgtatgaattggtcggtttttctccggagtcgtcttcacttttctccgagtttttattatcatcatctctctcgtgtccctgtctccatctccatctcttagtttcttcttcaaatggcagaagttgaagacatagacaaccctcatcacgaccaccatcattacctttcttcttctacaacacaacctccaatgatcaatttcccgcgagatctgttaagaaccttcgtgggagtgaacaacaacagcaataaaaacaataacaacagtcagcaccacaatttgcctatgccagtggtgaagttagaggatgagaaagaagagctggaactaagtctcggcctttcgatgaatggtagatttggggtggaccctacagcgaagaagataaagagaacaacctcgataccggagtttgtgcgcgacgaggagatgggatatgctgctgcgatggggtgcacggngtctc

SEQ ID NO: 2978 - DNA, 473 bp, Glycine max
  Clone ID: jC-gmfl02220053b10d1
aaaaggaatccatatgcgctccattataatccttattggccacagtataaaaaagcccatccaccataaatagaaaggcgcccatcatcataatcattttgatgacaaaagtgtaaaatagccctccaaaagatctattgtacggattcgacgaccattacaaaaaaataaactggtaaatatcggagactctcaagtccatataactgaatttttattgggccccctggtttcctttgggcaagatattttctgtagaactgtggtaccttcgaggggggttttatcaagaaagaacaggcctagctcttttttcaacattaaactgtgcgtccacaaggcctgtaacgccagcagtaattgtttgaccctctttgacagggccaacacccgggggagtaccagttagtatgacatcccctttaaacaatgtgatgacagagccaaggtagctaattagaaatgggatctta

SEQ ID NO: 2979 - DNA, 638 bp, Glycine max
  Clone ID: jC-gmfl02220053b11a1
aaaatcaattttctgtcttctttgcgtcttcttcctctatcaatcgttttgcatgggtcgtaccaagcaaaccgctcgcaaatccaccggtggaaaggctcctaggaagcaactcgccaccaaggctgcaaggaattctgcaccgacaaccggtggagtcaagaagcctcatcgctatcgccctggaactgttgctcttcgtgagatccgaaaataccaaaagagcacagagcttctgatccgcaagctccccttccagcgtcttgttcgtgaaattgcgcaagacttcaagaccgatttgaggttccagagtcacgctgttcttgcgcttcatgaagctgcggaggcttacttggtgggtttgtttgaggacaccaacttgtgtgcgattcacgccaagagggtgaccattattgccaaaggacatttaacttgcactccgcattcgtggagaacgtgcttaggcttattaatagaagtaatacgtagctgctgctgcttttattcttttgcaatacatttttgtttaaggtatttttatgtaagttccgttggctgtttgggtgtatagaaatagattatcattcacactttgctctgtatgatctaactgaattttgataatgattacctctggc

SEQ ID NO: 2980 - DNA, 339 bp, Glycine max
  Clone ID: jC-gmfl02220053b11d1
aaacaagctcgggcgagaattctttcactggtttctcatttatactagcttaggtcaatgaccaccaccgctttagatacaatcaaaatgctaaaagccgggatccctccaaaagctcgagatttctcaattaagctaagcttctcataaagaacatagtgattgttttgttggacttactcaccaaattacctaaaaaacatgggtgcttaagtgactattagtattcggtaaccaggtttttattaccttagggttttatgatattggggtggccctcaacaacaaagcatgctcaagctccacctccacttccccagattgttggccgcccatttg

SEQ ID NO: 2981 - DNA, 529 bp, Glycine max
  Clone ID: jC-gmfl02220053b12a1
caaaaaccatttaatttttctctctcttttttcttttttttcttttttttttctctggtgtctgtcatggaagttaatactactacaaccactgtaccttcagggccaccaactaggaaccattcttacacacaacaccgcttacattcagaaagacatagccataaccatagccatggccatttcccctccaaaaccattctcataatcatcgcattcgtcaccttagtcacggtcctatttatcattttcgtggtcctattcttgatccgtcgccaaaaatcctccagcaagaatggaacttgcgaagaagacagcagagagcttcatgacacaagcagcaggctcatcacttcaacaacgttgaattctagcccagatgtgaaaagtgggtgtcttcatgggggaaatttgagcaggaccccagcacctaaatttcgtggagtacaagtgttcacgtatagggagttagaaattgccactgatggattcagcgaagcaaatgtgattggtagtaatggaattattg

SEQ ID NO: 2982 - DNA, 466 bp, Glycine max
  Clone ID: jC-gmfl02220053b12d1
aaaagacaacctccaacggctaaaagaaaaagaacaccacattgataaattgacttaactagttaaattatctttcccagtcaaaccataggttcttaacaaaattaagccacataacctatccagccttcaaataaacatcaaaatgatatcgcaaattgctagctcaacggcgactgcacggtagcaaaacccatgaaagttgatacattctctaagcaaccagagtgctagcagttgttgattcgtacttccagactggtgggagcttcttagtcttcttgtaatagcgagcaagtcggtggattctgctctcaacaagaatcaacctgaacttggagtccttgtccttcctgttcctctcaagatgcttcctaattgaaactgccttcttaatcaaatggtacaggtcctctggaatttcaggcgcaagtccgtgagctttgaggatgcgaaggattttgct

SEQ ID NO: 2983 - DNA, 130 bp, Glycine max
  Clone ID: jC-gmfl02220053c01a1
ctccagctatatcattagctgagctgtctgttggtaaaacgcgttataggggctccttgaacacacctacaatgacaaccgacagcgtgtcagttcacggaaggttgcatgcatcacctgttgcgagtgc

SEQ ID NO: 2984 - DNA, 507 bp, Glycine max
  unsure (1)..(507): unsure at all n locations
  Clone ID: jC-gmfl02220053c01d1
gacaactatggattattttatttatataccaaagtaatcatacaaataaaatattttgaactaagatggggtacatctagattttgtgtaccaactccttaaaaattgtctctataccctgcttctgctattggaagcaatggaaatcctctgatcctgaagcatgttcaagttgggagccagcaaccgtgtgtaccggtcaaagtacaagagctgtttcaggagaagagcaaattctctaggaaacttcaatccatatgattcactaacccgaaccacatcaagaaagagtgcattcatctgcctctcatcaacaactatattagcagcaacagcagttgcatttgtggctgttccagttgtagttgctacaactatttcagtgtccaattccttaattgatgagaatactttntccaaatctcttgcaaggccttagcatcaacatcctggtttgtagcacccatttcaattaaggagatgccattgagtcataatcttcaatgc

SEQ ID NO: 2985 - DNA, 581 bp, Glycine max
  Clone ID: jC-gmfl02220053c02a1
gcagaaagcaagctcatcctagagttttaaaaatggcagcagcctcctccatggctctctcttccccatccttggctggcaaggccgtgaagctgggcccatcagcccccgaagtcgggagggtcagcatgaggaagaccgtcaccaagcaggcctcctccggaagcccatggtacggcccagaccgcgtcaagtacttgggcccattctctggcgagcccccgtcctacctcactggcgagttcccaggtgactacggctgggacactgctgggctttcggccgacccagaaaccttcgccagaaaccgtgagctcgaagtgatccactccaggtgggccatgctcggggccttgggctgcgtcttccccgaactgttgtcccgcaacggggtcaagtttggagaagctgcgtggctcaaggccgggtcccagatcttcagcgagggtgggctggactacttgggcaacccaagccttgtccacgcccagagcattctcgccatctgggccacccaagttatcctaatgggtgctgatgacggttatcgaattgctggtgggcccctcgtgagtcactga

SEQ ID NO: 2986 - DNA, 547 bp, Glycine max
  unsure (1)..(547): unsure at all n locations
  Clone ID: jC-gmfl02220053c02d1
ccttatcgtatacccataaaaagtacgttgaatctttttggaaacatatcctataatcaaaatccaatttgcattaattatataagggaacttgaaacataccccggggaaatgattcatgggtaagttattcatttagtaattaaatcttcgtgaatcccccctttttttaattccagttaaatcccttatcacattcacaaatatacataaagggggaagttctattagaaacttgcgttttctctttctttttttttttaccaaaaatggatcgaagtttctcatataattcgggtgttagaaagattaccatatataacataaaacttctccgccaattctttctaatcgagcctctcgatctgtcattatacctctagaagttgaaagaattacaatccccatgccccctaaaattcgagggattcgttgataattagaatatattcgtagaccgggtgtactgatccgttttaaatttaaaaaacttttatatgatccctttctatttcttctatanccgagagttaaaactaaaaaaata

SEQ ID NO: 2987 - DNA, 560 bp, Glycine max
  Clone ID: jC-gmfl02220053c03a1
cttcctgtcctgaatcagaattaactttgggaacgataaagcatgctgacgttgatttcattacagtgcttctacaagaccatataggtggcctccaagttcttcatcaggacacgtggatcgatgtaacccctgtgcctggggctctagttgttaacattggtgattttctacagctaatctcaaatgacaaattcaagagtgctcaacacagagtactggccaaaactgttggtccaagagtctctattgcatgcttttttagtccagcattccatccatcttcaaggacttatgctcccattaaggaacttttatctgaagacaatcctgcaaaatacagagaattttcaattgcagaatttacagctcactacagaacaaaatgcatgaagggtacttctcctctactacatttcaagatttgacaagtacaatgttgtaaaagtgactatgtccttgatccattgctcttcgttaacggagctgaatgtagcaaattttggaacttccactgtgtcatttcttgagggagaattaatgataaacttggaagagat

SEQ ID NO: 2988 - DNA, 548 bp, Glycine max
  unsure (1)..(548): unsure at all n locations
  Clone ID: jC-gmfl02220053c03d1
aatcaagatttgcataaccattaaaatagcttaaatataacaaaactttcactagacaatcaaatttcaaccacgcatgagcaatccaaacgagtcttaattatttcaaccaaaaggggggggctcaaactccaggattataagctgatggcatgaaacaacaaaaatgaaaattcttgatcgcaagactatgggttctaagtatcaaggtcctaaatttgggaaaatatcaataccaatatttctcatccataattattcaaatgacaaggcaatcggcatgattatcccaggaaattgtcgtcatcatttttagccgccgccagatccatatttctttccaaacaaaatgagctgcagcttgtcataaccagcaagcacaccagcacctgcaacagcacgcaatatgttcgcaccagcacctttgaagagtgacttggcaccctcatttgcgacgattgtttggaatgcatgcaaagagctcttgtacttcacagcttctncagaagtcatcatcattcttcttncgacagtgtcaatggggatag

SEQ ID NO: 2989 - DNA, 485 bp, Glycine max
  Clone ID: jC-gmfl02220053c04a1
ctttattctctcacacaaaattttggacaagaagcttggcaacacgtctcatgatcctgaagtgagaaaggggccatggacaatggaagaagacttaatcttgatcacctatattgccaatcacggggaaggggtttggaactctttggccaaggctgctggacttaaacgtaccggaaagagttgccggctccggtggctaaactacctccgtcctgatgttagaagagggaatattacacccgaggaacagcttttgatcatggaacttcatgcaaagtggggaaacaggtggtccaaaattgccaagcatctacccggaaggactgataatgagattaagaactactggaggacaaggatccagaagcacctcaagcaagctttcagcagcttccagcaacagagtagtaattctgagataatttatcatccccaagcttgcactagccaagtgtccaccatggcgcaacccatagaaacct

SEQ ID NO: 2990 - DNA, 469 bp, Glycine max
  Clone ID: jC-gmfl02220053c04d1
ggcacaagaacatatcagtgttcattctataggggttaggcaaaattaaatgtttatgtacacagcaactgggataattggaaaatcctacaaggttccccaaaagaccttgcaaagtgagaagtgaggagactaccaattaaccttgaccaacctatctaaaccaagttcaaatatctacaccagataaagtaataagttcacaggaaacaagagcagaggcaagttttccctaaaactccatattccagatcttattgaaatagtaaaaaacaaacactcttctcaatagcagtcataaaagtttcctgccgcagagggaacagaaaaatcagtctgtgtctgttcaagattcataagtccgcactgaatctcgaatctcctgacgacaaacaggacatttgggtgcaacttcacgttcaactgatatggcacacccttgtgaacacacaagatgcccacagggaat

SEQ ID NO: 2991 - DNA, 458 bp, Glycine max
  Clone ID: jC-gmfl02220053c05a1
aaaaaaaaaaaaaaaaaaaaaataaaaaaaaaaaaaaaaaaaaaaaaaaaaaaaaaaaaaaaaaaaaaaatataaaaaaaaaaaaaaacaaaaaaaaaaaaaataaagggggcggccccccctttttggccttccccccccggaatttaatttcggcccggtccctgggggcctcccccttttcccttttgggggctctttttaagctgggcgtaatcagggccttagttgtttccgggggaaaattgttttccgttcaaaattccccacaacattcgacccggaaacttaaagtgtaaaccccgggggccctatgggggggcctcccccccttttattgggttggcctcccttccccttttccatacggaaaacctgttggcccacctgttttaattaaatccccccacccccgggggggggcgtttttttttttggccccccgggggttttttttt

SEQ ID NO: 2992 - DNA, 436 bp, Glycine max
  Clone ID: jC-gmfl02220053c05d1
gtaggaagaacccaaggccttttttgaaaaaagagcaaaccagtttttttttaaacccaaacaaacaaaaggggtagggtgtaatcaaccccccccctttttgtaaaaaatttgcccgttcccggatttaaagccgccttgaaaaaaaaaaaaaccttgaaccccccttgggggtcgttttttttggttgggccccccacctcaaaggggggggggggtagggccccccttccgggtataatttcccccatcaaagggaaaaccaaaccccattgggcccatcttcccccaaaaagcccggttggtttcgggaatcccaaaaaagggcccggaccaagaccaaaaacttccctgaagcctttggctggggggaaaacaccccccgggggggggtcggcatcaaaaaatttttcacggcacctaaacccccaatggg

SEQ ID NO: 2993 - DNA, 549 bp, Glycine max
  Clone ID: jC-gmfl02220053c06a1
tgctcctgatcctgttattgacacctgcaacggattctactgtgaaaacttcaagcccaacaagaacaccaaacccaaaatgtggactgagaattggactggctggtacactgattttggcggtgcagtccctcgtagaccagcagaagacttggcgttctcagttgcaagattcatacagaatggtggttcattcgttaactactatatgtaccatggaggaacgaactttggccggacatcaggtggcctcttcattgccactagctatgactatgatgcgccgcttgatgaatacggacttgaaaatgaaccaaagtatgagcatttgagagctttgcataaagcaataaaacaaagtgaacctgctttagtggctacagatcccaaagtgcaatcgcttggatataaccttgaggcccacgtgttctcggccccaggtgcttgtgctgcattcattgctaattatgacaccaaatcttatgcaaaagctaaatttggagatgggcaatatgatctaccgccttggtctatcagtattcttcctga

SEQ ID NO: 2994 - DNA, 496 bp, Glycine max
  Clone ID: jC-gmfl02220053c06d1
atggcaacatactgataggatagaaagatatatatagtgtttaaaggttcttaggtattacaactttatttccatcaccacaaaaatagctagttgatgtaattggtagcaaacttgtgtgtttctgttctctatcaactttagtccttgttgaccttttctagacaacttgggtgaaggtcatagtcacagacatcacaagagaatgtccaaaacttgccttgctttttacatgaatcacatacatatgctttggccatatccaatttcagtacatgttcatgcttcacatcctcaacctgctgaggcaaagcctctccttcctttctaagagctgcttcgaggtctcttatccgtgattcggtgaacgggaaagcttctgcaccgtatgaggagaccattaacttcccattcacactaatgactttgccatctggtccaatgagaaccaaagcaggaatgccctttacatcaaagattcttcgaaggtcatgcc

SEQ ID NO: 2995 - DNA, 420 bp, Glycine max
  Clone ID: jC-gmfl02220053c07a1
cgtgcctgcccctatacctcttcccacttactattattattgtacaacacaaccgggtccctgaatgctttttagagagagaaagagtaataataataaagtggaagaaaatgaatttggtgagtgaatcacgacgaagaagaagactaataagacgaagaagaattgcgaatatggtgtttgaggaaacttgactgaggctgggactgggactatgtctccctggaaatggaaccacggcaacaactgaagctgctgctgcggaattaggagagaggaagagagggttctcttatactgaaactgatgaaacagcccccgtcgatttgatgcctaaccttccacccaacgaagctgctgctgctgatggtgcatatccacgtgagaagccaaagacttttgcgtaggagaagacccttc

SEQ ID NO: 2996 - DNA, 335 bp, Glycine max
  Clone ID: jC-gmfl02220053c07d1
atacccctcccactggggcttgccttggagactgaaaaggggtgtggttttgttttacccaaaaccccaaattaaagggtgggccaacggggctttttctttatgcaacataaatttttcctggggaaggaaatcaaaaattcattctaaataggcccccttttgtttaattgggtgggggccccaagaaaaacccacggtgggatgggtgtccatacggttgaaacaaaccccggcgttttctacttttaaccgtgactagggttcattcgctcacggggggggccaacaaaaagggagcaagagggggccccacagggttgctcccgaaccca

SEQ ID NO: 2997 - DNA, 522 bp, Glycine max
  Clone ID: jC-gmfl02220053c08a1
ggcctagctgttttctcaatgagaaagccttcatctctgcaaagcgcacttttgcgctttggggttcccttgttgcttgttatcaccttctgttatgctacttctactgctgcagcaacaactcaagtttcagggaatgaagagctgccaaagacaaacctaaatgggcatgatgaagaagcaaaattcggattttttcatcataaaccaatattcaagaaacatattccaattccagtatataaacctgtaccaaagccatttccagtgtataaacctataccaaagccagttccagttccagtgtacaagcctattccaaagccagtgtataagcctattccaaagccagttccagtgtacaagcctataccaaagccagttccagttccagtgtataagcctattccaaagccagtgtacaagcctattccgaagccagtgtataagcctattccaaagccagttccagtgtacaagcctataccaaagccagttccagttccagtgtataagcctatt

SEQ ID NO: 2998 - DNA, 419 bp, Glycine max
  Clone ID: jC-gmfl02220053c08d1
atataagtacaaatattattcttatcgttaaaattcggtagacatacattttatgattttaatatattgcttttgaacttttctaaccttaacatgaaactaagtgcaggttaaggtgcgcaaggtaaatttatctgcgtatgataataaaaaaaagagagtctttaaccccatagctagattggtaacaattaagatggtccaaaaatattgggtggaagggttgatggtagagagagagacaaggggtgaaatatgtatgattctagcggtgatttgaataacaaaatttaacagcacagttggaagttatgaaatacaaccagggcagtgtgccaagccattctcattacaattggggcacctctctatgtgaagaagcttgcgactaccagcacagtcgaagaaggaacgaacct

SEQ ID NO: 2999 - DNA, 450 bp, Glycine max
  Clone ID: jC-gmfl02220053c09a1
cttcgttccttccccaacccaatcttcgccttcgcccacaacaactcctgtcttcaggatcgctgccaacgttactttccatttttacccttcatcctcgagaaaaaaatggcgaacgcagcatctggtctggccgtccatgatgagtgcaagctaaagtttctggagctcaaggcgaagaggacgtaccggtatatcgtttttaagattgaggagaaatcgtagcaagttattgtggagaagctgggtgaccctgcaaatggctatgatgaattcgctgccagtctttctgctgatgagtgtcgatatgctgcttatgattttgattttgtcactgaagagaattgccaaaagagcagaatcttcttcattgcttggtcccctgatacatctagggttaggagcaagatgatttatgccagctccaaagattgattcaagagggagctt

SEQ ID NO: 3000 - DNA, 406 bp, Glycine max
  Clone ID: jC-gmfl02220053c09d1
aaaaaaaccccccccttcccccatttttcccaaaataaaaagggggggggaattttcaaaaaaaccgggccccccccacaagggggggcggggcaaatcccctttttgggaaaaacccccccccccacaaaaaaaaaccccccttcccaaacctggggggggttccccttttttaaaaaaaagggggacacccccgggaaaaaaaaaaacggggctaaaaaatttccccccccttttaaaattttgagaaaacccccaaaaaaaaaaaaaaacctgtaaccgggtgggggctgaaaaaaagaaaacccaaggccccaaaagtttattttcccccccaaaaaccccccttttaaaaaccttttttgggcccccccccctttttgggaaaaaaccatccccaaaaagg

SEQ ID NO: 3001 - DNA, 480 bp, Glycine max
  Clone ID: jC-gmfl02220053c10a1
ggaagcagaaaccaaacacaactcaatcacgaaaatgtcgaatttgccccaatcgctgtcgatgggcgcggccttcggcggcggtggcgctccaacgccgacttacagtggcggcgccggagcacagggctccggcgctggcaaggatcggaagatggcgttcgcggagcaggtcgtgctcgaactcaccaaccctgaactccgtgaaaacgcgcttctcgaactctgcaagaagagggagctatttcaagatcttgctccgctgctatggaattcttttggtactatcgctgcacttgtgcaggaaataggttcaatataccctgttctttcaccaccaaatcttactcctgcacaatcgaaccgagtatgcaatgctcttgctcttcttcagtgtgtagcatctcaccctgatacaaggatgctattcctcaatgctcatatacctctatatctgtatccctttcttaaaacaacaag

SEQ ID NO: 3002 - DNA, 586 bp, Glycine max
  unsure (1)..(586): unsure at all n locations
  Clone ID: jC-gmfl02220053c10d1
cggggcgtgtgtgatttattcccgggccgactgagctcagctagtccgggcgggcccgcccctttnntttttgtgtttatattttctatttttatttatctatatgttctctttcattatgttttatcttattattggtgtattttagcgttgtgtttatttggagttatacttagcgcacataaacatattatcgcgtttatttgttctgtggactataaatggcatagaaccctataggcggtgggctccacagaaaagaaagcgctatgtgcattttatttttatggggatgaggcttagatagaaacaatacatcttaactatatgtggatgctttgccaagtgattctgccatcatactggcaatacagtgagatgtagactgaatggttaccatggggttgacacccactgcactagggggaacactcccatcacacacatactagccttctgcttgcgaagactcaccattctcattgggtgcaccttcttcttcagaggcacccattctacatcttgacatctgatgtgcagtggttaacactgtacacactttattccttgaccttggacccccaac

SEQ ID NO: 3003 - DNA, 352 bp, Glycine max
  unsure (1)..(352): unsure at all n locations
  Clone ID: jC-gmfl02220053c11a1
gttggttgttatggctttgtaaaagcacgaaggctggcggctgctaaatggttgaagtagtgagttggctaccaattacaaaaggtgtgggcgtctggttggatggccctattattgtgtctgcgtgtctttgtgtctatgtaaatttaaggagaaataaccacaagggtattttattttttctctttttggaaggacctgggagaaactagaaagtaatacagaagggagaataatgtccagccggagtgcacttgatagtttgtattaatccacaatgcctttttgttgatcaattgcagaattcagagattcattataaatatcatacataacttgtcccnnnnaaaaa

SEQ ID NO: 3004 - DNA, 257 bp, Glycine max
  Clone ID: jC-gmfl02220053c11d1
ctctctccaaaacacagggggggggacaccaaattttaccacaaacccccccctctcagaggatgcgaccccccgaggggggggaagggtgcaacacccaccaataaaaaaaattgggtctttaagacctattttccacaagcgattatccgttagaaaaaacccaacaaaatttgggggcacctaaaaaaaaaagggctcggccaataataaaaaaaaaatctcccccccccccccaggacaccaaaacccccaca

SEQ ID NO: 3005 - DNA, 489 bp, Glycine max
  Clone ID: jC-gmfl02220053c12a1
agcaagaaaagagggtttttggctgcggttaaggtttttgaggagctgatttccaagggctatgaatcgggtcaagtcacctatgcttcggttataaatgcatattggcgtctcgggcaatatagcaaagcagaagaggtgtttttagagatggagcaaaaggggtttgataaatgtgtttatgcttactctaccatgattgtgatgtatggaagaacggagagggtgagaagcgcgatgaagttggtggccaagatgaaagaaagagggcgcaaaccaaatgtgtggatctataactccttgatagacatgcatgggagggacaagaatttgaagcagcttgagaagctgtggaaagaaatgaagagaagaagggtagcaccggataaggtgagttatactagcatcattggtgcttatagtaaagcaggtgaggtcgcaacctgggtgaggtttttcaatgagtataggatgaatggagggcttatt

SEQ ID NO: 3006 - DNA, 323 bp, Glycine max
  Clone ID: jC-gmfl02220053c12d1
gcataaacgaatataatggttggaatacgaagttgggggaccaaagttgcacactcgaatagcgcgcagcctcattacaataaacttgacgtcccatgagtccttcaacaagctagatggttgatgtggaacgctttctctgtgcataagaatcatctaacctatgccaccatgtggacaaaactttttccatcatgtggagaaccaatgatactacgggagatgttcactaacatatttcgggcttcacctatggtgattcaagcctgctaacaagaggaccgtgcatgtcccaaccaaaggggtacaccttaccctccaaa

SEQ ID NO: 3007 - DNA, 417 bp, Glycine max
  Clone ID: jC-gmfl02220053d01a1
agaaattgtattaggaatgattgattggtgtacagtatcttcagttgtcgtgtgacaacacgagaaaacaaatgttgcacccccatgactgtcgtattccatccatctatgggttccgttgacgtttatttttggaccgtggtgcttgttcaattatgaatgttagtagtagttatacataaaaaaaaaaaaaaaaataaaaaataaaaaaaaaaaaaaaaaaaaaaaaaaaaaaataaaaaaaaaaaaaaaaaaaaaaaaaaaaatacatataaaataaaaaaaaaaaaaagggggggcccccacatagggacctctttacccggggaattaatccgggaccggtccctgggggtttaccatttttccctttagagggtctttttaaagttggggttaacttgggccaaacttttt

SEQ ID NO: 3008 - DNA, 348 bp, Glycine max
  Clone ID: jC-gmfl02220053d01d1
aaaccaaaaaccgagctaacaaacacaagcaaggaaagggaaaaacatacaaagggggcacccaaaaaaaaataactgggcggagaacaaaaaagaccagacggggaaaaacctgacaaaaccgaaccaaaaaaaccaggggcaaaacccccttaaaacagaggggggaaaaaaaaaaaggcccgaacacgaaagacaatcccaaaagggggaaaacccgaagggcaaaagggacgcccccagaaaggggcaaaaagggcggccccaaaagaggggtacccccaaccggaaagggaaaagggccacccccaaagggccccgaaaaaggggggggggcgcaggcgaacc

SEQ ID NO: 3009 - DNA, 597 bp, Glycine max
  Clone ID: jC-gmfl02220053d02a1
ggcagatgccaagatcaaccccaatgcacaactccttgaagaactggaggctttgagcgaatccctttacaaacaacacaccttcaccacaaccagaagaacagcttcccttgtgttgccacgaacttcggctccacctattgaagatgccaaagatgatgatggaagcagcaacaaagctcggcggcgcatgtccatgtccccgtggcgatctagaccaaagaatgatgatgccactgccaaggcagaaaccaaaaagcttgatggcacatcaacaatttcttcaggtgacagtgacaggaaagggatttggaagtggaagcctattcgggctttgtctcacattggaatgcagaaactaagctgtttgttttctgttgaagtggtcgcagctcaaggccttccttcttccatgaatggacttagactatccgtttgcgttagaaagaaggaaacaaaggatggtgcggttaagacaatgccattcagggtttcacaaggagctgcaggatttgaagagacccttttcatcaggtgtcatggttatcataccttcaaccaaggcactgcaaagcagatcaagtttgagccacgccc

SEQ ID NO: 3010 - DNA, 530 bp, Glycine max
  Clone ID: jC-gmfl02220053d02d1
gatgttaccttgtcatttcatcatatatatgaacatagtaaaatcctttctttttctttccattattcaacaaacctatatacatatctggaaggttatttccgtctataggggcgttaatacaatagataagagatgaactaccccaagaagtttggggcctggtttattcagcaaatatctgctcaagcatacagagaatccccacataagttctaatcacatattactgctgagtttttccatatagcttgatcagatatagctactcaactctactttcttcctactaaatcagttataagtcattcattccctcttgacatcagactcttcagtccttgcaaatctcccacggattcttggctgactgtcagcaagagccttcctgcaagcatacttgattttcctcccaaaattcctctttgtcctcttattcctgtatcttgagagcttttgaaagcgttcctcactggtgcaattgctgataagcaagggcctctcacggggtgattggacgatgttcatgt

SEQ ID NO: 3011 - DNA, 508 bp, Glycine max
  Clone ID: jC-gmfl02220053d03a1
aaataacacaacacattaacgttcttttatttctctgtctagagaagaatctagcaggccttgctcgtcacaaaatcaaaggttgcaactgagaactcactccttcgaatcaaaatcaaaaaatgtcggtgactttgcacacaaacctaggcgacatcaagtgtgaaatcttttgcgacgaggtccctaaaacctccgagaattttttagcgctatgtgcaagtggttactatgatgggactatatttcaccgcaacattaagggttttatgattcacggtggagatccaactggaactggcaaagggggaaccagtatatggggcaagaaatttaacgatgagataagagaatctctgaagcacaatgcaagaggaatattagcaatggccaatagtggtccaaatactaatggaagccaatttttcttgacttattcaaagcagtctcatttaaatgggctatacaccgcgttctgcaaagtaattcatggatttgaagttcttga

SEQ ID NO: 3012 - DNA, 343 bp, Glycine max
  Clone ID: jC-gmfl02220053d03d1
atacatggacataaaccgcaaaatatacatgtactatgctatcaaaaatctaagctgatggaaatgctgcataggcatcttgggctaatcaatcaaactggctggactgcggcactgaattgggcaccagcatacacagctactaaaccaattacctactaacttctcaggagctgcatggacttggcaagcctttcagatcggctgggaactccagtcacggtccaaccagctgcatattcaactggacggcctaccttgagcgcgtcctacgagatagcactactggggatagccatgacaccaaagccagcttggggaaacattctcacagctccgatac

SEQ ID NO: 3013 - DNA, 531 bp, Glycine max
  unsure (1)..(531): unsure at all n locations
  Clone ID: jC-gmfl02220053d04a1
aaataacacaacacaaaacgatcttttatttctctgtctagagaagaatctagcaagccttgctcgtcacaaaatcaaaggttgcaactgagaactcactccttcgaatcaaaatcaaaaaatgtcggtgactctgcacacaaacctaggcgacatcaagtgtgaaatcttttgcgacgaggtccctaaaacctccgagaattttttagcgctatgtgcaagtggttactatgatgggactatatttcaccgcaacattaagggttttatgattcaaggtggagatccaactggaactggcaaagggggaaccagtttatggggcaagaaatttaacgatgagataagagaatctctgaagcacaatgcaagaggaatattagcaatggccaatagtggtccaaatactaatggaagccaanttttcttgacttatgcaaagcagcctcatttaaatgggctatacaccgtgtttggcaagtaattcatggatttgaagttcttgatctcatggagaagacacaaacaggg

SEQ ID NO: 3014 - DNA, 463 bp, Glycine max
  Clone ID: jC-gmfl02220053d04d1
ttttttttttttttttttttttttttttttttttttttttttttttttttttttttttttttttttttttttttttaaaaaaaaaaaccccccattttcttttttttttttccgggttccaaaacccccaaaaggaaaaatggggggaaaaaatttcccgccccccttttttggtcccaaaagggaattttttttgtccctggcctttgcggggggccgccaattttttaaatggtgaaaatgccccctttttttcccctttaatgactttaaaagcccccccaaagttccccaaggggaaatttgcttgaaattcttgaaaagacaaaaagtccaggggtttttcctccctttttttggccccaaaaaatctttttgggttttttttttaccaaggggtgattagcttgcccaagcttttgcaatcccggggagggtttttgcccccctttttttaggggct

SEQ ID NO: 3015 - DNA, 513 bp, Glycine max
  Clone ID: jC-gmfl02220053d05a1
gccaaatttcattttattcattcatctctttgccaatttctgttcatttttaggctcgctgttccaaatccaacaaattagagcttcgtttccgtcctgaagacccctattctcaccctgcatttggggagctttcgtccaccaactctctgcttctcaaaatatccaagacaaaaccaccaccacctgttcatgatgccgaagcttctagcagctctacaaatggggagcaagaccaagagggaagtctttgtgctgatatcgtcgctcgttttcccgaggcttattttttttatgggatggcggactaccaacatgtgattccagttcatgctgatgttgcccggaggaagaagcggaactggtcagagctagaagaactgcattttgataaaggtggtttcatggatctggatcacgaggatgttatgattatagtgccttcaattttcgctcccaaagatgtgccagaaaatttagtcttaagaccagctaccatgtcgagttcgaaaa

SEQ ID NO: 3016 - DNA, 521 bp, Glycine max
  unsure (1)..(521): unsure at all n locations
  Clone ID: jC-gmfl02220053d05d1
cggcggccgccctttttttttttttttacactcaaattctatatcccctgctttattgacatcaagtacaagaagtagcagcttcactctaataatttccccaccttattacctcaaatatacttacaatataagtaaaaaaaaacctgttggtaatggtattaatattcatatccataaaaactttcaacatgacacagaaaaaaaaatgtcagcttatccttaaactcaactatatataaaaaaaaaggtttacatgaattcaagtgccgatggaatcagcactaacccaagtccaataatgcttcttaacagaaacagcttcatccgcaacaattttgtcttcaaaaacccctccatactcatccacctngtaggtgcaaaaatccccttcgggcaaacactccacggtggcactgagcgtgtgcaaaacgtagcaaccgggcaaacccgggtaagaacccgaatctcgctctttaaccctcatctcatacgaattgggatcaatggtgacaatgtca

SEQ ID NO: 3017 - DNA, 590 bp, Glycine max
  unsure (1)..(590): unsure at all n locations
  Clone ID: jC-gmfl02220053d06a1
agaagaacaagtagttgagaactaagaaggagaagcaaatggcttcctcaatgatctcttccccagctgttaccactgtcaaccgtgccggtgccggcatggttgctccattcactggcctcaagtccatggctggcttccccaccaggaagaccaacaatgacattacctccattgctagcaacggtggaagagtgcaatgcatgcaggtgtggccaccagttggcaagaagaagtttgagactctttcctacctgccagaccttgatgatgcacaattggcaaaggaagtagaataccttcttaggaagggatggattccttgcttggaattcgagttggagcacggtttcgtgtaccgtgagcacaacaggtcaccaggatactacgatggacgctactggaccatgtggaagctgcctatgtttggttgcactgatgcttctcaagtgttgaaggagcttcaagaggctaagactgcatcnccaacggcttcatccgtatcatcggattcgacaacgttcgccaagtgcagtgcatcagcttcatcgcctacaagccccatgcttttaagtgtgaaaaatatgcaa

SEQ ID NO: 3018 - DNA, 258 bp, Glycine max
  Clone ID: jC-gmfl02220053d07a1
ggcccctgtgcctattcattgtcaaagtttctattattgtagagcaccacaacccgctccggggatgctttgtagagagagatcgccttatgatatgctactggtacagatagaattacgactctggtaccaggggatgaagagctggcagaaacaaacctagaagggcgtggatggtgagcgaagaaactgatcttacgctgtgaccgagactatatgtaactgaaaacggatccacggtatcaacctgagccgctg

SEQ ID NO: 3019 - DNA, 473 bp, Glycine max
  Clone ID: jC-gmfl02220053d07d1
aaactaaaaatacttttattttttaaataattatgctgttcaaatgttttctcatcgtacattataagctatttctcaagtcaccactatattcctaccatctgaaaggagatataacggggaaaggaaaattcaatccagtaaacacgtaatgagctgtttttttcttacatgcgagactttgcctgctgctccaaagaggcactcagaggaattcctttggcagctcttgcagccaagtaggcacaaggcttgaagaattccccatacaactctgaccatttctccaatcttgaatatatgtacttggatccaagagaatcagcccagaatatgatgcctcccctgtaagggggaaaacccatgcccatgatagcagaaatatcaagatctgctgctttgactgcgataccttcatcaaggacccgacaagcctcattcaccacaggaaagaatatcatctctatgatatc

SEQ ID NO: 3020 - DNA, 491 bp, Glycine max
  unsure (1)..(491): unsure at all n locations
  Clone ID: jC-gmfl02220053d08a1
gtttcaagaaggctaatattgggaaggatttggccctgcatgcatgcgccggggagcctcccctcgcattcctcgactctcttcttcttggagagtgggaagatcgcatgcagagaggactttttcgctatgatgttaccgcctgtgaaaccaaggtgattcctggtgaatatggtttcgttgcccagcttaacgagggtcgtcacctcaagaagaggccaactgagttccgagttgataaggtccttcaaccctttgatgaaaacaaattcaactttaccaaagtcgggcaagaagaggtcctcttccaatttgaagctagcgaggatggacaagtccagttctttccaaatgctccagttgatgttgacaattctcccagctttgttgccatcaatgtcagtcctattgagtatgggcatgttttgctgattccgcgcatatttgagtgtttgcctcanaggattgaccgtgagagctctctccttgca

SEQ ID NO: 3021 - DNA, 476 bp, Glycine max
  Clone ID: jC-gmfl02220053d08d1
caaaaaactatattgatgttttattgaaatatccatcatacaagcactacccaagcagaaatcaacagtatgcgtagacgccacagcatacctttaaacatttcccatcatgacaccttaaaatcacaagagaacattagaaatttcgaatcatgaaggttgaactatgaattcttaacatattatctagctaaaattaaacaggttttcacatattatagaccgaaggaacaatttgttggtccaaggaagaaagcacatgcaagaggggtctggagacaaatgatatagtgatagaaccatccagcattcatcgccgaaaagcattgctttcaccaccagatcttccttgagaataatatgtccgacgacggacactctcggctattgatgcactccccccttcagctgcaccatatacacttttctgagcagtatccaagaaattcttgccaccggcattatcattctggatt

SEQ ID NO: 3022 - DNA, 559 bp, Glycine max
  Clone ID: jC-gmfl02220053d09a1
ggtattgctcaggtcaatagcgtcactggcagcaaaatccttcgcatcctcaaagctcacggacttgcgcctgaaattccagaggacctgtaccatttgattaagaaggcagtttcaattaggaagcatcttgagaggaacaggaaggacaaggactccaagttcaggttgattcttgttgagagcagaatccaccgacttgctcgctattacaagaagactaagaagctcccaccagtctggaagtacgaatcaacaactgctagcactctggttgcttagagaatgtatcaactttcatgggttttgctaccgtgcagtcgccgttgagctagcaatttgcgatatcattttgatgtttatttgaaggctggataggttatgtggcttaattttgttaagaacctatggtttgactgggaaagataatttaactagttaagtcaatttatcaatgtggtgttctttttttttagccggtggaggttgtcttttaaagagatgactatgtgttttggctttattttcaagtaatatatatgcttagaagatttgaagg

SEQ ID NO: 3023 - DNA, 580 bp, Glycine max
  Clone ID: jC-gmfl02220053d09d1
gttgtgagatataaattgtttgacattgaatctaatttgcaaaatcaattgttctatggcgtaattgagttctatcaattacatctgaatcaaaaaaatgaaaattagggtacaaaattaacagaaggaaaatgatcccataacatgggcagatgagaaatcctgcttactaaatgtaaatctgatgccgcccctaaaccttaatgatacaattctgctacaaaaccttatctttccttctcccctaactgattttttcttcttttcttttcctgttcttcgggcatatacagatacatcgatgagtaaaatatcccagtgttggtggactttatactgtgtcaaaaaacacatccttggcaagttcaatatatcacaacacgaagtaggcctggctgagtttccgtgaagtcaatgccctcttcaagatgaaaacgctgtgcagctattggaagtcttgcaggagtgcgagaacccctggtatgatgacctgtgcccacaagaatataaacctgcagacgctgctcggcagctatggcagtgcttttcagcacactcaactcatgtttcagcacatgaa

SEQ ID NO: 3024 - DNA, 528 bp, Glycine max
  Clone ID: jC-gmfl02220053d10a1
agtttgccaattttacttgcaaccaagccctcattgaagctgtggaaaggtctgacagaattcatgttatcgatttcgatattgggtttggagtgcagtggtcatcttttatgcaagagattgccttgagaagtagtggtgcaccttcactcaaagtcactgccattgtgtcaccctccacttgtgatgaggttgagctcaatttcactagagagaatttgattcaatacgcgaaagacatcaatgtgtcatttgaattcaatgttttgagcattgaatccttgaactctccttcctgtccactgcttggtaaattctttgataatgaggcaattgtggtgaatatgccagtctcaagtttcacaaactatccatcattgttcccttccgttcttcactttgtgaagcaactcaggccaaaagttgtggtcactttggacaagaattgtgatcaaatggatgtaccacttcctaccaacgtagtccatgttctccaatgttattcggccctgcttgaatcgttggatg

SEQ ID NO: 3025 - DNA, 474 bp, Glycine max
  Clone ID: jC-gmfl02220053d10d1
gcaggatataaatgataactgtcttataaatccctctttgcagtaattaattaaactggggatgcacccctagttctaatttgccaggagctaatggctttacaatgattagtatccataccatctccactaaaaccaagtgtatgtttggattaccgttccaatccttccaaagttattaactcaaaagtaacaaaagcatgcttctccctacttactttgaatatagattcaccacctgcaaacggtaatccaaacattatgagagcttcattttagaactgatgcagaattcccgctgacaatgtggtttgagagcttaccatcagatccccaaaatgctgcacactttaaatcatcctgaaccattaatctggagaactcctcatggttataactcattatgctctttccacccagttctttgggcagattttcctcatcagaataagacttcatgacctgcacactatc

SEQ ID NO: 3026 - DNA, 532 bp, Glycine max
  Clone ID: jC-gmfl02220053d11a1
gcagcacatgcaaagtcattcacttgaggaaagtaatctataagtttctaaaatcattggaaaattatgggttaatagtgtgaagcattggatcccagagaaagatctccaaaatgcgcgaggcagcatatatggacttgatggattagtatcaggtagggtgacctcctgtgaagctccatcaaggatgcctcggtcacgctctgtccaaaattgaggttggctgtttgttcatttgtgttttgttcttgtcagagcatcatgatacttttatgtgtgtgttttttgggttttagtttcttgctttaacagtattttgtggtggttccagaggccatttgtgtgtgctgtcgatgattgtcaggcaagttacagaagaaaggaccacctgactcggcaccttctacagcatgaagggaagaattttaagtgccctgttgagaattgcaacagtgagttctcttttgcaagcaatatgaaaagacatactgaggagattcatgatgacagttctaccactaccagtagtgac

SEQ ID NO: 3027 - DNA, 443 bp, Glycine max
  Clone ID: jC-gmfl02220053d11d1
aaaggaaaaggcaccaaattcaatttatgtggacacttaagcggaaaacgcttgaggacgacagaccaatatgaaaaatataggaaaatcggggggaacttggaatcctctttttgcaccttttactttcgagaattataagaatgttacacgcgggtccgatcacatcttctatctctcggatcagcacaaccttgaggaacagaaatattcacttgccaagtttgctttggctccaagtcaagattgggagaaagttcccctgccaatagcatcctcgtttgcattttcaagtgcagacaagttcaagttctcgccagcccattggactctatggacattctctagttggtggacaaggatgttaccatacgtcaagagcttctccatagtcatcgggggctgctcaaaggacggaggtccatctttcgagttcacaagct

SEQ ID NO: 3028 - DNA, 339 bp, Glycine max
  unsure (1)..(339): unsure at all n locations
  Clone ID: jC-gmfl02220053d12a1
gtcttgaaatcaagtatcaatataatggaccaaaggcttccattgttgggaagatatgtgaattgcaatgcaaaggcttgggtccaaccggagtgcaaagagatgcaaggaaaaatgggataacatcaacaatttctttaagaaagttagggagagtagcaaagaaaggcgtgaagatagcaagacatgtncctatttccacgagcttgaagctctatacaaagaaaagggaaaatctcnnancctctttggcatgtttcagaatatgacgccaaatgatacgattatgatgtagtcatttgatggtgcatccggagcaacaatagatgtctccacctt

SEQ ID NO: 3029 - DNA, 355 bp, Glycine max
  Clone ID: jC-gmfl02220053d12d1
tttttttttttttttttttttttttttttttttttttttttttttttttttttttttttttttttttttttttttttttttttttaaccccccgcccctaaaattttgggttccggggcccaaaatttttttttttttccaacctgggcggggggggggaaaaaaaaccgcaaaaacttttattttgcctccaacaaatgttccaaaaaaaattttttgtaacccccccctaaagcaggggggaaaaacaaataaaaaaaaagggccccccctctaaaaagggggcccaaaaacaaaaaaaaaggggcccgaaaaaagatttttgtttttttccccgcccaaatgttttggaact

SEQ ID NO: 3030 - DNA, 518 bp, Glycine max
  Clone ID: jC-gmfl02220053e01a1
cttcgaaggaagatatccgttggaaaccaaaaccaaaagcaagatcaagatgagaaatgggtagagagggatttcttgagtttgagtgagacaagggagaattcttcaaagagatccatggaggaagagtgtgaaagggagacgaatggtggcagcaagatgcagaagcttgagactcttagcctctctcttgctttgcctgatgtgtcgctctctctcacagcctccaacgctttgcaaaatggcgaccaactcgttaggccaaagcctagtaagccatccacaaggaccacaactactatcaattcatgttcaaatgattacacagcagcttctgtgtctcactcttactctcaccctttctcacacaaccaaagttgctcactcacccgaaattcgaccgagaatttcgagtactcacacagcaaagatgatcaaatctggcattgtggggaggcgactaatggctcggttcatagcaggttcaagccattggagatgggctgctttggtcatca

SEQ ID NO: 3031 - DNA, 428 bp, Glycine max
  Clone ID: jC-gmfl02220053e01d1
gctgaaatgtaatttcctccttcacaacaaataatatcgttaggttacagtttagaaagcacccacatgcactcatttcaaacatatatcctacatctaactgctacaactcagtaaacaatattagataacaccaaagagaaacaaggaaagcctaaaaagtagatttcctaacactaataacacctaacacaaagcgaacaatttctcaagtcaaaaccaacctgacactcatccatcccactataagtgtcatgttaattgtcagcatcagtcaagcatgagcccaaaaggggtttgacactgtagaacaccaaatacttggcagggagcatgtttagcatgcaactccagcatctgcatggctggggttggactcattttcagggaaagaggctgaatcatcagaagctgagttcccagagctt

SEQ ID NO: 3032 - DNA, 550 bp, Glycine max
  Clone ID: jC-gmfl02220053e02a1
gggtccgtgtcgtaaacccttccttgcatttctctcggttgttctatttctgggtctctatgaggcagcagcagaacagactcagactcacaagagtacttacattgtacacgtggcgaaatcggagatgcccgagagcttcgagcaccacgctgcgtggtatgagtcgtcactgaagaccgtgtctgactcggcggagatgatttacacctacgacaacgccattcacggctacgcgacgagattaaccgctgaggaagcgcgtttgctccagcgccaaacggggattctggctgttttgccggagacgaggtacgagcttttcacgacgcgaacgcctttgcttctcggacttgacaagagcgccgacttgttccccgagtcgagttcgggaagtgacgtcatcgtcggagtcctcgacaccggcgtctggccggagagcaagagcttcgacgacaccggactcggacccgatccgagcacgtggaaaggcgcgtgcgagacgggaacgaatttcaccgcgtcgaactgcaacagaaagttgatcgga

SEQ ID NO: 3033 - DNA, 385 bp, Glycine max
  Clone ID: jC-gmfl02220053e02d1
ggtcggcgggggtggggggaagggggaaaacaagaaagacaaacagacaagcagaaacaccagaagccgaggggcacgacgcccgagcgccacacacggggggcaggacgaagaggcccacgggggggggggggggaaaaaaggacgggaggggcggggggggggggggggggggaacgcggggggagggggcacggggggggggggaccaagcgcgggggggcgcccgggagcgggaacgaccgggggcccgcaggggggggggaaaaagacacccgggggggcaagggggggggggccgcaacaggggcggccggcggggagggcaccccggggggcgcagggacggaggcccgggggcaaccggggggggggcaccccgggg

SEQ ID NO: 3034 - DNA, 582 bp, Glycine max
  Clone ID: jC-gmfl02220053e03a1
ctccaagaaccccgccgatgccgtcttcgacttcgccaacgacgactccttccccgcctccgccgacgacgacgcctccttccgcctcgtcgacggaaagcccccgccgcgccccaaattcggccccaagtggcgcttccagcagcagcgccagctccctcagcggcgcgacgaggaagtcgaggccaagaagcgcgagcaggagaaggaacgagcccgcagagaccgtctctaccacatgaaccgctcaaaccctaaccaacagcgccgcgaagccgccgtcttcaaatcctccgtggatatccaacccgagtggaacatgcacgaccagatccccttcagcaccttctccaagctctccttcaccgttcccgaacccgaagacctcctcctctgcggcgccctcgagtattacgaccgcacctacgatcggatcactcccaaaaacgaacgccgcctcgaacgcttcaagaatcggaacttcttcaaagtcaccaccaccgacgaccccgtcattcgcagactcgtcaacgaggaccaagccaccgttttcgccaccgacacgattctctccactctcat

SEQ ID NO: 3035 - DNA, 358 bp, Glycine max
  Clone ID: jC-gmfl02220053e03d1
atcaaatgacaaccccaccgtttcaacggtgttcacaatcacatcttctaaaaggagctacagggcaaagaatgcaagatagccatacaaaagtattcagaggaagacaaactgttagtcagcactagaaaaatacacattttattttatttacaaacaaacctcaaaagctgtacacaacaaatgaccttatcaatatttcatttggtgaccaaaattgctaaacttagcaaccaagaaaaagaagattctaaaactctactcatacccttttcttcaagttaatcacctagctggtacaacagggtcttctctgcaccagctaggtgattaacttgaagaaaactctactcatacc

SEQ ID NO: 3036 - DNA, 513 bp, Glycine max
  Clone ID: jC-gmfl02220053e04a1
ctttgtgggtcatactgattataaatacctgaggtaccaagtaattgatacgccagggattttggacaggccttttgaagatcgtaatattattgagatgtgcagtatcactgctctagcacatttgagagctgcaatcttgtttttcttggacgtctctggatcttgtggttacagtattgctcagcaggcagcgctgtttcacagcattaagtctttgtttatgaacaagccgttgattatagtctgcaacaagactgacttgcagccactggaggggatatcagaggaagacatgaagttggtcaatgagatgaaagctgaagccttgaagactctagttggtcaaggaggtgagcctacagacaataacagtgtattgttgaccatgagcactttgacagaagaaggggtaattgctgtaaaaaatgcagcatgtgagaggttattggatcagagggtggagataaagatgaagtcaaagaacattaacgactgcttgataggtttatg

SEQ ID NO: 3037 - DNA, 482 bp, Glycine max
  Clone ID: jC-gmfl02220053e04d1
gattgaaaattttattagccattttaagaaatgggcaaaaatgcaaaagggtcagcgttgtttcaaaaaaccatttttacttactattggaagtaaaaaaattcttaccgcttcagacgtacgaaaaccacggcatcaccgaaggctttacaaacgtgtcgaggtaatgcttctttgtatcggatgcgctcatcgatgtttccatggctagcatggcttggtggaattgggtgatggcatcggtcaggatggcctcgttggagaatggagccgttgtgtagccattcatcaaggactgggacagcgggatcgggcggtagaattgtactaccgtggaggacagcaacgggaacaggtcggacggaatgacgtattcgaacgggttgacgttcaccccttttttagtcggaagtggtgcgttataaagtgctccagtacggaacggtgccgcttgactgtgccacgacactcttccgttcatg

SEQ ID NO: 3038 - DNA, 496 bp, Glycine max
  Clone ID: jC-gmfl02220053e05a1
gtgtacaatcaccgggtttgactccttctctttgcaacctaatgctggtgctgctggagaatatgctggactgatggttattcgtgcatatcatttggcaagaggagaccaccatcgcaatgtctgcattatacccgtctcagcacatggtacaaatcctgccagtgctgctatgtgtgcaatgaaaattgtatctgttggaactgatgccaagggaaacatcaatattgaagagttgaggaaggctgctgaaacacataaggacaacctagctgctcttatggtaacatatccttcaacccatggtgtttatgaagaaggtattgatgagatatgcaaggttattcatgataacggaggtcaagtatatatggatggtgctaacatgaatgcacaggtgggacttacaagcccaagttggattggagcagatgtttgccatctgaatctccataagacattttgcattcctcatggaagaagtggccctggcatg

SEQ ID NO: 3039 - DNA, 475 bp, Glycine max
  Clone ID: jC-gmfl02220053e05d1
gaagaacaagcaaatattgctttattaagcattgctagaaagaaatatcttatggagatgtctttttgaacaccatatgaccagaatcatccacatcaaacaggcgtccaacaaattcattccaattttgtgctcgttttttgtgagacaaggaggaacctaggacacttgatcttccagaatcctccccaacatcaatttgattaaatgttccatataatgaaggtgaatatgcttgtggaatatccaaagcaactgccctcttaagggctgcatggtactcttcactgtgttctcgggctatagattcatgcctctccatcttctgctcttctgggatctccatatgctgctcatctttatctcgcattaaatcgagagcccgtcgggattctctctctatccaaatgatggcatggtcagaagttgcattgcatgaaagaactaaatgctcaaacctcccatcacaggtact

SEQ ID NO: 3040 - DNA, 524 bp, Glycine max
  Clone ID: jC-gmfl02220053e06a1
acgggttgctgatgccaaagactatgcattggagaaactttatgagaaacgcatgcaaaagaatgctctcaagaaagaaaaagaagaaactggtttgcaggttgatcgtgtagatgctcttccaatcaagacattggatggaaagatccattaccagacagctacgaagacagtattggaaaatgatccaagtgaagagagaactggagagaatgtcaaaaaagataaaggtatggtcaagctaactaaggctgaaaagagagccaagcttaagaaaatgagaaaagacgcacaacaacaagggaaagaggtggctaaagcagaagtggaagagacaccacaagcagcagtattggctgaggtaaaggaagatcttacagctgaggaggcatttgaaagtaagaagcataaacttgcagaattggggaatgccttgcttacagatccagagtccaatattaaaattttgaggagatggtgcagatatctaaagataatgatgatacccattgtaaacttggact

SEQ ID NO: 3041 - DNA, 408 bp, Glycine max
  Clone ID: jC-gmfl02220053e06d1
acggggaaaaagggaatgcccttataaaaaattggtgaagccccccatttcaaatttaaacatggaataaaaagggaagagactccttagtttaaaaatctaggccatggtcacgggctgcttcaaaagtgcttgaacacggccatggtatgggtatccacctcgatcaaaggcaacctttgggatccccttttccaaacaggattttgcaatgatctcacccctcctttttggtacttaaactggtgggcccgcggagttatttaactcattaacaaccgttttttggtttggttacaccgaaacaagcgtgcgccttggggtgtcatcaatcacctgcacagaaagatgctttgtttaccggaacacggacagccttggccttttgggcgtcccttcaaccttttt

SEQ ID NO: 3042 - DNA, 542 bp, Glycine max
  Clone ID: jC-gmfl02220053e07a1
ggaaccgcgccaaccctctcttcttctttttcttcaatccttttataacatttatagtttcattcttaatcgttgggaaaaatgttcatcgagaattttaaggtagagagtcctaatgtgaagtacaccgagactgagattcagtccgtgtacaactacgaaaccaccgaacttgttcacgagaacaggaatggcacctatcagtggattgtcaaacccaaatccgtcaactaccaatttaaaaccaacacccatgttccaaaattgggggtgatgcttgtgggttggggtggaaacaacggctctaccctcaccggtggtgttattgctaacagagagggcatttcatgggctacaaaggacaagattcaacaagccaattactttggctccctcacccaagcctcagctattcgagttggatccttccagggagaggaaatctatgccccattcaagagtctgcttccaatggttaatcctgacgacattgtgtttgggggatgggatatcagcaacatgaacctggctgatgccatggc

SEQ ID NO: 3043 - DNA, 516 bp, Glycine max
  Clone ID: jC-gmfl02220053e07d1
gagaatcacatatggtgtaatcatccttttatatttccggaaatgagttagtgaatagatacatgattatacaaaggctgtgtagcttaacccaatatgctagctacatcaccttctggcggtaaattagtgtaacaatgaaatggttcactcaattccatctcttggcatttctcacgcctttggacttctgttttgctgcctgaaaggcctgcatcttttgtttcttccgtgcctctttctcagccttggacatcttatatttggctttcactttaggagctttgctatcaagctcaacctcgcgttcaagttctgtttacctagcatcaaaattcttctctaaataataagtcgaatcacctgcataatcctgaatggcgccatctttaagtcctatcactctattaactatttgctttataaagtatcggtcatgagatactgtgataacagtgccctggtattcattaattgcttgctcgagcatttctttagaaggtgtatccaagtgat

SEQ ID NO: 3044 - DNA, 547 bp, Glycine max
  Clone ID: jC-gmfl02220053e08a1
cacaagccaagtgaaagtgattaaaattttaaatcaaagagcataatgtcagggatcattgagcaagattggggagacccttcatgtgggagggcacaagaaggaggaggagcataagggtgagcaccatgctggagaatacaaaggggagcaccatggtgaacacagtagtgagtacaaaggagagcatcatggtgaacacaaagctggagagtaccatggtgagcacaagccagagcacaaagaggggttcctagacaaagtcaaggacaagatccatggtgagggcggcgccgccgacggcgagaagaagaagaaggagaagaagaagaaggagcatggccatgagcatggccatgacagcagcagcagcagtgacagtgattaaactgctgcatcacctatatatttaaaaggtttatgggaccatagtagcgagggctgggccttaattactctctatctctctctctatgtgtatatctctctctctttttcctttggccctatcttgtgatctatttatgagtgagaaaaacataagtga

SEQ ID NO: 3045 - DNA, 421 bp, Glycine max
  Clone ID: jC-gmfl02220053e08d1
ggcgaggaatgtaacaagattttacaaaatagggttgcatggcgctctccctacagggatatgcgcatgcggtatccctaacaattgtacacactaactattgacatggacgggtagatgcccacaatagacatgtggcaaattacaattgagttcgtgatgtccttacatttctttgccatgcgtgacatccgttttcaaacagaaaggggaagaatggaaaaatattaccttacgaaatattaacaaataaaaataaaaattgggcagttctgcaggaaatgtctttcttgaatatacgggagcccattcaatgactactacatgcagatgcaataaaacagtctcttctaacagtgtactactcaactccggcatgcagaagatacttgtgaatcaaaatcttcttcccaccacgtgc

SEQ ID NO: 3046 - DNA, 579 bp, Glycine max
  Clone ID: jC-gmfl02220053e09a1
caggaaagaaaatcccagatgtgttgctgaattcaggacacaaaatgccagttataggcatgggaacttcagtggagaatcgtccatcaaatgagacccttgcttctatctatgttgaagccattgaggtgggttaccgtcattttgacactgctgcagtgtatggaacagaggaagccataggcctagccgtggccaaagccatagacaaaggccttataaagagtagagatgaagttttcatcacttcaaagccttggaacacagatgcacaccgtgaccttattgtcccagctcttaagaccacattaaagaagctggggacggagtatgtggatctttatctgattcattggccagtgaggctgagacatgatcttgaaaatcctactgtttttaccaaggaagatgtgctgccttttgatatagaagggacatggaaagctatggaagagtgttacaagttgggaatagcaaagtccattggcatatgcaattatggtatcaaaaaactcactaaactcttggaaatagccaccattcctcctgcagtcattaggtggaaatgaacccatcttg

SEQ ID NO: 3047 - DNA, 526 bp, Glycine max
  Clone ID: jC-gmfl02220053e09d1
gtatattctttttttttgatttctacttcataggatctcatgtctcaattaagaggagtcatggaaagaactggttcaaaatctcgatcaattcctttttcaaatcctgcggcagctgcgcgagctcttcccgcgtgccataaatggcctacaaataggaagaatcctagaacaaaatgagaagtagctaaccaacttctaggagaaacataattgactgcattaatctctgtagctacgccacccacggaatttaaggaacctaaaggagcatgagtcatatattccgcagaacggcgttcttgccaaggctgtatatcttttttcagtctactcaagtctaaaccattcggaccccttagaggttctaaccaaggagcacgcaaatcccaaaaacgcatagtttctcccccaaaaataacttctcctgtcggggaacgcattagatatttacctaaacctgtaggtccttgagcagatcctacattagccccaagacgttggtctctaactagaaaagtaaatg

SEQ ID NO: 3048 - DNA, 579 bp, Glycine max
  unsure (1)..(579): unsure at all n locations
  Clone ID: jC-gmfl02220053e10a1
gccggttcttcaatcttctattgagagagagagagagagagagagagatggcgttgaatcctcaactgtttccaaatggaatgcccgttcctttcgtgaacgagatgtttgtgttggccagagacggcgtcgaattccaggtcgataagattcctgcctctggcaatcatgggggtaatctcaaaacaaagggaatcgtgtatttgtcgaatattcggatggtcttcgttgctaaaagtccagttggacacttcactgcttttgatatgcctttgctttacatccatggtgaaaagtttaaccagccaatatttcactgcaacaatctctctggacatgttgaacctgtggtcccaaatgaccaacacagagctctttactcaacacactcatttaagatcttattcaaagagggaggctgtggaaccttcattccccttttcttcaatttgattacttcagtgaggcagaattatcaacacactaatttgcagacacaaaattatgtggatccttngcaggcatctcaaactccagctgatgagatgatgagacatgcgtttgttgatactaatgatc

SEQ ID NO: 3049 - DNA, 484 bp, Glycine max
  Clone ID: jC-gmfl02220053e10d1
aaaagaaaccactcactgtattaaccacatgaatataacgtacaaagagaaaacaaaaacgattaaatccttctattaagtatggaaaacaaaagaaagttgcatgtaatcccaaattaatagaaccttattttgcatgacacaaaaaacaaaggcaggggattgagctgagttaactagcaattcttgaattgagaaaaccatatatatatatatataatgtggtgttatcgctattctttagcaactcaatcattcccttccctttgatttgagttcactcccagtcttcgtcactcaattcatcattttcttctttgggaggtctaacaaccaataacacagttcctaaactctgagtgaaacccttttccttcaatcccgaacccctctcgaccttgaaaccctcaccatcagcattcacaagataaaacccatcatcggcacccacctcttttttactcctgtcagccaccaccaatat

SEQ ID NO: 3050 - DNA, 514 bp, Glycine max
  Clone ID: jC-gmfl02220053e11a1
gacctcacctatggcaaatccaattctctcctttctcttgttggccctcctctgcatcctcgccttggctcacgccgattcccatttcgaaggctttgaagccgaagacgatgacgacctcgaagactcttccatcgatcccgcctctctccgatcaccgcccctctccgaccctactcccctcaccaccgatcccaccccccaacctcctgcttcagatctccccaaatcccctcccgccaccaccttcgatttctgggacgacgaagaattcgaaggcgtccccgtcgaacaccccgcccccgagccttcctccgatcccaaatcccccgaaaactccaccaccactcaaacccctccaaccctcacccctccgcgctccttcaccgtagagatcgtctgcggaagctttcttattatgttcgcaatcaactacttcactgggaagcgcgagaacgagaacatcgcgctatcgtgggcggcgcagttcgcggcgaaggattcgatcttcgag

SEQ ID NO: 3051 - DNA, 457 bp, Glycine max
  Clone ID: jC-gmfl02220053e11d1
atccagcaggccactttataatagttttgacagtaagtacattcacttccgacataatagtagatgaaatgctagctcgtacattacaaagtttctctcgatatatctctataatagagatggttattgcatttgtaggacacttcacttggaataaacgggcattttttgcccctacgattaagttgtaaattaaagtttttaacccacccttctctctctctctctctctgtatatatatatatatatatgcagattcatcctctaatttgcttagcttcattccatttctcaatgtttctgagtctggcgtacatcttgcgaattcggtttagtttttgagactcttgagcaatcaaattagccgctgaagggctctcatctaagaccacctcgtaaccgtctcgataagaatccattccttgagccataagttgccaaaacaggccaccaaca

SEQ ID NO: 3052 - DNA, 550 bp, Glycine max
  Clone ID: jC-gmfl02220053e12a1
cacttactggaagccttgttgtgagtaagagaaaaggcttcctgcaccgagcacaccaacttgatacctctgattctttctttgcttagaattccacagaatatggagactgttcttttcaatcactccccacctttggaattcaagggtttgagcaaggaggaggaagactcattgctagggcaagtggaaatatggaggtacatgacatgcttcacggactccgtggccttgaaagctgtcatagagcttcgtatagcggacatactagaccgttatggtaaaccactatccttgtcgcaaattgtggagaacatagaagacgcaccctccccagatgcctctcttctctagagagtcctgagagtgatggtgcgcagaaagatcttcagtgcacaagaatcagagacaggagaaaccctcttcggcttgacacgagcctcgaagtggatccttcgcgacacgaaaatgaccctagcacccatgttgctgctggagaaccacccaattcacctgaaccctgcgcactacatcagtgagattattagag

SEQ ID NO: 3053 - DNA, 546 bp, Glycine max
  Clone ID: jC-gmfl02220053e12d1
aacatcaaatcaaaagaaatctttcaaatccatctacgtacctggctacatccaataccatatacaatatatataccccatccccaactttatgaatcctataattaatattaagctaacttaaatctctggaagtatagttctatatgctactattcaatgtttacagggagctagcatcccctcccatgccaggaattccagtataccagaatcacggtacaatatttcataattagtgactgcatgcatgtgtatatatatgtaaatgaaaataacataaaccctctccttttcttttcttggtgctgctagcgaagttaattagccaagtctagagaaacactcatcagaactctaagatttctctcataaattatccaatattgttttagctagctagctagccatcagttcttacttcctaggccacgaaatctggtaataactgatgagcaacaaacctctttctgttttgaatatcaatgctctcataagtggttcctgagtgagaagaaggtggagcagtgttgatagtacaaaact

SEQ ID NO: 3054 - DNA, 517 bp, Glycine max
  Clone ID: jC-gmfl02220053f01a1
accacatgcagtgtcgcctctcagctacaattagatgtctttctcatccaagtgcacatgtccgagctctgagtatatcagttcgtgacattttgcatactggttcaatcagatgtagtcctaaacctcggagattaaatggcacccacaacccttcttatcaatacttcaatttggatgccgttgactggcaagctgacatagaaaaatgcttgacttgggaagctcacagccgactttcaaacggattgtctattaactttcttgatatcgctgccaaagagttaggctgtactatttccatgtgaaatgaaatcatccatcttagtctgtgacaattttttgctagacttatagaaaaagaaaaagaaaacagaagttattgatatgcttatggaactaacgggtttgcaaataagcataattctgctagtcctgttaaaaagagctgcaatcataattctagtatgtttatagaaagctcattttgcatcatgcatgtactctagctaaacta

SEQ ID NO: 3055 - DNA, 458 bp, Glycine max
  Clone ID: jC-gmfl02220053f01d1
ttttttttttttttttttttttttttttttttttttttttttttttttttttttttttttttttttttttttctttttatttatgttttatttttctttaaaaaaacccaaaaacctagaaaggggacggggcaacccagggaacctttacaacaaaaaaaaaaagggggccccgtttcctaaaaaggggacacccccgagagggaaaagggggcccaaaaacttgaaaagaatcatttttggcccctaaagggggggaaaaaaacctgaaaaaaaaaaaatgccaaggcaccggggggcccccttggacaggccccccccaaaatgggggcccgaaaagttccccaatgggtgacaacactcccggatttgggaaccaccccattttcccccgggggggacaaaaggggtttaggaaacccacccaaagaggcagttttttatcccccaattttgag

SEQ ID NO: 3056 - DNA, 466 bp, Glycine max
  Clone ID: jC-gmfl02220053f02a1
ggcagtggcattgagaaaccagggagacatgtcggccatgttctactgcgccatgcacggttaccaagacacattgaacgtccacgcgaaccgtgaattctaccgcaactgcgaaatctccggcaccatagactttatctggggagcatatgcaaccttaattcagaactcaagagtcatagtaaggaagccagactcacaccaattcaacacagtgaccgcaaatggaaccaagcatatgaacatggccacaggaattgtgctccagaactgctagatcttgccggagcaggctctgttccctgcaaggtgccaaacgacatcgtacttggggaggccgtggaaggagtccgcgagaacagtggttatggaatcgaacattgtcgactgcatttagcccgaagggtggaccccttgggatgggaacctgtatctcgatacgtagtactatgctgagtatgcttac

SEQ ID NO: 3057 - DNA, 478 bp, Glycine max
  Clone ID: jC-gmfl02220053f02d1
gaacaaacattattatcaaccctaagctactatacacttgtgaaaaacgctaaaaaatgcatcgctcgaaagcacatacaactattatacaacaaaggaaaacccggctggtctagccaaagatgcgtacacacctcttatctttcaagcggtgtagcatgatcaggaattatttttgggatacaacctctctgaactcatcgtctctcagtgataatatcggagaggaccaataccgatgccttccagccccccgactttctagctttgtcttgatccccccaagtataactcggtgttgctgatgccgaatgggtatcccgttggatatcaaaatgcaatgctcaatcaatcggatcaatctttttcccacaagtgaaacttcggcttgttcgttcaacttccacctcacgatcaatccttacgtcgcgtctatttctttccgagaagaccgccgacaatggggatgttgctgaca

SEQ ID NO: 3058 - DNA, 554 bp, Glycine max
  Clone ID: jC-gmfl02220053f03a1
atatcatcagacagttgaccagcacgacacagacggcaattaacctggacgcgccgacggcgctatgaccgaacctaaagaccgctgctcctaccgttgcattgaccccgtcgacatcgatctgatgatcgtcgggaccgtcctatcggaaaccgccatggccgacgccgactgcgccggcgggaaaaccatactgcacctggagcccaactacttctacggcagccacttggcttgtgtctgcctccacgatctcactaggtacctcacttagccgcactccctgccctgcgccgcaaccgacgacgcatcctccgactctgacgacatcggtgtcgtcgacctcgtacaccaacccctctgcaccgacgcggggaccgcgacctacgatgaatgcgcggttgttagcgaaaattcgcgaaaattcaacatcgatttgggaggtcccagggcgctgctttgcgcggacaagacgatcgatctgctgatgaaatctggcgctgtgcagtatgtggagtgaaaggaattgacaagagcttcgctatgaagcgacg

SEQ ID NO: 3059 - DNA, 500 bp, Glycine max
  Clone ID: jC-gmfl02220053f03d1
aaagggaaagtcgtgtttataatcaagtacaaaatttcatcgctaatctactatttatgaacaacttttgacaataatccattgtatactagacacctagcaacagagcaagccccaaagatatactagttgacaagaatttgttttcggaacccactctcgtcccccacaaaaaacaaataatgtgcaggcaaggaacggaattgcatatgacacaatgatctaactatcagcggctctgaaaatagtgagcagagacaggaagaggttaatgatgtccagatacaaggagatcgaagcccaaatgtattcatcgtacgagtatctcttgatcaggttgtctgtgtcatagatgatgtagccgcaaaatataatggctgccaagcaaccatagatcatcacggacaatttacccagtggaaacagaacctgaatcagagcaaagaccataagaactagcactgcaccaaacaagaagggtccaaggaagttgaaatcat

SEQ ID NO: 3060 - DNA, 541 bp, Glycine max
  Clone ID: jC-gmfl02220053f04a1
ggaaataggaaaaaaaaaaattcctgtgaacggaaattagggctctcaagttgcaatttcggttgcagattggggtggtaccgttgcaattgcaataatttttgaagaggaaaaaaaagattcggaccacttccgaagtagttccttaaccccgattagtcatttgcatcctccaattttgatggaatatgtttaatctatgatttcgttctcttaatgctttgaagtttatctagggtttgctattgcaatttggtatcagaagattgattaacctttatctatggcccgagcacgcaatctaattgtcgctgtgggtttagttgctttcgctgcagcaggcatgacatttcccttctacatggcttcatcaaggaaacctgttattgacccaacaaagccacttccaccacaagcaacttttctagggccttacattaacacagggtcgcgtgatgttggtccccagaagaaatgaagcaagttcagttatttgatcaagctcatatatgtgctcattgtctgaggttaaatttttata

SEQ ID NO: 3061 - DNA, 547 bp, Glycine max
  unsure (1)..(547): unsure at all n locations
  Clone ID: jC-gmfl02220053f04d1
agtagctagttgataaattcacacttaaattccaagcaaaatatcaaggggtacaacacctaaaaatgctgaagtgaccctacctctgcaaattgctggttgatcaattcaatcatttgcactccaaggaacatatcaagggtacaagtacaacacacaagaatcctgaagtgaccccagttttgctacttgctacagttgatcaattccatcatttgcactccaagaaaaatatcaaagtgtacaaaacctaagaatcctgaactgaccctatctttgctaacttctagttgatcaattcaatcatttacattccaatcaaaatcaagatgtagcttgatggatactgctagaccttggatagaagctacagaacaaataattcaagtacaaaagcatatatatacgtaagatcacaggagccaaaattgtcagatatccttacctcttttatcttaaagggttgcacaattacaggaaattgattntttcttatttttggtttagctaccaggaaggagctcacaataacattacttaaccaaac

SEQ ID NO: 3062 - DNA, 436 bp, Glycine max
  Clone ID: jC-gmfl02220053f05a1
aaattctcgacgaagcaaccctgaccataaccacactctctcaagtcccaagaaagaaccctctcacctagctagctatcaaactaccgattcatagcactcttctcttcctcacttatgcgaaacgcaaacatggttctcgttctccttttccttatggcaatcttctccgccatgaccactccgtcaacctccgcgatcgacaccttcatcttcggcggctgctcccaggccaagttcacgccgggttccgcctacgaaaacaccgtcaactccctcctaacctcgctggtcaactctgcggccttcgccaactacaacaacttcaccgttccagcctcttccgacaccgtctacggcctcttccagtgccgtggcgacctccccaacgaccagtgctcgcgctgcgtctcgcgtgcggtcacccagctcggca

SEQ ID NO: 3063 - DNA, 419 bp, Glycine max
  Clone ID: jC-gmfl02220053f05d1
tttctttttttttttttttatttgtctcatttttctgctaacttttattaaaaataccaaaagaaggggtttactgtggactcttcaaaacagggttaccataaatgaaaataacccacatttgtggattttagcataacacaatcgattcaaaacgacatgtgagtcttccactcattttcttgcttcttcttaagccataagtttcctcatactacaagatcataatggttctcaccgctgtataatagccccacatcttttctgttatgacccttcataaagcgactaacatactctgctgtgggaatgaaaccatatgcaaaaccaccacttttatgctgatgctctggtatgtacacaatgattggctgcttacataactttgactgtaccaatagatattattctgctcccca

SEQ ID NO: 3064 - DNA, 547 bp, Glycine max
  Clone ID: jC-gmfl02220053f06a1
cttgatttctcgtcgaaggtggatcagcacggtgctccgccggagcagaggatcactccccggcaacagcaggtgaagaagagccgaagaggaccgcggtcgcgaagctcgcagtatcgcggcgttactttctatcgcagaaccggaagatgggaatcgcacatttgggactgtgggaaacaagtgtacttgggtggatttgacaccgcgcatgttgcggcaagggcttatgatcgagctgcgatcaagttccgtggcgttgatgcggatatcaattttaacgttagcgattacgatgaagatataaagcagatgagtaacttcacgaaggaggagtttgtgcacattttgcggcgacagagcactggtttttcgaggggaagctccaaatacaggggagttactctgcataagtgcgggcgatgggaagctcgtatggggcagtttcttggtaaaaagtatatatatcttgggctattcgacagtgaattagaggctgcaagagcgtatgataaggcagctataaaatgcattggaagggaagcag

SEQ ID NO: 3065 - DNA, 513 bp, Glycine max
  Clone ID: jC-gmfl02220053f06d1
gcaagaagccaagagcaatcccttttcaattaacactattacattattgttatataatgaagctgattatgatgcttgcagcatcaataaagcagtatataatatatacagattttttgcaaattagaggatccaaacaaacaagctaatcaaacaattttgaaagaatatatttttttcttgctttgtaagaatatagctcctctattccctgttcatggtaaccttatctagattacatctgttgaccttgacagtggcacaaaatctatgaggaagctggcattggaactcgaagtacttgttgcagaaagcgtgctgcaagacgttgagtgatcccacccataacacgctccccaagtctgcgtgcttcaggttgctgaagaacctgtagtataggtagtaaaagatctggatcataatcattagaggatcgcagaagttcccatatcctaattacttgatctctaagctctatcaagttttgcatttcagtttctgacgttataatgg

SEQ ID NO: 3066 - DNA, 502 bp, Glycine max
  Clone ID: jC-gmfl02220053f07a1
ctcttattttattcttcatccaatgactatacattcattatctttttgtgtaaatagatgaacaactctgtggaaacccggcgtgttaattgtctcttgatggatgagaagcttaaatacaagcgccaatctagtaaatccatgggtggtctcggtcctattgacaataccagtctcaggggagaccctaatattttacccgatattgaaaaaaaccttcacaggcatttgccttatctcaaaatggggggtttttttttatagcgagccgaaaactgtttctaggactgatcctgctcattccatgtgtgaaactcagtttagatttaacaagaacattgctattatcattgacatgaccattgagagtttcaattcaggtgatatcgtcaactacaccgatatttatttttatagtatcgtacctttgaagggcagacattgccgtgaaagcgataactctagtactagtataataacttgtacgaatgatacctatgat

SEQ ID NO: 3067 - DNA, 477 bp, Glycine max
  Clone ID: jC-gmfl02220053f07d1
gggggaaatgtagggactaatgatagtataacacgttaaatccaaataatgctaccggttggtagcaatttatgtcctgtataagtactaactactaactaactagcactttcactttccttacctaggtaataattttctatacaaccatcttcagtggttggaaacatgcacattatggaactgtgaaaattgaaatgtgtatgatatgatatgatacgtcacctctccaatgaaactattaggccaaaagctcatgtcaatggtctctctatgtatcaacaaccaccaccatcagctggctcaattgaacttagaaggccgtttcctcttaactgcatgcagtggtcttcagcatccacttgagcacatactatcaccactgctagtccattataatgtgcctcctgcatgatgttaaccgcactatcaattgtcattccaggtatcaccttcatcaacacttgcacaacatat

SEQ ID NO: 3068 - DNA, 289 bp, Glycine max
  Clone ID: jC-gmfl02220053f08a1
gactttcgattcattttctattcaagctattggatatgactctgactgtgaggaatctcataccttatgtgcatgggacattaccgtatgagaacctaaaaccgaacccgggtctgaggaacctgttgctgatcgctacctataggagactcatcttgacgaacacagacaaagtccacgcggataacgcgctgagcacgcttggattagaagactgctggggaggactcatatgcttagagaccctggatcctatacacaagagcactgattatgacgatgaagatga

SEQ ID NO: 3069 - DNA, 288 bp, Glycine max
  Clone ID: jC-gmfl02220053f09a1
atggcaacagcaacaggggcctcaacacggacacggccttttgttgcttcgaaggtctctttttcggtggtggttgttttcattctctctcttttggtcgcttagctttctgggttcctctctcccaatgacgtctcaacaacatccttatcttccttccctttcacacagacacaaaaagatcaatagcattgttatctagtgacaaaaaagagtaccattgtgattgttaaattatactatagtacatgtaaattgtaaagtggtagtagtacaagcgtttcaatc

SEQ ID NO: 3070 - DNA, 533 bp, Glycine max
  Clone ID: jC-gmfl02220053f09d1
ggggctcccttgtatccaggtgccacagaaatgctaatttctgcaactaaatcaatcacatgttctacctaggagcagcaatagaaactttacctgcaatggaccaggacggactattgtgtatccaaggccagatcttcttaaggaatcttcaccagccctcttggctttaagaacctgctcccgcctggaaggctcaattcctagtccagaacatgaaactaatacaaaatcggtttcttgcccagtaggcaaggctttaatatattccaatataagcttaaagcttcttaaatcctgtttcattggtgcatttccttcaacaggcctctgtcttctaggctcaaagcgtatggtcaaagtatgcacaagaaaaggatctaacactggatcatctggtttcactgggcggaatgatgaaaatggtactctaaccctacaaaatcccacttttgtactaattcttgcaaaatacaatctactctgacttggatctgccgaaggaccagcttctagaattaatacataagatc

SEQ ID NO: 3071 - DNA, 548 bp, Glycine max
  Clone ID: jC-gmfl02220053f10a1
ctcgagccgaatcggctcgagccctccttcagccacacgtgtgggacactcttggatgttgagctagtcctcaggttggttaagaggtttatgagtttggaccgtgatggtgctgctttggttaaggtggccaagttggttgattgctacctcgctgaggctgctgtggatgccaatttgaccttgtctgagttcattgcacttgctggagctcttccaagtcattcaagagccacggatgatggcttgtaccgagccattgacacgtatctaaaagcacatccagatgtgtcaaagcaagaaaggaagggcctgtgtaggctgcttgatagccggaaactcacaacggaggcctcacttcatgcagctcagaatgaacggttgcctgtgagagctgtgattcaggtgctcttctccgaacaaaccaaactcaaccgccacatagattggagtggctcctttagtagcttgaggaagcccaatggaggccttgacccaccaggacgatgcctttcatagcgtgaaacaaatgctcagcaaatggagat

SEQ ID NO: 3072 - DNA, 396 bp, Glycine max
  Clone ID: jC-gmfl02220053f10d1
gggaaaagacaaacccccggggcccccccaaaaaattggagggctagggggttttaagttcccccgggggggggggggggaaaggggaaaaaagatttggggggggggaatttttttccctaacaaaaaccaaaaattgggcccccaacttgggccttaaaaaacaaaggggccccggggggggggttttttaaaggcctggggaggggaaatggggcacaaaaaattttaaccattccaggggggggggttaaccgagacaaaaacccttggggcccgggggggccaaaagggggtttttggccaccaatatactccctctaaaacccttgggggggggaaaaaccctccccttttggtgccccccccataaatattttttggggggcacaaggg

SEQ ID NO: 3073 - DNA, 513 bp, Glycine max
  unsure (1)..(513): unsure at all n locations
  Clone ID: jC-gmfl02220053f11a1
acttgccttatttttggttttgagattgagctaaaggccaactcaaccatcgaatttgttggtgattgaaagagaaggaagaagaagcaggaaatggaagcagtgagagctggtcgagaaggagcaataggtctaggtcaaggtgatggcgtagccaaggacagcactgagactgaactcaccaaaatccgtctcctcagggcaattgttgaaacccgtgatccctcttccaagatctattgtagccaggaagaggatgattttatgattagaagattcctgcgtgctcgtgatttagatgtagagaaggcttcggcaatgctcctcaagtacttgaaatggagaaattcatttgttccaaatggctctgtatctgtgtcagatgttcctaacgaacttgcacaagataaggtgttcatgcaaggacacgacangataggtcgacctatacttatggtcttcggtggaagacattttcagaacaaggatggtcttgatgaattcaagcgattt

SEQ ID NO: 3074 - DNA, 494 bp, Glycine max
  unsure (1)..(494): unsure at all n locations
  Clone ID: jC-gmfl02220053f11d1
gataaaaantcctttgatattcatttcattcattcagaccaatttaaatccatacaacaaaatccaatttacagagtcacaaatcacaatgactagaagcaatgagaaagaaagcttttctccatcccatttcttcctattttcattgtcacagtttggctaaccaattcttgaagctaataataacatcattgccactagaagaaaaaaaaaacgctgataagaaatagaaaaatcaactaaaaaaacaaaagtaaggaggtgtggaactagtagaggaccaaactgctgctaaaggtggcaattctcccaaaaacctcaatttcttgtagtgccagccaattcacatatcaaatcttctgcataacttcagtaattgaagaggctagcatagcacaacatgatcgatcatccatggcatatcgacaaataataataataataataataattagttgttccacaccagggaaaaaaggaccaggtggaaaccc

SEQ ID NO: 3075 - DNA, 551 bp, Glycine max
  Clone ID: jC-gmfl02220053f12a1
gcttctttccttattatgctttcaatgttttgggtggccttgacaatgaaggaaagggatgtgtcttcacatatgatgctgttggttcctatgagagggttggatatagctctcagggttctggatccacacttattatgccatttcttgataaccagctgaagtctcctagcccactcctgttacctgcgcaggatgctgttactccattgtctgaagcagaagcagttgatctggtcaaaactgtttttgcatctgcaactgagagagatatatacactggagataaggttgaaatcgtcgtcctaaatgccagtggtattcgtcgtgaatacatggacctaaggaaagattaatgctttacagaaatttactgttggagataccagacttggattgagaatgtttgaaatgcttctagaattttaaatgacatagtgggtttttcacatgaggtgaaaattaaaatagcgtttccagtgaaattgctttgaacaagtactagtctgctcacattataactagactgtgctttcacttaaatttgcatt

SEQ ID NO: 3076 - DNA, 515 bp, Glycine max
  Clone ID: jC-gmfl02220053f12d1
acataaatgaatcattatattcataaatgctgcatcaagtcacataaattttctcggaatccaaacactttttactattgcttggttgggagaaggaagaggagtggggtatactttaacacaattttccaactctatggtttttttagctttccataatctctatgtaacattaaaatataataacaatgtgtatacaatatccatagaaaataaaaagtaaaaagtagagttaactaattaacaccaagcagatgcgacggtgagagttcttcccatccagccaaagcaaatcccaccgttctctacttttaccgcgactcggttcccagcgccaccgagtcgcgctttgatcgactcagcgactcgctgactcagcggcttcaacctgaacccagccatgctcatacgcgctcgccactttccaaacacctcgcaccgttccacgcggttccttccttcgcacgccaccgagttccccaccttccgactcagtcccttctcgatcctaactc

SEQ ID NO: 3077 - DNA, 518 bp, Glycine max
  Clone ID: jC-gmfl02220053g01a1
ccaattcccgaaaccctaaccctacctcctcgcccccatgcccatggctaagaaacgaaagcttcgatcctccaacccagaacccaccaaacccgtcgagccacagcaacagaaccatgagactgttgaactcgaccaacagcaacccatccccgaaccaaccctagaagactccaacaccatggccatcgacgaaccaaaacatgaacaagaagaagaaccgcaaaacgccgaaagcgaacaagaggtagaggaagaggaagaggaagaagatgaacaacaagaggagcaggaaccagaaactcgagaagggcaaccgggaccagaaaccctagaagctgcaaaccaagccgaagcgaacggtagcaatgaaggaaacaacgaagaagaggaagaggaggatctcacactagaagaagagcccgtggagaagcttctggaaccgttcacgaaggagcagctccactctctcgtcacgcaggccgtggatatgttccccgaattcgtcgatagcgtgc

SEQ ID NO: 3078 - DNA, 315 bp, Glycine max
  Clone ID: jC-gmfl02220053g01d1
ctaaaccaaagaaaaaggcgacagggcaaaaagcgccgtaggaaaaagacacgccccagggggaccggaaacggggccccgaaaagaaacggggggggggggaaaaagaccaagggggggggcgggggggccaaaaaaggggggcaaaaggggccgaaacgggggccccggggcggggcccctgacgtgacgaaaacaccgacgggggggcaaaaaccccaaatggggggggcgggggggcaaaccctgggggtcggggcgaaaaaagggggaccggggcgggtacaggaagagggcccgggctttcgggggggg

SEQ ID NO: 3079 - DNA, 644 bp, Glycine max
  Clone ID: jC-gmfl02220053g02a1
gttttctattataagacagggtgttaacggctagaagccaaggaatcagtaacataaaatggaggttcaatttgccctcccatttcactaacgcacacatcacatcataccagagactccatctccctctcgcacgcgacgagggagtcccgcttcggaatctcaccccctctttctgctaattcgcaagatggttgctcagaaattcgttgtcgacttgaacaagccccttgtattccaggttgggtatcttggggaagcctacgatgattgggttcacgatcctatcgtaagcaaagaaggtcctcggtttttccaaagcggtttcctcgagttgttcacacgcactgcatggtgggtgattccaaccgtttgggtgccggttgcgagttggttcatttccaactctgtcaaatcaggcctcccttctcttgatgtagctctgctcgtctatctcggcattcttgcttggactttggctgaatacaccttgcaccgtttcctcttccatgttaaaacccagagctactggggaaatacctggcattatcttcttcatggcttgcaccacaagcaccccatggatagctatagacttgttttccccctgagcagcagctatatagcccctccgatttctcttc

SEQ ID NO: 3080 - DNA, 515 bp, Glycine max
  Clone ID: jC-gmfl02220053g02d1
aaacaacagaaaactctagagttcattcaaacccaacataaaagataaaactatccaatataaacaccatgtccatgtaaattgaacccaaaggagtaagtaacataaaaaatatgaatcaatggcctcagacattgtagacgcggatcaattcacagaacaaaagaagaaccatttctcgagcaataattaaacaaaaaccaatgctcaagaggcagtaatatttacactcccgcgtccaccataacaacaaattcaacctgaaaaatcgcatacaccattcaccaatctttctttaaccaatcaagaattcttcgagtcacgaattttctttgccacggcagccaaattgtcacgcaaagccaaagccttggaagacacagcctcaccatccaacatagcattacaaggctcgccataacaaccttgattacaatcctcaaactccgaagccagagcggaaaaatcctccctcatcagcaaactattgtgaagaatggagcacgcgccaatgt

SEQ ID NO: 3081 - DNA, 555 bp, Glycine max
  Clone ID: jC-gmfl02220053g03a1
acagaatttacaagaccggtttttgctccttatcttaagcttgtgccaaaaattttatctatcccaccttcccacaacattgccacctacctaccatttcctgtagtttttttcaaatcttggggtggttgaaagttttaaacttttcttgatttgattgcaagtttggtcttgaatgaatacttctaagaaaagggtactgcctcgtgtcattggatgtgtgaatttctgaactcatttcacagaggtcatgcattattctgctgcctctctttgcatccaatacctgctgtcggtttagacttggaattcctgattcaggattgttctaagtgtgagctggataccccttcaatcctctggtattggcatgtaccaaatttgagaagcctgtaaaggtttgctggggaagtagaggatctacactaatttgaatggggcattctgcagctgtgtgggactatagagcagcaactgaaattacaaaggactggaatgggattcatcaaattgtgcttccgactccaaggggtgcttcagcacaggtatgcttac

SEQ ID NO: 3082 - DNA, 407 bp, Glycine max
  Clone ID: jC-gmfl02220053g03d1
aaaaaaggacccaaacaagaaaaataccccccccaaaggggaagggcccaggaaaaaaaggggaaaaaagggggccccaaaagggataagggggggcccccaaaagggggaaaaaaaaaaggggaacccaaacccggggggaaagcaaaaaggggaaaacccgggggggcgggaaaaaggggggcccaaaaaacacaaaaagggtaaaaaacgaaacagaaaaaaggggacccccacaaaaaacccaaaaagggcccaaaggggggcaaaaaaacccccaaaaaagggggggaaatggcttgaacgggggggggccccctttggggggccaaccccctcccgggaaaaaaaggggaaacccccaaagggggggggggcccaaaggaatgggggaaaaaaacggggcc

SEQ ID NO: 3083 - DNA, 534 bp, Glycine max
  Clone ID: jC-gmfl02220053g04a1
caaaacaacagaaccaaactcagaaccaaactcagaaccaaactcgccaaaactagggttttgcattgatggcactgtgcaaccgcgtcagatcgggaatctctctcttcaccaaatccacgttccttacttcccagcgatccagtctccaacgatccctcgttgcccctttcatttccctcgcctccagaaattacgccaacgtgccggggcaaaaggaaaccaaagttaaggtccctctggctttgtttggaggttcaggaaactatgcctctgctttgtatattgcatctgtgaaagccaatgcagtggaaaaggttgagactgagcttctgcaatttgttgaggcagtaaagaatagtcccatattttcacagtttataagggacttgtctgtggctaaggatgttagagtgaaagttatccaggatatttgtggggaagccaagttttcggatgttacaaagaactttcttgttattggtgctgagaatggaaggcttaaaaacatagacaccattgcaaagagatttg

SEQ ID NO: 3084 - DNA, 530 bp, Glycine max
  Clone ID: jC-gmfl02220053g04d1
ggataaataacattttattacaaagtcctccatagcatacaataacaaagttacatggaaattcattaactaccactaacaataccgttatagccgggtcaaaatgctgaatttaaacaaaactaaagagatgaagcacatgtacatttatttttatttttatgaaacttagattgaaacaatacaacttaactatatgttgatgctttgccaagtgattctgcaatcttactggcaatacagtaagatgtagactgaatggttaccatggggttgacaccaactgcactaggcaaaacactcccatcacacacatacaagccttctgcttcccaagtctcaccattctcatcgagtgcaccttcttcttcagaggcacccattctacaacttgacatctgatgtgcagtggtaaacactgtccacacttcattccttgaccttggacccccaactattgtcacagtgtcaagaaactcctccaaatcttcctccttcatccccttacacttgattctttggccatcact

SEQ ID NO: 3085 - DNA, 550 bp, Glycine max
  unsure (1)..(550): unsure at all n locations
  Clone ID: jC-gmfl02220053g05a1
caatttataagaatggcactttctcctattcgttcttcttctttctcttcatcagctattgttgcattggctgtgttactgcttcttacagggacctcttcagctaacctctcaaagaacttctattccaagacatgtcccaacgttttcaacactgtaaaatctgtagttaaatctgctgttgtcagagaacctcgcattggggcatctattgttcgtctcttcttccatgactgctttgttcaaggctgtgatgggtcaatactacttgatgacactccaaccttccagggggagaaaactgcagctgctaacaacaattcagtgagaggctttgaagtaattgatgctatcaagtctgaggtcgagaaaatatgccctggtgtggtctcatgtgctgatatcttggacattgcttctcgtgactctgttgttcttcttggagggccattttggaaagttagacttggaagaagggattccagaactgcccactntactgctgctaacactggtgttattccaccctccacatctaacctcaccaacc

SEQ ID NO: 3086 - DNA, 354 bp, Glycine max
  Clone ID: jC-gmfl02220053g05d1
tgccgtcctttttttttttttttttttttttttttttttttttttttaaaaacacaaccctgggggggggataaatcttctcaaaggggatagggaactgcccgggctcaagggtgtgtgtgttgccaacaaaaattttttactaggacactgaatgccaaactacctcctcggaatatttatcttacagtttaaggggggggttcaatacaactaccttccaagattgatatccggttttctccaggtttcggaccacttgttgggcccccttggtgactaaaggccccacaactggtgttgcagtgggccccctgccaaggggggtttccctttattgaacccggccttttc

SEQ ID NO: 3087 - DNA, 549 bp, Glycine max
  unsure (1)..(549): unsure at all n locations
  Clone ID: jC-gmfl02220053g06a1
ctagcatagagctagtaataatattaatattgttaagctagctctaagccatggctaatgaacgtgatctgttctcggcggagattgtgaaccgtggaattgaatcgtcaggaccaaacgctgggtcgttgacgttttcggtgagggtgagaaggcgcttaccggattttcttcaatcggtgaaccttaagtacgtgaaattgggttaccattatctgataaaccatggcatatacttgttcaccataccggttcttctcgtggtgtttagtgctgaggttggaagcctcagcaaagaggacctatggaagaagctttgggaagacgcgcgttacgaccttgctacggttcttgcttcctttggggtcttcgttttcaccttgtctgtctacttcatgtcgaggccacgtcccatttacctcattgattntgcatgttataaacccgatgatgaactcaaggtgtcaagggagcagttgatggaggtagcaagaaaatcatgcaagttcgacgaagcgagtctggagtttcagaagaggatgctgatgt

SEQ ID NO: 3088 - DNA, 552 bp, Glycine max
  Clone ID: jC-gmfl02220053g07a1
ttaaattcaattaaggttctctctcttgtaaaatgctccaagggaagggagttttataacatgacctagtaacgattcaccacatcatgcgtgccactcctctttaactctctcatcctttttctctttccgtgtcaccctctttcaggttaatttgcaatgactgaaccttccaaggtcattcacgttcgaaatgtggggcacgaaatatctgaaaatgatttacttcagctgtttcagccttttggagtcataacaaagcttgtcatgctgcgtgcaaaaaatcaggctcttatccaaatgcaagatgttccttctgcagttaatgccttacaattttatgcaaatgttcagccaagcataagggggaggaatgtttatgttcaattttcctcacatcaggaattaacaacaatggagcaaagtcaaggacgaggagatgagccaaaccgaattctcttagtcacagttcatcacatgctgtatcctatgacagtggatgtgctgtatcaagtattttctcctcatggatctgtggaaaagattgaacat

SEQ ID NO: 3089 - DNA, 409 bp, Glycine max
  Clone ID: jC-gmfl02220053g07d1
aaaaaaaaagggggtcccccaaattggggggggggaaaaaaacccccagggaggcttttttcttggcccaccccccccgggtttttaaaaccccaaaaaatggcgggggggacccccttgggggcccccggaatactttttttcccttaaacccttaaaaaaggggggaacggggggaaaaaggcccccccggggaaaaaaagaaattttccccccctccaaaaaagggggccgggggaaaaaaaaaccccccggcaaaaaacccccgggcaaaaatttttttttttaaaaaaaggggggggcctttttaccccccccccccccccaaaatgggggaggggaggggcccctcccccaaggggggtcccaatccttttgggggtttccaaaacccggggggggggggggg

SEQ ID NO: 3090 - DNA, 541 bp, Glycine max
  Clone ID: jC-gmfl02220053g08a1
gttcgcactgggaactgggaagaatagaaagaaaaagaaaccttccgattccttcatcgccgccattattcggtggccactgcatgcacctttcccttttctcatccaacaccttctcagatctactccttttcctcttcccaaaatcattctccgattgcgcctagggttcacacttcgaatcgccgttttctgtcatgaattgggctccgttagcacacctcgccgactctcgctgacggaggagattcgaaattcggccgccaaatggtttcaatcttgttgtacatcgtcgctttcatttgcacgtgcggagccattgcgttgtccttgcttcacatttataagcacctcctcaattacaccgagcctacttatcagcgcttcatcgttcggatcgtttttatggtcccggtttatgcgttgatgtcattcttatcactttttctaccacagggttcaatctattttaattcaatccgggaaatctatgaagcttgggttatttaataattcctatcactatgtctcgaatgggttg

SEQ ID NO: 3091 - DNA, 507 bp, Glycine max
  Clone ID: jC-gmfl02220053g08d1
cattcgaattcattttatttatatattaatattatattcaaatgaaataaaaagatattaaaagatactaattataagaatttgaaagtgaaattataaagttattaaatgattaatcaatttttttctacctgttcctgtagtaaaaagagttccatctgttcttgaatagcttccttcaaaaggacttctgcttccccagtgaatgtcttggtagaagatatgatttctttgaattgaggtttattcgtgtttaagtaagcacgtaactcaacaagaaatttccttacctgtccaatttctaatgaatcaagataaccattcgttccagtataaatagttattatctgttcttccacggtaagaggagctgattgggattgtttaagcaactcgcgcaatcgttgacctcttgctaattgattttgagtagctttatcgagatcagaagcgaattgggcaaaagcttctaattctgcgaattgtgctaattccaattttaattta

SEQ ID NO: 3092 - DNA, 518 bp, Glycine max
  Clone ID: jC-gmfl02220053g09a1
atgtcagacgcgttctgcagcgactgcaagaggcagacggaggtggtgtttgaccactctgccggcgacacggtgtgctcggagtgcggcctcgtactggagtcccactctatcgacgagacctctgagtggcgtaccttcgccaacgagtccggtgacaacgatcccaatcgtgtcggcgggccctccaaccccctcctcaccgacggcggcctctccaccgtcatcgccaagcccaacggcggcggaggtggcggcgagttcctctcctcctccctcggtcgctggcagaaccgcggctccaaccctgatcgcgccctcatcatcgccttcaagaccatcgccaccatgtccgacaggttgggactcgttgcgaccatcaaggatcgggcaaatgagatatataagagggttgaagatcaaaagtctagtagaggaagaaatcaagatgctttattggctgcttgtctctacatcgctggccgacaagaagacaaacctcgtactggaaaggaaat

SEQ ID NO: 3093 - DNA, 453 bp, Glycine max
  Clone ID: jC-gmfl02220053g09d1
aacctcaattacatcgaattgaaagtttacatgtatattgtaaaccgacatacacttcaaatcaatacaatatatgatgaattacatccacacaaatctttatttaatagacttgattttcagccatcaagtcatgctagcttcttcataatattttggttgatagcccagcccaacactaggatctccaatattgaaacacctaataccctaccttcggacccccaatatattgaaagactcaaacaacatcattgtgaagaacctccttcactaatcgatggaaatcattatatgatgatcctcccatatcagtggcttctattgctttctttttccactccagacacttttgtctcattcccttccccctttctccggttatcatttctttcacaagtgttgtcacctcctccctttttacatcatctttaatatccattcctatccccc

SEQ ID NO: 3094 - DNA, 530 bp, Glycine max
  unsure (1)..(530): unsure at all n locations
  Clone ID: jC-gmfl02220053g10a1
gcattccaggaactgttatagagggctggttcaggttctgtccaaggccgagaatgcccgaaactcctcgcagtgtgactctatgctcattggtgacaatgcagctgcaaatacctatccttacattcaggtgaaaaatccaacagcaagaatcgaacatgaagctagtacgtccaaaattggtgaagatcaattgttttattttcagcaaaggggaatagactatgaaaaagcaatggctgctatgatctctggattttgccgtgatgtctttaatgagcttcctgatgaatttggttctgaggtgaaccaactcatgagcttgaagcttgagggatcagtaggttaaacttaaacagcttgttaagcatatcattatatggaatttgctcaggccatttgttcctgaaattgtcaaagtccttataggtagtgtattcggaaggatgtgtatatgtttggatatagatgctgtcttcaactgcaccctgcanaagtggcctgaaacatagccagttttgaaccttaat

SEQ ID NO: 3095 - DNA, 490 bp, Glycine max
  Clone ID: jC-gmfl02220053g10d1
atgggaaattcttggtattaatgacgaaattattctcaaccatagacatggcacatggaggctcaaaaagaccacttaaaaattcctaactaaacatcaccttgcaaatataaatttttagatcaaatgactattgaacacaatttttagtggtccaaatctagagactatatgactgtttttcatggtttccagaggatggtagtctctgcgatcatggaggtgactacatatggatccatattagaagcaggccttctgtcctcaaagtaacctttgccatttttctctgtgtctcttccaactctaatggagcttccacggtttgccacaccccaagaaaaggtgttgatgtctgcagtttcatgtcttccagtgagacgtctctcgttgccttctccatatgctgcaatgtgctccttgtgcctcaatccaagcttttcaatggccttcttaatcacctcataaccaccctcatctctcatggact

SEQ ID NO: 3096 - DNA, 433 bp, Glycine max
  Clone ID: jC-gmfl02220053g11a1
ctttctttctctcacaaatcacaatgtgctccgataactacaatctctcaattccccattaattaaaatcaaaatcaaaatctaatctgggtttctcccatcagaggacaaagcttccgactttgcgggattcgttcgtatttgtttcagtgctgagatggggaaggtcgcggtgggagctgccgttgtctgcgccgccgccgtatgcgctgcggcggcgctggtggtgcgccaccgcatgattagttcccggaagtggagtcgcgccatggcgatactgaaggagtttgaggagaagcgtggcaccccaattgtgaagctaagacaagtggctgatgccatggatgatgagatgcacgcgggtctcgcatctgaaggtggtagccagctcaatatgttgatcagttttgtcgatatctcccactggtgatga

SEQ ID NO: 3097 - DNA, 412 bp, Glycine max
  Clone ID: jC-gmfl02220053g11d1
agggattccgaaattcgggcccctcaacttggtatgaaatcacattggtagcccctactcggggcctagctcggctaaaagctagatttgccccacattggttggctcttgccctccgccttattcaaattagcttctggtatttcaagaggttggtgggcttcttgggggtcaatggcactacccttttccggattatttactaaaacaggggtctcattattggttattttagcaaaaccgcccattagagcccttgttaaccattgggctttaagaagacgttttttcaaaatacctatatctacgggtgggggaataggcgcctgatttgggaataccccaatttggccgctattagtagataaaaagatttccttcacttccgaatcccaaacaattggattggggg

SEQ ID NO: 3098 - DNA, 473 bp, Glycine max
  Clone ID: jC-gmfl02220053g12a1
cgtagattggtttctgagcttcgtttaaaagaatacaataaagaaagctggcagtcttggtatgacaggaatggttctggacagttattgcggcaagctagcacagctgcatgcatgctgaatgagatgatatttggtctatcagatcaagcaactaatgattttgctaggatatttcataggtctactctaagcagaggagttcaggttcagtcttacaaacatgatagtgcatttcatgaattttcctggaagaagtccaaggataaaggtgtaaggagttgtttagttgagtgcattggtgggatcttacacgagtatttatctactgaggtatggaatgttccaattgatggcagaattgctgacttgcagcttaatgctgcagttgaagaagatattagcctatactttttccaagatgctgcaatgctacgtgaggttattattgatggagtaagattctttaatct

SEQ ID NO: 3099 - DNA, 524 bp, Glycine max
  Clone ID: jC-gmfl02220053g12d1
gattggtaaccacagattatattgtaggccacaaagaagaaccagaatgacatacttgtgttgccaaattttggtatcaatgtcgtcatatgctgtactccaacatcacacggatccttattctcaatctaaggtgtacatgtacatctcaattctcaaaaactctatttacaaactgtggaaaatagaattattccttgtagaaaatttctgttatgtattgcaatgttcacataattatcctacagtaaaatactgatcttccttcgctgtcaaatggattcaaatccatatagccagttctatttataatccttctctcaagtggattatgcagtgcaacgggttcctttgactatttttagctcattatgtatgtcttacacggcgccttgttgtcgtaaaggctgagcttcagcatgaactacattattttgctggtccagtggcatgtattgtgacatgatagccatgatctcagagtccatgtaagaccggagcctatatttgtagaatcacgtacc

SEQ ID NO: 3100 - DNA, 564 bp, Glycine max
  Clone ID: jC-gmfl02220053h01a1
caacccttgaacctccatggctgatgccaccaagtatgttcccatcggtggtggcaatgtggccacggacctcaagagcctctctttcattctcaaaaccaaaaaaacagtggctgctgcatacgctttcatactcgccttcgtcgctttcactgttttcttagccttttctccttccccaaacgcttcctccccctggttcaccaacatattctcccccgcatccaccaccgatggttcctacaagcctcaaattcccaacattttctctctccttttcccaaactcctctgatcccctgcacaataacactaactcttctagatctccttatccaaacacaaccactgaatctcaaacactcaaagaaacctctttggaaaacagaacacaaacaaccttagtgaattcaacccaagatgcagttcctgttccaaccacataccagaccacggattctcacgcgccaagtttggaggtgaaagttccaccaccccttgctagtaaggaaccaccaggtgtttgtaaaaaccagactttaactctggtgaacttacctatgag

SEQ ID NO: 3101 - DNA, 366 bp, Glycine max
  Clone ID: jC-gmfl02220053h01d1
aatcaaataataataataataatgaaagtgccgctaatctgtgacttaatttacaagaccagagaaaatatacagaacaaacatcaacaataaggtaacatctggcatcatgttatttacagcaatataggatatggccagattaatagatcttatggcatggttgatccattgtagactccaattgcttcatgaaggcacctaatcaaatgctttcaaagaccatcatagtaaccaccaacgcttatgtgagctctgctcataggaacacctcttgctgcagaaattgcatcattcaatttggtcgcatgctgcaccacttgcttaatcctcttgtcatcagtatagatctggaaccgaattttc

SEQ ID NO: 3102 - DNA, 406 bp, Glycine max
  Clone ID: jC-gmfl02220053h02a1
ggcatctcctatattattggcaaagtgctctgactctctatgcagcttggatttatatgtactcggtgtctatatacatctgtttttatgtacttggtctatatatacatttggtgatgattgcccattcaatctgtgtgtgttctctttgcctcatagactgatactttctgctattccccactatgtgcttcatacagtgaatgcacacagtttgaggtatagtgcaccgattgccttacttgacacagaacccttagcctacattatcggctttttctgcctttccaagccttctatgaccatacctctagcgccgtataaatcggcccactaagtgactcatggcctatactatgcagtctgcgaagcgttctacctgtccatgacgcatgcaaacttactg

SEQ ID NO: 3103 - DNA, 338 bp, Glycine max
  Clone ID: jC-gmfl02220053h02d1
aaattaggtgcttgttataaacaacggaccgaaaaaaccccaagaaaaaaaaaaaccggcggacgaaccaacctgcaacaacacacagacctgcctgccaaatgaaaaccccgcgtgagaaacccacctgaggaagaaatgagcttcgcagacaccataaggatctggggcacaagaaatgcaagggggaggcacacgaaagaaggaccctgaggagggaccaaccaaagcaggctggccgacagagacaacatgccaggaatgccaagccggaaggggacccaagcaaaatagggaacaaagtcagggcgaacaaaaaagacgagcggcccaaaacc

SEQ ID NO: 3104 - DNA, 523 bp, Glycine max
  Clone ID: jC-gmfl02220053h03a1
gggggcaaagagaactctaacgagcacagtatgggaacggctcacttcaaagacatagcattggcacatattttggcacttgagaacaagaaagcagcaggaaggcacttgtgtgtggaatctattcgttactttagtgatcttgtggacaaggttgctgagttataccctgaatacgatgtggctaagttgccaaaggatacccaaccagggttgttgagagcaagtggaaaggatgcatcaaagaagctgattgatttaggtctagaattcactcctgttgagcaaatcatcaaggatgcagtggagagtttgaagagcaggggctttgtctaattctttgctactgcagatgaactgagtgcactgttacaagtggtggtggcgtaatattattgttctgccattgctttgactcaatggtcatgccatttatgtttctacctatggtcttgtgttgtgcacttgtgcgtgtaactgctttctaaaataatgatcacttgcatcagtggttgtaacgatt

SEQ ID NO: 3105 - DNA, 529 bp, Glycine max
  Clone ID: jC-gmfl02220053h03d1
gaatatccaatatatactaatatatgctaatatatgctaatcgaatatctatctatatctatctacctatatctatatagatataggtagatagatatagatgtttactaagtagattatattgagccgcaatatatgtgcggcaagctaaacgaaaaggactattttgtagaaaactggtcaatgatggccttccatggattcacctatataagccgcagctaaagtagcaaaaatgagagcttgaataccgcttgtgaataatccaaggaacatgacaggtataggaactactaaaggtactaaagaaacaagaacaacaactactaattcatcagctaatatatttccgaaaagtcgaaaactaagagataagggttttgtgaaatcttctaagatgttaatcggtaaaaggattggggttggttggatgtatttattaaaataagctaatcctttttttgaaagacccgcatagaaatatgcaattgatgtaagtaaagctaaagcaacggtagtatttatatca

SEQ ID NO: 3106 - DNA, 484 bp, Glycine max
  Clone ID: jC-gmfl02220053h04a1
agagattatagaaagcgaaagagagagggttcaagttcaacaagcctctcttctttgtgttcttgcgaagaagaaaaatccctccgagtcaactcggacgagttgcctcatcgtacggttccttcctcggactctttcctcttcttccccttccgaatcaccgttcgcagggttttgctctctctctctctctgtctctcgcttcgtttctagttcagatctcgcattggcttcagctgaaaccacgcggtttaatttcattcccttaaattagggatttatcttatgtcgaaacacttgaagtgatgatggtgtggctgttgtgagaaattaatgatcgttgagggtgtgggacattggtacagagctttcagtgtagttgacaactacctaggagggaagaagaggaatctttcttccgccgttgtcgtgtgccgtggttgttgtactgttgatgtctcggaaactcgacagccctgtgcag

SEQ ID NO: 3107 - DNA, 497 bp, Glycine max
  Clone ID: jC-gmfl02220053h04d1
acagagtcaaaatgactgtattcaatattcatatactcactaggttacgtgagataagaaaatatatttgagtggaaaatgtaacccgtaacgtcatattacaggaagagagggaaaaaaaaagtagaaagtattacataactataggaatgttgttgaaaaagtctatctattactattactgttagctagaaatccgtttagctctgcaataactgtccttctttctgatggaggttcctcgtggcaccacgaaccttcatgcttataagcaatagcatggccatcacgaaaacacagatgctagagcctataactgcacaaaatcgtcaagaaaattgtaaagccaacccccacaatctaaatatttacgaaaaagaactactaatgtatctaaagaaacagtaatgtcaaaactatccaaagggtccaatccaaatttccaagaaggggaaaaggaagaacaaagaaattaagtttaatttacctatattacg

SEQ ID NO: 3108 - DNA, 524 bp, Glycine max
  Clone ID: jC-gmfl02220053h05a1
atgaagagctcataagccattacctctacaagaaggtcattgacaccaagttctgcgccagggcaattggagaagtggacctcaacaagtccgagccttgggatttgccatgtaagtgaaaccaaaccaattcgatcaatctacctttcatgtattatattgattttccttgaaaagttaaaattgcaagtttgtgtttagggaaagccaaaatgggagaaaaagagtggtactttttctgtgtgagagacagaaaataccccactggcttgagaaccaacagggccacagaagctgggtactggaaggccacagggaaagacaaagagattttcagaggaaaatctttggttggaatgaagaaaactctggttttctacagaggtcgagcacccaaaggagagaaaagcaattgggtcatgcacgagtaccgactcgagggaaaattctctgctcacaacctcccaaaaactgcagagggatattattattctcttccttatcttgcttttcaaacttggatt

SEQ ID NO: 3109 - DNA, 485 bp, Glycine max
  Clone ID: jC-gmfl02220053h05d1
gatgaataacatgaatcacttttcttgttgaattgttacaaaattgatgtgttggtatgaaaataatatttacaagtatgattttaaactaagcaaccactatgatcttcccaccaaaaatgggagaaaaaacagaagcatgagagtagaatcatctaaaccttttcccttgataaaaacatcagggactaaattatgccagttcatttttcacggacacattgccatccctctgatctatgctcaatgctcctctatccacaaaatttaccattctgtgggaaagtacgcgagacttatctatacatgtggcatgacaagtaccaatgatcaatgaaagtaagttattccaagaccttttcaccagttgaaaaaagattaaacaccacagttccaaccaaatacaacacaactgaaaccttgaaaacatcatcccaggagccatgttgtagaatgtaacctgttgctgctgttccaagacacca

SEQ ID NO: 3110 - DNA, 581 bp, Glycine max
  Clone ID: jC-gmfl02220053h06a1
tctctttctcttctcaccggctggtcaccggcttctctcattctccgaccgtccccacccccttcattcccgattcgttcgtcttcgctgcttcgcgtcaacactttttttctcttctaggtcatttatgatttcgatcttttcctttaatttctcctccatttgttttgatttgatttgaatttccacggttaagttaaggtagtgttcgggaagatgtcgagtcacggtggttcttctttaaggaacggttccttgtccaatagccccacgcgggccaagaagaaagcctttggctctgagcattcaacgcctgactttattgctcgtaaaacctttacctcaccgcgcaccatgggagagagaactgtgaaatcattgcggctttcaaaggcattgacagttcctgaaacaacaaccgtctatgaagcttgccgtaggatggctgctcgcaaagttgatgctctattactaactgattctaatgctttgctctgtggaatcctcacagacaaggatatagcaacaagagttattgctcgtgagttaatctcgaagaaacacctgtttcaggttatgac

SEQ ID NO: 3111 - DNA, 510 bp, Glycine max
  unsure (1)..(510): unsure at all n locations
  Clone ID: jC-gmfl02220053h06d1
gaaatgcaaagctattgagacacacgaactatgtaggaataatcttacaagcaatccaatgatgcacacagaagtgttacacactctttaacacatactttctgacaccacactctcctactagttgaaaattatcagaaaatacaaaataaggaggttcgttaaatatgtagcatccaccaatttgtgattttcaatcaataagaaagattgtgttcaaaagagtatttgagagtattttcctaacatttctcgtgatacaaatatgatgataaaagcctgctaagaagagaactgtgaatctcccaacaagtaaatttacaccaagccctccagatagcacatacccactctgtattagcagaataagttgcctgagataaatgaggagcatgtctagaatcgacggatgtctttaggaggcctgaagttaaggggatgggtttctggagtggcactctcatcttctttccacattnttatcgtcttgtcagcttcgcaggttatgag

SEQ ID NO: 3112 - DNA, 526 bp, Glycine max
  Clone ID: jC-gmfl02220053h07a1
gaaagcaagctcatcctagagttttaaaaatggcagcagcctcctccatggctctctcttccccatccttggctggcaaggccgtgaagctgggcccatcagcccccgaagtcgggagggtcagcatgaggaagaccgtcaccaagcaggcctcctccggaagcccatggtacggcccagaccgcgtcaagtacttgggcccattctctggcgagcccccgtcctacctcactggcgagttcccaggtgactacggctgggacactgctgggctttcggccgacccagaaaccttcgccagaaaccgtgagctcgaagtgatccactccaggtgggccatgctcggggccttgggctgcgtcttccccgaactgttgtcccgcaacggggtcaagtttggagaagctgtgtggttcaaggccgggtcccagatcttcagcgagggtgggctggactacttgggcaacccaagccttgtccacgcccagagcatcctcgccatctgggccacccaagttattctaat

SEQ ID NO: 3113 - DNA, 488 bp, Glycine max
  Clone ID: jC-gmfl02220053h07d1
gacacaagttatgaatatataaggtccacttttttttacagtgaaaacagttgaaacgaagttgttaataatagattgccgagagaaatgggtaaaagaaatttccacccaagatttaataattgatctattcttagcctaggcaaagtccatcttgttgcgatagaaaggaataagaataaataagttttagctagtgtaataaagataccaattatcgttacaaaaactccatatgtttgatttatttcaaaaaagtcagaaacgaatatgtatggaatagagatatttgaaccaccaaagtaaagaactgttacaaataaggaagaaatgaataggtttaaataggaagcaacataaaataaaccaaatttgatacccgagtattcggtttgataacccgctactagttcttcttccgcttccggtaaatcaaaaggtaatctttcacattctgcttgggacgagattagaaaaacaatgaaacc

SEQ ID NO: 3114 - DNA, 106 bp, Glycine max
  unsure (1)..(106): unsure at all n locations
  Clone ID: jC-gmfl02220053h08a1
tgccatttagtgttgaagaaatcttccacgtcagctngctcaacactaagggggtggtccccaacaaatagtgcctccgaagcgccacattcttttttgggtgtaa

SEQ ID NO: 3115 - DNA, 445 bp, Glycine max
  Clone ID: jC-gmfl02220053h08d1
gaaactggagccaagtgggaatgttaaaattattgaaccaattttttggagaaaaccaaaagggggaccccaccccacattttaatttttaacaaaagaaaaacccgatgcccactccttgcccaaacaaaacatgcttattaaacccagatgggttctctatgtcagaaaccaacgggatgtttttccccttacccgttccacccactttaacagaaattcctcggcaatcaaaaataaaaaacgctaaacgggggcgaccccttatctgaaaagtttaacaacaaaacttccaaaaaatggataattccacactcaatccgattcataaacccgggggggggtttccctctctttcccgtgataatctcaactactgaggacctgtaatgaccaggcttgtattgaccctaaccaggcccactgacgtaaccagcctggggcg

SEQ ID NO: 3116 - DNA, 517 bp, Glycine max
  Clone ID: jC-gmfl02220053h09a1
ctcttcactttcattcactccgttgccatctcaaacccgaatccaaatccaaatccaacacgatgtcgtatcgaccttccgccaacgccaggaccgaggttcggcggaaccgctacaaggtcgccgtggacgccgatgaaggtcgccggcgccgagaggataccatggtggagatccgaaagaaccgtagggaagagagtttgctgaagaagagacgcgagggtctccaatcccagcagattccttcgtcacttcactctactgtaattgagaagaagttggaacaccttccagccatggttactggtgttttcaccgatgacaataacatgcagtttgaggccacaactcagtttcggaagttgctttcgattgaacgtagcccacctatcgaggaggttattcaagctggtgtagttccacgctttgttgagttcttgatgagggaagattttccacagctgcagtttgaggcagcttgtgctttgacaaatatagcttctggaacttctgaaaa

SEQ ID NO: 3117 - DNA, 523 bp, Glycine max
  Clone ID: jC-gmfl02220053h09d1
gattaaaaagttgccaatcagctttttattgataaaacaaaatttccaagtatcagaacaaaacctactataacagagaataaacaaatcccgaatgcacttattatattggcaaaaaacaaaatgatttgaatgaccaaaattctaggcaatgaagttataaactattaacaatatgatgtccattgtccagagctttggctagacaaacactcagatggagagacaatatcggttatttatttcctaactctattcaacgaactgaagcacaaatggactgttggttgtacaattctgtgactccatttgtgatcttctgcctgtttttcctcctctttgagacaactataaacccttcaccatctccattcttattttcagtaactcctaatttctctggctcaacgctatcactggaatgaggcactggcttattcttttcttcatttccatacataatgtttatgacagcacggtctttggtaatttcatcagaacaactttcaagttctcaattttt

SEQ ID NO: 3118 - DNA, 501 bp, Glycine max
  unsure (1)..(501): unsure at all n locations
  Clone ID: jC-gmfl02220053h10a1
gttttctccggcgaattttcggcgccaaaaaaccatccgattccaaatccgccaagaaaagatggaccttcctcaaacacaccgtcaggaacaagtcactcccgccgccaccgccaccctccgccgtcacttactttgattcctcaactcccttggacgccaacaagcatgccatcgccgtcgccgccgccaccgccgccgtagcagaggctgctctcgccgccgcccacgctgctgcggaggttgtcagactcacaagcggaggcgtctccgccacaagcaccaggcccgccgctatggcggcgcgtgttggcaaccttgaaaccgccgccgttaggatacaatcggcgttccgtggttacttggcaaggagggtattgagagcgctaaaagcattggtgaagttgcaagcattggttaggggccacattgtgagaaagcaaagtgctgatatgctgaggcgcatgcaaacattggtgcgacttcaggcccangcacgtg

SEQ ID NO: 3119 - DNA, 520 bp, Glycine max
  Clone ID: jC-gmfl02220053h10d1
gataagtcgcaaaagctttgaattgaaatcattcaccttcgtcaataaattaatcctgacttattctcattgaaaacacatgttacattgggaaaacgagactactcaaaagtttacatctctcctagtatttaatgtgggagagacaaacactgtaaccaaaataatgcaccagtaattggcggagaagcagcaatgttgcatttgcagcaagaagaacacagccctaaaaataacttcacagtggacttggtccaccttcctggttaaaagctctcaaggactagtaactaagacttttctgcttcaatttgttgatctagtaggtatacaaaaaaatgaaactagtgttacactgatttaccttggcgttaaaccacatcttcaggactcctgcactcccaaatactgggagttagaagctgccaggagggctgctccaattccagagccatcattagaatgttcaatgccaactgtctcatctgcctcatcacccaacaactcctttagtgtactc

SEQ ID NO: 3120 - DNA, 493 bp, Glycine max
  unsure (1)..(493): unsure at all n locations
  Clone ID: jC-gmfl02220053h11a1
gacgtgtcacgcaacaaggaatatattccgattgttgggctagctgattttaataaattgagtgctaagctcatttttggggctgacagccctgctattcaagacaacagggttaccactgttcaatgcttgtctggaactggttcattaagagttgggggtgaatttttggctaaacactatcaccaacggactatatacttgccaacaccaacttggggtaatcacccaaaggttttcaacttagcagggttgtctgtcaaaacatatcgctactatgctccagcaacacgagggcttgattttcaaggacttctagaagatcttggttctgctccatctggatctattgttttgctacatgcatgcgcacataaccccactggtgtggatccaacccttgagcaatgggagcagattaggctgctaataagatcaaaagctttgttacctttctttgacagtgcttatcanggttctgctagcggaagtc

SEQ ID NO: 3121 - DNA, 469 bp, Glycine max
  Clone ID: jC-gmfl02220053h11d1
gggaataaggatgattcttgaggaccaaagacgttctaatatccttacaataacacggacatgtgcacgctaaagtataagccttcaatacaaaacattatttaactacttgtccactgaacaagacaagattcttcactctttccaacatactatcccatgttatgtaccaagaactttacagttacatcccaaacacaatatttcccaacactgaaatattcaatttaaggagacacgaaccgtaatgggtctaaatccatcagcatgggtaacaatgccaatctgttttcagtaataatcatgtcaacgagggctgtaactttgcattccctttattgtgcagaggctctttcaagtcgctcagactcaggttgacctgaattagttgaggattacgtcctatacggagaccatagcaggaatgatgccctgacgcagatattttatgaccctgaagaagatttat

SEQ ID NO: 3122 - DNA, 174 bp, Glycine max
  Clone ID: jC-gmfl02220053h12a1
ggtgtataggtgagaagcgattgttaaattttgagccaagtggtatcttctcaggtgcggtttcttattgcatgccctcaattctctattcaatcaagtatgaaaattcgtggattctggttaaattgatgctcaattgtgaattttatttgtatgtgaaatgttaaagattca

SEQ ID NO: 3123 - DNA, 541 bp, Glycine max
  Clone ID: jC-gmfl02220053h12d1
agagggaatatttcatatcaatgtcatggtaactaaaaaaacaacatagagaaagttaataaatttctcaaaattaagaatatacaatgagtgaattaatgcagcagcagcagtagtcacacaagtatcatcatataatgcttaaaagaaattaagcatagagttttccaaatacaaccttaaatgagttctccaaaaaggaaaagaaaggaggttcatgaaacacatatagaactgtttcctccattgttctgcaccacattatacaaacttggctcaaatgaggagcaaatttttcataatcttggcaatgcgcggggaagaatgcgaggttggtcccaatcagtgacaatgtgatcacgagtgatatccttgagtgaggtgcaaccactcaaggccatggttagctcaaactcctcacgtagcatccgcagcacgtttcttacaccagcctattctttagcagccaaggagaacaccacagggcgtccaataaatatgccagaggcacctagtgctaatgccttgaagacatcagttc

SEQ ID NO: 3124 - DNA, 578 bp, Glycine max
  Clone ID: jC-gmfl02220054a01a1
cgttgatgggattcagattaaacaatcatcaaaattcattattattaatgatttacggggtaaagtagttcatatggatgtagtgaaaagaaagggaaaggaacatgagaaattgctgatttctgatgatgatgctccacaagataagaagaaagaaagtagctggaattctaacttactgaaatgggcttctggtttcattagtagtaatgaacaacctaaaaatgctgaaaccaattcaccagagaaaggaaggggtggacgccatggaaaaacgattaatatcttttcaattgcttctggacacttatatgaacgctttctaaagattatgattctaagtgttctaaagaatacacaccgtccagttaaattctggttcataaagaactacctgtctcctccttttaaggatctgattcctcacatggctcaagaatatggttttgaatgcgaactaatcacctacaaatggcctacatggttgcataagcagaaagaatagcaccgaataattgggcatataaaattttatttcttgatgtcatctttcccctttcttgagaagtcattttgta

SEQ ID NO: 3125 - DNA, 151 bp, Glycine max
  Clone ID: jC-gmfl02220054a01d1
catggatgatttccacagaatctctgatcatttaatgaaaatagtcactataatcaaaggaaccaccatgagacagtccaagattatccaccatgactgtttattattacatataacaatctgtaattcgaccaaaaaactaacaacctgt

SEQ ID NO: 3126 - DNA, 388 bp, Glycine max
  Clone ID: jC-gmfl02220054a02a1
caaaatttcagaagctagtgatcaatcatcaacacagagctgagtgtgttgctctgagaatccaccttcttcttccattggaggaccatttcctactggaatagaaatactaccacacttttcttttttcacttctctaaggtgctaaggtaatttgctccttcattttttcactctttgggctcgcgtacccgtgttaccggtactcgtggtgaagtgttcgaaaaagactgtcacacctaagatctcagttaacgatgggaaacttgttgtccatggtaagaccatttctgactggagtgccagacaacgttgtgctgactccaggatctggaaggggtcttgtgactggtgcttttgttggtgccacagcttcacacagcaaaag

SEQ ID NO: 3127 - DNA, 394 bp, Glycine max
  Clone ID: jC-gmfl02220054a02d1
cctaacttattctattacaattgtaaaaaaaagaagaaataaaagacgaaataaagaagaggagattaattacatattaattacatatatttaatacttaattggatctataaatcttcttcacccctttccgtgtcaataactagaatgaaaaaaaagggaatatcaatgcatctggaaaaaaacgattgatctctatcaagagacccgccaaagccccgaaccatagagtacttactactggtgccacggaaagatatgtttttagatctcgcatttcaaatcctcctttttaagtcttttttctatctaaaatttatttgaatttaatattctttttgattattctaaagaatattagttatatttctttagaatcttttttttctttttc

SEQ ID NO: 3128 - DNA, 489 bp, Glycine max
  Clone ID: jC-gmfl02220054a03a1
gggaaaagaatattgactttgcagctcatagtccccaagaagagtcaggttctcttttagctaacctgattgggaatctggctttccctttgctcttgattggaggattgttccttctctcgagacgatccggagggatgggaggtcctggtggccctggatttcctcttgcttttggtcaatccaaagccaagtttcaaatggaaccaaacaccggagtgacatttgatgatgttgctggggtggatgaagccaagcaggactttatggaggtggtggagtttttaaagaagcctgagaggtttactgctgttggggctcgcattcctaaaggagttcttcttgttggtcctccaggaactgggaagaccttgttagccaaggctattgctggtgaagctggtgttccatttttctctatatcaggttctgagtatgttgagatgtttgttggtgttggtgcttctcgtgttcgtgatttgttcaaga

SEQ ID NO: 3129 - DNA, 388 bp, Glycine max
  Clone ID: jC-gmfl02220054a03d1
gtgcatgctgcctaattcagaactggttccccgggctcactactcggtggccggccttcgtccttttttttttttttttttttttccttttttttttgttttcttttaaaaggatggcctctactattataagtaagagctcataaacccaatcacaaatgggctatctgaatttgaggatcgagttctcactttgagtataactagtccctctttaggaaagatcatctcaacaagcacctaacctgttgaactttccaggatcacaccattttgccctgatcctgattacaggcttacatgcccacgcagtgactttccaaagccaagttccaaaggcaactgatttgggaacccaataagccggcaaaggggccctgctgaacct

SEQ ID NO: 3130 - DNA, 419 bp, Glycine max
  unsure (1)..(419): unsure at all n locations
  Clone ID: jC-gmfl02220054a05a1
gagccgtagcagcggaagctctagcttgggtagcgaatcacaatggcgagaggattaaagaagcatctgaagaggcttaatgccccaaagcattggatgcttgacaaactgggtggtgcatttgctcctaagccctcatctggaccacaccaaattgagggaatgcctgccactcatactcattntgcgaaaccggctgaagtatgctctaacataccgtgaagtcattgctattctgatgcagcgacatgtccttgttgatggcaaagtcaggactgacaaaacataccctgctggttttatggatgttgtatcaatccctaaaacaaatgagaacttccgcctgctgtatgacaccaaaggtcgattccgtctccactcagtcagggatgacgaggctaagttcaagctttgcaaag

SEQ ID NO: 3131 - DNA, 568 bp, Glycine max
  Clone ID: jC-gmfl02220054a05d1
tcactgctcggtggccgcccttttttttttttttttttttttttttttttttacggatcactacccaaatgaaggaaactggagcataccctaaaatagttcaaacaacttgattgcttctaacggttccctatcacctttaaaatgtgaggatgtgaccaactagttggagttggaacacaagctggtacaatttgattaaccgaccataaggatgtgaatcaatgaaggacggcaacgccgtactcaaaactcaaggcatattacaagattgttcctggcttgctgcttgaaatatcatgcgtcaaacaatggcaactttgcttaaatgaaaaatgtcaataagactctctaatacattcttttaaacacactctattattgattaaaatttattgaaaattacaattttttttctcacttctttcttgtcactatttgatgaagtcatctcactctttgtaatttcccatatattttaaccaataatcaaatgtgttaaaaaaagtatcttagaaaatgttttgtagcacttctactaaatcataatatgcctagaaacataagc

SEQ ID NO: 3132 - DNA, 550 bp, Glycine max
  Clone ID: jC-gmfl02220054a06a1
gaaggcttagagttagatggagtcgcgcggacactcaaacccgcttctgtcattttccagcttcatccatcaacactgcgtccgcttagggtctgacctcgcgactcgtttggatgacacgaaacgagccctagctcaagcttatcataattcttctattccccaaacacgccctcgccgacacttctactctgggctccctgcacgtggctaagtccctcgtcggcacctctgtttacaccgtcagcaattccaacaatgagttcgttcttatctctgacgctgatggagccaagtccattggattgctttgctttcgccaagaggacgccgaagccttcctcgctcaggttcgatcacggagtagagagcttcgaagcaaggctagggttgttccaattactcttgaccaggtatacatgttgaaggttgaaggcattgccttccgattcttacccgatcctgttcaaataaggaatgctttggagcttaaaccagccaacaagggaggtttcgatggagttcctgtttttcagtcagagcttttggt

SEQ ID NO: 3133 - DNA, 73 bp, Glycine max
  Clone ID: jC-gmfl02220054a06d1
aagcgcaagaaatgcttcaatataatgtaatgatggaagtcttccatgatgaaattcaaacattagaagcatg

SEQ ID NO: 3134 - DNA, 497 bp, Glycine max
  Clone ID: jC-gmfl02220054a07a1
aagctctggaactggaaccctctccttcttcctcctcgtttttcttcactcaaacatgcttttccatcaacaactactcgcctcgtagctcacaattcagtctcagaaaccgttcccattcataaggaaaaggaacaaaccctaccttctgtcaaacctacttactcccccactcctcccaatcgaggccttcgaacccctcacagcgggtaccattttgatgggactactcgcaaattcttcgagggttggtacttcaaagtctccattcccgaacggaagcagagcttttgctttatgtataccgtcgagagtcccctgtttcgtaaaccattgacgcagctcgaactggcccaatacgggcccaggtttactggtgtcggggcccaaattctcggtgctgatgacaaatatgtttgccaacactctccccaatcacattttttctggggaagcaggcatgaactaatgttggggaacacgttcgagcccaacca

SEQ ID NO: 3135 - DNA, 344 bp, Glycine max
  Clone ID: jC-gmfl02220054a07d1
gcttaaatgttttattgaagttatgcacatttactaaatccaaaacgtgactggtttatcaagctagttaatacataagggcaattgatctcaaaccccgaatgctctaatgctgaaggaacataaagcttcaaatagatacacatgcatatatgtaaaatttacagttcacactagaatctatataccacaactaggattagcaccaactgatttggctatagactattgaattctaagctgtcaggaggggcatggcggaatttggactttgacatcaccttctagcatctgtgtcacagatctcattgatgggtctaagaccatggatcctcttgctcaca

SEQ ID NO: 3136 - DNA, 484 bp, Glycine max
  Clone ID: jC-gmfl02220054a08a1
tgagtttcgaaggggaagtgaaatatgtgaggctatggaggctagcaaggctgattgggatactctttttgagccttatcccttttttgaatcatacaagaattatctacagatagatataacagcagagaatgcagatgaccttagacaatggaaaggttgggttgagtctcgtctccgccagttgacattgaagattgagaggcacacttatggtatgcttcaatgtcatccacatcctggtgaattctcagacaattctagaccctttcaccactgttactttatgggtctgcagcgtaagcaaggagttccagtgaatgaaggtgaacagtttgatataaggctaactgttgaagaatttaaacattctgtcaatgcttacactctatggaaacctggaatgaatatccatgtgtcccatgtgaaacgccgtaacattcctaactacatatttgctggtggtgtccgacctaccttccca

SEQ ID NO: 3137 - DNA, 510 bp, Glycine max
  Clone ID: jC-gmfl02220054a08d1
cattcgaattcattttatttatatattaatattatattcaaatgaaataaaaagatattaaaagatactaattataagaatttgaaagtgaaattataaaggttattaaatgattaatcaatttttttctacctgttcctgtagtaaaaagagttccatctgttcttgaatagcttccttcaaaaggacttctgcttccccagtgaatgtcttggtagaagatatgatttctttgaattgaggtttattcgtgtttaagtaagcacgtaactcaacaagaaatttccttacctgtccaatttctaatgaatcaagataaccattcgttccagtataaatagttattatctgttcttccacggtaagaggagctgattgggattgtttaagcaactcgcgcaatcgttgacctctgctaattgattctgagtagctttatcgagatcagaagcgaattgggcaaaagcttctaattctgcgaattgtgctaattccaatttttaattacca

SEQ ID NO: 3138 - DNA, 515 bp, Glycine max
  Clone ID: jC-gmfl02220054a09a1
gttcatttgtattttatgacttcagtggaagcttgtgccgcttgttacacagaaacacatctaaacttgactggagacggcgagttcatatggccttggatattgcacgaggtgtaaattatcttcatcattgtaacccacctatcatccacagagatttgaagtcatcaaatcttctagttgataagaactggactgtgaaggttggtgattttggtctttcacgtcttaagcatgaaacatatctcacaactaagacaggaaggggcacgcctcaatggatggcaccggaagttcttcgtaatgaaccctctgatgagaaatctgacgtttacagctttggagtaatattatgggaaattgcaactgaaaagataccttgggataatctcaactcaatgcaggtattgctttcatctgtagatgaacctttgaaaatatatacacgtgcagcctgaaatggtagtaaagcctattgaatggaaatccactgcagagtgtctgtttatcttttg

SEQ ID NO: 3139 - DNA, 496 bp, Glycine max
  Clone ID: jC-gmfl02220054a10a1
tctacaatggttccaaagcttagtggtgacgtggatgatggtggaactgggcttgaaactaagcctatctgaacaataccctcctcttccttcttctattaaggttgaagttcttagataagaagaagaagagagcataagatagccttttgaagctgaaagcaaattttgtgaagtagcatatatactttcaatttgtttagttcttctgggtggagttccttcatttggtgtttgtagtcatggaggtttcttggttctataccttttgcagctttttatggatccaaccatcccaaatgtgccaatggttcaaaagaaatgatatgataacagaagctcatctcctttgttaccagattgacctgattgagtgttagacttatttgtagaggcagatctcctttggaagtgtaaccctcaatattggaaaaagaagcttcatctatttcagatatctatttatgattgaagattcagctgtactgggcaaatc

SEQ ID NO: 3140 - DNA, 312 bp, Glycine max
  Clone ID: jC-gmfl02220054a10d1
gccccgggagaaaaaaaacatgaaacaccaggggcccgggagcgggggggggaaagccccccgggggcaaacaacacccccaaaaggggggcccccccccccgcgggagacccgccccagggggggccccccccccccggggaaacaggccccccccaggcctagggggggggcacccccccggggggcccccaaagaaaggaaccccccctggggccggccccaaaaacccccctttttggccaaggaacggggggggccccaagacccccccccgccacccccagaaagggggggggggggccccccaaa

SEQ ID NO: 3141 - DNA, 384 bp, Glycine max
  Clone ID: jC-gmfl02220054a11a1
atcgaatcgcatcctatgggtagcagcagaggacacacgctcatggaggttggacccgacggggttgccgtcatcaccatcgtcaaccctcccgttaattcactttcctttgatgtattgcgcagtttaaaggagagttttgatcaggcgatacagagagatgatgtcaaggcaattgttgttacaggtgcaaagggaaaattttctggaggttttgatatttctgcatttggtggtattcaagaggcaaaagagcgtccaaaacctggttggatatcagtagaaatcatcactgatactattgaagcggctaggaaaccatcagtcgctgccattgatggccttgccttgggtggaagattaaaagttgcaatggcatgccat

SEQ ID NO: 3142 - DNA, 491 bp, Glycine max
  Clone ID: jC-gmfl02220054a12a1
actagttgtgctattgccgctgtcccgtgcaattcgaagggaatgaagaacaagggtttagaattagggtcttaaaacaactcaaccaactttgtgggtaaaattagggattcaggtgtaaagtgaaaaactagggttttggtaaatctccaaaatgtcgacgggcaaacccagaggcggtgattttcagatggtcccggcgccgggaacgtcaaagccttcccttccgccggcagcagcatcgaatgcgatagtggaatatactccggtctctctcaaagaggaagaggaggatctggaagtcaagctccgacggattatcgacaatgttcctgtccgtgttagcaatacttccggtagttccgccggttcaggctccggcgacttccaccagtatcggcatatgagacgcatggaacaagatcgtcttgccaggatggaagtcgactaccagaaaaggaaagagctggcagaatttaatttgagatgag

SEQ ID NO: 3143 - DNA, 537 bp, Glycine max
  Clone ID: jC-gmfl02220054b01a1
caaaatttcaaatgctagtgatcaatcatcaacacagagctgagtgtgttgctctgtgaatccaccttcttcttccattggaggaccatttcctcctgcaatagaaatactaccacacttttcttctttcacttctctaagctgcttagctaaacgctccttcatttcttcactcttcgttctcgcgtacccgtgtcacggtaactcgtggtgaagtgttcgaaaatgactgtcacacctatgatctcagatcacgactgggaaacttggtgtccatggtcagaccattctgactggagtgccagaccacgttgggctgactccaggttctggatagtgtcttgtgactggtgcttctgatggtgccacagcttcacacagcaaaagtctccatgtgcttacaatggctgatagacaggggctccggttcatgtactgatcacggttcaagctatggtggatgactcacagaatggctacttgtgcgcaggatgactctctggagatcaaatcatgcttactgagagccatgagagt

SEQ ID NO: 3144 - DNA, 493 bp, Glycine max
  Clone ID: jC-gmfl02220054b01d1
atgagatgattttcctgccgtccatcgtttttagagaatccttatatgttgttcagctcctccgttcaatcgtccattcgtcagatcgctttgtttgtcatatcatcgagacgtcctttgggcgaacgtcaggcacgagctttgggagtcgtgctaaaagtcgacgtgctgtcgagaggcgtctatgcgccaaggctggggaaagcgctagagtcgctgaggttaggggcgttgccgccacgaccaccgttaggagcgccagcagcagcaggagcaccacgggcttcgccgcgaccacgtccaccacgaccctcaccgtgagcgcggtcaccaccacggccacggccctcaccgccacggaaagatccacggccctcgccacggccacggtcgtcacggtcaccgcggccaccgtgcgatccaccctcacggggagggggcgcgagcatgcgcttgctgtcaagctcgacgtgaaccttctccttgcgctggc

SEQ ID NO: 3145 - DNA, 478 bp, Glycine max
  Clone ID: jC-gmfl02220054b02a1
caggctgcgcagtgtttgaacgttgaaggagagcgtagaggcagtggttttctttttttgatttctctttgtagaatcgaatcgagttaatttttgatcgtgtgagtgtccgatcttgaaatccacaacatcaatggtgagaggattgctcaacaagctcgtctctcgctccctctcggtcgccggaaaatggcagcacaattaactccgccgccttaacatacacgagtaccagtgtgctgaattgatgagcaaacacggagtcaacgttccgagaggcgtggctgtttcctctgttgaagaggccagaaaggtcatcaaggaccttttccctaatgaaaatgagttggtggttaagagtcaaactttagccggcggacgaagtttgggaactttcaaaagcggccttaaggaggagtgcacattgttaagactgaccaaggtgaagacatagctgggaagatgcttggacagatac

SEQ ID NO: 3146 - DNA, 555 bp, Glycine max
  Clone ID: jC-gmfl02220054b02d1
aaacaaatcacgggtgaatttattatatgatgaatccatcttcaattactgagtttttcaatacaatggtaaccccagaacggatgtaaaacccttccgaagatctatcagcctcttgtataccctctgagtttgctattacaacattctttccgattctagcgtttttgtcaataatacagtccttgatttttgtattttctcctattccaattggaactcttccttcagctaagagtgctgccacttctgcatcggtttcataataatcagcaccaagcatcactgtatcctttaagtgaatatttgagtttattctggatctgattccaacaacactgtgctctatgaaggaattattcaagaagcttccatgtgatataattgaatcaacaatcttgctattgtcaatctttgatggtggtaagtttctccgtgatgtatacattggtttggctgcatcataaaagctaaacctgggtggatgctcagtgagggcaagatttgcctcaaagatgatctgtagtacctatgtttccagtatcattgatagat

SEQ ID NO: 3147 - DNA, 434 bp, Glycine max
  Clone ID: jC-gmfl02220054b03a1
gaacggcaattaatttacaatggccgtcacgaaaagcctctcaatcttcctcttcatcgcaatgagctgcgtcgccgcagctcaggcagcgaacttcaacatcacaaataactgcacctacacggtgtgggccgctgccgtgcccggcggcggcgcaaggcttaaccctggcgaatcgtggaacatcagcgtgacgaacggcacaacaggaggacgcatctggggtcgaacaaactgcaccttcgacaacgcgggacgcgggaagtgcctcaccggcgactgcgagggtgttctggagtgcaacaaaacaggtacacccccgaacacggtcgttgatttcgcgttgaaccagtattacaacctcgacttctacgacatcttcctcgtcgacggtttcaacgttcccctacagctgaccccgacctacaactgca

SEQ ID NO: 3148 - DNA, 537 bp, Glycine max
  Clone ID: jC-gmfl02220054b03d1
cccaaaaatcagcatatatttcctctataacattggtcctatattcctagaccatatattaactgatccgttaacttaatcaattccagaaaatttcatacgaacaaatgttaaaatgcatatacatacatctttcagaaactataatgctgtgtagccaattagattcaggatcgtgtctaattgcgtgctctatgacaatatcattgaattgagcatgttgatcttctcggtggtttgatatgaaggagctatcatattcttccttgatcagcctgtggtccaatgtatctagtgccattaatgattcacacaggcgtaaggaatacccccaaatcgcatgatccttgaccttcaacttcgtgaggcaaattcctcagattggaggatacatattatcactttcaacttcactttcaatttcactatcattttcgctattataggtcttgagatatgcctcatcaccctgctcaccatcctccacctctgagttctcatcatcactaggataggcagaatccaatttgtcataca

SEQ ID NO: 3149 - DNA, 555 bp, Glycine max
  Clone ID: jC-gmfl02220054b04a1
gaacggcaattaatttacaatggccgtcacgaaaagcctctcaatcttcctcttcatcgcaatgagctgcgtcgccgcagctcaggcagcgaacttcaacatcacaaataactgcacctacacggtgtgggccgctgccgtgcccggcggcggcgcaaggcttaaccctggcgaatcgtggaacatcagcgtgacgaacggcacaacaggaggacgcatctggggtcgaacaaactgcaccttcgacaacgcgggacgcgggaagtgcctcaccggcgactgcgagggtgttctggagtgcaacaaaacaggtacacccccgaacacggtcgttgatttcgcgttgaaccagtataacaacctcgacttctacgacatctccctcgtcgacggtttcaacgttcccctacagctgaccccgacctacaactgcagttccgttaaatgcgccgccgacatcatcggagagtgccccactcagctccaggttcctggcgggctgcacaacccctgcacggttttcattacgactcagtactgttgtagcaccggagc

SEQ ID NO: 3150 - DNA, 352 bp, Glycine max
  Clone ID: jC-gmfl02220054b04d1
aattgaaccacattttattgaatccaatatctatgatgactacaactattataatgttcgagctcttaaaagcttacttttcaaggaagtgctgctcttgaggagcgggttaaagcttacaggactttcagcccctcttgaggagatttggccttaccatgcaccttcactataggactgccaacgatgtcaccgtcagctgcccataccggtaccctgtatagatgctcaggttttgaacatccttgccaactgggagggtttagtttcagcctcttggtttcctggagaaagaactgaacgttgcccctaaccgatgcccgggctacaacgacccccactgtgctcacag

SEQ ID NO: 3151 - DNA, 560 bp, Glycine max
  unsure (1)..(560): unsure at all n locations
  Clone ID: jC-gmfl02220054b05a1
tttttcttgaaaaatgatggaactttgacgccattggccattgagttaagtaagccacatcctcagggtgaagcatatggtcctgttagtgaagtctacgtgccttcgagtgaaggagttgaagcttacatttggttactggcaaaagcttacgttgttgtgaatgatgcttgctaccatcaaatcattagccattggctaaacactcatgcggttgtggagccattcgtcatagcgacaaacaggcatctgagcgtggttcaccctatttacaaacttctgtttcctcactatcgtgacaccatgaacattaattcacttgcccgcaaatccttggtcaatgccgacggtattatagagaaaacattcttgtggggtaggtactctttggaaatgtctgctgttatttacaaggattgggtnttcaccgatcaagcattgcctaatgatcttgtcaagagaggagttgctgttaaagatccatctgctccccatggagttcgacttttgatcgaggactatccttatgcttctgatgggctagagatatggatgctatc

SEQ ID NO: 3152 - DNA, 591 bp, Glycine max
  unsure (1)..(591): unsure at all n locations
  Clone ID: jC-gmfl02220054b05d1
aattccaggagtctactggtcggcggccgcccttttttttttttttttttaaccagaaaagaatggccatacaaaatgtctagaacaaccaaatgcaatatttacaaacttacggtacttactttgaatgaaataaattacaaaagaaataacagaagataaaaatttcataatttggtattgaagttagaaatgctcctatgacaactttgcagatgtatcaaacccttggttctgcaattctgccctaagccaacataccttcaagaacaccctaaaattagaagcttgctagcaattttgctataaattgcagtcaaaaatagcacatgctttatgcatatatgcagttgagatttgagctgattcatcttgagcatccagagtaaaccatcacaatatgctacttcccagaagtctgaatatttgacatcaaccaaattctgtttgttgaacaattagactcaattccaaaacagctaacagcaggatgatcatgtgcttgtgtaacacactatttacactggcaacttcagtcagaaaggatttgttctagacaggaatgttgtctagagaatatncatcaaattc

SEQ ID NO: 3153 - DNA, 550 bp, Glycine max
  Clone ID: jC-gmfl02220054b06a1
aaaccaacgaatctgactcaccaatattccaacacgctcgctcattccacattgcataatggccaaggaaccttctctatgcctcttgttcctctcttttctcattttctgctcttcagggacttctgtatcttcttcttcatcgtccggtggtacaacattctttcaaaaaagcaagatctccaaatctgagattcgattttctgtatcagattgcaagattttgagcactctgaccaacaccaacctgtcagttgatttcttcttaaacgaaagcctggttgaaaattttgtttcttcaaaacaaaatcatctctagtttcatggctagaaactcatctcatgaacattattccccaagttgacatcagaagcatcgttgttagatgtggcagtgagtggcatgccacattagatgccttcactcatacccatttttaaaataaatcatttattttctcagcaatcttcaactgagaagggaaataaaagtctccgtggcccttcctctttcattcttagagaatttgaatgcattgtatggaaatga

SEQ ID NO: 3154 - DNA, 533 bp, Glycine max
  Clone ID: jC-gmfl02220054b06d1
acaaatcaaatcgacaagtatatataatcttagcgttatactccaaagtctatctacaaatgaaatcaaatagaaacaggggtaaggcaaaagaaaagaatttaatctttctggatgaacattattctagtccatcaatattatctaactcaccttcacagttgctgatatagcattcccatacaaatcattcttaccgaggttctcaaaattttgaggaaactgcccaaaagcaatttcttggcctttctcttaatccatgaaaaaacaaagggcatctctcactgattgtgaatggtttgagtacatgtcacaatctataattagaatgatttttgcgttgctaatccttgaagagactcttagcaatgaatttatagctccagctttggagttgtgatgatattgaggtctcttctcacgagccatttacaccagagttggcataacaaacccatctacatccttcgaattgtgcgggttcctttcatgaagtagtttcttgaggattgtatcgtgatcatgtcgagaat

SEQ ID NO: 3155 - DNA, 400 bp, Glycine max
  Clone ID: jC-gmfl02220054b07d1
cgaagtagctgaattagaactcagtcaggagctcctgctactaggtccgcggttcgtccttttttttattgcttatatttttaaattgtatatttttatttagattgttttttttttacagaagatctacatgaaccggaaggctttccaacattaattggttgagggaaaaaaattcacctgtgctgggaacatgaacctaaggcatttacaaactttgtaagaagtgcagcagatttacacggaatgccgaatctgtctagcaaaattcaaacccgacatatttcagcgggatataaggagcactggatcagcctgcacaaaagccaatagggactttttaatggctccactggcgggtgcatgaaggccaagcttggctcgcaggtcggtgaccaca

SEQ ID NO: 3156 - DNA, 488 bp, Glycine max
  Clone ID: jC-gmfl02220054b08a1
ctcgagccgcgcttccccaccgtgcttttcagattggtcaagctccttttactccccgcaacaaaacaccacctagttgcagattttttcttcttcaaaaatttgtttatctttatcctaatttgatttggctttaaggttttccattatagcggttttctttttattatttgttgttattattatgacgtaatttcaatccttttcataatgactccataatggcgattagtgaagtttctgagctgtgtgagcgatttagtataaagtatacgatgcatcgtttctggttctggatgttcatgttcgagcaaagatcttttgtgtgtgtacggttactgctttgacgttttggattttcagtcagtcaaatctcggaagttctcagtgaagctcttcagcttagttagggttcggaagatacttattgaaaagaaaaatcactctatatagggattagtattttccctggatccaggctagttttc

SEQ ID NO: 3157 - DNA, 460 bp, Glycine max
  Clone ID: jC-gmfl02220054b08d1
ataatcgacaacaactcctcgatgtccatctcgggtcattactgcattcgccttttcaacaattcccctttctgggtaaaagacgacacaccccagaggccaaaacataacaatagaagcaagcaaataactaaaatatctcagtcctgaaacaagaattaacaaaaacaactacaaaggaacgacaattagcatgggagtcttggttgttcttcaagcgagtgtaggattctctgcaggagaagtcctacacacgatatctttaagagctggacgaagctccttgctacagaactggttatactccaaggtgtcaccgttgtccttcttaacctacaccaccaaaaacgacggcgtcacggcgtacaagtccgcagcaatagcgagtttaccttttcgccctttgtcttgaccctgcaacctaaccttagtctagctcttcttcacgtggaacttcacc

SEQ ID NO: 3158 - DNA, 493 bp, Glycine max
  Clone ID: jC-gmfl02220054b09a1
ttttcttacaacttattcaccactcgttcccgttactccccagcaaccataattattttttttgacaagcagctcaagaaaaatctgcaaagaataaaacaagaggaggaaatgcaacttacttgttgatataaacttcagacagagcgagttgttgtaaagctagccttgttgcagccatggccacccacgcggctctagcttctacaaggatccccactaacaccaagttcccatccaaggcttcacactctttcccaacccaatgcgcctcaaagagacttgaggtgacagaattctctgggctaagatccacttcatgtgtgacatatgctaacgatgctagagaatcttccttttttgatcttgtagcttcccaactcactcccaagaccaatggatcatcaactcctgtgaggggagagacagtggccaagttgaaggtggcaatcaatggtttccgacgcattggtagaaacttccttcgctgctg

SEQ ID NO: 3159 - DNA, 543 bp, Glycine max
  Clone ID: jC-gmfl02220054b09d1
gcggtcgtcctttttttttttttttttttttgagcataaatcggaaaaaaattttattgacactttattttctccctttacaaactacaaaatttagaactatactgaaaaaaagagaaaaaatacatttaaaatctggcatcctcgaagccatgcaagtcactgactctgttcatagactttctcataatagccactttagccagtctctcagctactctccaagccgacatcggcgtaagtggctcccccttttcatcgaagcaattattattacaactacttcttaacttttggctcctcagctcggcttgttcggattcgagccagcgcaagcactcatcaccctgttcgcggctcacagatgctcgagccgaggatagcaactcaagcgcgccagacacgtcgttacgagccatcaaccttctcgactcggctacggcgcgagcgctgacctggcaacgtcttaaccgttcgattctggggtcgcatgatcgaaccgtgcggtgtcgcggaacgttaactcacgatccttggaaatac

SEQ ID NO: 3160 - DNA, 500 bp, Glycine max
  Clone ID: jC-gmfl02220054b10a1
gaaatctgaagctaacttaagggaaatgagatggccaatggcaacactagtcatcgcttcaagctcttgcttttccttctaactctgcactcttcattcgctgagattttcttcgaagagagattcgaagatggatggaagagccgttgggtgctatccgattggaaaaggagtgaaggaaaagcgggtaccttcaagcacacagcaggaaaatggtctggggatcctgatgacaaaggtcttcagacatataatgacgccaagcattttgccatatctgcaaagatacccgagctaagcaacaaggacagaaccctggtgctgcagtattctattaggtttgagcaggacattgaatgcggtggcggttacatcaaacttctttctggttatgtcaatcagaagaagtttggtggtgataccccttatagtttgatgtttggaccagatatatgtggttcacagacaaagaagcttcatcttatactatcataccaggg

SEQ ID NO: 3161 - DNA, 449 bp, Glycine max
  Clone ID: jC-gmfl02220054b10d1
acagaaatgtaacttgatattcaagtgcctcttggaccctgtagatggaaggaaggagattcagggtaccgtgcttcaattcaaatccttatacatcctttaaaaaaaatgcaaaaactaaaatcaataaacacttttttttgctcggcaaaataaataaacactgactaatgagagcatcaaacctcaggagtacaatacaaataatgacccggataaaccatttgtcactcaatccttgaatctctgaagtaaacaccaaatcaggtcctcttcctagcaattacacagatacaacacgagccttgtacatgattatatacgccatgtgccaatcaccttctccggatagtctagttatgtcttcttctagttttggtttgggattggcatcgtcaaactctatccatttgccattttcttgctagacccaaccaacataatgtcct

SEQ ID NO: 3162 - DNA, 332 bp, Glycine max
  Clone ID: jC-gmfl02220054b11a1
ctgaagcagaagggttcctcactctcttcatctgattgaacaaaatgtacacctcgaggaagaaaattcacaaggataaggatgccgagcccactgaatttgaggagacagttggacagtacttgttcgacttggagaacaccaatcaggatctgaaaagtgacttgaaagatctctacataaaccaagctattcaaatggatgtggctggtaatcgcaaggctgtagtcatctatgtgcctttcagattgaggaaggcattccgcaagattcatcttcgacttgtcagagagttggagaagaagtttagtgggaaggatgttgtcttgatt

SEQ ID NO: 3163 - DNA, 432 bp, Glycine max
  Clone ID: jC-gmfl02220054b12a1
cacgtggcagagcctcttctgaattgctggcccttttccatgctgagagagaaggcactagaagtcgcaattgatcatattcgttatgaggacgagaacagtggatacctttgtattggtagtgtagagaaggtgttgtgtttgattgcacgttgggtcgaagatccaaactcagaggcatacaagcttcatttagccagaatccctgattacttttggcttgcagaagatggattgaaaatccagagtttgggttctcaactgtgggatgctacattagctatacaagcaataatatcatgtgatttgagtgaagagtatggacctacacttcgtaaagcacaccacttttgtaaggcttcccaagtgcttgaaaattcatcaagtaatttcaaagcaatgcatcgacacatatccaaaggagcatggaca

SEQ ID NO: 3164 - DNA, 489 bp, Glycine max
  Clone ID: jC-gmfl02220054c01a1
ccaagattaatctgaacaagttgcgtgtccctgctgtcactgctctctgagcaaaaccagaagaacacatcaatccaaccctgccaaaatcaatccccagataccattccccttcccataacaaagacaacccaatcattgtttgttcacatccgaatccacaaaatactgttataattattctgattcacgaaaaacaggaaaacccgaatctctctctttgttcctctcggggtcacgaaaatgggcacagagacctcatcggtggatatttctgaacccttgctcgtggattctcacgggaacgaggaaaaggaggagtatttgcgcgaggaggttccggaatggaaggagcagataacaataagagggttggtggtgagtgctgtgttggggaccttgttctgcatcatcacccacaagctgaacctcaccgttgggatcattccttctcttaatgtggctgctggcttggtggggttcttcttt

SEQ ID NO: 3165 - DNA, 381 bp, Glycine max
  Clone ID: jC-gmfl02220054c01d1
gaaaaaaaaaaacattttttaagtcggccaaggaaattattgtcccccacaaaacgtgttctcaacccccggggggccccttggtttttcaaaaaaggaaaaattgctccaaccaaaaagggggcccccaaaccaaaggcccaaagaactggggcccaaaaaatatttccccccattggggttccgggattaagggtctttgtataaaaaaaggggccccccaaaattttgggggggggtggccttaaaaacccaaattgaaggtcaccccccgggggaaaaccccccggggttattggggaaaagggaaaaaaattgggcccaaaaggtattcaaaaccttacataaaaaaagggcccttttggggaaacccccgggggg

SEQ ID NO: 3166 - DNA, 498 bp, Glycine max
  Clone ID: jC-gmfl02220054c02a1
tggtggtgaaattgcctggccaacccaaggttgggtttaagcaatttgctggatatgttgatgtagatgccaagcatggaaggagcctcttctactattttgtggaggctgagcaagaccctcacaagaagcccctcacactttggctcaatggaggtcctggatgttcctccattggaggaggtgcttttactgaattgggacccttttatcctaaaggtgatggacgtggtctccgaagaaattcgatgtcttggaataaagcatccaaccttctttttgtggagtctccagctggagttggttggtcatactcaaatacaacttcagattataattctggagatgcctccactgccaatgatatgtatttgttcatgctgaaatggtacgagaagttttcatcttatataacaagggagctgttccttactggagaaagctatgcaggacactatataccccaatttaactaatgttttattggaccataatgct

SEQ ID NO: 3167 - DNA, 471 bp, Glycine max
  Clone ID: jC-gmfl02220054c02d1
agctacctgctcgtaggccgccgcgtcgtctttttttttttttttttttttttttttttttttggtttctaatttcacggttgtgttaccattattagttaataatttgttaaacacttgaaggaccaaagtctactacataaccaaactttgaccccaaagatgcatatctaaagccccacactatgttgtgctatcctccaattgatctgatatataatccccagcaaccctttacctccacctttttaattacacctcatatatcaacaaagattcaaaatcttggctttcacacacaacaagatccaacctttagatcaaggactacttggagggggtatgaaacattaggtgaagaatctgccactactgcactttagcatgaggggttcaagaggagcacttgttttgccttctcatggatccaattcttcaagaaaaatggctccggattccaactttggggac

SEQ ID NO: 3168 - DNA, 494 bp, Glycine max
  Clone ID: jC-gmfl02220054c03a1
tgcacgttttgcaatcgaactcgacaatggccaacagcaacctccctcgaagaatcatcaaggaaacgcagcgtttgctcagtgagccagcacctggtattagtgcctccccctctgaagagaatatgcgatatttcaatgtgatgatccttgggcctacccagtcgccttatgaaggaggcgttttcaagttagaactatttttgccagaagaatatccaatggctgctccaaaggtacatatttactattattctttctaatggcaccatggcattcttttggtgttaagtttctaccgaattcttatacaccaaaaagaaatgaaactaagtctgtaaagtgtttgctggataattgcttagagtaaactacacaaacctcccccggggtttaaggaaattagagatgtctcccctcaatttttaaaagctacacaaacctcccttgaggtttaaggaaattatagatgtctcccctcggtttttaaaata

SEQ ID NO: 3169 - DNA, 523 bp, Glycine max
  Clone ID: jC-gmfl02220054c03d1
gacattcatagatcagaatatcagacttacatacgggtgaacatgatacgggtgaacatgataggagcacaatactatacataaaaactgacacaacaccctattagatatgaaaaactagatagcatccaattacaaaacttaagcatacataagaaaattatgcacacataagtttgcacgtttatttgtcaatgagaggtacgttggaaggaaagaaaaccacacaccacacaccacacactctcattagatagagatgctgttgggaattcctctgaaagtaaggccttccccactggtaggaagaagcacagtgtagggcatctgcgccggtccattacggttcctaaggcttgaattcttgttcctccctgagattttgtcctcaatttccttcagcttgtttccaaacttcttaaaggcttgaattgcctttgtgtcatcagtccaatttggattgtccctctgtccaaggtagacctcatcagaagcatgccttgacaatatctctatcactgta

SEQ ID NO: 3170 - DNA, 522 bp, Glycine max
  Clone ID: jC-gmfl02220054c04a1
accgcatcagaaagcttgctgacaactgcacaggtctccaaggttttctggttttcaatgctgtgggtgggggaactggctctggacttggttcccttttgctggaacgcctttcagtggactatggcaagaagtccaagcttggtttcactgtctatccttcaccccaagtttcgacctctgttgttgagccttacaacagtgtcctctccactcattctcttcttgagcacactgatgtggctgtcctgctcgacaatgaagccatttatgacatctgcaggcgttcactggacattgagaggccaacctacaccaaccttaatcgtttagtttctcaggtgatatcatcactgactgcttccctgaggtttgatggagccttgaatgttgatgtcaatgaattccagaccaaccttgtgccataccccaggattcattttatgctttcatcttatgctcctgtaatttcagccgagaaggctcaccatgagcagctatcagttggtgaaatcaccaaca

SEQ ID NO: 3171 - DNA, 415 bp, Glycine max
  Clone ID: jC-gmfl02220054c04d1
cccaagtgaaaacaattgggctgggcatttacaatcaaggtaaaaaggtacaccacagggtaagatatttgaaatcctggggaaaaatggtggggcgacaaataaatggacccaattgttatgtgaatccactggctgggaaaacaaattgtttgggggaccaaaaccttggggcccccctttttttggttcgaaaaaacgagctggtaaaactgtacccggaaccccttgccaaggaggccccaaacgtttttgccccctgcgaagggcccttaggaggggcgaccttcctgtcccactgaaaggctggggttaatcccaactggggggaacccttggcccccaacggggccaaaagggtttccaggggaagaattttgggaaccacgggaaactggttttcaaaggggggtgg

SEQ ID NO: 3172 - DNA, 588 bp, Glycine max
  unsure (1)..(588): unsure at all n locations
  Clone ID: jC-gmfl02220054c05a1
atcaattccgaataaaaattaggtttttctcttcgtctttcattttcttattcttcaccaaaccgataagcaggtgagactaatccatcatccaaacctttccgatccaatgacctctaaactaattgcttccaatctccgtcaccaaatcacaaaaatcagctcaaaaccttcgccgccagcttttttccacggcggcggcggtggcggtgcctgaacacgatgggaacaactccaactcgtcgggaatgacgatgaagggcgttcgaatctccggaagacccctttacctggacgtgcaggcaacatctccggtggacccgcgcgtgctcgacgcgatgctccctttctacctctctcgctacggaaaccctcactcccgcacccacttctacggntgggaatccgacgaggccgtggaacacgcgcgcgctcaggtagcgtccctcatcggcgcgtcccccaaggagatagtcttcacctccggcgccaccgagtccaataacatcttcgtcaagggcgtcatgcatttctacaaggacaagaagcgccacgtcataaccacgcaaacggagcacaaagtgcgtc

SEQ ID NO: 3173 - DNA, 541 bp, Glycine max
  Clone ID: jC-gmfl02220054c05d1
cagaagagctcgacaacggggactcaacgaaatcccaatcacttaagattaaagtagcaactcgtcaccccaagaaacaattattttccttcgatttttctctttgtgaaaccaaatttaataatttattctttaatctaggaaggaagcaaacattggttgttacattttctattgtagaacatccaacatatatgctcaacacttggctttctcatagacgtgccattgactttggagtagatgaagcaggtgcactcaagggaatgcctttgagtgctctttcttccaaataccttgagggtttatagaagttaccatataattgtgcccatttttttaggctggtatatatatgattggccccaaccaagtctgcccagaaaacaatgccaccccggtaatttgggaagctcattccaagaacagatgcaatgtcaaggtctgatgctcgaataacaactccatcttctagaacacggcatgcctcattaactactgggaagagtatcatcttcacgatctcttggtcagtaacaga

SEQ ID NO: 3174 - DNA, 462 bp, Glycine max
  Clone ID: jC-gmfl02220054c06a1
aacccccaacgccacgccactgtcactttctttctctcacaaatcacaatgtgctccgataactacaatctctcaattccccattaattaaaatcaaaatcaaaatctaatctgggtttctcccatcagaggacaaagcttccgactttgcgggattcgttcgtatttgtttcagtgctgtgatggggaaggtcgcggtgggagctgccgttgtctgcgccgccgccgtatgcgctgcggcggcgctggtggtgcgccaccgcatgattagttcccggaagtggagtcgcgccatggcgatactgaaggagtttgaggagaagtgtggcaccccaattgtgaagctaagacaagtggctgatgccatggatgttgagatgcacgcgggtctcgcatctgaaggtggtagcaagctcaatatgttgatcagttttgtcgataatctcccaactggggatgagg

SEQ ID NO: 3175 - DNA, 414 bp, Glycine max
  Clone ID: jC-gmfl02220054c06d1
cttcgttctttttttttttttttttttttttttttttttttttttttttacaaaaatggactattaaaaaaaatagtcattaattccttcatagatggatgtcttctataacgatttataaacctacattaataaaggaacagtaaaaaggaattctaatcagcggatacaaatttctacagcttattagctaattacacctttagccttttttcactggggcataatacgtatcccccaaccaaaaaaataccaagggtgtgggggaactcatctttggtggtcttttgcatcttctaatgaaagctaaaagcctaattgtaataaccctatccatcaacacgctgcaaaatggttggcaacgggcctgaataattaaggcttacgggccacggggaatgatgccttggggga

SEQ ID NO: 3176 - DNA, 501 bp, Glycine max
  Clone ID: jC-gmfl02220054c07a1
ggcactgttcggagatggcgccgcagcgttgatcatcggatcagaccccgacccagcagtggagcggccgatattcgagatgatatcggccgcccagacaatcctgcccgactctgacggtgctatagatgggcaccttcgggaggtgggactcacgttccacctcttgaaagatgtgcccgggatcatctcgaagaacattgagaagagtcttgttgaagcttttgagcccatcgggatcagcgactggaactctatcttctggatcgcacatcccggtggtcccgcgatcctcgatcaagtcgaggagaagctccggctcaagccggagaaactccaatccacccggcatgtgctgagtgagtacggaaacatgtcaagcgcgtgtgttttgttcattctggatgaaatgaggaagaagtctaaggaggaagggaagagcaccactggagaagggttagagtggggggtgctattcggattcgggccgggtctaacccg

SEQ ID NO: 3177 - DNA, 380 bp, Glycine max
  Clone ID: jC-gmfl02220054c07d1
tgaagttgctgatcagaattattcccggagcgacaatgctcactggccgcggtcgcccttttttttgaagtttcaatattttactaatatatgctaatatatgctaatctaatatttatttatatctatctacctatatctataaaagaataggtagatggatctcgctgtttacttggggggatctattgagccggaatacatgtgcggcaagctaaacgaaaaggaccattttgtaaaaaactggtcaaggagggccaaacatggattcacctatataagccgaagctccagaaccacaagggacagcttgaataccgcttgtgaataatccaaggaacatgacaggtacacgaacctgcaaaggtactgatgaaaca

SEQ ID NO: 3178 - DNA, 524 bp, Glycine max
  Clone ID: jC-gmfl02220054c08a1
gacaaccgtaagaaccttgctgctgtaagggaggaaataccacatgcattaagagcagctcctaacgccgcctgtttagttttagattctctgaaggggttttactgtacagaagtgtcaaatcaggacgtaaagaaggatgctaacttactgggtgttcgccgaacatgtatcatgctgatggaatgtctatgtgatttcctgagcaactcaggttgtgtttctaatgtaatttcagaagatatcaaggaccgggctaaggcagttgctgaagaatggaaacccagattggatgctcttgacatcgatgctagcaatgtgaattccttggaggctcatgcatttttgcaacttctagccagttttggtattgcctctggttttaatgaggaggagttatctaggctaattccaatggtatctcgacgtcgccaaactgctgatttatgtcgttgccttgggtttcagagaagatgcctggtgtcattgaagttttggtgaatagcgggcggcacattgatgct

SEQ ID NO: 3179 - DNA, 323 bp, Glycine max
  Clone ID: jC-gmfl02220054c08d1
gcttaaaggaaatcatatgcatttctcattaatactaatgaaactaaactgataatagcgatatgaaaaggtttgcatctctattgttgaaatgttattacattataaacttttcaatatgagctaataattattgctacatatttccaccttatgcagaatgagatgagcaccatgttggggtcctagagtcataacccatgttggagcaccattataggtggtagaaagttcaaacgagaaacgctgtatgaacattgacaaagcaacctttgctgtctaaacagctacgtcatgtccgatgcatttactaagaccccctc

SEQ ID NO: 3180 - DNA, 470 bp, Glycine max
  Clone ID: jC-gmfl02220054c09a1
cctaaacataaactgtttttcccaaatccccttcccaattttcaccaaaacctaagactccgaaaccaatcttcgatcatggccgccgaatcacaacctcaactaatcgaagagagaagagaggagcaagaactttaagtcctggtatatgagccaattcgcgaccatccatgccctgatgcgctgtgccatcctctactcctacgccaaggagcgcgcgggtcctctgaagcccggcgccaacaccgtcgaggaggccgtgaataccgtcgtggctccggtctacgacaggttccaccttgtccccggcgaggtccttaaatactccgatcgtatggtcgccgaattggaccgccacgttcccttcaacgtgaagtaggtcttcttccaggcccgctccgtattctacgaagtccgccgtgatggagtcttccgctacaccaaaatcgtttacttgaagtatgagccca

SEQ ID NO: 3181 - DNA, 514 bp, Glycine max
  unsure (1)..(514): unsure at all n locations
  Clone ID: jC-gmfl02220054c09d1
ctggtgtgatgtctagnagattaattctccgtgtcgacgagtctcacatactcagcgtaggtcggcggtcgccctttttttttttttttgcacgcaaacaaagtgatttattaatccattcgatgttcaaatgtgtatagaaacatttaaggtctaaatgcccaaatggtctctaacagaagctaatatagacaactatgaaataacaataacgtatctggcaaaccagacttattttcacagggacagactattcaagacacttatggaaactactctttctcatcttcctcattccagcactttaaagttgatctaagggaaccacagtcactagtcttaccgaattcttggtcgacaacagaaccagccattgcaagcccttcgtggctgctctcttacgacagtatgccttagcatccagaaagcgggtctgatcaatcgacttgcttgcaccatccacatggactgcaccagtaaactcagatgggaggaaacatgcctaatccctctg

SEQ ID NO: 3182 - DNA, 494 bp, Glycine max
  Clone ID: jC-gmfl02220054c10a1
ctcaaattcgatttgttccaaattttcttcacaaaatgtctggtcgtgggaaaggtggcaagggtttgggaaagggaggtgccaagaggcacagaaaagttcttcgtgataacattcaaggtatcacgaaacctgcgattcgtaggttagcgagaagaggtggcgttaagaggatcagtggtttgatctatgaggaaaccagaggagttctgaagattttcttggagaacgtgattcgagatgctgtgacctacaccgagcacgctaggaggaagacggtgactgccatggatgtggtttatgcgctcaagaggcagggaaggaccctctatggtttcggaggctgaatgattgattcttagtattattaaattatgttgcaggatataatattatgcctgttcttctgaaattcggtgtgatgtttagtttaaattcgttctgtaacatatgaatctttaaaggttctgttcggacagaaaatgtactacttt

SEQ ID NO: 3183 - DNA, 548 bp, Glycine max
  Clone ID: jC-gmfl02220054c10d1
tggtcggcgttcgtccttttttttttttttttaaatgaaatccatagttacattctcaacgagaagacattatttaattacattggaaccaacagtttgattacaagtactaacaaaatgaggcaaaaagaaaacaaacatttttttcctgataaagctaaagctatagccatttttgaagcctggacaaaaagtgcaaatactaaatactaattactaaaaaaacatatgacacaaacacacacatgaacatggaagaaaacttagtatgcccaggtccaaagggcgtgatcttcctcagaaaatccaaaattacaagaactttcaggcgggtcggagtaatccacatcttcttcaagtttgggaaagaggtacgaagggtagagacttttgctgaggttatcttcttcatcttgtgacatatccgattgatcatgctcaaacacataagaagaatcaccatgctctagcagtgcggagttaactccatcggtgtaatgtggactatctgaatccaaaatatcactcctggctgaactgatatcttc

SEQ ID NO: 3184 - DNA, 438 bp, Glycine max
  Clone ID: jC-gmfl02220054c11a1
ctcaacccacaagaatcccttcctttctggctttctctcgctaaaactatcatgtactacaacgcggctcccgaccttcccatatccaacccccaaaccaccgacgcaggcggcggcgccatcgaggctccagcgaacaacccggccttccgcgccttcatcaacaacctctccgaggacctccgacacggtctagaccagcgccgtccgtggtcggagctcggggaccgatccgcgttcgcgaagcccgagtccttcttcgaagccaccctccgcgtacgcaagaacttctgctacttccgcgtcaactactacgccgacgtttcactcagtctcgcagtctctctcgtcaccaatccttgtgctctgatcctcctcgacggcctcctcgcctactggaccttgctgtacctgttacgtccgtcagatgaaccactc

SEQ ID NO: 3185 - DNA, 423 bp, Glycine max
  Clone ID: jC-gmfl02220054c12a1
gttataattagatgatataaaattattttaaatcaggatttattttttcttgtaatttccataaaccattctatagtacaattatgatattgataatttttaattttatgtgatgtagagagtaatagagattataacagtacgggagtaataattaaacttttccattttggctttgtaccatataaaatccccacacccgcaaacattacaacctgtttgtgtcggtcacactcgtcacgagttagagatattttcccaagaagaaaaaaaacactctccatttgtgcttgtgttttttcccgggaaaactgagttcaaaatgatgaagaagaaaccgagcgcgagagagaattcgtcgtcgtcgtcgtccacggcggccagagaagaagagagcgaatgggaaatgaggcccggagggat

SEQ ID NO: 3186 - DNA, 382 bp, Glycine max
  Clone ID: jC-gmfl02220054d01a1
aattacaggaatcggctgcttagacctcatccatgcacaaggctttggccgcatacgaagatgactacgtctttcctgcatcgacgctgatatatcactgtgacgagactgatcggagacacctgtccctactgccgagtccactgaggcatgattgggagccacatacgttatcccttaggagaaagcgcttttaagtattgataccgtttctacgttgcaggatcagacttactctccgtctcatgatacagacatgctgcaatccatgcttgcaactagggatcttgactttacagatcttaagtgggaactgccactactcaatagaatctgtgatgctctagactgatccacagctcaatggtttgagctcgcctat

SEQ ID NO: 3187 - DNA, 470 bp, Glycine max
  Clone ID: jC-gmfl02220054d01d1
cacatccacacatttatagaacagaaggaacacgtttccacaaagtacttcatgaataattcttcatttttagatagttacatggactaagtttgagcttaaaacatcgatttgcaaagtttattgcgccaaagcccttgtgttgtagacaaaaagtgcaccaccagcaagaagaccaagtagagtcacagcccaaatagccaagccagtcgtaccgccagcgtaaacatcaccggttggaaaccagtccttggggttctaaataggactgtaaccttcgacattagcaccgtatttgtttacaaactggtaaacgccttttccctttcctttcctgccagatgcataaactctttcctttaaagccttgccaccattaattccataaggctttgtaatcttgatctttttgccaccattggccacaactttgaatgaaaaggagttccttgaaagggagggaaggcctt

SEQ ID NO: 3188 - DNA, 531 bp, Glycine max
  Clone ID: jC-gmfl02220054d02a1
ctaattcagaagctttagtaaaagaaatagttgggcagacatctggttacatgcccagggatatatgtgctttaattgctgatgctggtgccaacttatttcccagaaacaatgctaaagtagacaaagatgtacatgatgatgtaggtagttcccttagttccaagatggcagaggacaacaatcacgggaaagtttcacctcagattactggaaaagaagacttgttgaatgctttggaacgatcaaagaaaagaaatgcatcagcattgggtactccaaaggttccgaatgtgaaatgggaggatgttggtgggcttgaagatgtcaaaaaatcaattctggatactgttcagttacctctcctgcataaagatctattttcatctggattacgtaagcgatctggtgttcttttgtatggtccccctggaactggcaaaacattattagcaaaagctgttgctacagagtgctccttaaattttcttagtgtgaaaggtcctgaactgatcaacatgtacattggag

SEQ ID NO: 3189 - DNA, 434 bp, Glycine max
  Clone ID: jC-gmfl02220054d02d1
cgaagtcgctggtccggaattagtcccggagctcctgctcactaggccgcggttcgccctttttttttttttttttttacttttgcattcgaatccatgagattcacagattaggattatcttcaaatgctatacggagacattaaaagagactcctgattagaatacgacagcgaggttataaagttaccaacgtgatccatcaatgatgctctacctgttcccgtagatcacagagatccatatgttcttgcatagctgccttgagaaggactggtggtttgccagctgactgttttggaacaagatctgggtccttcgacttgaggctcctacgtgtgtgcatgggctcgcaggtcctctggaaactcccttacgtgcccggggactcatgagtcaagataaccattcgttgcccgttttcttgggatcat

SEQ ID NO: 3190 - DNA, 483 bp, Glycine max
  Clone ID: jC-gmfl02220054d03a1
ctcattttcgttttacatgttttgagaaagtgtgtctctcagaaaattattaatgtttgatgaaaagtgagaatctggacaaatactactgaattaagttttgatgctccagaatggagtgttttagcttattactttttatggtcttgttctatctgctccaatccatgatatacataacaacaacaacaacaacaaccaagccttatcccactaggtgaggttggctacatggaccacacgacgccatatgatatgcataacccctgattggaatttatatatatgtttatatttatatttattttctctcggaacacttgtcttcctgattgcttgtgaagttgataaataagttgtgttttcccaggttggtagtggaggagtccagaaataagtttgctaaccacgaaaaagaacttgcatccttgtctaaaggatttccaaatttctcaggtggtgggtctaacatcccgaaaatag

SEQ ID NO: 3191 - DNA, 531 bp, Glycine max
  Clone ID: jC-gmfl02220054d03d1
ttcgtccttttttttttttttttttttaactcatcaaaaactgttttattttgccggtgcatcatattctcatgttcatatcaatgaaactcgacggctctaataactcaagtttaaatactggatcataaaatatgacataagtatacacggaactagaaatgacaaatttgcataaatgaactagctgcagcttacgcacttttgtcatacaactttgcctaaggcggtgaagttcaccctgtttagcaggctcttaattggtcaaagtgcaggaggcccacttaacaatggtgctgcttgctaatcaggctcaagcttctccaagatgtcattggcgaataaatgagccgtacaagttatttccttagaaataactggctcttctgccactgcaagctgtgatagcaaagactgcatgtgcgccattatgggcccaccagaatctttggcttgattttcacactgagtatcgtgttcaagctcttcacgttcttctggaaaggcttgatgggcatcatacggaccgga

SEQ ID NO: 3192 - DNA, 585 bp, Glycine max
  Clone ID: jC-gmfl02220054d04a1
ctcattttcgttttacatgttttgagaaagtgtgtctctcagaaaattattaatgtttgatgaaaagtgagaatctggacaaatactactgaattaagttttgatgctccagaatggagtgttttagcttattactttttatggtcttgttctatctgctccaatccatgatatacataacaacaacaacaacaacaaccaagccttatcccactaggtgaggttggctacatggaccacacgacgccatatgatatgcataacccctgattgtaatttatatatatgtttatatttatatttattttctcttgtaacacttgtcttcctgattgcttgtgaagttgataaataagttgtgttttcccaggttggtagtggaggagtccagaaataagtttgctaaccacgaaaaagaacttgcatccttgtctaaaggatttccaaatttctcaggtggtgggtctaacatcccgaaaatagaatccgaaattcaagaagagggtggatcaagggcaaacccacttaacacaaatcatcatgtagatggatatggaagagagaagacatggaaaaggacttgac

SEQ ID NO: 3193 - DNA, 461 bp, Glycine max
  Clone ID: jC-gmfl02220054d04d1
ctggatgctgctctgattcagaattgggtcgacgagcgtactgctcggtggccggccttcgtcctttttttttaacacgcgcatgtgatatttaattataagcatattggatacaagacaagattgttcattatactagcaagattatcttctaggagcattatccatttactaaaccttaggagatccaacatgatatgcacaactttttacaacttgacggcctatcaagcacagcatggtcacctttgagacacacttggctcatgcgactctgttgcgtgagacgcagactcaggcatactgtaatgcatgaagagtgaccggccgttgcctgcatcactggattgagtgtctacctgtagtgcagcactttgttgagacatggagactgggtacgacccaagtgatgtaactggttctgctacatcatatctatgtgggtgacagctgctagtcca

SEQ ID NO: 3194 - DNA, 527 bp, Glycine max
  Clone ID: jC-gmfl02220054d05a1
tgttggtgagtgtcactgctgaagagagaaccacgcagaactgacgcaatgggaagcacaagtttgcttcatctattacttggtgttgttttggctctgctgagtgtgtctcttgtggaaggagaagatgcatacaaatactacacgtggactgtgacatatggcattctttctccactaggtagtcctcagcaggtggttcttatcgatggtcagtttcctgggcctcaactagacttggtaactaatgaaaatgttgttctcaaccttgtaaacaagttagatgagccatttcttcttacttggaatggcatcaaacaaaggaaaaactcatggcaagatggggtattgggaaccaattgccccattcctccaaactcaaattacacatacaagtttcaggtcaaggatcagattggaacctacacatactttccatcgacttcactgcataaagcagctggagggtgtggaggactcaatgtctaccatagatctgtcatcccagtttcttatccgtaccctga

SEQ ID NO: 3195 - DNA, 408 bp, Glycine max
  Clone ID: jC-gmfl02220054d05d1
tccttaatttctgctgtttactgtatccataaggaggagcgcgttcacaattgacgtggagccccacctgttgtttgaaccaattgcaggggaaagcgctcttgactaacacactggactggctggtgatcagtgggcatggggcgaagaatagcattatcacactacatgaaaatacgggttcaaccggctcatctgtatcgacagcctttacactaaaatacacgccctactacagtgctgtgaaactgtcgatgtgcgtccctggatgactgaactatacgaaactgatacactgtagacattatcgagaaacacaaagtccgggcctgttattgggcacagagagcaaagccacatgccaactcgtgcagcatgcgttgatcttatagataacagtgtgagctc

SEQ ID NO: 3196 - DNA, 526 bp, Glycine max
  unsure (1)..(526): unsure at all n locations
  Clone ID: jC-gmfl02220054d06a1
gttgattgttgaagtttctcttctcttgctctgactccaatatttcctttaaaataaaaatagcattctcttccttcttccttcttccattcattcattcacattccacgctttcttcagagcctgcacttgttccaccctttaacataccactcctnctcttncacaattctcttatccgtaatctggcactcttcagagaagactttgtaagataaaaagagaaatggccttagaccagtattttgatgaggctgtgccccagttggattccttggaagataaatcgtctctcgaaacatggaaatgtggcagtgacgatattgcagattcggatagaaatgcctctggtggctttgattgcaacatatgcctggagtgtgtgcaagatccagtggtcactctctgtggccatctctactgctggccctgtatttacaaatggcttaatttacaaactgcctcttctgaanatgaagaagagaagcaaccatgtccagtctgcaaatcagaaatctcacagtcg

SEQ ID NO: 3197 - DNA, 585 bp, Glycine max
  Clone ID: jC-gmfl02220054d06d1
atctgactggtcggcggccgccctttttttttttttttgaaataaacaaacttcacattgatctcattaatgataaatccatgcaccaaaggaaacaactttaaacctagcttattaattactatacaataactcgtactgacgacaaactgttatattattcatgatcattatgatacataactattcttcacatgatacataatgaagtgttattaccattttttctaaaactaaaaatcttgattatgtaaattttagtctgcatgaccatacacatgtacgtagtggtatggaatgatcatgtatacggacacatcaatctgctttaaaatgtttttcaattgatcccagaagagtggaattaatataatcttgtggaccgtgagcaggtaagccaggaatcagcagaccaaccaacctgaaactaaagagaaaccatccttctctatagtgaggtccatttttgtacgctatggtaaagctccttattagttccaaaacagcattgaacatcatgggtatcacacaccatggcgagaaatagttcttattcggctcttcttcgagaactctgagttcata

SEQ ID NO: 3198 - DNA, 470 bp, Glycine max
  Clone ID: jC-gmfl02220054d07d1
tgggatatgcgctaattcagaacagggtcgacgagctacacatactcgcgtaggccggccttcgtcctttttttttttttttttttgtttctattttcattcgaattcattttatttatatattaatattatattcaaatgaaataaaaagatattaaaagatactaattataagaatttgaaagtgaaattaataagttattaaatgattaatcaatctttttctacctgtacctgtagtgaaaagagttccatctgttcttgaatagcttccttcaaaaggacttctgcttccccattgaatgtcttggcagaagatatgagttctttgaattgcggtttattcgtgtgaaagtaagcacgtaactcagcaggaaattcccttacctgtccaatttctaatgaatcatgataaccattcgtttcagtataaataggcataatactgaacttccacgggaagaggagct

SEQ ID NO: 3199 - DNA, 533 bp, Glycine max
  Clone ID: jC-gmfl02220054d08a1
aaaccctttcaacagttacaaatgtatgcaactccacaaaggctctctttttgcatgagacatcctctctcttaaaacctccctccttcagtcaaagctcccccaatcatactattcccatttcaccactcacacttttttcctctcgctcttataataacttcctcatatatacacttactctccttcaatagggtaacttttgaatttggtgccccccccaatctttttttttctctattttgttttggagtttggaacatatatagtattgaagcctaaaagattttgaagaaaaaagcgatgagaaactctgaagcaccaacacatggtggcatggagatagaagcaacacggccttcagctgggaatggttcaacaataaccctaccagggttgagtcctctgagtgagaccctttggagggaaaaggccaacactgcagagatcattggtgatgtctcagcaaggctcacatggaaggatctgactgtgatggtcactctcagcaacggtgagacacagaatgtttt

SEQ ID NO: 3200 - DNA, 417 bp, Glycine max
  Clone ID: jC-gmfl02220054d08d1
ctgactagctgaattagatcagtccacgagctcaatctcctagtccgcgcgtcgcccttttttttgttgtttttttttttttcttgttttttcttttttttttttttttctttgattttaatcacctttttggacgcaaggaaaagggccccaagttaatttaaggggaccctttaacccaaaatttataaggggagacctcccaaactcaaaaattttatagacgcatctcaaactggggcttttttcttttacccctaaacattgagaaacccaaaaagggtacccccccatcccagcaccactttttacgcttggatcaactcaacctccgagaaccgaaattttttcctggcacattcgacttgacccctattcaatagtgggaaaaagatccccttgaaatgaccccccttg

SEQ ID NO: 3201 - DNA, 505 bp, Glycine max
  Clone ID: jC-gmfl02220054d09a1
caaaaagctcttttccttctaaatttgattccttagttcagcattctattattatatatggcttcttcaccttcctcagaaaacaaaaacctagagggagtagctggtggtgccggagagaaacccattccacttggtgagaaccgtttggagaagcatgctgcattcttttgacttgaataaagatggtgtcatctacccatgggagacttttaaagggttgcgtgaaatcgggactggggttttgctgtccgttggaggtgctattttcatcaatgtgtttctcagtcagagtactcgtcccggaaagtttccatctatactttttccaattgaaattaaaaatatccaacgcggcaaacacggctgtgacactggagtctacgatactgaaggaaggtttgtacctccaaaatttgaagaaaattttaacaagcatgcacatacacatccaaatgctttgacatatgatgagttaacggagatgataaaggcaaatagagag

SEQ ID NO: 3202 - DNA, 423 bp, Glycine max
  Clone ID: jC-gmfl02220054d09d1
taggccggcggtcgccctttttttttaaatttttaaatttttttatacttattaactttattctgagcatctcgggccgctcgagggataaaggacttgaactgaacttagaagcatgaggaaacacacgcaatcaactgaatagtatgcatagaaacaagatgacgtaactatatatattagaacgaaaattcctaaccattttcaaaaggaaaaacatgaaattctaaggctccactgttgtgacctgctgccattccccatcaactgctgccttccacaatgtgacattgacggttccatcatccacagacaatatgattcctgttaatgaccatgagaccctccaaacacgggtgttgaaatcattcaaaacctttggttaccactgatcccactgtttcaccagggagcatattatca

SEQ ID NO: 3203 - DNA, 501 bp, Glycine max
  Clone ID: jC-gmfl02220054d10a1
cctaaacataaactgaatttcccaaatccccttcccaattttcaccaaaacctaatactcccaaaccaatcttcgatcatggccgccgaatcacaacctcaactaatcgaagagagaagagaggagcaagaacttaagttcctggaaattgggcaatttcgcgaccatccaggccctgatgcgctgcgccatcctctactcctacgccaaggagcgcgcgggtcctctgaagcccggcgtcaacaccgtcgaggaggccgtgaagaccgtcgtggctccggtctacgacaggttccacctcgtccccggcgaggtcctcaaatacgccgatcgcaaggtcgccgaattggaccgccacgttccctccaacgtgaagaaggtctcctcccaggcccgctccgtcgtctccgaagtccgtcgtgatggtgtctccgcctacgccaaaatcgtttacttgaagtatgagcccacggcggagcagtgtgccgtcttcgcatggag

SEQ ID NO: 3204 - DNA, 490 bp, Glycine max
  Clone ID: jC-gmfl02220054d10d1
tttctttcattttttgacattcaagatagataaattcttgacttaaaaaatgaaagaaagaaatctttacacattacttctgttagcagaaaattgaataagaaatttcaacttttctgatgaataccaatgaattccaatcgatcagtaattccttacagggtcaataccatcatcagcctaaatgaagatcgtattttgaattttacggctctccagaaaacagtagggaaggaactaagttagctgcaacatcagttatcctagcgtggcatggtaatgagctcaaatgtcatggtgtttccattatatcattttcacaaaatttccatgatccatcgtcttgcctcttcataacatacttaactttgtaagtgagataatagtttgggctcttctgctgtgaaccgtcaacaagttcagatgcttcctctaagagagcttcaatttctgccatgtcatctccatttccatctgatagaatgtcagc

SEQ ID NO: 3205 - DNA, 478 bp, Glycine max
  Clone ID: jC-gmfl02220054d11a1
ctccacattcctgccgttgtacaaatcgtcaatctcctcgttcgtatcgtgagtatcctcgaagtcagactcgaagtctcggatgtcgttgtcatcggtgtcctcatgcttcctcggcaactaaagcttcagaatcgcatccatgatcaacgggagcacctactcatcgccttgaagtagttctcgatctgcgctttcaggtatgccaagggaaattgaacggcaatggtgtaaaacaacgtcgttagaatgagaagaaagagattaattgatataactttgatgtccacgttcgcgatttggggaacagagagatgagaatgccaaagaggaagaaaaatgagaaatagtctacagagttgtggcattcagattcagattcaaattccaatttcaaaaacctaaactctgtagccaaaatttcaggattgtggcaaaatctcttgatcctgcatgttggtttctgctacttgctttt

SEQ ID NO: 3206 - DNA, 526 bp, Glycine max
  Clone ID: jC-gmfl02220054d12a1
acctaacgcagcatcgctattctcttcattccatggctttgcccaaccagcaaaccgtggattaccctagtttcaaactcgttatcgtcggcgatggtggcacaggaaagacaacctttgtgaaaaggcatctcaccggagaattcgagaagaaatatgagccaaccatcggtgtggaggttcacccattggattttttcacaaactgtggaaagattcgattttactgctgggatactgctggacaggagaaatttggtggcctcagagatggatactatatccatggacaatgtgctattatcatgtttgatgttactgcccggctaacatacaaaaatgttcccacctggcaccgtgatctttgcagggtctgtgagaacatcccaattgttctttgcggtaacaaggttgatgtcaagaacaggcaagttaaggcaaagcaggttacattccacaggaagaagaatttgagtactatgagatttcagctaagagcaacttcaactttgaaaagccattctta

SEQ ID NO: 3207 - DNA, 525 bp, Glycine max
  unsure (1)..(525): unsure at all n locations
  Clone ID: jC-gmfl02220054e01a1
gcggaaatggaacaagccttcaaataagaaaaaatcacaaaaggggaattatgcaaggatgttggcattggctgcacatgccttggcagagaataaacgcgaacctaaagatttgtggcaagaacccttcgttcctgcttcttcttggagaccttgtgctgatcagcggaattgggaacccaatggtatgtgtggttgaaatttaacaatgattcatattgtgtatgtttataagtgtgcaactacaaaaggaaaataaaagttcaagctgatactcatagcctgctctcttgtactgtactccaatagagggaaaaaatggatacattttggttactgcaaatggtgggatcaatcaacaacgagtagctgtttgtaatgctgtcgttgtggctcgtttactcaattcaactttagttatccccaaatttatgtacagtagtgtatggagagatgtgaggtaatgcccgtctattctctcgtctttnccattccaacttgcctatactcatatatntcctaatg

SEQ ID NO: 3208 - DNA, 501 bp, Glycine max
  unsure (1)..(501): unsure at all n locations
  Clone ID: jC-gmfl02220054e01d1
agttattcagttaaaccaatgattcgttattggagcagatagcaacaaccatctcatctgggaaaagccatctttttctcaacaatgtctttgtcatttgatccaatagcgcttcgttagataggaacagatttgataaatattgataactctcagatagagtattagaacggaaaaatccattagataatgaactattgattctaagccatctctggcaatgaatcaacaattcaaaatgcttttcttgcgtattcttgataaaccagtgtttatatatagatgtaggaagatctgtttgggaagtaagaagttcccttgacatctcttcatctgtaaagaattgtcgatgtgaaaacacagagacaaaaggctgatctttgaataggaaaaagagtggatccgcggggtcccaaatgaattggcttattcgaaaaaagccctgttctttggaagatctatctcgtgtctggtactgcatggntccaccctgcaagaact

SEQ ID NO: 3209 - DNA, 525 bp, Glycine max
  Clone ID: jC-gmfl02220054e02a1
cactgatctccattcccattccatggcttccactgaatcatcccctttcaagaaaattcagattcaaagggatgacactacatttgacgcatatgtggttggaaaagaggatgctcctggaattgttgtgattcaggagtggtggggtgtggattacgaaattaagaaccatgccgtgaagatttctcagcttggtagtgggtttaaagctcttattccagatttatacagaggaaaggttggtctggatgttgctgaagctcagcatttgatggatggtcttgattggcaaggtgctgtgaaggatattgctgcttcgggtaactggcttaaagcaaatggctcaaagaaggctggtgtaactggattttgtatgggaggtgctctctctattgccagttctgtcttggttcaagaggttgacgcttctgtagcattctatggagttcctgcttttaacttgctgaccctgacacgccaaggctcctgttcaggctcattttggagaggtggacaattttgttg

SEQ ID NO: 3210 - DNA, 523 bp, Glycine max
  Clone ID: jC-gmfl02220054e02d1
agaaacgaaataacatctgcataatcacacaagtgaagtgaagctacacaacaagttcattgcttcactcacatcataacccccatatttatttatttaggtaataacacactcgacagtaaagataaataacaacagaacataaaaaccagaagtacttatatctccctcacttcatcttcgttctcgtcctcactccagcagcatttcagaatagacctaggagatgcactaccatcgcagccttgaacaaatgtttggtacacaactgcaccacctactccaagctcttcagtgctcctctcaccacagtagtatcctttgatgtctaagggaaatttattaagcttctcaccatgcatgtcaatgtgcaaagcaacagaaaactctgctggacaaaagcaagctaaaatcctttccacaagttcacctagagccatgtcattaaagtcataaccaacagcttcaaaacttgcgtaactgaaaccatcttcaggagtgacatggatggtggatatagcac

SEQ ID NO: 3211 - DNA, 554 bp, Glycine max
  Clone ID: jC-gmfl02220054e03a1
taaatttttcttctctcccttctttctctctctctctctctgaccattctcttcttcttctttttcttctcctctctctctctcccctccgccatggctgaggataaggagatgtctacctctgtcatcaatgggaatgattccctaactggtcacatcatatctacaactattggaggcaaaaatggggaacccaaacagactattagctacatggcagaacgggttgtaggaactggatcatttggaatcgttttccaggcaaaatgcttggaaactggggaggcagtggcaattaaaaaggttttacaagacagaagatacaagaatcgtgaactgcagttaatgcgtgtgatggatcatccaaatgtgatctctttgaagcattgtttcttttcaactacaagtacagatgaactttttctcaatttggtgatggagtatgttccagagtccatgtatagagtcttaaagcactatagcaatgctaatcaaagaatgccaatcatctacgtaaaactttatttgtaccagattttcaggggggtggctta

SEQ ID NO: 3212 - DNA, 549 bp, Glycine max
  Clone ID: jC-gmfl02220054e03d1
cgctcgtagctgattatactcggtcgaccgagctcactactcctaggccgcccttctcctttttttttataaattacaacttctgtgctttgtccatcatgtgttatgactgcggtcgccttgttaacaattcccctttctgggttaaagacgtctcaccccataggccatttcatatcattatatcctgcctattactcaaatatctcattcctgaaacaagaattaacaacatcaactacaaaggatcgacaattagcatgggagtcttggttgtcctacaagccagtgtaagattctttgcaggagaagtcctgcacacgatatctttaagagctggacgaagctcctcgctacagaactggttatactccaaggagtcaccgttgtccttcttaacctgcaccaccaaaaacgactgcgtcacggcgtgcacgtgcgcagcaatagcgagtttaccttttcgccctatatcttgaccctgcaacctgaccttagttctgctcttcttgacgtcgaacttcaccggctttggcaaatgttccaatc

SEQ ID NO: 3213 - DNA, 556 bp, Glycine max
  Clone ID: jC-gmfl02220054e04a1
tggaatttgaaggttatcatcatcatttatagatattattattattataagaagttcatcagaaatattcaatggggagctttgaaactgaactgatgaatcttaaggccacagagttgaggttgggactgcccggctgtgatgaaactaatgagaaaagttcatccagtagtggatctgttgttagaagcaacaagagatcttcaccagaacccagtgtggaagagtccaggtgcaactctaatggttcttcagattctaccaccacaagtgatcatgatcaagacagtgcccaacctgaaaaggtacaagtagtggggtggccaccaattagatcttttaggaagaacagtctgcaacaacagaagaaggtggagcagctgcagggtgatggaggtggaatgtacgtgaaagtgagcatggctggtgcaccttacttgaggaagatagatctcaaggtttacaatagctacccagaactcctcgcagccttgcaaagtttgttcacgtgcacatttggtgaatattcagagagggaaggttatcatggatctga

SEQ ID NO: 3214 - DNA, 379 bp, Glycine max
  Clone ID: jC-gmfl02220054e04d1
ttcgtcctttttttttttttttttttttttttttttttttttttttttctttttatgtttgggtttttttattgtgtcacccaaattcaaccccttgtccgtaaattacaacaaactagactgggacaacccaaaaaaaaaccaaaataagggcccggaaaaaaagcaggcaataacagccggcgaaaaaacaaaaaggcccaaaacgatcgccccccccaacagaagaacagccagaaaggggaatggcaccccccctgtagcagcacaaaaaccgccgctgaagcgggggccacacccagagggacccccaaaaaaagcaacgccccaaagggcggaaccaaaaaaaactccccttacataaaagaaacgggggggg

SEQ ID NO: 3215 - DNA, 521 bp, Glycine max
  Clone ID: jC-gmfl02220054e05a1
attgttgcaccttcctcgtaaaagataactcccggtcggcgtgcatagccgccgattgaggcaaaaaaaaaacacaaaacacactgtagctcatcacagccaaacgcggcgtcaacgatgacgagcttctgaaattccaacttcgcccttcttctctgtgtatattcttttttatttatttattattatttctattattttttcggggaggttagctccatgcctagtcccaagagcagccgcagcggccagatcgagagtcaccggaggggaaggtcgtcgtccttccacggccagtgcgcgatgtctgtcggtcagctccaccgtccgaagacggtttccgacctcccgtcgctcagaagcctcgccggaacggcgccggcgcctatgccggagggattgcctagacagccgccgaagatgctgctgaaggtgacggtgctgagaagcctcgcgcccgtgcaggtgctgatgacgccgggatccaccgtccgcgacctgatagcggcggcggtgcggca

SEQ ID NO: 3216 - DNA, 540 bp, Glycine max
  Clone ID: jC-gmfl02220054e05d1
atatcaaatggtgtcaaggtattttacattattatccaaacatccattatcatttatttacactataaaatgcaccaaacttgtattcatgtataccccctcacttatgcctcacagatctttccatgtaaaacatttccttgtttcctcaacatgtatatgtagtccaatgtcaaacaacatttacattctccttagagaatcgagctcctaatgtaacaaaattatacttattctacatttgaaaagttaacaagtattggcaaggccaagttgtgatgcacctctcatctcaccttttgctgcctgaaacagtttctttcacagcaccaacagactccaaaaactggtcaagggatgatagggtcctcatgtcatgcggaggaaaatagctggctgactttgccatgattgatgagaagagaagggacagtgaatgccatgcatcattactttgccccaaaaactcattcaaaagtgcaaacgcagccctgaaatcagacctacttgcactcattggagcagcatagtgagcaggga

SEQ ID NO: 3217 - DNA, 495 bp, Glycine max
  Clone ID: jC-gmfl02220054e06a1
aaccacacacctcacctattagaagtaacaaaagaccctccctctcaaaagaataaacaagtataaaaaagaaggcacttccctcaaacagaaactaccctctatctctctcttttcaagccttaaatgagtaaaaaagagtgaagaaaggaaagaaaggagcaccatttttggtttgagaaacataattagcaagagagttcaaaatggggaagagagagtttaatggggtggtgttgatgatgctgtgtttgtgggtttgcggtgtcacagcctctgtgacttatgaccacaaagccattgtggttgatggcaagagaagaattttgatctctggctccattcattatcctagaagcacacctcaaatgtggccagaccttattcaaaaggccaaagatggaggccttgatgtcattcagacctatgtgttttggaatggccatgaaccttctcctggacaatactatttcgaagataggttcgacttggtta

SEQ ID NO: 3218 - DNA, 364 bp, Glycine max
  Clone ID: jC-gmfl02220054e06d1
ttgttttttttttttcctaacttagcatataacaacagaaaaatcctgaataacagggggcctatattcctagaccgtattttaactgatccgaaaaccaaatcaattacagaaaattggatacgaacaattgttaaaccgcatatacgtacatatctcaaatgctataatggggagtatccaagtatatgcaagatcagcgattgatcgctatgcatctaggaccgtcatagtgaatagcaccatgaggactctactactggggccagatgtaagatgatgctttcagatctcgccttgaacagcctgcggtccaagggatctagggccctaaatgatatacgcaggcaataggaataccgcc

SEQ ID NO: 3219 - DNA, 541 bp, Glycine max
  Clone ID: jC-gmfl02220054e07a1
gtgctgtgagaaatttatagagagagaaagagagatgtgtttggtttgtggaataattggtgacttgaatcgttgaatgagatattattgagtttgattcagaaatgaacaaagacgaaagcgataggaacgaaaagaaagcgcaagatattaagctttggggagttttcatcttcggattaatcggcgccaccgtcactgctttctccctgtccaggtcgcaggcaaaaggaggcagctctttccgaacagcatttcaagaagaagcatggaagaggtacaataagcgattgcaagaggagtatgaggaggagatggagagggtggaacgaataagacgtatgcaaagtgtgtttaatagagaaagggataagcatagaagaaactacgagagctggaaggaaaatggtgccggtgcacatcatcaacatttccaaagagatgattggtattggaaggctgaagcatcctttagagagcagtgggccaatcaacatactcaaagagggagcggaaactattcgttatcacatcactactc

SEQ ID NO: 3220 - DNA, 379 bp, Glycine max
  Clone ID: jC-gmfl02220054e07d1
agaaacaaaatgatcggatctagcattaaaaaaattgaacttcggatgcacaacatgcaggttcattagaaaataggagtaacacgtaagacttataaattctaattccttgagaaacatagcataaactctgctttcttgggcacaattcttcgttatctacattggctagaaaaatctgcagtgatctcacccagaatatgggttcccaccaggtggtcctcccatatccctgcttggcacatctctactgggagcattgttcgaccatcctgaattttgttgaaacccttccatgttctggtttgatggtggccctcccatgttccctgcgttagtattctgaggcacaccaccaccaggaccattgccaccacct

SEQ ID NO: 3221 - DNA, 465 bp, Glycine max
  Clone ID: jC-gmfl02220054e08a1
tacaataattatcaaacctaaccagtaaaaatggtgaccgtggaggaaatccgcaacgctcagcgttcccatggacccgccaccatcttggccttcggcaccgccacgccgtccaactgcgtctcccaagccgattaccctgactactactttcgcattaccaacagcgaacacatgactgatctcaaagaaaagttcaagcgcatgtgtgaaaagtccatgataaagaagcgatacatgcacctgacggaggagtttctgaaagagaacccgaacatgtgcgagtacatggcgccatcgctggacgtgagacaagacgtagtggtgatggaggtgccgaagctgggaaaacaagccgcaacgaaagcgattaaggagtggggtcaaccaaagtcaaagatcacacaccttgtgttctgcaccacttcaggcgtggacatgcccggagcagattaccagctcacg

SEQ ID NO: 3222 - DNA, 369 bp, Glycine max
  Clone ID: jC-gmfl02220054e08d1
aatccttaagaactacaactcctaggccaaacagttccctgaatttattatttctcgctgcatgaaagccacgatagacagtcaagtcaagcattttgatacatcaaaccccaaaataccagacaacactactcagctgagcagtttttatatcgtactttgacatgaaagtgtcataaaggccgataaaagcatatactgttaactcacacgaccttagggctaaagcccagggcattagttggacttaaacggggacacgttctagcaatttttgttaaaacactgctaattttcggaattggttcaaaatccaagagccttgtttctgagaaaccgcacatgtttgtgaaccagccaccaccacca

SEQ ID NO: 3223 - DNA, 461 bp, Glycine max
  Clone ID: jC-gmfl02220054e09a1
ctgggttactatactttggttacatgctcatagcatcctacgccttctttgtcgtaaccggaaccattggattttatgcgtgcttttggttcacaaggctcatctactcttcagtcaagattgattagttatagcaaccactggtttggattaatctaactcacttctgaaaggatgaagaccggtttgtgtaaggattccgaacatgacagtacctgaatttcaaaatccttacacaaaccggcggctcgagggagctcacctctattacaactgtcccagtggaaactattttgaatatcaggcttttgctattgggtctcgctctcaagctgcaaagacatatttggaacgcaggtttgagaattttgtgggctcttcacgagaagatctgatcaagatgcacttattgcaactagggagtccttgcaaggtgaaaaactcaggagttctgtgtgcac

SEQ ID NO: 3224 - DNA, 450 bp, Glycine max
  Clone ID: jC-gmfl02220054e09d1
taggtcggcggtcgccctttttttttttttttttttttttttttttttttttttacattctcaacgagaagacattatttaattacattggaaccaacagtttgatttcaagtactaacaaaatgagggaaaaagaaaacaaacatttttttcctgataaagctaaagctatagccatttttgaagcctggacaaaaagtgcaaattctaaatactaattactaaaaaaacatatgacacaaacacacacatgaacatggaagaaaacttagtatgcccaggtccaaagggcgtgatcttcctcagaaaatccaaaattacaagaactttcaggcgggtcggagtaatccacatcttcttcaagtttgggaaagaggtaccaagggtagagacttttgctgaggttatcttcttcatcttgtgacatatccgattgatcatgctcaaaca

SEQ ID NO: 3225 - DNA, 504 bp, Glycine max
  Clone ID: jC-gmfl02220054e10a1
ctgggttactatactttggctacatgctcatagcatcctacgccttctttgtcgtaaccggaaccattggattttatgcgtgcttttggctcacaaggctcatctactcttcagtcaagattgattagttatagcaaccactggtttggattaaatctaccaacactttctgaaaggatgaagaccggtttgtgttaggattccgaacatgacagtgcctgaatttcaaaatccttacacaaaccggcggctcgagggagctcacctctattacaactgttccagtggaaactattttgaatatcaggcttttgctatagggtctcgctctcaagctggatagacatatttggaacgcatgtttgagaattttgtgggctcttcacgagaagatctgatcaagatgcacctattgcaactagggagtccctgcaaggtgcaaaactcacgagtttctgtgtgcacacttgctgtggttggtgttggagagccattccacatttt

SEQ ID NO: 3226 - DNA, 403 bp, Glycine max
  Clone ID: jC-gmfl02220054e10d1
cttactaaagccaaataaaagaaacataagatgacgtacaatgctaaaagcatatgaatgtcgctaattagataccctgctcatttaaccatattcaaaccggcgaccaaattgatatttaacatacatactgatcggaaagtgctcgttcatttgatactgaaccacatttccagcccatcagtgatcttccaactttgtcaacaatctgagttcttgctcggcttctggccaatggacagtcacggctttactgcaacaaatttctatacactgcccattgacgatcttgcgttgaatgtctaacaacttcagccgttaaaatgcctactaccaacgcttttaaagtcaacgtaacatcatataatacacggggtataccctttcactcagctccacagga

SEQ ID NO: 3227 - DNA, 557 bp, Glycine max
  Clone ID: jC-gmfl02220054e11a1
cggctcgagcccggttttaagctgctttggaacacggtgaaatcatttcttgatcccaaaactacttcaaagataaatgttcttggaaacaagttccataacagattacttgaaattattgatgcaagcgagctgcctgaatttctaggtggtaattgcacttgtatggatcgaggtggttgtatgagatctgataaagggccatggcaggatccaaacattttaaagatggttcttagtggtgaagtacaatgttctagacaaatagtaacagtttctaatgatgaggggaccgtgatcgaatgtgataaggcatgttatccaatgccaataagaagtagtgatacatcaacagcagaatcaggatctgaagtcgaagatattacttctcccaagcaagtgggaattatacaaacccaaggttaactcctgtccacgaagaagcaagattgattggtagggctagtggtttctctgagtatgatgagtatgttcccatggttgacaaggcttgtgaactcgggtggaatgagaaacaagtaacaactcaaaactca

SEQ ID NO: 3228 - DNA, 603 bp, Glycine max
  Clone ID: jC-gmfl02220054e12a1
aaaagagtaaatattcgcccgcgataattttgattttattgaattttttttttatttttgccaattctatttattctttctaataataaaaaatattctaataactaataataaaaaggaaaataaagattcattagaatattataaaataacaaataatagaacaaaacaagattctttagttatatatgtaaaaaaaaatggtttatttataagaatacatattccattctatatcaaaacaaaatataaaaatttggaatagattctatgaaatctcaaaaaatcccgctattcaattattcattaaacatatgaatattagtgcatattattttatcgattagattaaatagattatctatatatatagatagatatctatttgaattgcttcattcgcgaggagccgtatgaggtgaaaatctcatgtacggttctgtaataaagatggaattgagaaacaaccatcaattataacccccaaagaaccagatttcgtaaacaacatagaggacgaatgaaaggaatatcctatcgagggaatcatatttgctttcgaagatatgctcttcaagcacttgagccagcttggataacatc

SEQ ID NO: 3229 - DNA, 362 bp, Glycine max
  Clone ID: jC-gmfl02220054f01a1
cttttgcagaattcaaagcagtggagaacaaacgaatggtgacgaatgaagaacagaggcacagtcccagagaccagaagatcctcccattagcagattacaatggccaaagcttgggaacgcttttcagcccaaggctcagatctggggctgctgtggctggttgggatgaagaggcactgatgttggccagccgtcatgcttgaagacacgccgtattgagatcccaagcaccagaagcgctacgtttggcactccagaaacccactaaagtcatcaaggagacgtacagctctgaggagtacacacgcaccaatccgtgtaggtcttgaacctgatgcagaagaaactacgagaaaaga

SEQ ID NO: 3230 - DNA, 502 bp, Glycine max
  Clone ID: jC-gmfl02220054f01d1
acaaggacaaacagttacctgaatttattatttctcgcagcatgaaagccacgatagacagtcaagtcaagcattatgatacatcagaccccaaaataccaacaacactactcagctgagcagttattatatcgtactttcacatgaaagtgtcataaaggcagataaaagcatatacattcaacacacacgaccataaggctcaagcacaaggcaatagtatgacttaaacggtgacacatttcagcaattattcttaaaacactgcagattttctgaatttgttcaaaatacaagagccttgttactgtagaaccacacattcttgtgaaccagccaccaccaccacagtagggtgttcgcttgtgctgactgcatcaacttcttttttgacactttgaacattgacatcctccaattcaccacagccaatggcttcaaaaacaagatcattgacttcttgaaacctctcttgagaaagggacacctcagcaagaagcct

SEQ ID NO: 3231 - DNA, 591 bp, Glycine max
  Clone ID: jC-gmfl02220054f02a1
ggcaagtgttcttcaaaaaattgctagtttgtactcacttgattgcttcatcttaaatgattctgtaagtgaggttatgcctggatggagtaatactgatgatggcagtattattatttatctgatttctgataagaaggagttcttacctaaattaagcagctataattggctggttgttgttctaaatgttggaggcgaaagcttatgtcacaatccaaatatacttcagattgaaaacttagaggagtttccattgaccatatgccacttaaataaaagatcaattggaaccaatgctgtgactgtgagttatacaatgaagccttctcgtgtcgaagattttgcaaagaggggtgcatttcctttgtgtcctactcaaaatgggttgatgtttgtgcctctcgcatccaagctgcctttatcatctcaattaaagggtgttgacatagttcttcacaagccactgatgaaatattatcaattgaagataataatattacttttacacagaacatccaagcattgcaaagatacttggatcagcaccaggatttttgtgtattgatccactgagaatgtttattctta

SEQ ID NO: 3232 - DNA, 542 bp, Glycine max
  Clone ID: jC-gmfl02220054f02d1
atgcgcaatatgttaaaagtgtatatatgtggtgacagggtaaataatttacaaaagtgtgacccggagatgttgtatggagagcactcaaaggatgcagttgctcacctttcacaatagttggtctcaagctaaagcatttacacactataattgaggtggagtggattcccattgataaatgtagatgtcagctcagctcccatccaaattgttggtttcttgagttttgcttaattacgatcagttgaagtcgaagtactcggacccgatatcacgatgacaatgatagatcaggaggggacggtatgtatgttgaattgatatagaagccattactgattgaaagacaaaggtttactaactcgtcctgcaaatcaaggatgctgctataacttcgagtgttgcctccaagggcacccaccatcaaaagcatgttctaacacatcttccactcgtttagcaagcaggatctccatattggatagcacagacgatggtacttcaaccaagtccttcaagttcctttcaggtagaataac

SEQ ID NO: 3233 - DNA, 551 bp, Glycine max
  Clone ID: jC-gmfl02220054f03a1
tggaatttgaaggttatcatcatcatttatagatattattattattataagaagttcatcagaaatattcaatggggagctttgaaactgaactgatgaatcttaaggccacagagttgaggttgggactgcccggctgtgatgaaactaatgagaaaagttcatccagtagtggatctgttgttagaagcaacaagagatcttcaccagaacccagtgtggaagagtccaggtgcaactctaatggttcttcagattctaccaccacaagtgatcatgatcaagacagtgcccaacctgaaaaggtacaagtagtggggtggccaccaattatatcttttaggaagaacagtctgcaacaacagaagaaggtggagcatctgcagggtgatggaggtggaatgcacgtgaaagtgagcatggctggtgcaccttacttgaggaagatagatctgaggtttacaatagctacccagaactcctcgcaggcttgcaaagtttgttacgtgcacatttggtgaatattcagagagggaagggttcaatggatc

SEQ ID NO: 3234 - DNA, 507 bp, Glycine max
  Clone ID: jC-gmfl02220054f03d1
aggaaccaaaatgctggaaaaacttaattattttgcatcacattcttatataacagtatatctgagtacagaacaaaccattcaccattatggctatgataatctttccttagcaaacctattataaaacaagggtgaacatatgtgaattgtggaaggcttgtacaatatagtccttgagaagcaaggtcaacctgtattcttcatccctgcagcaatcccatttatggtgataagcaaagcatctctgatcttacggttgtcatcatcacgtcttaacctcttgagtatctccacctgcaacatgttcaagggattaaggaagggaagtctattctcaattagcctcctcaagctcctattattctgctgaagtttctcgtgcccactaataaccatgacaaacttttcagctgtcatgagctcacttcttagttcatggccaagctcttgcctctcctttgacacaaggacttcatcatagtgctcggctataggaatgtcagc

SEQ ID NO: 3235 - DNA, 494 bp, Glycine max
  Clone ID: jC-gmfl02220054f04a1
ctccaaacacaccaattgcatttgcattaccattcacaatggcaatctcctccacttccaactacctcattcccaccaaatctctaatcccccaatcccaccccctcattgccaacaccaggcccgccctccggcccaagcctggtccatacccttccttctttgccggtcacgccgccgagcccgccaaaaaccccgtcggttaccgagaagctcaagcgcctggcccaacaaccttccccggccttggcccgggctacgaaatgggccgcggacagctggaagtcaaagaaagccctgccgctgcccgaatacccgagccaggaggagctggagcccgtgctcaaaaccctcgaggctgtttcttcaatcgtcttcggcggtgaggccacgacttgggaagagcatcgtcgccgatgccgccatgggaaatgcctctcctcctcagggcggagactgtgctgagagctgcaaggaggttattggcaacacca

SEQ ID NO: 3236 - DNA, 493 bp, Glycine max
  unsure (1)..(493): unsure at all n locations
  Clone ID: jC-gmfl02220054f04d1
cttcgtcctttttttttaaagtagtagttctagcggatgactcgcttttttcaaatgggccttcattactaatgaaaaggtaacagagagaatatacgagctcgtgctatagcaaatgttattaatcgttcgttgatcaaggtccatctacttacgcgtatggacactattttttgttgggcactaataattcacactgactaacgcatgcattaatcctcaagagtgcacccccgattggtgacccgggcaatacgcactantaactgatatccttggatctcatgaaagaaacacttagatagttccatggtcctatgcatcactcttgcaacactcagagcctttaccataattactatcgccgagtgcgctttaccttctgactatagtaaatatgtgcatcttctagttttggatcgggattgtcatcgtcaaactctatccatttggcattttcttgcttgacccatcccacataatgtcctgaatc

SEQ ID NO: 3237 - DNA, 446 bp, Glycine max
  Clone ID: jC-gmfl02220054f05a1
gtgattgtagcttccgcgattgatgatgggggctactccagaggcgaacggaaatgtcgcggacgaagaaaacgggagcaacgtctgtggctcaatcgatttcggcacggcggaggccgtcgaatacgttcgctccctcaccgacgttggcgccatgacgcgccttcttcacgaatgcatcgctcaccagagagcggtggacgttgaactcgacgagcttctgtcgcagcgcaccgacctcgaccgacacctcctgcagctccagcgctcctccgacgtcctcgacatcgtcaactccgacgccgactacatgctctccaacgtcggcttcacctccgacctcgccgaccaggtcagacgcaaggtccgcgagcttgatctagcccagtcgcgcgtccgcaacacgctcctccgtatcgacgccatcgtcgaacgcgccaactccc

SEQ ID NO: 3238 - DNA, 528 bp, Glycine max
  Clone ID: jC-gmfl02220054f05d1
gttgtaaacttcatttctattacacccgcggatttaatagtgatatatatctaacttttacatgatctgcatcataggtatgccctaaacatagggtctgtagatgttaaaactaaactagttctttggtgaactaagtacaaaatcagacaactaaaactgctctatactattaatcatctctgctttacaagttctcttgtaatgtccagtttgattacaccgactacaatgcactgtatgtttctcgcgattaaggtcatccacacacatccgtttctcagggcgtcctggtggtcgccgtaattttggtggccttacaacaaggatattatcatccatagaagagttgcctgttttactccattcaagttttccggggatggggtgtatagtctctgcataggtatccctgaaacttgcagcagtaaaacacttctgggaaaatgcatagacatcctttcgacatgagataagagcagcagcagcatgggaacatggaataccattaagctgccaatcacggca

SEQ ID NO: 3239 - DNA, 283 bp, Glycine max
  Clone ID: jC-gmfl02220054f06a1
gcttggagattccaacatctttcttattccttcactcactcctttctgcgcttggctatgggaaaaacgcacagcttcatcgcagaggagcaggatccgacccggcgccacctggatcccccacccggtttaactgctgaagagtacgaggacctcacacccttcgtgctggagcaccacacttatctccgtacacccacccggcatagctccttcattcttgcgcagggtatccacgctccaccacacgcggtgtggtccgtcgtgcgctgcttctacaacc

SEQ ID NO: 3240 - DNA, 382 bp, Glycine max
  Clone ID: jC-gmfl02220054f06d1
caggagcgtccatgctcactaggtcgcggtcgcccttttttttatttaattttttttttgtcgtttttagtttatgatttttttctttcttattgctgagtgtgtcaataccagggtcgcctcataacggatgtattaccctaccgcagatctatcaacccttttggataccctaagagtgggctattacaacatcctttccgaatcttacgtttttgtctttttcacaggtcttgatgctcgtatattcgactatgacagtggcaactgttggttcaactcccagtgctgtcacttctgaatctgttacatgatagtgaggcccttgcgacactgtatgcttgcagtgaatatttgagtggattctggatccagattccac

SEQ ID NO: 3241 - DNA, 448 bp, Glycine max
  Clone ID: jC-gmfl02220054f08d1
aattgaaccacattttattgaatccaatatctatgatgacaacaactattataagttcgagctcttaaaagcttatttttcaaggaagtgctgcttttaaggagcgggttaaaacttccagttctttcagtccctcttgaggagatttggcctcaccaagcaccttcactatagcactgccaacaatcacaccatcagctccccatcccgctacctgtttcacatgctcaggttttgatattccaaaaccaactgcgacaggtttagtagttgcctctttaatttcctgtagaagggactgaacagaaccactaacagatgcgcgggctccagtgacccccactgagctcacaagatacacaaatccttctgccacatcaacaatggctttcattcggtctggtggaatggtggctgttgtgaggagtaccagttcaatccatgtttc

SEQ ID NO: 3242 - DNA, 428 bp, Glycine max
  Clone ID: jC-gmfl02220054f09a1
atctgctactgccctgggtcaccataaccataatcatatcccaaacccaagccaacccagcacaacacagcaccacctcctatcacataataacaaccgtaaccttaaccttaaacccccacaagattaatgtttgggaccccgggattgggatccccaactacaaaaagaaaccgggtgtttgctgttttgggcagagccggctgggaacactcatgacgcggtgtagcttgctttgcaaacacggtgggcacaggtacagaacctgccctacccgtggggctaagctatctggggtgcgattcaccgacgggttgatgcggaagagcgccagcatgggcaacctaacccactacgctggttccgggtcggccccgccccatgacgggatgaataacccgggatcacccggtgagacccccgatcac

SEQ ID NO: 3243 - DNA, 514 bp, Glycine max
  Clone ID: jC-gmfl02220054f09d1
gtgcctatgctctggttcataaccgggtcgacgtgctcactggtcggtaggtcggcggtcgccctttttttttttttttttttttttttttttttagaaagcatagactatcatagaggattcgttgttattttttgaggaacaaggaatttagaggtatgggatgatagccaactacagtaaatgcatcctttccacataagagtggttcaaccattggcaaagaggctccccacatcccacaaaacaccctgaatttcccttttcagccaaaaatgggaaactgaatgtgtgcaacaggtcctgcactgcctgtctcaccagagaagatcctgtcaccttgctccgacgaccccatcctgtgataatgtctacccgactagggcgaatcccggataccagcatacgttggcgaaaccaagcaagtgtcctagacaatgctgtcacagcagttccatcagacatgacatgaagatttataagccaatagcgagagcttttttccttaacagca

SEQ ID NO: 3244 - DNA, 344 bp, Glycine max
  unsure (1)..(344): unsure at all n locations
  Clone ID: jC-gmfl02220054f10a1
cggagactcattgggctttgccgcttgctttgatcttcactggagctgccggcggtggagcccaaggcccatccacctgtcccgcgccttccacaccccagtgttcaccacctgccatccagtcttctccgccacctgttgcttactcacctcctccggctcagtctccaccaccagcttgcactcccacaccagccccactcaggtctcctccccctgcctgcccttctccttcatctgcaccacccggatatgctccccctgcctctgctcctgcgggatctccaccacgccgattctnctccccctgcctgccctcctgcggcatctcctaccccagccac

SEQ ID NO: 3245 - DNA, 489 bp, Glycine max
  Clone ID: jC-gmfl02220054f10d1
acatcaaactcaattttttattctgaaaatcagttctagaaaatcaaattgatttatttgattttctttacatgccctaatgttgtaagacatgccccacaacaaatttatatctacttttaggagtacttccccacatccaaaatttcaacttccttcacatcctttcccttccccaattgctgtaaaatatttagcgaattcgacatctcacatttcagttagctggacaaaatccagccacagagaatacgagctcgacttggtacgctaaaaaaaggaatacatgaaaaccaccctttaaaagcctaaacaacaaaacttgaaaaaaggggaaaattttcacacccacaaaataatcccagtatttgggaataaacccaattttgatgcctcctattatggcatccccttttcccaccttaggtcccaaagaaaccagcacctcatcgtcttcttcagcttttacactcttcagcactttcgata

SEQ ID NO: 3246 - DNA, 541 bp, Glycine max
  Clone ID: jC-gmfl02220054f11a1
tggacttggaaccgaatcaagggggttctaccaaaattactactgcatcatccaatcattcttgcaatggtgagccagattgcatgaattcaagccaaaactgtggaacatctaccctgatgggatgcttgaagagatttacaagagcagaaagattggggtcagaccaaaaatttttctgtcggcagtgtcaggtgaggcaagaaactctcaaacagatgtccattaggaagcttccccttgtttcttgcttccatataaaaagatttgagcactcttcaacaagaaagatgtcaaggaaagtggatcgctacctgcagttcccattttcactggacatgtctccttatctatcatcaacaattttaaggaatcgatttgggaataggatcttttcttttgatggggatgagccggatgcttcagatgagttgtgttcaaagtttgagtttgttgccgttggcacgcacagtggtaagctagacgctggccattattgtcacttatctgcgaataagtaatcagtggtccagtgtgatga

SEQ ID NO: 3247 - DNA, 488 bp, Glycine max
  unsure (1)..(488): unsure at all n locations
  Clone ID: jC-gmfl02220054f12a1
attcttcaagattcaggtactgcgtttcggaagcagacacagatggctcgtacgaagcaaaccgctcgtaagtccacaggaggaaaggctcctaggaagcagcttgcaaccaaggctgcacgtaagtctgcaccaactactggtggtgtgaagaagccccaccgttatcgtcctggtaccgttgctcttcgtgagattaggaaataccagaagagtaccgagcttttgatccggaagctccccttccagaggctggttcgtgaaattgctcaggacttcaagactgatctgcgtttccagagccacgccgtgcttgcattgcaagaagctgctgaggcataccttgatgggctctttgaagacactaacctgtgtgccattcacgccaagcgtgtaaccattatgcccaaggatattcagctggcangaaggattcgtggtgagcgtgcttgattggtggttggaaagatgaagatgattggtggctg

SEQ ID NO: 3248 - DNA, 508 bp, Glycine max
  Clone ID: jC-gmfl02220054g01a1
gctagaaaaccgtatttcaggaccttttcggccattgctgagaaatatggtccaattttcattctcaaattgggttgccaccccaccttagtcgtgaatagcagggaaattgccaaggagtgcctgacaactaatgactaaggttttgcctcaaggcctatcacatcagcagggaaaatcttaggttacaacaatgcagttaccggtttttccccttatgggaagtattggcgcgaaattagaaaaatggccatccttgagatcctctcaagctataagcttgaaaagctaaagcatgtgagagacactgaaacattgtctcttgtcaaagacctgtgctcatcaatatcatgtccaaagaacgtgaatggctcaacaactcacggcctataagcaatttattggagcacatgtccttcaatataattgtgaggatgatagctgggaagagatttggaggggacacagttaatcaagaagacaatgaggcatggaagctaagatacgc

SEQ ID NO: 3249 - DNA, 499 bp, Glycine max
  Clone ID: jC-gmfl02220054g01d1
caatccaaaatcatttcatattcaggacttaaattaaattgaatatttaaacagttcttacatggacgtacacaaatagcatgttcattactcctctacaagtcacaatgtagaaaatgaactacataatgtcgaaatgcagaaattttcatgaaatgaaatgggggaagggaactcataataaggcatacattttgtctcaaataggattaagcaggctttgcttccacgacggactcactaggtaagccttttaccgtgatggttatatgacaagtgcgctttttaattggatgggcacgccctcgagctacaggttttacccttttcattgttttcccttcattaacctctgctttactgataactaaacttcctttgcttaaacccagattattgctagcattagctccagccgaaaacactattttgagaatggcttcacaggctcgataaggcatgagttctaataccataagtgtttcgtcatatttacgtc

SEQ ID NO: 3250 - DNA, 544 bp, Glycine max
  Clone ID: jC-gmfl02220054g02a1
accaaaccacccaaggcacttaaaactccccaccagaaaaaaaaatgaattattctcttgccctagccctaggcctaatcctcatttcttgttctcctttgctagcaaacgctagaggccaccatcatgcaggtggccatcatctagggttggtagggcaaatctgcacggaactcatccaaaaccagacgacttgcacggaccttgtaaaggcagcagatcctaaaattgcacaggcaaagacattccaagagcttgcacaggcagtgctagaatttgccgtgaacaagggaatagagggccaaaccttcctcaagggcttggcactgattgagcaatcaccagccattaaggaatgtgcaaactttttctatgatggggtggttggatccttccgtagtgccttacgtgagttgaaagaagatgctcagaccgctagctatgatgccaaagcggcttatgatggccctgacgggtgcaatagaaccttggccgctgaaaatatcaataaccctgctattactgctcttaacagcgaaatagc

SEQ ID NO: 3251 - DNA, 258 bp, Glycine max
  Clone ID: jC-gmfl02220054g02d1
ggtgctacaagttgatcatgtttttcccggttcaaataataaccaatgatatgaaacaccgcaattattgcagtgatagtaagtagaggttttagacccacaaatcgttttctgatgaagaaaagtagctaattctgagacacagcagtagtatggccgtatctttgcatgactcttttagtggctagagctgcagcctcactagcacgcattgtcccacttgccataattgcagcaaactctttgagaatctcatct

SEQ ID NO: 3252 - DNA, 499 bp, Glycine max
  Clone ID: jC-gmfl02220054g03a1
gtgtgttgttctgtgctttttgtggaccgaattgcccctactcaggtaaagagaatgattctcacaaagcagtatcgatgcgtacattcagctagctgtcaatgcaccaagggtcatttaagtgaagatgtgatattcttggtgtttcagcatttgaattggaacccgaagctaattgctgctctgtcatgtgtgtgcaaatggtttgacgatctttcaaagcaagttctatggaaagaattttgtaaaacgagagctccgaagatgatgcttgatctgcaatctagtggaagccacagtgttgatgggaactggagggctctggggaagcttcttatattctgttcaggttgcaggcaaggcagtttgttcaataacgttcaggttcctggccattttgttaacaagactcgattttctagaacatcaagaaagagctttctcatgccacaatgcataaatgatgttttgtatgtgtctgatccttgtgagcatattg

SEQ ID NO: 3253 - DNA, 437 bp, Glycine max
  Clone ID: jC-gmfl02220054g03d1
gaaaacaatacttgagacgaccttattctgattgtttcatgctacctgatgaccatgatgcaagctagggccatgacacgatggttgcttgttggaaaaaaccgccctctgctgggaacaggagcccagggcttatcataaattcgtaataactacggcatatttacacgacattcattcacgatcctgcttgcttcaagccatgcatattacatcactatcaaagaatggaccaaatgttccaccacagatgccaccagggacttgttatcggcacttctagcggagcaattgtaacgatttttgccttgcatgccggtgagctcattatgctggcccatcatgcgcatacttgagacccgattctccaaaaccaggttctggttgacggtaaaggtggtgacaatgcccttattatgcggatcagtgtccaagtc

SEQ ID NO: 3254 - DNA, 522 bp, Glycine max
  Clone ID: jC-gmfl02220054g04a1
ggagggcaaagccaaaggggtttctttgtgttgtgttactccgccagcggtagagatgagctcagccgataccttcaatgcgagttctgctgagtctgtcaaagaacctgttatagggtcaagtctagaagtaaaacaggatgatgctgaaataaaagctcaagttgatgccatgtgggaacaaatgaataaaggagtatctaataagaccctcaacaaatttacaagcaagcctaattccacttccaagaaaactgcaaaaaagtcatcttctaactggatgtcttatttgggtttggcaccaacggcaactgaatcccttgggcaaggtgcttccaagaatggacctggcgtgctgcagagcagtactagtgatgaagtcaagaagcttgctgctgctgctcttgcagcagtgaaagatgatgctgccatagctgcctcaagcagggggaaacttgtgattactgaggttcgggactctgctggtcaagatattgaagttaaaaagctcgtagattctga

SEQ ID NO: 3255 - DNA, 317 bp, Glycine max
  Clone ID: jC-gmfl02220054g04d1
ggaaaaaaaaaaaaatccctttcaaaattggggctttaaacaacaattttcacgttccaaaaattgggaagcaaaaccccccaagaacgtttgcccccctggggcacctttgaaaccctacttactcaaaaggctgttcccccacccggacaaaaacccttgggggggacctttcaacgtccctccccaaatgtggggccccctcatcacaaattcccagcttcaaaaattgcaatgcccctgcgaactttgggaaatccccaatcagggggcaatcccccatggaaagcttctgacagcctcccaagttacccatt

SEQ ID NO: 3256 - DNA, 550 bp, Glycine max
  unsure (1)..(550): unsure at all n locations
  Clone ID: jC-gmfl02220054g05a1
gcttggagttcccaacaactatcttattccttcactcactcctctctgcgcttggctatggaaaaaacgcacagctccagcgcagaggagcaggatccgacccggcgccacctggatcccccacccgggttaactgctgaagagttcgaggacctcaaaccctccgtgctggagcaccacacctactccgtcacacccacccgccaaagctcctccctcctcgcgcagcgcatccacgcgccaccacacgcggtgtggtccgtcgtgcgctgcttcgacaacccacaggcctacaagcacttcatcaagagctgccacgtcaaggagggcttccagctcgccgtggggtccacccgcgatgtccacgtcatctcagggctaccggctgccaccagcaccgagcgcctcgacctgctcgacgacgacagacacgtcatcggcttcaccatcgtcggnggcgaccacaggctcatgaactatccgtcagtcacctcggtgcacgggttcgagtgcgacagaaagatctggaccgttgttctggaatcgtacg

SEQ ID NO: 3257 - DNA, 409 bp, Glycine max
  Clone ID: jC-gmfl02220054g05d1
ctgggctatgcgctgatccggaattaattcccggatctacctactcggtaggtcgcccttcgttcttttttttttttttttttttttttttttttttttttttttttttaacagaaaatgaaacaatttataaaaggacctggttacagcgaactttgctactgaacaaagctgttatactagtagcatctggcataactcaaagccaggcaagacactgacttatgtcatagactttcctataacaaccagctcagccagtctactaactactattcaaaccgacatttttttaaagaggctctcccttattattggagcattgataaccacaactaccatttaacctattggctactcagctttggcttgttcggattcgagccaactcaagcactcataaacctgt

SEQ ID NO: 3258 - DNA, 490 bp, Glycine max
  Clone ID: jC-gmfl02220054g06a1
gcttggagttcccaacaactatcttattccttcactcactcctctctgcgcttggctatggaaaaaacgcacagctccagcgcagaggagcaggatccgacccggcgccacctggatcccccacccgggttaactgctgaagagttcgaggacctcaaaccctccgtgctggagcaccacacctacttcgtcacacccacccgccaaagcttctccctcctcgcgcagcgcatccacgcgccaccacacgcggtgtggtccgtcgtgcgctgcttcgacaacccacaggcctacaagcacttcatcaagagctgccacgtcaaggagggcttccagctcgccgtggggtccacccgcgatgtccacgtcatctcatggctaccggctgccaccagcaccgagcgcctcgacctgctcgacgacgacagacacgtcatctgcttcaccatcgtcgggggcgaccacaggctcaagaactaccggtcagtca

SEQ ID NO: 3259 - DNA, 489 bp, Glycine max
  Clone ID: jC-gmfl02220054g06d1
aaagttaacaaattgttattatagaagtcacttaataattaataataacaaattgttattaataatacaccacaaccaaaaagatcggaattgaaatttatgaactcaagaaggtgtgtcgtatcccccctctcaagtaattattcatatcacacactgttagagctgcagcatgcagctctaattttattattaattagtatacgtagcgcagaacacgatatttaatacatgaagttgatcatacataaattaatcagtagttcctcgttgaggcatcgaaattaccaccaataaagcctccattgccatgtccctggaaattgccactattatttatagcaggaccaccaccgtagttgttggtggcgtgatgagtgttaccatcaccagaatatgcaccactgttggtcttagtgccagtgatgttctgaaacccatcgccatggttggtgtatgtgttcactttacctttgggatttttgggct

SEQ ID NO: 3260 - DNA, 484 bp, Glycine max
  Clone ID: jC-gmfl02220054g07a1
gatcgagataactagaaacagtgtgatgaaaatgaaggtccttgttttcttcgttgctacaattttggtagcatggcaatgccatgcgtacgatatgttccctctccgaatgaacactggctatggtgcccgtactccggaggtgaaatgcgcaagttggaggcttgctgtggaagcacacaacatctttggctttgagaccattcctgaagagtgcgttgaagcaacaaaggaatacatccatggcgaacaatatagatcagactccaaaacagttaaccaacaagcttacttttatgccagagacctcgaagtccatcccaaggacacatttgtgttcagtatagatggcaccgtactctctaatattccatactacaaaaaacatggatatggggtggagaaatttaactcgaccttgtatgatgaatgggttaacaagggcaatgcaccggcactgcccgagactcttaagaattacaac

SEQ ID NO: 3261 - DNA, 472 bp, Glycine max
  Clone ID: jC-gmfl02220054g07d1
cccaaaagtcagacatatatatcctatataacattggtcctatattgctagaccatatattaacggatccgttaacttaatgaattccagaaaatttgatacgaacaaatgttgaaatgcctatgcatacatttttaagaaactataatgctgtgtagccaattagattcaggatcgggtctaattgcgtgctctatgacaatatcattgagtagctcatgctgatcttatcagtggtttgatatgaaggagctatcatattcttccttgatcagcctgtggtgcaatgtatctagggccattagtgattcacacaggcctaaggaatacccccaaatggtatgatcctggaccttcaacttcgcgaggcagattcctcagattggaggatacatattatcagtctcaacttgactgtgaatagcactatcagttatgctatcataggtctggagatatgcctcatcaccct

SEQ ID NO: 3262 - DNA, 506 bp, Glycine max
  Clone ID: jC-gmfl02220054g08a1
aaattcatgcgtgtgttactattcatttgaatcgtcgacacttcgcactgtctttctaaaggcttcaaaaagagctcaagtaggtttcttggaagccactcttgaagcctactactacgaccctttatatatatccaccacaaacgacacgtcttacataaactccatcacattgaagccaccacttgatggtttcattttcataaattctcaaatttctctcagcagcttctttgtactcttccttggctgagcttcttttattttaattttctctctaagtacacccacccagtttgtgctatatacttgtattttctctatattattacactgatcttgaagaagcatggcagagaaaaccaagaacaaggtggaggttcaattgggttgcggtttgatgggaagaattttccatctcaaaaccaataacaggactagaaaatcctctgttcattcactacccgtgaaggtttgcaacaacactgcacagcaacagagggatc

SEQ ID NO: 3263 - DNA, 400 bp, Glycine max
  Clone ID: jC-gmfl02220054g08d1
aacgcacatgtacgtaacacttaaaaatacatacacaaattaacatgggcatgtctgttgagatggacgtcaccacaaatatagtaaacataaattaaataaacatagtgacgaggatatacagattattccaatccaccatgtataagcaaattaattaagaacacaattaaatgaagcatgtctctcgtagctcaaatagcttggccagaattacaggtttgaggagctcctgaaagaccctagagcctttgctgcttgggcccttaacacggactggtggtagaatgcagcatgagcagcaccgatgaagggtccaacccagaagatccactggtcatcccaagccttctcgttggtgaatatgacagcaggcccaaggcttctagctgggttgatg

SEQ ID NO: 3264 - DNA, 547 bp, Glycine max
  unsure (1)..(547): unsure at all n locations
  Clone ID: jC-gmfl02220054g09a1
atctgcgaaagccaagggtcaccaaaaccatcatcataacccaaacccaacccaacccaacacaacacaacaccacctcctatcacataataacaaccttaaccttaaccttaaaccccccaattttcatgtctcggatcccgtgattcggatccccaacaaaaaaagaaacctcgtatttgttattttcgtcggatccggttgggaacgctcatgacgcggcgttgctcgcattgcagccacaatgggcacaactccagaacctgccctaaccgcggggttaagctcttcggggtccgattaaccgacgggtcgatccggaagagcgccagcatgggcaacctaacccactacgctggttccgggtcggccccgctccatgtcgggttgaataacccgggttcacccggggagacgcccgatcacgccgtcgtcgtcgtcgacggctacgcctncgaggacttcgttcccgggtcttcttctagctcccgtgaaagaaagaaggggttccatggactgaggaggaacatagaatgtttttgctcgg

SEQ ID NO: 3265 - DNA, 368 bp, Glycine max
  Clone ID: jC-gmfl02220054g09d1
taggtcggcggtcgccctttttttttgtttttttttttttttttttttgtttttttagggggaacccacttttaaagtaggtatcaacttgtgaccctgattctgagaaactacaccgcaactcattttgacgccatactagtctaatatttatgaccataaggatggggcactttagtggagacgatacatcacgaagtgttattaccaatattaataatgctactaatattctagagggtaattttcgggtgcctgaccacacaaatgtacgttcagaccttgaaggatcatcaattcggggaggtgcttatgctgtaaggtgtggggactcgagatttgacgaggagctaggacgcattgttggg

SEQ ID NO: 3266 - DNA, 571 bp, Glycine max
  Clone ID: jC-gmfl02220054g10a1
cttcttcgcggtgtgcggttccattttgatacgtttgtcggtgatcttaagtctggagatttagaaaaggcacaacttggtctggggcatagttacagcagagcaaaggtgaagtttaatgttaaccgtgttgacaacatggttattcaagctatcttccttcttgatacacttgacaaggatgttaattcgttctccatgagagtcagagtggtattcatggcactttcctgagctggtgaaaattgtaaatgataattatctgtatgccaaagttgcaaaatttattgaggataaggcaaagttggctgaagacaagattccagccttaactgacatagttggagatgaagataaagcaaaggagattgtggaagctgccaaagcctccatgggacaggatttgtccccagtggacttgatcaacgtccatcaatttgcacagagggtaatggacctatctgagtacagaaaaaacttgtatgattacctggttgctaaaatgaatgatattgcaccaaatttggcctctttaattggtgaaagtgtggtgctcgtttgatttccatgc

SEQ ID NO: 3267 - DNA, 521 bp, Glycine max
  Clone ID: jC-gmfl02220054g10d1
cacagcgaagaaaaaaatttgtatattgaaaataatagaaaaacgtacaatggagaacactcattttcttttgtagaaaaaagcattatccttgcttacggtaaaatcatcgagggaacaagccctaatattggaatcccaactcatgcctgaccatttactagaaaccagtaataatctccaatcatagctcgaaaaagtcattctggaagatgcacaaaaattgtaaaactataatagtcctcccttccatataactgcattagttcagcttggaaaagttgagcatgtccaaagagcaagactccaatccttccttacacaatttcattgttggcagtggaccagcttggagaattcgggcagaatacaagtcctagaacagtgacaaaaatataggaggcatcccttatgcataaaatgacgcataaatgattacatggggcttatgtctatccggcctttgtggagttgaaaagctggagtgatccagcttccacagctgcatttgatgcctgacc

SEQ ID NO: 3268 - DNA, 472 bp, Glycine max
  Clone ID: jC-gmfl02220054g11a1
cagaaaaattactattagagagatacaaaattgttcagagaactcatccagtctcaagaagcaaaattcataataattttttggatagactatagagaggacacgacccacaagcttaagacctaggcttctccttcttctccttgaaaagggccaggagagacacaccagaaaccttcacgaccttgaacctgactccaggaatatcacccacggcatgaccttttcgtccaaatccagctatcaagacttcatcattctcttcaatataatttaagcaaccgtcatttggcacaaatgcagcaatcttcttcccatttttgatgagttgaaccctggcacattttcgaatggcagagttgggctgcttagcctcaataccaatcttttcaagaacaatacccttggcatgggatgaaccagcaaaaggcttcttccattcatttcccagatgagactttctgtatgactt

SEQ ID NO: 3269 - DNA, 353 bp, Glycine max
  Clone ID: jC-gmfl02220054g12a1
gcaaaatgctattcgttggtgctggtgacctatacacactcagacgattaatgagtttctagttacaataattacttacgtaagagtaatccgacatgtgatttctgcagaatgataatgattcttttgtacttggaggcaatggcaatttttagacgtgggaagcatgtattgtaccaacctttcttcaggttttctgtgacaaaagttaattgttattgccagaatgagtcccaattttgcttgaggtaaatatattcggattggtatgtcagtcaagtgaggcggttctttatgactatagctcggtattcaactgtttttcttttaaagtagattgtacttcacagttt

SEQ ID NO: 3270 - DNA, 520 bp, Glycine max
  Clone ID: jC-gmfl02220054h01a1
gagcacttcaaggtgaggaacaattttttgcttttaaaagttatcttctgtttattatgaatatcttctctggatatgttgattttaagacatgcaggaagttcctcataatttggaatttggaggcagtcattgattgactgggtgagacttgtaaatatggtatacaattttttctgtatactatttggagggtgcagacgacgacttgaattatacaatgcaactttaactgccttaggctcaaaagtggcctttatgtcctcaaaaagatattttaggttgattattttggactgaaattctaaattgggctagtcttgtatgttgtacatacattatattgcacaaactttttaagatgtcactctaaacagaactaaccactacttaagatcttacgactaaatttaaaaaatagttagaaactgtatcattctgccaaggccatctagttaagtgtctcggctcagtatatcatgtgaatatattaattgagaaagttgcattttggtattta

SEQ ID NO: 3271 - DNA, 506 bp, Glycine max
  Clone ID: jC-gmfl02220054h01d1
gtagaagtagaattgttgattcgtaattatatacaaagctatgataccgttgttgcaaaatccctaggatgaaaaaacagtagataatacaacatactctgacaagtttaaaaaattaaaagacctgccacttatatatctcaaacaaaaatatttttatctcaagagaatgtatcctctcgatctccctcagcagttatctccacttcctccatattgctgaactctaagaaatgggttggtctatggtcctcgtggtaatattccctaggagtcccaagcttcactccatatttcatccctgatgcgtgtctcacccccatgaagttgtaattccatggaccattatcaggaaccatgtagaaaccaaggaagcgatcactaaggagcatctgaaccttctcataatgggtgggaaggtaaccatgtggattgcttcccgtatccttattaacacgcccccattcataaccagatggagtgagcttatatgcagttaaagaaca

SEQ ID NO: 3272 - DNA, 477 bp, Glycine max
  Clone ID: jC-gmfl02220054h02a1
tttgctaataagacatatcttccaaatgaaactccaactccactagtgaagtacagaaaagaagaattggaaaatctaagaggagatggaaaaggagagcgcaaggaatatgataggatctatgattatgatgtctataatgatttgggtaacccagacaagagcaatgatctagctcgtcctgttcttggagggtctagtgcctatccatatcctcgcaggggaagaactggtagaaaaccaacaacaaaagactctaagagtgagtcaccatccagcagcacctacatcccaagagatgagaactttggtcacttgaagtcatcagatttccttacatatggaataaaatccatagctcaaaccgttttacctacatttcaatctgcatttggtttaaatgccgagtttgataggtttgacgacgtgcgtggactctctgaaggtggaattcatctccctacagatgcactcagt

SEQ ID NO: 3273 - DNA, 537 bp, Glycine max
  Clone ID: jC-gmfl02220054h02d1
ttcgttctttttttttttcaatccaaaatcatttcatattcaggacttaaattaaatcgaatatttaaacagttcttacatggacgtacaccaatagcatgttcattactcctctacaagtcacaatgtagaaaatgaactacataatgtcgaaatgcagaaactttcatgacatgaaatgggggaagggaactcataattaggcatacattttgtctcaaataggattaagcaggctttgcttccacgacggactaactaggtaagccttttaccgagatggctatatgacaagtgcgctttttaattggatgggcacgccctctagctacaggttttaccctattcattgttttcccttcattaacctctgctttactgataactaaacttcctttgcttaaacccagattattgctagcattagctccagccgaaaacactattttgagaatggcttctcaggctcgataaggcatgagttctaataccataagcgtttcgtcatatttacgtccacgactctgatcgatcact

SEQ ID NO: 3274 - DNA, 569 bp, Glycine max
  Clone ID: jC-gmfl02220054h03a1
tgaagattcacaggaggggaacagtgttcataacattagtgttaatggaaatatgtctataggtgtttctccatctttgatcgctggtgcaaatatcaagggcttcactacaatttcagttctacctcctcctcccccgagctattttctgggttacactcttccttctggtcatccctgtaatactttcacacttcctcctccaccggcagataaaaagcgaactgggccacgaccatgcccagtatgttaccttcccgtggatgaagccattgcacttatgccaaagtttccgtcaccttctccagtacttaagaacttagcatttatctatgaggaaactcttagcagggatggtgaatttggtggctcggactttggtggatatcctactctgaggcagagaaatgaatcttttgatatacgagagtcaatgagtgtgcactgtggatttgttagaggaactaaacctggccgcaacacaggatttgacatggatgaagatgacctccttgaaatggagcagtgtcacggcgtagttgttgcatcaaccatatttggaaatttga

SEQ ID NO: 3275 - DNA, 544 bp, Glycine max
  Clone ID: jC-gmfl02220054h03d1
tttgtttttttttttgaatatccaatatatactaatatatgctaatatatgctaatcgaatatctatctatatctatctacctatatctatatagatataggtagatagatatagatgtttactaagtagattatattgagccgcaatatatgtgcggcaagctaaacgaaaaggactattttgtagaaaactggtcaatgatggccttccatggattcacctatataagccgcagctaaagtagcaaaaatgagagcttgaataccgcttgtgaataatccaaggaacatgacaggtataggaactactaaaggtactaaagaaacaagaacaacaactactaattcatcagctaatatatttccgaaaagtcgaaaactaagagataagggttttgtgaaatcttctaagatgttaatcggtaaaaggattggggttggttggatgtatttattaaaataagctaatcctttttttgaaagacccgcatagaaatatgcaattgatgtagtaaagctaaagcaacggtagtatttatatcat

SEQ ID NO: 3276 - DNA, 533 bp, Glycine max
  Clone ID: jC-gmfl02220054h04a1
tgaagattcacaggaggggaacagtgttcataacattagtgttaatggaaatatgtctataggtgtttctccatctttgatcgctggtgcaaatatcaagggcttcactacaatttcagttctacctcctcctcccccgagctattttttggggttccactctttccttctggtcatccctgtaatactttcacacttcctcctccaccggcagataaaaagcgaactgggccacgaccatgcccagtatgttaccttcccgtggatgaagccattgcacttatgccaaagtttccgtcaccttctccagtacttaagaacttagcatttatctatgaggaaactcttagcagggatggtgaatttggtggttcggactttggtggatatcctactttgaggcagagaaatgaatcttttgatatacgagagtcaatgagtgtgcactgtggatttgttagaggaactaaaccttgccgcaacacaggatttgacatggatgaagatgaccctccttgaaatgagcagtgtca

SEQ ID NO: 3277 - DNA, 570 bp, Glycine max
  Clone ID: jC-gmfl02220054h04d1
aaatcttaaaacaactcaaactaattaacttcattcttccaatcacggaatactcaatggatcacaaacgtcaaggaacttagtgcattatgaagcacaatttatcaactgtatagtatgcaaagaaacaagatgccgtcaactatatattgtaaaacgaaaattctaaccattttgaaaaggaaaaatatcatattataaggctccactgttgtcacctgttggcattccccatcaactgctttcttccacaatgtcacattgatgttcccatcatccacagccaatatgtttcctgtcaatgaccatgagacccttcaaacaggggtgttgaaatcattcaaaaccttgccttaccactgatccccctatttcgccacggtccatataatcactttaccgtcctgtgatgcgctagcaatggtagatttagggagccctatattgggtgcccaagcaacatctcgaacccaatccgtgtgcatctgaagagcagggaagcagtccatctttcagagtccatcggttagcttccataccttcacagtattatcacaaccaccagagcac

SEQ ID NO: 3278 - DNA, 477 bp, Glycine max
  Clone ID: jC-gmfl02220054h05a1
caattattgggagttgtgtgttgatgggttgatccacagatcgttacaagattcatccaagtgaagtaacaacaacctattttactccaaaaaaacccgatggcgacatactttcatcatggtaactccgaaatccaatcgggtggcgccgacggactccaaactcttgtcctcatgaaccccggctatatccactactccgacgcgccgccgccgcagcagcaaacctcacaaaccgccggaaacctcgtgtttctcaaccccgccgcggttgctggaggaaataataactcgtttaacccccacgcgccgtcatctcacacccaacaattcgttggaatccctctcccaaattcccaagacctcaaccaccactccatgcacgcgcaccacgatgtctcagccctgcatggcttcctgccgcgcatgcagtacaatccctggaacgcgctcgaccccgccttggcggcgcgtgaa

SEQ ID NO: 3279 - DNA, 536 bp, Glycine max
  unsure (1)..(536): unsure at all n locations
  Clone ID: jC-gmfl02220054h05d1
aagaaaaaagaaagttctaattattaataaattatatctatatatatatatatacagatagatattctatatcttttatcttaattaatatttgacccctccttataatgtgttatagttttctttatttttaggaacttatccattccttttttaatgtgcccgacaatccgaaagaattctgggggaggggtcatttcgtttttgatctagaataaatagagcttcaagaaatgagagaattaagaatacccacgagaaacactaatccaatccataatgatgtaccggaaaatacaacatttttgttattcgaccaaccttcaggagaagcaaatacaacaggtacactaatcaataaaataaatgaaatagcaattaatgcaaaaacagctaattggaaagcaatagtcatgtttctaatcctccaatttaccaacaaaagaactttaccatttgatcccccaaccccttgatccctttatctgacaanaaatttatataaaaaaacgccagagggttctatcatgaattca

SEQ ID NO: 3280 - DNA, 279 bp, Glycine max
  Clone ID: jC-gmfl02220054h06a1
aggaaacacttaaactacactactacaataccaccaaagagtattgcaatatttatctaggcgggatctatagtcgttcatgatgattattataccgacgaagatgatcataaatactaatagctagaggatcaagaatctggttacgtagaatctatggaaataccgtgcttaatcacatcacaggattctccctgtttggagacggagactatacattttctatttgtatgaacagagccattggttttgctcacaacctagtggctatttctatgg

SEQ ID NO: 3281 - DNA, 461 bp, Glycine max
  Clone ID: jC-gmfl02220054h06d1
gtgattgtgtaaaattttattcgattaatggcttaataatttatcagtcacagtgacattataatgcgctgtgatttagaagaacttccaaaacaatatctaaaacactgattaacaagaaaaaaacatacaaaagcaacctaaaacacatcaaatctaaactatacccgttaaccactgattattcatgagtcagataaagctgcccaatcaatctccacggaagggtacttctccaagtccaacccaagattgtccattgtttcacaagaatccgagaaatccaagagggtaatatcggattcaggtgaagaagaagaagaagaagaagaatattcatcggagaaggccgaggacgatgatgtttggtaattctcaaccttattaaaatcctgaaactccgatgtctctgtctctgccttgtgtgtatctagaacatagggttttgagttttgagtttc

SEQ ID NO: 3282 - DNA, 450 bp, Glycine max
  Clone ID: jC-gmfl02220054h07a1
gttttagaaagacgcaggttgaattaattagtatcatggcagctttgatggatttttacagcagcagcccagagtttcaacttcactcagatccattcaggggagaactaatggaagttcttgaaccttttatgaaaagtccttctcccaactattttccttcctccccctccctccctaatctttactcaaacgggttatccagcaacacccaaagcttaattggcttcgggcaagcgcaacccacatctcttgtgggcctgaaccacctaaccccatctcagatctctcagatccaagcccaaatccagatccaggcccagcagcatcagaatcgcagcaacaccctgagcttccttgggccgaagcccatccccatgaagcacgcgggcatgcctccgaagcccacgaagctttacagaggggtgagacagaggcactggggaaagt

SEQ ID NO: 3283 - DNA, 349 bp, Glycine max
  Clone ID: jC-gmfl02220054h07d1
ggttccaaatcacacggtgcagtaaccattattaggaaataattgagaaacacatgaaggaccaaagtctactacataaccaaacttgaccccaaagatgcttatctaaagccccacactatgttgcgctatcctccaattcatctgatctataatccccaataacccttttccttcacctgtttaattacactcaatatatcagcaaagattcaaaatcttgtatttcacacactacaagatccaacctttagatcaatgactacttggagggggtatgaaatattcagtgaagaatctggcactactgaactttatcatgaggggttcaagaggagcactaggttgg

SEQ ID NO: 3284 - DNA, 541 bp, Glycine max
  unsure (1)..(541): unsure at all n locations
  Clone ID: jC-gmfl02220054h08a1
tgcaggcagtgtcatctctcctttgacgacaagatgagcatcccaattccccatcggcagttattcatagacggagactggaaagtccccgtcctcaagaatcggattcccatcatcaacccttccacccaacacatcattggggatatcccagcagctactaaggaagacgttgatctcgctgtcgctgccgccaaagctgccctctcccgcaacaagggcgccgattgggcctccgcttccggctccgttcgggctcgctacctccgcgccatcgctgccaagatcaccgagaaaaagcctgaactagcaaaactcgaagctattgactgtggaaaaccgctcgatgaagccgcctgggacatcgacgatgttgctggttgctttgagttctatgctgaccttgctgaaaaattggacgcacagcanaaggctcatgtgtctcttcccatggacacattcaagagttatgttcttaaggagccgattggagtcgttgctttaataactncttggnattatcctctgttgatggctacgt

SEQ ID NO: 3285 - DNA, 528 bp, Glycine max
  Clone ID: jC-gmfl02220054h08d1
tgccttgtctgattatctccgggtcgccgagctccatgctcactgtcggcggtcgccctttttttttttttttccatcttcacattatataacacgtatttggcccccataaccatagtgattaagaagcccttcatcttgtcgccaatttgctctaaccttcacttcaatctcaagataaactttcttctgtaaaaaatcttcaacatcaaggcgggcagctgttgcaagcagtttcaaagcctttccttctcttccaataaggataatcttctgagtgtgtttctcaaccaaaatctctacttgtatgtattcttttgcatttggccgagctttatagtttacaacatttacctgacatgcatatggaatttcatttcgatactgcataaaaatcttttctctaacaatttcagctacaaaaaatctctctggatgctcactgacaatatcctttggataataagctggtccattgggaaagcttgacagtatccagtccttgacatcttcacacccctgaccata

SEQ ID NO: 3286 - DNA, 522 bp, Glycine max
  unsure (1)..(522): unsure at all n locations
  Clone ID: jC-gmfl02220054h09a1
aacaaaacaagcactcaaagtgcttcgagttcgtcactgatcacgtttcggcaatgcaccgcgtgggtagcgcgagtaacggaaacaattcaactcgctctcgcaaggagaagagaataacctacgtgttgaatgattctgacgacacaaagcattgtgcaggcataaattgtctggctctacttacatctgctgcatctgatgggtctgattatctcttcactgggagccgtgatggcaggttaaaacgatgggcactagctgtggatagagcaacatgctcggctacctttgaatctcatgttgattgggttaatgatgctgttgttgtaggtgatagtacacttgtttcttgttcttcagatacaacccttaagacatggaatgccttgtcctttggaacctgtactaggacactccgacaacactctgactatgttacttgccttgcagcagcaggaaaaaatagcaatattgttgcctctggtggccctggcggggaggnttttatatgggatatcg

SEQ ID NO: 3287 - DNA, 421 bp, Glycine max
  Clone ID: jC-gmfl02220054h09d1
aacaaacaactggcacattcttgcactacttgggaattacaacatattatgttagcacattacagcatattgcgctatagcatattacaatgtcatagttgctaatcagcagcttcactagaaaaatatcctaacaacatcagtttaatatggttatatataagcctggcttatttttcttccaatacaataccgatgaacttagtaggataattttatgtctcgactcagttaaaattacaaactattaggccactttgaattgattagacaggcaatactattgtacctgtgaattgtgggactattcggaggttttaatccaaagatagagaaatctacagacattggagctgattcattcttgccagtattatcatctagatggctgtctgaacataccaaaactggcattaacctt

SEQ ID NO: 3288 - DNA, 519 bp, Glycine max
  Clone ID: jC-gmfl02220054h10a1
aacaaaacaagcactcaaagtgcttcgagttcgtcactgatcacgtttcggcaatgcaccgcgtgggtagcgcgagtaacggaaacaattcaactcgctctcgcaaggagaagagaataacctacgtgttgaatgattctgacgacacaaagcattgtgcaggcataaattgtctggctctacttacatctgctgcatctgatgggtctgattatctcttcactgggagccgtgatggcaggttaaaacgatgggcactagctgtggatagagcaacatgctcggctacctttgaatctcatgttgattgggttaatgatgctgttgttgtaggtgatagtacacttgtttcttgttcttcagatacaacccttaagacatggaatgccttgtcctttggaacctgtactaagacactccgtacacactctgactatgttacttgccttgcagcagcaggaaaaaatagcaatattgttgcctctggtggcccttgcggggagggttttatatgggata

SEQ ID NO: 3289 - DNA, 509 bp, Glycine max
  Clone ID: jC-gmfl02220054h10d1
actatattgagattgaagtttcaattcaaaaataacataaccactcttctctcctttgaaccaatagaaggggaaaacagtggtgattaacatcctagacagcagaggtatagctggcatggggcgaagaaaagaaatatcataatccatgaaaatacaggttcaaccggcacatctgaattgacattctttattttaaaatacatgcccaactacagtgctgtaaaactgtagatgtgtgtccctggatgactgaactataccaaactgttccattgtagtcattatcaagaaacaaaaagtaaggcttcttattgggcacagtgagcatagccacatgccaactcgtgcagcatgtgttgatattagagataacagtgtgagctctccaacttacaggaaacaaaagcagccattctctggaaaatcgcacattaagacactataaaagaaggaataaaaactaagccctgggaaccttgtctagcaaaacattatctgaagattta

SEQ ID NO: 3290 - DNA, 594 bp, Glycine max
  Clone ID: jC-gmfl02220054h11a1
gaaaacataagggaacttcgtttgactggcctttacataaaagaattgccattttcatttcaaaatcttactggactccgtctgttagccttgagtggctgtggaattgttcagttaccatgtagcttagccatgatgcccgaactgtcttcattctacactgattattgcaacaggtggcaatggatagaattggaagaaggtgaagaaaaattgggctcaataatatcttcaaaggcacaattgttttgtgccacgaattgcaatctatgtgatgattttttcttagcaggtttcaagaggtttgctcatgtaggatatttaaatctatcggggaataatttcacaatccttcctgaattcttcaaagaactgcaatttttaagaactcttgacgtgagtgattgcgagcatcttcaggaaattagagggctttcaccaatcttagagtattttgatgcaagaaactgtgtatcctttccttcctcgagtacaagcatgctcttaaatcaagtattgtcttattttatctaatggatatgatttgatgatgatgctgcacttaatgctgtaaacttatgaatatgactaata

SEQ ID NO: 3291 - DNA, 541 bp, Glycine max
  unsure (1)..(541): unsure at all n locations
  Clone ID: jC-gmfl02220054h12a1
gaaaacgttggtcggagaacattaccggaaagagaatctttgttgattccagaaatgtctagcatcgcttcctcacaccaaagcttcctcaccaacgcccttattccactaacgcacaacccaaagttcaggaccactgttactttcccttcttcactcaaaactgtctcttgcagttccccacaacatgaacagcaacaatctccaaggaagaagaatgagaacaagttagcaaagttggcaatagttgcacttgctgctggtgtgttaacacttgggtcagttcatgatgcatcagccgccaagactggtggtagaatcgggggccaggccttcaagtcagcagctccgcgctcctcaccaagaatcaacaattccagaaccaatatctatattaatcctcgagtggcacctccgctagttggtggctatggctatggttatggtgtgccattttacggtggctggngatggtctccattttcattctttgcaccaagtcccagtgtagctgtaagcgttggaagtggattcgacacta

SEQ ID NO: 3292 - DNA, 518 bp, Glycine max
  Clone ID: jC-gmfl02220055a01a1
atcttcttactctttcgtttgtctctcttctttccctttcccctctctttcgagggtttttctttttctttttttcccccttttttatttttccttttttttttttactttctcttgtttttcagttttgcttccatttcctttgaatccccatttcttgttcctctgcaactctaaccctagaattgaagatgcaaccacagaggttaaggcagcatgccatgttgcaaccatctctctaccaccaccccgctctccttactcctcctcagatagagcctatcttgagtggaaatctgccacctggctttgattcgagttcatgccgcagtgtttatgttggcaacattcatccccaggttacagattcccttcttcaagagcttttttcaactgcaggcgcccttgaaggatgtaaacttattaggaaagagaagtcatcctatggctttgtggactactttgatcgcagttctgctgcatttgccattgtaactctcaatgggaggaatattttt

SEQ ID NO: 3293 - DNA, 497 bp, Glycine max
  Clone ID: jC-gmfl02220055a01d1
gttcttgaattagaataatttcacctcgataactttcaaaatcctttaatgcaaattaccgaaataaaactctagttctagtacaaacaacacctagctataataattaggggttgataccatagagctttcgaatcccgtctatatcatcttgcgctagattcaccttcctagttcgaggtggtatagaaggatacatgatggctcttaggtccgacgagtggcctaatccgagcaagtgcccgatctcgtgcactgccacagattcaaggtcaaacgcacttgtcaccggcgatttggtgacatcgccagacgccacccaatattcgtcggcgtcaaagtggcacctcccatcagtgggagcgaatgcatggcccaatatcccacctggaccatcaaaaggatacggatcaccgtggttcttactcgcgaaaagaatcttaatgttggctgtttcatacgacgtcgtctcctggaacgcgatgttcaccactggg

SEQ ID NO: 3294 - DNA, 537 bp, Glycine max
  Clone ID: jC-gmfl02220055a02a1
actagttgtgctattgccgctgtcccgtgcaattcgaagggaatgaagaacaagggtttagaattagggtcttaaaacaactgaaccaactttgtgggtaaaattagggattcaggtgtaaagtgaaaaactagggtcttggtaaatctccaaaatgtcgacgggcaaacccagaggcggtgattttcagatggtcccggcgccgggaacgtcaaagcctccccttccgacggcagcagcatcgaatgcgatagtggaatatactccggtctctctcaaagaggaagaggaggatctggaagtcaagctccgacggattatcgacaatgttcctgtccgtgttagcaatactttcggtagttccgtcggatcaggctccggcgacttgcaccagtatcggcaaatgagacgcatggaacaagatcgtcttgtcaggatggaagtcgactaccagaaaaggaaagagctggcagaatttaatttgagaagagaggatagactaaaagctgctgatgaacggactgcaaagatgcgagc

SEQ ID NO: 3295 - DNA, 571 bp, Glycine max
  unsure (1)..(571): unsure at all n locations
  Clone ID: jC-gmfl02220055a03a1
aaactggttcttcttttcgcgttgcgttttcttggtgtctctgtcgattcttcttctgaattttaatacttaggaagtttagttttctctcttggcttctccggttggagtttccggcgaccttgtcggagattttgttgtttatttttcacaccacttgtgaaacttctcaagaaaaagaaaaaggatgtttcttgttgattggttctatggaattttggcgacccttggcctgtggcaaaaggaggcgaagattttgatcctagggttagataattctgggaagaccactttgcttcacatgctcaaagacgagagacttgttcagcatcaacctactcaatatcccacttcggaggagttgagtattgggaagataaagtttaaggctttcgacttgggtggtcaccagattgctcgtagggtctggaaggactattacgctcaggtggatgctgtagtgtacctggttgatgcantttgacaggaaaggttttcagaatcaaagaaggagtnggatgctcttctctctgacgagtcactagcaatgtgccttttctcatcttgggaa

SEQ ID NO: 3296 - DNA, 324 bp, Glycine max
  Clone ID: jC-gmfl02220055a04a1
ctcgagccgaatcggctcgagcgcacccaaaggtgacggggaacaaaattaaacataccatactctctgcttattagtcattgaacttcccttctgtaatgttttcaaagggagaaggtgttgaatgctaatctcaatgttactgagattttgggcattcgtgttcttcgttatgaattgtggatgtactgggctattttagtttgtccttccatttatacgcgtttctgaactgcctattttcttaatgacactgaaatctccattatgatgctgtttagaatattaccaagatgttgctctctttaaaaaaaacctcttcac

SEQ ID NO: 3297 - DNA, 540 bp, Glycine max
  unsure (1)..(540): unsure at all n locations
  Clone ID: jC-gmfl02220055a05a1
cacaaaacttgctatagcagtaagctataactcatttgaggctctgtgagaattgagaaatggctaaagatgttgaggttcaagagcaaggaggagagtactctgccaaagactaccatgaccctcctccagcacctttgttcgacccagaggagctcacacagtggtccttctatagagccctcatcgctgagttcatagcaacccttctcttcctttatgtcactgtgctcaccattattggctacaaaaggcagactgatacaacggtaggtggcaccgactgtgatggggttggcattntgggcatcgcttgggcctttggtggcatgatcttcatccttgtttactgcaccgncggtatttcaagaggacacataaacccggcggtgacattcgggttgttcctaggacgcaaggtgtncgtgataagggcgttgttgtacatggtggcacagtgtgccggtgctatctgtggtactgggatggccaaggggttccaaaagcatacttacacaggtatggaggtgtgccactctg

SEQ ID NO: 3298 - DNA, 617 bp, Glycine max
  Clone ID: jC-gmfl02220055a07a1
acgcagtctcctatcatactaatcatacatactcgacctcaccatgattcaatctatctaaattcataatttctaatattactatatacaataccttatcaaatatagcattcacgagtcgcgtggccatacaatatctaatactcaccaaggacacgctcgaagctcgtaaacgagagacgagctcgcaatagtattaccattaaacccatacacgtataatagaatgagtggatacagaaatgaaaaatcattctgctatatttcacacccataacatggtcacattgaatagtgggtgtgatcacccctgctgacatcgaaatagactagtgcatggctcactacttgttctcgtgcaaactagaggatcgtacactcacatcgacgtgcttaatgctacatctcatatacatcacacaggtctacaatagaaatgcccagacgcagagaaccaccctcttcttctagtgcacaggatctctgattgtggatttcaatgcacagagcccagcaatcccaccacagctatgactatgatgatgtctgtactactcgagaaagagtcattcatctcaatcaagtacgacgagaatggagtggcatctggggaaaag

SEQ ID NO: 3299 - DNA, 553 bp, Glycine max
  Clone ID: jC-gmfl02220055a08a1
gttttcagcgcgcatcactctttctttcgctttctctctcttcctcgttcgcttctctccccgaaatggagcagtctctgctgagaggcgaaagcagtgaccagagtaaccggtcgcggggaatattccggcgctccgatgctatcacctacggctccaactacgagaaagccgctgcgttcatcgatctggctgaagatggtgttggtctccctgaggaaattctcgactcaccaaacttccaaaattacataagattttactttatattcaataaatgcaatctaatctggtctcttagttattttgctttgatagtcctgaatttcctggagaaacctctatggtgtaaaaagcttaccacaaattcctgcaacgatagagagtatttctatttgggacaattgccatatctaacagatgcagaatgtcttatttatgagggaataactcttgttttgctaatcatacatacattcttcccattgtcatacgaaggatcccacatatattgggaaaatactattaatcaattgaaggttttctctctatt

SEQ ID NO: 3300 - DNA, 554 bp, Glycine max
  Clone ID: jC-gmfl02220055a09a1
gctgaaagggcatgtgctgcagcaataactcttgatacgcctggtgcaaattatagaacagtttgggctttaagcaagtacttcccaaatgtgaagacttttgttcgtgcccatgacgttgatcatggattgaatttagaaaaggctggagctactgctgttgtcccagagaccttggaaccaagtcttcaactagcagctgctgtgctttctcaggctaaactccctacgtcggagattgcagctactataaatgaattcagatctcgacatctggctgagctcactgagctgtgtgaagcaagtggaagttctcttggttatggatttaatagaattatgaacaaacccaaatctccatccccagattcattagatgagacccctgtctccgaagggacactagcaatatgaagagtggcgcatatatacaaagtagatggcagaagaaaaggagaactaggaaaaaaaaataatcgtcaaaaaaatgtatatcagatcattagttccattgttatgtaccagaatatagcccaaattagttttattttctc

SEQ ID NO: 3301 - DNA, 359 bp, Glycine max
  Clone ID: jC-gmfl02220055a09d1
gtcgccctttttttttttttttttttttttttttttttttttttttttttttttttttttttttggttttttgggttttttttttttttttttttttttttttttgttttttttttttttttttttttttaacccccggggggggggggaaaaaaaaaaaaggggggggaaaaaaaaaagggggcccaaacgggggggggggggtttcaccctccccaaaaggttatattttgcccccccccaaaaaaaaccctttggtaaaaaagggggggggtttaaacccccccccgtttttggggggggaggaaaacttttaaccccccctgccaaagggggaaaggttccccccggggggcctc

SEQ ID NO: 3302 - DNA, 509 bp, Glycine max
  Clone ID: jC-gmfl02220055a10a1
caaggatccagagtggttcttcttctgtccgcaggaccggaagtatccaaacgggcacaggttgaaccgagctacgaatcatggctattggaaggcgacggggaaggatcgaaagattaagtctggctccaccttgattggaatgaagaagactcttgttttctataccggtcgtgctcccaaggggaagaggaccaattgggttatgcatgagtacaggcctaccttgaaggagcttgaaggaaccaatcctggacagaatccatatgtcctttgtcgattatttaagaaacaagatgagagtcttgaagcttcaaacggtgatgatctggagcggactgcttcaactcctacaactgccaattactgtcccgacgaaatacaatctgattcagctttggttccagcatctttctcacaggttactgaagatgataagcctctaccagttatttccgagaactccgaggaagcaatatccaacattataacccctggtgatattcata

SEQ ID NO: 3303 - DNA, 441 bp, Glycine max
  Clone ID: jC-gmfl02220055a10d1
aaacaagagttatatattattgctttattcatttatttgacattttataacttgggaattgtatatgaaaccagacactacagataaagcatttgcttagtaatggctattgtacatatattgatatatagcacttaaactgcagtgccatatatatgtatatatactaaccagctagtggctaagtttagtactagatgcatttttacacaaacttgtgcgtcctcttttggtggttataattaggtgagaagggtttaaagtttgatatgattgcgtggttgcttaggttgtttttccatgaataagaggcaagtcaacttcatcacaccactcgatgtacctagtttcaaaataagaaccctttgcttggttgggcaaatagctaacccaaaactcttcccctattctccacttcagcacactcccttccatctcttt

SEQ ID NO: 3304 - DNA, 532 bp, Glycine max
  unsure (1)..(532): unsure at all n locations
  Clone ID: jC-gmfl02220055a11a1
tagagtggcaggtagatgaattggataaagcaattgctgtagcgtctagagatccttcttggtatgggattgatgaagctgaggttgaaagccgaaggagatgggcaagcagtgctcgttctcaggttggcacaatgaagaaagcaatggaatctggcaagggctcaagtaccacaagccatgctagtgtaaatgggatgcgccgagaactgatgaggctaccaaattctcatcaaactgatagctccaaccagtatgctgccagagataatgatgatttcatacaatcagaatcagatagacagacgcttcttataaagagacaggatgaggaattggatgagctcagtgaaagtgtacgaagaatcggaggtgttggactcacaatacatgatgaactcactgcacaggaaaagattctagatgagcttggttctgagatggacagtacaacanatcgtcttgattttgtccaaaaaaaagtggcaatggttatgaagaaggctagtgcaaagggtcagatcatgatgat

SEQ ID NO: 3305 - DNA, 412 bp, Glycine max
  Clone ID: jC-gmfl02220055a11d1
aggacaaaaggaaaaggcaccaaattcaatttaagtggacactgtaactcaaaattatagaggaagacgggccaatatgaaaaatatagtaagatcatctcaaacttagcatcttctctttgcacctaagacattgagaatgctaaaaatgttacacgcaagttccatcacaacttttagcacttggattagtacaacaacctttacgaacagaaatatttacttgccaagtttgctttgcctccaattcaagactggaagaaagttcccctctgaatagcatcctcgttagcatttccaagagcagcctcgttcaagtacttgtcagccaattggactctcttgacattctcttggtcttggacaagcatgttaccatacagcaagagcttcttcagagtcatcttgggct

SEQ ID NO: 3306 - DNA, 307 bp, Glycine max
  Clone ID: jC-gmfl02220055a12a1
cactaaccgtaaagaagtttatatcgtctatatgggagccgcggattcaacaaatgtttctcttcgcaatgaccacgctcaggttctcaatttagttctaagaaggaatgagaatgccctagtacggaactacaagcatggtttctcaggattcgcagctcgtctatcaaaggaggaggcagcctcaattgctcacaaacctggtgtggtgtctgttttccctgaccccattctgaatctccacacaacacgttcctgggaattccttaaataccaaacccacgtcaaaatcgacaccaaaccaaat

SEQ ID NO: 3307 - DNA, 257 bp, Glycine max
  Clone ID: jC-gmfl02220055a12d1
gtcattcaaaagtctcaacttcactctagcactaaataatttacaagattaattcaatttggtctctgcactaaataagaaataaattaaatcgaattaaactgaatacaattgacagaccaatatcattttgcatactcagatattattaggacgtctacaaatatggtgcattattcgcaaaattgattatttaccactctatagtctatactatactgaatatttactacacggtgatataaactatgtgttct

SEQ ID NO: 3308 - DNA, 480 bp, Glycine max
  Clone ID: jC-gmfl02220055b01a1
gtcagacaagtgcctagcgtagcattgcggggtttcctatgagacagtcaccgacgataatgagtctcctcacgatccacatgccttcactcagggccttctttatactggaaatgacacctcatttgagccaactggactttatggggagtcatctgtccgcaaagccgatcttcggactgcgaaggctgacattattcacaagatggatgatccttatttaggggaaggtataactctcctcaatagcaggctcttacatggaactcgagcgcggacacatggctccatatatgacccacaacatttacgcccaattgggacatttaatcatgatatgaatgatgctagccgtctggcaactgctggaacagtcttgttcggaagtgatcggcagttcaacattgcattaaatgatttaaactgatcctcatacatttaaagctgtatcacaacgtgtagactactaatgagggcatg

SEQ ID NO: 3309 - DNA, 494 bp, Glycine max
  Clone ID: jC-gmfl02220055b01d1
tttttttttttttttttttttttttttttttttttttttttttttttttttttttttttttttttttttttttttttttttttttttttttaaaattaaggggggattccaacccccccttttagggggggaaaaaatttccatccccccaaaaaaaaacctgtaaccttgaaaggggggggttttccaaaaggtgggtccccccaggttttaaaatttttttgaaaaaaagggtttttaaaaagggaaaatttttttacccaaaaggccccttcccttgaaaaaaacccccaaaaaaccccaaaaatttgggccaaccaaatttccaaaattccggggaattttttaaagggggcccaaaaaaaggcaaaaaacccctttggggccaagggaacccccctaaaacaacccctaaaaaaaaaaggggctttcccaaattaaatttggggggccaaaaacttttggccaatttaaaaagcccccaattgaacccc

SEQ ID NO: 3310 - DNA, 594 bp, Glycine max
  Clone ID: jC-gmfl02220055b02a1
ggggagcctctaagttcagactataaaggaggttattattgttgttatgatcaaacccagtgcaggttgagggaaggctttgagggcccaagaggagcctctacctaagatacacagtgaagtgggttgaatggaacaagttcattgtgcctgtaaagatttatatacttgatgtcactgatactttaaaaatatcagatgattctagtggaatgatccctgagcatgattgcaagaccgagtatgaagttgaatcttgcagcactggccaaaagaatggtaatggctgtcttgatgtgaagagaacaagcctcccaatgcaaaagggtggttatgtcatatatggtgttgctcatcagcattcaggtgccactggatcaactctctatgcacaggatggaagggttatatgttcttcaataccaaggtatggaaagggaaaggaagcaggaaacgaagtagactacattgtaggaatgagcacatgttatcctcaaccaggttctgtaagataattgatggtgaaactataactctagagtctaactacagcagcagccgttgccacacttgagtaatggtgcttttctacct

SEQ ID NO: 3311 - DNA, 459 bp, Glycine max
  Clone ID: jC-gmfl02220055b03a1
ggaacctacaactactgggcagactcctacacactgttcgtgtttgagatggcactgatgggatttgcagagcacagaagattccaagactgggccaaaccaggctctatgggcaaacaatacttcctaggactagagaagggtcttggaggttctggtgagccagcttatccaggaggacctttcttcaacccactaggctttggtaaggatgagaagtccttgaaggatttgaagctcaaggaagtgaagaatggaaggttggctatgttggcaatcttgggttactttgttcaagctcttgtcacaggtgttggcccataccagaacctcctagatcatttggctgaccccgtgcacaacaacatcttgaccagtctcaagttccactgaatgtattatatgttattgtacataatctttacgttgccaaaacttaactacctttctacctttcta

SEQ ID NO: 3312 - DNA, 537 bp, Glycine max
  Clone ID: jC-gmfl02220055b04a1
tcggaattcggctcgagaaaagagcctttgctttttctttaggcctttccgaattaagtacttgtttcattttctctcgaagcaagaaaaatgttcatcgagagtttcaaggttgagagtcctaacgtgaagtacacagagactgagattcagtccgtgtacaactatgaaaccactgaacttgttcacgagaacaagaatggcacttatcatggggttgcgacgtcctaagactgcctatgtgcctttaaaaccaacacccatgtccctaaactaggggtaatgcttgtggcgtggggtggaaacaatggctcaaccctcaccggtggtgttattgctaaccgagagggtatttcatgggcaacaaaggacaagattcaacaagccaattactttgggtcgctgacccaggcatcagctattagagttgggtctttcaaggggaggaaatatatgccccattcaagagcctgcttccattgtaaaccctgatgatgttgtgtttggtggatgggatatcagtaacttggacctggc

SEQ ID NO: 3313 - DNA, 465 bp, Glycine max
  Clone ID: jC-gmfl02220055b05a1
gcagaggactatgctcggtgaagctttatacccgcttgtggatcagctggaacacgatgctgcagcaaaggttactggcatgcttctggagatggaccagcctgaagttttacatctgattgagtcaccagatgctctgaaggcaaaagttgctgaagccatggatgtgttaagaaatgttgctcaacagcaaactaacccagctgatcaactagcttcactctctctcaatgacaatcttgtgtcttagattcctttagtcttttgactggaatctgctttccagttattcctattccgtatgcttccccccagtttatttgcaggtgtcttagatgttttgttttagtcagagtactaaggaagtttatgttcttggtacttttggtttcactttttttcgtatctgaattgctgtaagatggattagcataacttggtggatttattagatatgcatttgcg

SEQ ID NO: 3314 - DNA, 533 bp, Glycine max
  Clone ID: jC-gmfl02220055b06a1
gatcaacatatttttgttgacatatcactttgacatacatcttaatatccttcaaatttttcagaaaaccaaaaactataaatcccttatgcagtaccaagcaccaaaatgctttcaattaattgacttctgagttatcacaacttggctcaattctatattagaaggtgaagtgtagaatagagctccattaacttacaaccacatcgccctcctcacccattgcaactgcagctcgcacagctaccctcctaatgtcatggagaaaaagtctatgaccatttggaagaggtggataatagtcattctctccatatttcaggtagtcctgcatcgtccatcctaccccagctaacatatcatccaatatgtccaatggatcttcactcttgggattgtcagatgtcagcatggtcacttcacttttatctggtgctatcttggtcatcacgggcctcttcccctgtcgccctaccacagcatccaatgacagttataaccctgcgaggtccaagctctctacagaatcgagc

SEQ ID NO: 3315 - DNA, 444 bp, Glycine max
  Clone ID: jC-gmfl02220055b07a1
ccagcctgcacgttcttcaatcttctacagagagaaagttaaagatagaaattcggatcggagagagagagagatgatggcagacgatatcctcaatgtgttacctaatggaactgcccggtcctttcgcgaccgagatgattgtgttggacagacacggcctccaactcgacgtcgatcagattcccgccttcggagactcatgccggacatctcacaacacggggttccgtggatgtgccaaatattaccatcgctcttcgatactaaacgctcaagtgaactcttcactgctgatgatctgcctgtggttcacgctcatggtgaaccattcagccagcctatatgtcaccgccacaatctatatcgacatcttgagcctgtcctccgatatgacgaacacacacctctttactgtacacactcctttaagatcttattcac

SEQ ID NO: 3316 - DNA, 294 bp, Glycine max
  Clone ID: jC-gmfl02220055b08a1
gaccaatggagcgatctcctcggaggccacagaggcgaaagcaggacctttaagcttcctaatcccctgtactacattcagtagttccttcacctctcaacaatctagcttgctcctatctatctatatgtaataagatgcgttcaaataggggcactagcttcactttatgttgtttcagctgtgtgtcaacaagtcatgtaagagacttcactatgttgttttctctttcgtggctttaataaattatgcgcccttgttccaaaaaaaaacagaggtcatacgcattagaag

SEQ ID NO: 3317 - DNA, 150 bp, Glycine max
  Clone ID: jC-gmfl02220055b09a1
gctcgattacactcatatatctattatatcttattaagcaactatataacttctccgctatattctatctgtatatctacttccaatctgatgtctatactgacatatatatactacattagatctattacaggtggctcccgacgatga

SEQ ID NO: 3318 - DNA, 444 bp, Glycine max
  Clone ID: jC-gmfl02220055b09d1
aaaaaaatcaatagagtttctttaaaatccctataaaaggaattgtaactttaatcattttcatctggacacaaaattaataacattacaacatgcaaatctaatctggaaccagctgccaaagaagatggaaaaaaaacgccactgtatacttagccattaaaaggaaactcaatcagccggacatggaagatcactcaagttaccactcaaaaagagctgcggctaggcctatcctgtgcaacattcactctgatagccctcccgtccaaactctgaccatcaagggcagcaattgcatcattcatatcagtctcactagacattgtgacaaagccaaaaccacgtgatcgaccagtctctctgtcatagaccacccgagcatcctcaaccttaccatgttcactgaaaatttgctccagccgagcatcgtaacttcccatg

SEQ ID NO: 3319 - DNA, 538 bp, Glycine max
  Clone ID: jC-gmfl02220055b10a1
aggaatttgtcaaagagtagccatcgccccaacgatcccgtttcccttcacttctctacgcaaagccccttgttttgcatagagctacttaaaatgtcggagggaaatgctgagagaggaaagagaattgccattattggtgtctcaaccttattgttggtggcgatggttgtggctgtcacagttggtgtcaatgttagtgagaatggttccaacaatgaggacacaaaaattgcttcttctgtaaaagccgtccaaaccctttgccatcccacaaattataagaaagaatgtgaggaaagcctcatagccagggctggaaataccactgatccaaaagaacttatcaaaattgtcttcaacatcaccattacaaaaattggcgataaactcaaaaaaactaatcttttgcatgaagttgaagaggatcccagagccaagatggcacttgacacatgcaagcaactcatggatctttctattgaggagttaacaaggtcacttgatggaatatgtgagtttgacctgaaaaatatcg

SEQ ID NO: 3320 - DNA, 513 bp, Glycine max
  unsure (1)..(513): unsure at all n locations
  Clone ID: jC-gmfl02220055b10d1
ataactacattgtattcagaaatgaatttaactaaatgcaatattaggatacatcaacaaaacatttgtgttcaatatctgccgatgttggcatgctgcaggtccacaatgagagttgcaatagaagaaataagatgaaaaacatgattgatccattagttacctgcacaagccatagtacttgcacacaacatatatagtacgtaaatttatacatatctaagagagaacaagcaaattagaaagattaaatctagaaggaaagctgcaatagcattacaaagccacatccctaaccatggcggatgatgataccagctgcaacttcagtctgacgtaagacaggaaccaaacaaattcaaagaaccaagtgctagccaattntcagagcatcactgattntcccactgtttgcactgcaccttgagcagatactaaaaaatttaataccatttcaccagttctcttcttgtggtagattacgactgtagaatggaaactcgaagagaaaag

SEQ ID NO: 3321 - DNA, 558 bp, Glycine max
  Clone ID: jC-gmfl02220055b11a1
tgtttctcgtttcgtcgaacccttggaaggcacaatgggagggaggaagaagaagttcatcgacaagaagaactctgctactttccaactcatcgctcgcgacacctccgacccttccttctcccaatccgaccgtgtcttcgtccgcgtcgacaacaaccccgtttccttccccgtcgccgacgactccgctttcgatgactcccccgacgactactactacgacgacggcggcggcggagttagcggtggtcccttgccggagggcgtgaggagggagattctggagctagggtttccggatgatggctataactacttgaatcacttgagggaaatcaaaaacaccggcgctggtgctgctttctttcacaaccccaagttcaagcttcaacacctccctcgcgatgttaaggcatatgatgcttcgagattgcaaatttctgatgcggatggagaggctgtggagaacactatatacagtggtgcgttcaaaactaccagcgtaagggtgcagaaagcagttgatcctgaagtggctgcattgcttgatgatga

SEQ ID NO: 3322 - DNA, 562 bp, Glycine max
  Clone ID: jC-gmfl02220055b11d1
gaaaacgaaattaaaattttatttataatttccattgatcactgatcagctctataacattaatttccaactgaacacttctcaattccattgcagccactttctatttgaatagattattaagtatgcatgatatataaagattcaacagcctacgttggaaactttcctccaactcagtatcttgaggaattaaagtactcatgcaactatcactctaaaactttctgcagcatgattctcaaactctcacgtcacatactgtaattaaggttaacaatgctttattttattaggcattgttccaaccttctgattcatccttcatggggttcggtttgtaggaatggagcatgaagttgcacgcaccaacagcctcttcaactgtcagatagatccatttttgccccagttcatcaaggaacttggatttgttcagcttcttcatcacctcgcttcctggattcaccaaagcaggctacacacatatgaaggaatgattataaaaaaacaatgtctctcaagtaaaactatttagcgaaaaatattagcttaatgagaa

SEQ ID NO: 3323 - DNA, 634 bp, Glycine max
  unsure (1)..(634): unsure at all n locations
  Clone ID: jC-gmfl02220055b12a1
gcaacatgttgagcctagggtaaggagggtggcattatatcgtggtgctgagtacttggaacggtacttccgtcttattgcttttgcagcatatcttggaagtgaagcatttgatgggttttgtggacaagcagaatacaaaatggcatttaagaattggatgcatgaaaggccagaggtgcaggctatgaaatggagcatcagattgagaccagggcgattttttactgtccctgaagagttgagagcaccacaagaatctcagcatggagatgcagtaatggaggctttcgtcaaagcccggagtggttctgttcttgggaaaggctacatactgaaaacgtatttctttcctggtcagagaacttctagccacatacaaatacatggtgcaccacacgtttacaaggttgatgaattccctgtgtatagcatggcaactccaaccatctctggtgcgaaggagatactatcctaattgggtgctaagcctaaagcaaatgtctcatctgctcaaaagtgatatngactgatctgagagaggaagcagttgtctatatcaaaggcactccctttgtcctagggagttgaacaaactcgtgatcactcaagctgtggaatactgtcctgcatg

SEQ ID NO: 3324 - DNA, 404 bp, Glycine max
  Clone ID: jC-gmfl02220055b12d1
aaggacaaaaaaaaatagttaaatttttttttctttaataggatccaatttttaatatataaaagggaaaatgcataaacttttatccaactgaaaactaaaagggacaatttaaccccaaacaaaataaagcatccccccataaaaaggttcaatcctgtttgaaaaaggaaacaatttggtcgatcaaaacctgagcattttcacaattgggtttgaacaaatgaaaaacatggccctaatccttggtctccaccatttccgaaacaccagaccacccatttttttaaagcaactccttatagtacaaacccctgtccctaaccaaatccttttccgcaacacaaagaagcaatttttcacaagctaacttccccagcttcggatccttactcgggttaata

SEQ ID NO: 3325 - DNA, 466 bp, Glycine max
  Clone ID: jC-gmfl02220055c01a1
gttggagcatcctttatatcttcattcaacgtggcaacgttggatcagctgaactgaacttctttgtatatgcactctgggatttgactctgctgcgccatcctatgggggacaacgacagcatcaacgatgccttcatgcgcaaccgagacgccggcgttcaggaccgcaccaaagcgcagaaccgctccaacgtccttcagctcaaactgattggacagagttacccaaccggtctcacagcgaacctgttgaagctcttcgagcctaggcactccgttgggggacaagccacctacggagagacgacaatgcccaccggtatcagggatggcacaatttgagagcaagtgtgccgagcctggccagccataatacgctccacctgtcccagaaactgagactcctgcacaaaaaagagccagaatacacaagctaaggcttgagaagggagctgcagaagctg

SEQ ID NO: 3326 - DNA, 452 bp, Glycine max
  Clone ID: jC-gmfl02220055c01d1
accaacctcatgaatttttataagctagaaaacaatgacgtactccaactttacattaaaagcaaaaaaaaaaaaaaaaaaagggtaaagcggagagatgaaaagaaggaaaagcaagagttaattacttttcctcctttattacagatcagaaattaacacaagggaacacaggggggatcatgaaattaaaaatcaggggcgaaaggggcatgctgggtggggatgaaggcataggtatagataagaccagccaaaccaccaccaataagagggccaacccagtagatccagttgtcatgaaagtcaccactgacaacagcagggccaaaggagcgtgcagggttcatggacccgccagaaaatggccctgctgctaaaatgttggcaccaacaatgaaaccaatggcaatgggtgcaattgggcccaatgaacccttcttagggtctgc

SEQ ID NO: 3327 - DNA, 395 bp, Glycine max
  Clone ID: jC-gmfl02220055c04a1
aaactggttcttcttttcgttttgcgttttcttggtgtctctgtcgattcttcttctgaattttaatacttaggacgtttagttttctctcttggcttctccggttggagttttcggcgaccttgtcggtgatcttgttgtttatttttcacaccacttgtgaaacttctcaagaaaaagaaaaaggatgtttcttgatgattggttctatggaattttggcgaccctaggcctgtggcacaaggaggcgaagattttgatcctagggttagataattctgggaagaccactttgcttcacatgctcaaagacgagagacttgttcagcatcaactaacttgatattccacttctgaggagttgagtatcgtgaagatatagtttaaggctttcg

SEQ ID NO: 3328 - DNA, 383 bp, Glycine max
  Clone ID: jC-gmfl02220055c05a1
tttgaaattaacaagtagcaaagatgtttggaatcatcggaggaaacaagggtcacaagataaaggggaacttggtgattatgcgaaagaatgtgttggatatcaacagcattaccagtgttaagggtgtcatcggaaccggcattaacatcattggaggagtcgtcgacaccgttactgctttggcgtcccacatcttcatccagctcattagtgccaccaaggctgatggacatgggaaaggaaaagttggaaaggctacaaatttaagaggacaagtgtcgttaccaaccttgggagctggcgaagatgcatacgaagttcattttgaatgggacagtgacttcggaattccccgtgcattttacattaagaacttcatg

SEQ ID NO: 3329 - DNA, 516 bp, Glycine max
  Clone ID: jC-gmfl02220055c06a1
cattgttggctattcattcattcgtgttcctcaggagagagagggtgcgtgtgattcggattcgaattcgaattagggttttgcgcatcgtcatcgaatttttctcttatgcaaggaaggttttccttctccgatttgaatttgattgaacgagtagtgttaagattatgatattttttgagaagcttcgtttctctcctcacttgagccgcttcattgccggcatcctcctgttaatcttctgcaattcattccagttagtctctaatttccccattcctatacagccttagattcaacgtcgatcgctacactcttctctccgattcgtacgattccgtattcgatattcgtttggttgattcactcctcctctctctcgctttcgattcgttggtgattgctgcttgaacaattaaacatggaacctaatcagctcttctccacgcattttcgcgatggtactattgcctcatgcattgagggccaacacagaggagctatcccttccgtatt

SEQ ID NO: 3330 - DNA, 535 bp, Glycine max
  Clone ID: jC-gmfl02220055c07a1
cttgaaacttgagagatttcatcatggctccaaagaaggacaaggctccaccaccttcctccaagcccgccaaatctggcggtggcaagcagaagaagaagaagtggagcaagggaaagcaaaaggagaaggtgaacaatatggtgctgtttgatcagggcacctatgacaagctcctttctgaagctcccaaatacaagctcatcactccttgcattctctctgatcgtttgaggattaatggatcacttgcaaggaaggctataagagaattgatggcaagaggttctatcaggatggtgtctgcccatgcaagtcagcaaatttataccagggcaacaaacacctaggtggtgaactgatcttagtttacggagtattggtaggaatagtgaagtattgttcttttgaagtttgagatgcatctcatatagcttctatcagatctagattggtgctgaatccgaggctgagattgtatttttggattccttcaatgtttatctatttggatattatggcagttgtcttatac

SEQ ID NO: 3331 - DNA, 574 bp, Glycine max
  Clone ID: jC-gmfl02220055c08a1
ctcaaatcatggatttcttgcaagcacaagaaaatcagatacttgtgggtgtggccgtggccgttgtagccattgggcttggtgcagtatatctctattcatccaagaagaccaaaggttgcttggacccagagaactttaaggcattcaaacttgttaagcgtgcacagctgagccataatgttgcaaagttcacatttgcactcccaacacctacatctgttttgggtcttccaattgggcaacacataagttgcaggggtaaagatgctcaaggtgaagaggttatcaaaccatatactcctactactttggattccgatgctggacattttgaactagttattaagatgtacccacaaggaaggatgtcacaccatttccgtgagatgcgtgttggtgactacctttccgtgaaaggacctaagggacgtttcagtaccaacctggcgaggttagggcttttgggatgcttgctggaaggtctggaatcaccccaatgttccaagttgcctgagctatattagaaaaccctaatgacaggaccaaagtacatcttatctatgccaatgta

SEQ ID NO: 3332 - DNA, 555 bp, Glycine max
  Clone ID: jC-gmfl02220055c09a1
cccgtgaccaacgaaaccctcttccggaaacttaattttgtggcgcaattccagagttcaaattcgaccaagaacagagccctatcagagagcaacagaagcttcctgaactcttccatcaccaacatggactcgacggtggcatcgctaacccaaacagttctcaggaacgagagctggcgcaaaatgatgtcgtcattgtcgttgtagtcctcagcaaaaaaggaaaatagggttccggagtgagttcctttaactctcgactagttaattaattcacactcgctcttttgtgatttcctttaactccatatagctagaaagaaagaaagaaataaagaaagaaggaaatggttatttccttcaacggaaccaggattggatttggtacgctagtttgggtttcacgatttctgcatacttggaatcttaaattcctatctcgaatgctaattcttcttttttaggttttggcgtatgttgcgcgttcggtatagtagggggtttcggaggtttatgccttatttctgaaccattttagacatttctatagat

SEQ ID NO: 3333 - DNA, 491 bp, Glycine max
  unsure (1)..(491): unsure at all n locations
  Clone ID: jC-gmfl02220055c09d1
ncgccctttttttttttttttctattttcattcgaattcattttatttatatattaatattatattcaaatgaaataaaaagatattaaaagatactaattataagaatttgaaagtgaaattataaagttattaaatgattaatcaattgggttctacctgtgcctgtagtaaaaagagttccatctgttcttgaatagcttccttcaaaaggacttctgcttccccagtgaatgtcttggtagaagatatgatttctttgaattgaggtttattcgtgtttaagtaagcacgtaacttaacaagaaatttccttacctgtgcaatttctaatgaatcaagataaccattcggtccagtataaatagttattatctgatcttccacggtaagaggagctgattgggattgcttaagcaacttgcgcaatcgttgacctctcgctaattgattttgagtagctatatcgagatcagaagcgaattgggcaa

SEQ ID NO: 3334 - DNA, 519 bp, Glycine max
  Clone ID: jC-gmfl02220055c10a1
aagcgaaagagagagggttcaagttcaacaagcctctcttctttgtgttcttgcgaagaagaaaaatccctccgagtcaactcggacgagttgcctcatcgtacggttccttcctcggactctttcctcttcttccccttccgaatcaccgttcgcagggttttgctctctctctctctctgtctctcgcttcgtttctagttcagatctcgcattggcttcagctgaaaccacgcggtttaatttcattcccttaaattagggatttatcttatgtcgaaacacttgaagtgatgatggtgtggttgttgtgagaaattaatgatcgttgagggtgtgggacattggtacagagctttcagtgtagttgacaactacctaggagggaagaagaggaatctttcttccgccgttgtcgtgtgccgcggttgctgtactgttgatggtctggaaactcgacagccctgtgcagactcagatggctgtggcagtgattaggagcagtccacttgggagaga

SEQ ID NO: 3335 - DNA, 552 bp, Glycine max
  Clone ID: jC-gmfl02220055c10d1
aatgttgaatagagaccaatatctgtattattgggtttataacgtcagcagataaactgttttttctccattgtagttggagttatacattacatgaaataaaataatatcttctcgatcatctcaggtgttggcatgacatatgccagtgttctgtatcatgatcctatgtcatttctcctttttttctgtagcttccctttttctataaaaaaatatcttatgatgcttttaactatataccaagatgcctgaacttgcaaaaatatgcaattacacaagagcagcctcttgtgtgtgcttttcctgtgttgctttgatgtgcccaacataaagatcactcccatgggaatcagctgccggaagtctctctctccgaccaccctcagacatgcttcttacgaaatccactaggtgccgccagttgtcagcttaaacaacctcttggtcattcttagatatgtgaatgcagccaatccacttgccgattctgacttactttgtgataaacttgagcatatgcatctgcatcatatctctcccatgcatttt

SEQ ID NO: 3336 - DNA, 612 bp, Glycine max
  Clone ID: jC-gmfl02220055c11a1
atccccccctagctacagagcagccaaaggggaggaataataataagcctatattctaaggccggaaaaataaaaaaggaataacaaaaatgtctggaaaggtaattatctcggctgtttctctcatcctggtggttggagtggccataggtgtggtggtggccgtcaacaagaagggcgaggatcccacacttcaatctcaacaaaaatcagtaggggttatctgccaaaacactgatgaccagaagctctgccacgaaaccctaagctccgtgaagggcatggacaccgctgatccaaaggcttacatcgccaaggcggtgaaagccaccatggacagcgtgaccagggccttcaacatgagtgataggctcagtaccgagtacggaggcaacgataacggaaccaagatggcccttgatgattgcaaggacctcttgcaatccgctatcgagagcctccaactcagcatcgacatggttcacaacaacaacttgcaggccgtgcataaccaacaggctgactttaagaactggctcagcgctgttatctcgtaccaacaggcctgcatggagggttttgaccatggcaaagaatgtgagaagaagatca

SEQ ID NO: 3337 - DNA, 390 bp, Glycine max
  Clone ID: jC-gmfl02220055c11d1
ggatcactaactatcgatacatgattcgctgattataacgtgctatatacagacaaccgacgcgccgcactgacctaactcgtcctgttcttcttgagcaacttgccatgggctagcaggaggtacagcctgaaacacaacttggcaaagtcattctcatacaggtccttggggtaatccgctccaagcttgtacgccgcggccgttccggagatgacggcgacttcgtgggcgttgacgagggtccaagcggcggcatatgtcgtatgcttgctgttcctgttcaaagcccagacgaatggcacaacgaaagcgtattgcgtccaggaatgcatcaactgatgccaccagtcttcccggatgatcttgtccttcttgatctcatccttt

SEQ ID NO: 3338 - DNA, 544 bp, Glycine max
  unsure (1)..(544): unsure at all n locations
  Clone ID: jC-gmfl02220055c12a1
ctcgagccgaatcggctcgagcttcaattcatggaagtgtgattctaatctccacaacaaacctaaccctaaaaagctaaccctttttttttttttttttaaatattggttctttttttacttaccctagatgttagagccatggacataaccccaacaacaacgatcaacaacaacaacactactcccagtgcaacaacaaaatccccagaaaatgaaacagaaacaccgaccaggatcaccacccccatcactcccacaacgacaaaaacctcatctttctcgaatggtgtcctcaaacgcacccaccaccaccaccaccttcaccaccctatccctccggtggttacctacaaagaatgccttaaaaatcacgccgccaacttgggtggccacgccttagatggctgcggcgagttcatgccctctccgaccgccaccgctgccgaccccagctccataaaatgcgccgcctgcggctgccaccggaacttccaccgccgcgagccggaggagccctccatcgncttcaccaccacgcacg

SEQ ID NO: 3339 - DNA, 489 bp, Glycine max
  Clone ID: jC-gmfl02220055c12d1
ggaatagagggtgatggagaaatctccatatccacttttattattaggaaattcagcacatgcatgcattcataacaagggcaatattaatttcagagtacattttagataggagaatacttagggaaccaagatgaggtcattgataatggttgatgttcatacggagaaagaggatgcaaggccaaactgaaggccccagagctcaaaagatcccttaacaaagtcatagtatcctccttttagtgacaatgtcttgttcaccaagccatctctaacaaatgggtatgttagaaggtttccaagggaaacattcacagcttccttctcacagtgtgagcacaactcagcaaaaggtgcatccccatgttgtgtcttcacctttgcctttgcaggcaagccaattttgacccactcctcaataaaatcagtagagtaggttccatcatatgggaaagacagaagccccttaataccaccacaagcact

SEQ ID NO: 3340 - DNA, 509 bp, Glycine max
  Clone ID: jC-gmfl02220055d01a1
gccatttgacttcagcctctacagcagagtcccagatctctgcattccaattcccatggctggtcgctatgacagtaaccccttcgatgaggaagaagttaaccccttctataatcctggaagtgttcccgctgccactaattcaaggctttcacctctgaagccagaacctgttgattataattatggctttggtgcgacagttgatatacctcttgattcatcaacggatttgaaaaagaaggagaaggaacttcaagccaaggaaactgaattgagaaaaagggaacaggaagtgagacggagagaagaagctgcttcacgagctggaattgttcttgaggagaagaattggccgccttttttcccaataatccatcacgacattgctaatgaaattccaattcatcttcaaaaattgcaatatgttgcatttactacactgttaggattagtgttgtgccttttttggaatgttatagctgttactgcagcttggattaaaggtg

SEQ ID NO: 3341 - DNA, 501 bp, Glycine max
  Clone ID: jC-gmfl02220055d01d1
agaaataaactgagggtatcattaactaaggaaattgtataaatgaattttacaaaacttgtctattgacagcatagcatttgggaattatgcaaaaggaacaaataatttaacaggcaaaacaagatatatgaataaatgaatggaatcgtacttcaagtgagtttacgccaaagccctcccttggttgctgttaagcacttcacacgtcgaaaaacaaaacctgcctttggaggtcttccatcaacaagtgaattctcatatatctctttgcactcttgaatgacctccttggcatccttccgaggaatgccttctcgtagaccaacaagtttctcaacaacttcaggcgggcagtcaggttgatgttcgagtatatttgtatagatgagtgtaaaggtatccaggctctctgctgaagcaagctccctcaagtcgctaagtacactcactctgttttcaactttagaaacactgatatgttcccttaaaaagtccatg

SEQ ID NO: 3342 - DNA, 447 bp, Glycine max
  Clone ID: jC-gmfl02220055d03a1
ttaagctcggtattctcgctattgtgctcgagaagaaaagtcaaagacaatgtcagggatcattcacaagattgaggagacccttcatgtgggaggccccaagatggaggaggagcacaaggttgagcttaagcttcgagaagaatgcaaaggtgtgccatcatggagaacacagttctgaataccgaggcaagtgtcatgccgatgagccaaggcttgggaagaagggaggatctgctttaagcaagagtgtttatagactggaatcacagtcctgatacactggccggtctgctgcggcaggctgttcgtgcaagctccagatctctacgagcggaccatgcggtgcattaacatcgacaccgtactggtccttgacatggccgcttatctaaccctaaagtgccgtgctaacggcctcatgaaactcgtcttcagaatattccc

SEQ ID NO: 3343 - DNA, 344 bp, Glycine max
  Clone ID: jC-gmfl02220055d04a1
gaacaatggcgtctctctcttacctcaacaaactcctctgcatgccgccgctcaactcttcaccctctacttcgccaccgcgcagcagcgtcggagtttcgaccaaatctgtcggaaggccgaggatggtcgccgatttcgcgaggccggtggggcgtgtccgagcggtgacgagcgacgacgagtggggcccggagaaggaggaggaggcatacggcggaggagtggcggtggaggagaaaccgacggagacggaaacggagaagctgaagaaggctttggaggattcggtttatggacgggatctggactgaaggcacgagtgaaccgagagcagagatcgt

SEQ ID NO: 3344 - DNA, 547 bp, Glycine max
  Clone ID: jC-gmfl02220055d05a1
acagtgttaggatatgggatcttcgggtaaatgcttgccagggcatcttacatctacgtggtagacccgctgttgcgtatgaccaacaaggcctggtctttgctgtagcaatggaagggggagctattaaattatttgattctcgttcttatgacaagggtccctttgacacctttctagttggtggtgacacagccgaagtttgtgatatcaaattcagtaatgacggcaaatcaatgcttctgactactactaataacaatatttatgttcttgatgcatatggaggagagaagcgttgtggatttagtttggaaccatctcctggtaccccaatagaggctacatttaccccagatgggaagtacatggtggcaggatctggaagcggaaccatgcaagtttggagtattgagaccaaaaatgaggtggcatgttggaccagccatattggggtgccttcgtgcttgaagtgggcccctcgcatggccatgttcgctgctgcttcagtgttcttacattttggatacccatatgattaaagctg

SEQ ID NO: 3345 - DNA, 522 bp, Glycine max
  Clone ID: jC-gmfl02220055d06a1
catttttattcttattttgctccatctctttagatcatcacaacttcagaggcttggttttaggattcaacttccaaaggcttactctaacatatctctgattgaaggggttctgtgagtttcttgttttagtttgagctttgtttggtaaacttgtcaagggggaattgcagtttctgatttgtgaaactacaaaaaattgaatttagaactgataaagggtctaatagaagagttaccaccatatcatgttataccaaactagcattagaatttatcatgatccttatggatatttgttagtaatgttcttagttcttatatagtactagaaagtggtgcttgaaatttcaactactattattggtgtagaggctcaatcgagttaaaagtgagaaagcaatttaaagtctttgaagtgaatttggatcaaatggttcttctgtgtttacccttatgtgtgttcttcattctacaatagctctaacttgtggagctttgatgatattctacttcaaagag

SEQ ID NO: 3346 - DNA, 616 bp, Glycine max
  Clone ID: jC-gmfl02220055d07a1
cacagttagtacaaaaaagggttacttcatcttccacatatcttgaagaattgatcaatgggcaagtctgtagttgagaagctactttggatggcaattgtgtgcttggtgctgggtgtaatttccattactcccaaggcccaagcagcagtgacatgcaaccaggtggtgagcaacctcaccccatgcatttcttatgtgctcaatggtggcaaaaccgtgcctggcccttgctgcaatgggatcaagaccctctttaacctcgctcactccacaccagaccgtcaaaccgtttgcaagtgcataaagaacgctgttagtgcgttccattatggcaagtccaatgtggaccgtgctgctgctcttcctaagcagtgtggggttaacattccttaccagatcagcccttccaccgactgtaccagagtgcagtgaggttaatgatatatggagcggtaactctagatgagaaggatatacaatatatagctagtgtgtgaataagtggctggctatacgtaggccacacattacattaatgactggcggctgctaatattacatccatcactaattttgtaacgaataatgaactttttatttgtagaatcaaaat

SEQ ID NO: 3347 - DNA, 559 bp, Glycine max
  unsure (1)..(559): unsure at all n locations
  Clone ID: jC-gmfl02220055d08a1
agactggtctgaactcccaaaggacctcctacacaaaatatcacaactcctcctcgaaagccctctctacctcctccgcttccgatccgtctgctcctcatggcgttcttccactcccccctctcccttcaacccctcaatctccctcaccaacaccttctccctctcccaccgcaccctcctcctcctcaaccctaaccctaaccctaaccctaacccccgcccctggctcgtcaagctctccctcgacccacacgccagcaccgcgcgtctcttccaccctctctcccgcttccccatgaaactgccccgtttcgccctcgacctcttcaccctccccgccctcgacctcggccgcgagttcctcctcaccaacacgcgccacacccgcgactccctctacattgaaaagctcgtcttcctccctctcacccatcgaaaagaccgttttgccctcctcacgatccacgtctnncggaaactcgccctcttccgctccggcgacgacggcttgaccgtgatccccgacatgccgaccccctacgacgacgtctgcgtc

SEQ ID NO: 3348 - DNA, 507 bp, Glycine max
  Clone ID: jC-gmfl02220055d09a1
caacacaagaaaaccaacctaattccgagaagaagaaacacattcattgcctccataaacaagaaaatggaacgctctacaaaactcttctcggcggcgtggggtctctgcgtggttgtgatggcacaccagacagcaggacaggaactaagaggaaagaacctaatcaacagggcttgcacaatcaccccgagcagagacctttgcggtgggatcctctgatcggacccaatcagaagccctgacgcagacctcaaggacttggcacgttatctcccttagggttgctgccagaaacgcctacgggatgctcagcgaagccaaaatgttgatcgatgaccacaacctagaccccgacgatcaacaaggactgtccgattgcaaggagacaatcttggacgccgagagccagctcgaggacaccattgcatgcttgctggtggattccgacaccgacacacagattcggctcaaggctgccttggacgtcattgacacctgcgacgc

SEQ ID NO: 3349 - DNA, 592 bp, Glycine max
  unsure (1)..(592): unsure at all n locations
  Clone ID: jC-gmfl02220055d09d1
tcnnnnnnggncgccctttttttttttttttaggtgttcaaatctcaaaacaacccgtaaaccgtaaggataaacaataatgtattgttgcggtatgaactacgtatgatttatgaacaaatgtctgatggtacatgttatatggacatttgaggaaaataaattgaacaacaagaatactgaattcctattactaaacttacaagtttacactaattatcaagataatataacgtcaataataacacaaacggcataattcttgggagtttcctccgtcaatcaagttggtgtgtctgcaccgtcccatcagctccatggacgagaactgccataacccctcccgcggtcttggaaacctcggggacctgaaagtggaggtggtgcaccacgccccattgctgctaattcaagactcactttctgtccagcttcctcgagtatggctataagttccttagcaaatctggcattagcagctgtgaagtatgtgtacgcagttncttttgcaccagccctttcttgtcgnccaatgcgatgaacataatcctcaagtgaccccgggaaagtcatatttacaacatattttaca

SEQ ID NO: 3350 - DNA, 250 bp, Glycine max
  Clone ID: jC-gmfl02220055d10a1
cgactacaccgtaaattcatacgctgatcctgcaacctcacactgcttgcattgtctcagcttactcgatactaaggctacatcaaagatgcatgggaccacggctcccgctcttaacatagctgaagtacagaatcaacaccccatgccgtgtccgatgaacaaaacccaccaacgagctgacccaagatcgtgatgggtcatacctccactcaactgtccctcacgaggattctgtggacggcgacgt

SEQ ID NO: 3351 - DNA, 522 bp, Glycine max
  unsure (1)..(522): unsure at all n locations
  Clone ID: jC-gmfl02220055d10d1
nnngncgcaacatccttcatcctgtaatgactgacttgaaagtcaaacagcttcctttgttcactcttctggtccgcaaactgagcgagcagtcctgcgccgctaccgtttgtgaggctgagataacgggtgtctgtatggtttgatgattcttgaggcacctcgtaatcgacccagagttcgtcgacgctagatgctgtgtacttgcccacaggttgtgagagcttgctatcgcggtaggtctcgccgaagccgcggccaaaccattcgactcgttggaattgcttaggaagctccataacgagaccgatgcgtggaagggtccgaggtaggttctcaccctttggtgtaccgacaacatggacagacagagtattgttggcgctgaaagtgtacgtaagaacgcagtcgacagaccaagagagaactggaggtgcgacacgttgatgcacggtaaccttgagggtctctgagtcagactgtgaccattcgaccttgcgagtcaatggtttcgcgtgatgc

SEQ ID NO: 3352 - DNA, 569 bp, Glycine max
  Clone ID: jC-gmfl02220055d11a1
ccaggctgaaatctgcaggagcatggaaatactggttcaatagtgttattgtgataaaatttagctaatttgatctaatttttttaatgttgtgtggtgttcaattgggttggatcttaaatgttttgctgttcactctactaaatttttctagcaatgggaattatattttacaagcatggtttgggggatcttaaatgttttgctgttcactctacttaagaatgttccttttagcagataagtttattttgtcttgtttatttgattgatcatgctaaatgtattgaactttttatcatgttattctgcagcttagtattttaaattgtgttgtgcaacacaataattggatgagacattgagttgcctggaattatttatgagtttcttttttttaagattagttttttcttcttgcttcttagatgaagctttgttgatctaggtttgtgcactttggtgttcttaagtgtagctaagttgatgatgggatcttaaagatatgtgctttcattttgtcagaatatgtccgcatgagctcacgatgaactgatttatttctttga

SEQ ID NO: 3353 - DNA, 548 bp, Glycine max
  Clone ID: jC-gmfl02220055d11d1
gttcagtgattcaccaaagtttctatactttgaggtggccaatatgtgaggaaagtttgcataaatctcacaagatatatactacagaatacattacttcctcctttcatctattttgtcttttgatcattactgggtaatccataaaagtattacacacaaattcttcaactgacaaaaaattgagcttgaacacttttcctgtgtccccctccctttttttccatccccttgtcctatataaattaaagcacttcaccaggttgataagccaacatgactcatgcacgcctgtactcatctccacaatcaccaatcactttaagcagatcctttcctttcgctgtggcttctcttatgctgttcacgtcatcttcatcgagaacaagtgaaaagatagcattggtatcttgaatatgttctgccaagccaagtctgacaccaaccattgatcctgctactgcaggctgatctagtatatacttcacagcaacagttgcgatcgatacgccatgtttagaagctacttgtttaagagtccgaagcag

SEQ ID NO: 3354 - DNA, 475 bp, Glycine max
  Clone ID: jC-gmfl02220055d12a1
aagagcacaacagaacagatggagcacacaatcttccttcattcttttcgtgaaacagaagacaaccgaaattaggtcatcatgtcgggcatggagaggcttcacaggatgttcgctggtgcaggtggagcgctgggtcatcctccaccggattctcccaccctcgattcctacgagcaggtctacatctcctccctcgcccttctcaaaatgctcaaacacggaagagctggagtaccgatggaagtgatgggtctgatgttgggggaggtcgaggatgagtacaccgctcgcgttgaggatgtgtttgcgatgcctcagagtgggaccggcgttagcgttgaagctgttgatcatgttactcagactcatatgcttgaactgttgaagcagactgtaaggccggatatggatgtgccgtgagttcactcgcatgctgcattagggtgttgactttttggagtggacattaata

SEQ ID NO: 3355 - DNA, 355 bp, Glycine max
  Clone ID: jC-gmfl02220055d12d1
actaacataactgggggaaaaattctcaaatcacccatttttagttatattttatttacaaattttatgcatcacattatgcctttctatatattaggcaacacattccaagctgaacatgctaaatccctaagaagcatccatgtcaaggggtcacaccattggcaatcccattttgggaaacgatacttggggaggccaataaagggggcttttttaaccagtattggtgaaatctttgccttgcatactccttggagtcaaaggcaattggattgacctgactcgaaataagtccccacaagccccaaaatagatggtttgcaagagtggatttttctgcaagattcactag

SEQ ID NO: 3356 - DNA, 515 bp, Glycine max
  Clone ID: jC-gmfl02220055e01a1
atcagagatgtccgataattaccacgatgaggctggtccctctttgattttagtagactaagctattacagccataatcactcaccctacgaacctagataccaatgctcccctctatttgaactcacccacaccgaacacaagaaaggatcatgtccctttgctttgacccttcaaacctatgaacctcagaacccccaaaatttatccaccgaacacaggacactcaaacctctgaaccctcatcttatccaaacgaagcacataacaaaatgaaattcaaaccaacatcaataggattgtcatactaacatcaaacaaagcaaagatgaaaagaaccttgctgttatagttttcccctaacgaacccttgacggcaacagttatcacggactcaggttggtgcggagaggcgaactgacgagcgcggcgttgcaacccaggtcacggtggcaaggcgcactgctgcagctgaggcgctgatcactgaagcgcgcgccgttgcgacgctgcat

SEQ ID NO: 3357 - DNA, 490 bp, Glycine max
  Clone ID: jC-gmfl02220055e01d1
gaacagttaaatgacttctatctttcataggaaaacaaattgcggttcactaaaaacagtaaaccatgataacaagtaaagaaaatcacctgatctatggggacaaaaaaattatctgacttgagaaagtagctagcaagcttattctataagagcttatatataaacctacaacaaatagtttcatctaacacttctctcaaaagtgctctattttttcattctgaggcaatttttcacagaaagaagagcacatttaattgtgaggagtcgatgcttcagatggactacttgaggagtcacctgaggatggattcaatggtgaaccagctgttagagaaccatttccaccctcactctcagccaccactggtatcttgacagtggctgctctttccatctctttctcgagttcttcctctttacgcaatgcagtaaactgggtatccaaggatttcgccgcagctagccaggcagaaacaatcagcag

SEQ ID NO: 3358 - DNA, 532 bp, Glycine max
  Clone ID: jC-gmfl02220055e02a1
ctctgacgatgctccaaatccacgcactcggaaggaccttgttctaatgatttgcggtttgtttttgctctcttcccttgttgcctttggagggtacagggcctccaacgcgccacatgctgacgtgtcatcgccagcatcgaacgatgaacaacctagtcccacatcggtgccttctccgaaatggtacccggtttcacggggtgtttcttctggggtgtcggagaagtcatcaagcatgttgtttgcggttaaagatggagcttcggaagcatttccttgggacaatagcatgctgtcgtggcagagaactgcttttcatttccaaccagagaaaaactggatgaacgatcctaacggtcctatgtactacaagggatggtatcacttcttctaccaatacaacccgaacggtgcagtttggggtgacatagtttggggacacgcagtgtcaagggacatgatccactggcttcaccttccactagcaatggtggctgatcaatggtatgacatgcaaggtgtgtggaca

SEQ ID NO: 3359 - DNA, 511 bp, Glycine max
  Clone ID: jC-gmfl02220055e03a1
gaggcatcaagctactcagattgtttcaatgagactgagtcgtgccgagccaccgctgagaaaggagatagtggaatatatgctagatgtgggttcccacatgtggagtatgagaagaagcaaggcgaactttttcaggattatgggagttttgggtggattaattgctgtaggaaaatggtttgaccagatttgcaactggaaaaatccaatcacaacagttctgatccatatcctgttcataatattggtcatgtaccctgagcttatcttaccaacaatcttcctttacctcttcttgatcggagtttggtactacagatggaggccaaggcacccacctcacatggacactcgcctctcccatgcagattctgcgcatactgatgaactggatgaagagtttgacacattcccaaccaccaggctcagacatcgtgaggatgcgatacgaccgacttagaagcattgctgggaggatacagactgtggttggtgatttggccactca

SEQ ID NO: 3360 - DNA, 305 bp, Glycine max
  Clone ID: jC-gmfl02220055e04a1
ctggaacatggacatctgacctatagatgtcttcacgcacagagatgaaccttattcaatgactgggatggcatatttaccggacaacctggcggtgcgatctccaagacatctgctatctcatgtcaatcagcaggagccagtgatgctgatgagaacgactgtattacctctcatgatgatggtgcacatcccaaagatcataaaggtgatcacgctcttgccgttcatggcttggctgacgcttgtagattcggttgtaatgatgcagagttgatctcacatggcataatgacgtagcatgc

SEQ ID NO: 3361 - DNA, 458 bp, Glycine max
  Clone ID: jC-gmfl02220055e05a1
aaataaaaaaaaaaaaagaaataggaaggagataggaaagggttaattgaatccaaaaaaaagaagagaaaaacaaaatgggcagggtttggacttcgatgatagcattgttgctttgcctgatgacatcatcggttcggggcgaggacccttacatttactacacatggaacgtgacctacggcaccattgccccattgggtgtcccccaacagggtatcctcatcaatggtcagtttcccggccccgaaatcaactccaccagcaacaacaacgtggtcatcaatgtcttcaacaacctcgatgagcctctcttgatcacatggcatggtgtccaacagaggaagaactcttggcaagatggcacattgggtgcccagtgccctatcgccccaggcaccaactacacctaccgctttcagggtaaggatcaaattggaacttacttctactacccg

SEQ ID NO: 3362 - DNA, 514 bp, Glycine max
  Clone ID: jC-gmfl02220055e06a1
tgctattgccattagtatttttgttagtttcacctttgctgccatgtatggtattgctgttgctgcgcttggcatgctgagtaccattgccaccggattggccattgatgcatatggtccaatcagtgacaatgctggaggtattgctgaaatggctggtatgagtcacagaattagagagagaactgatgcccttgatgctgccggaaacacgactgccgctattgggaagggatttgccattggttctgctgcccttgtatcactggccctctttggtgcctttgtgagccgagctgctattacaactgttgatgtgttgactccaaaggttttcattggtttgattgtgggtgcaatgcttccttactggttttctgctatgactatgaagagtgtgggaagtgctgctctgaagatggttgaagaatacgcatgcaattcaacaccattccagggttgatggaaggaactgctaacctgactatgccaatgtgttagaactcactgatgc

SEQ ID NO: 3363 - DNA, 520 bp, Glycine max
  Clone ID: jC-gmfl02220055e07a1
gttactttctttaaagttgttgctacttgctagtatccaatattagcttactactagggtgtttgaaagagatggggaagacaggcaaatggcttagaaacttgttgacaggtaagaaagacaaggaaaaagagaagggaaaatctacaaccaacctgaattgttcttcaaatggaacagaaaactcaaccactccaacttgcacaaccccaaaggagaaaaagagatggagttttagaagatcatcagcctcagccactactgccacaaccacaccaccaacaacttccaaggaattgaattttgtagaaacaaatgtgactgtttcacagacggtgcaaactgacactgatattcagaatgagcagaggaagcatgccatggctgtggctgctgccactgcagtagcagctgatgctgcagtggcagctgctcatgctgtagctgctgtgatccgtttgacttctgcttccaatggaacatctaagagcattgaagaggcttgtgccatcaaaatcca

SEQ ID NO: 3364 - DNA, 554 bp, Glycine max
  unsure (1)..(554): unsure at all n locations
  Clone ID: jC-gmfl02220055e08a1
ataccttcttcttcttcgaccttcgatttgggcccaacacaaacgcaccattggctccgatcactgcgcgacccaattccatggcggctggccctacaacaacatcaccctccgatcgacccaccatggtccctcccccaatgctcgtctccgactccttcgccaaggacgccatcctcgcctggttccgcggcgagttcgctgccgccaacgccatcatcgacgccctctgcgcccacctctccgcctcctccgcccacgattacgacgccgtcttcaccgccatccaccgccgcaggctcaactggatccccgtcctgcagatgcagaagtaccactccatcgccgacgtcacgctcgagctcgccagactcgacgacagaaaccacaactctgccgccgacgaacacgaaaccgacgacaaaacgacgccgtcggagagtgtcggaaatggtggtggcggtgacgaacacgaggagtatgagtcccncgagagcgagattactgattcaggatctcaagaaatgcctgctagtcccatgaccgtaatatat

SEQ ID NO: 3365 - DNA, 593 bp, Glycine max
  Clone ID: jC-gmfl02220055e09a1
caaagtttcttcctttctctgctctttgccttctctgacacatttggtgccttgtagagcgtgttttggcaggaaggtggtatggcgaaggacgttgaggttgctgagcgtggctccttctctgggaaggactaccaggaccctccaccagcaccactcattgatgctgaggagctcacaaagtggtccttttacagggctctcattgctgaattcattgccactttgctcttcctctacattactgtgctcacagtcatagggtacaagcaccagactgacctcaaggaaaatggtgaaatctgtggtggggttggcattcttggcattgcatgggcctttggtggcatgatcttcatccttgtctactgcactgctgggatctcagggggtcacattaacccagcggtgacatttgggcttgttttggctcgcaaggtgtctttgatccgagccatcatgtacatggtggctcaatgcttatgtgctatctgtggagttggtttggttttcgcttctcaaaagttctacttcaacaagtatggtggtggggctaatttcctcgctgctgggtacagcacaggtactggatt

SEQ ID NO: 3366 - DNA, 531 bp, Glycine max
  unsure (1)..(531): unsure at all n locations
  Clone ID: jC-gmfl02220055e09d1
ctcactaaagccaaataaaagaaacataagatgatgtacaatgctaaaagtatatgtttgtcgttaattagataccctgctaacttaaccatattcaaacggcaaaccaaattgatatttaacataaaaactgaacggaaagtgctttttcatttgatactgaaccagattaccagcccatcagtgttcttctaactttgtcaacaatctgagttcttgcttggcttctggtcaatggaaagtcacggctttcctccaacaaaaatctatacacttcccattgacgttcttgtgttgaatgtctaacaacttcagccgagaaaatgcctactcccaacgcttttaaagtcaacgtaacatcatagaatacacggggtctcccctttccactcagctccacaggattagcaaccagaagttctgtgtctggaccccggttcactatcgtcacccgcaacggatgaagcatctcttctttaagcatgaacacaaggttntctggctttaggatctatgatctttttccatcgt

SEQ ID NO: 3367 - DNA, 640 bp, Glycine max
  Clone ID: jC-gmfl02220055e10a1
agaggacaagggtaactgaatcgccgcttctgcagcttcgttctttcgtttttgtttcatctttttagcttcagagggtaaataaaaaatggaggttttggtgggtcccgctttcaccatcgacgttccctcgtctccgccgcagcatgccggttccgatgatcggatctttcttaacgtgtcacccgaagaaggtgatgggtcgaactttcgtatttcgggcccacccaagttcttcgccggcggcgagtcggagagttcgtcgtcgatcggaacccctgatgacagcgacaacgaggaggaggaagaagtgcagagccagttaaagatacgaactgggttgggttctttggatgctttggaagaatctcttcccatcaagttaattcctttaattttctcttttcatcccgcttctttgatttgattctcgtaatcatcgaatgcttttctttaacccttagattagatcctttctattttgagtcggatataattataatattcttttcatttatttttggtggtaataagtaataactaatactaactagtaaagtagtaactggtgtgtgtgatctttggtaattcgatcttggattatggaatctgatacggtatcgtttgggatttatggtag

SEQ ID NO: 3368 - DNA, 524 bp, Glycine max
  Clone ID: jC-gmfl02220055e10d1
ctcactaaagccaaataaaagaaacataagatgatgtacaatgctaaaagtatatgtttgtcgttaattagataccctgctaacttaaccatattcaaacggcaaaccaaattgatatttaacataaaaactgaacggaaagtgctttttcatttgatactgaaccagattaccagcccatcagtgttcttctaactttgtcaacaatctgagttcttgcttggcttctggtcaatggaaagtcacggctttcctccaacaaaaatctatacacttcccattgacgttcttgtgttgaatgtctaacaacttcagccgagaaaatgcctactcccaacgcttttaaagtcaacgtaacatcatagaatacacggggtctcccctttccactcagctccacaggattagcaaccagaagttctgtgtctggaccccggttcactatcgtcacccgcaacggatgaagcatctcttcttttaagcatgaacacaaggttttctggctttcaggatctatgatcttt

SEQ ID NO: 3369 - DNA, 523 bp, Glycine max
  Clone ID: jC-gmfl02220055e11a1
ccactttctatattttgcaactcttggagctgaaacactcacgcacttcatcaaaactctcctcagttatccctccaacagaagataaaacatggttctagttgcaagtcatggcgaggaggaaaagggggcagaaggcattgctgctgttgattttcgaggtcaccctgtggacaagacaaaaactggaggatggctagcagcagggctcatcttaggtactgaactggcagaaagaatatgtgtaatgggcataagcatgaacttagtgacctacttggttggagttttgaatctcccttcagctgattctgccaccatagttaccaatgtcatgggaactctcaacctgcttggccttcttggtggcttcatagctgatgccaaacttggcagatacgtaactgttgccatatctgcaatcatagctgctttgggggtgtgtttgttaactgtggctacaaccattcctagcatgaggcctcctgtgtgcagcagtgtcagataacaacaccatgaatgc

SEQ ID NO: 3370 - DNA, 447 bp, Glycine max
  Clone ID: jC-gmfl02220055e11d1
gcaaaatatatagaaagtgttgattgattaatttgacttgtttaagtgttcaatatagctgatgaagccatcgctctctctctctcccaccctttccttatacttctgcttatattctcctatagccaattctataaagaaaaagatggctatttggagcagcaattattgagacaaggatgcctatatatacatgattggccaaatgtatttgtccaattgatacaatcaattatcagtcagaagcggggtctcttggcttccctctatgtcattactcgaactagtatcagctggcttcagcaagcaagcaaaacaaagagaaattatcatgcatatggatgcacatataatgctaaaacctttgcattcaaaaggagcattgctagataaaaaccatgaagtcaatggacctcatagcataggagatagcaaatcagatataga

SEQ ID NO: 3371 - DNA, 532 bp, Glycine max
  Clone ID: jC-gmfl02220055e12a1
ctgtcatcttgtcattcaccgagaaagtcgtactgattcctcttcatctttcgttaaagcgagtacttttcgttcttgatctgttggttacgatgtcgtattcaaggagatctaggtattctccttctccttctccttctccatacaagcgatacggtaggtctgtgtccaggtctctctcaatatcaagatccagaagccgttcaaggagtttatcaagagatgcagaaaatccaggaaacaatttgtatgtgacaggattgtctcctaggattaccaagagagaactggagaaacattttgctgctgaaggaaaagtgatagatgtccatctggtagttgatccttggacaagggaatcccgtgggtttggctttgtgacaatggagactcttgaggaggctgaacgatgtgtaaagtatctgaatcgctctgtacttgaagggcgtgtcatcacggtggagaaggtataatacttacctagctatgccctattttgtgtgcctgggactttattagctatgatttttta

SEQ ID NO: 3372 - DNA, 500 bp, Glycine max
  Clone ID: jC-gmfl02220055e12d1
gacaactatggattattttatttatataccaaagtaatcatacaaataaaatattttgaactaagatggggtacatctagattttgtgtaccaactccttaaaaattgtctctataccctgcttctgctattggaagcaatggaaatcctctgatcctgaagcatgttcaagttgggagccagcaaccgtgtgtaccggtcaaagtacaagagctgtttcaggagaagagcaaattctctaggaaacttcaatccatatgattcactaacccgaaccacatcaagaaagagtgcattcatctgcctctcatcaacaactatattagcagcaacagcagttgcatttgtggctgttccagttgtagttgctacaactatttcagtgtccaattccttaattgatgagaatactttttccaaatctcttgcaaggccttagcatcaacatcctggtttgtagcacccatttcaattaaggaagatgccattgagtcataatc

SEQ ID NO: 3373 - DNA, 508 bp, Glycine max
  Clone ID: jC-gmfl02220055f01a1
aacaactctttccttgaaaaacataaagattctttgatgcatcgagcagcttttgcagaaatcttgcacattttggattcaaacagaaagtctgaggctgttaagttcgttgaagattcaacaaataacatagtgcccagaaatggagcacttggaccaatcagggaatggaatcttacagactgtattgcagttcacaagcttcttgaaacagttcttgctgatcaggatgctggattgagatggaaggtgcgttgtgcagagtatttcccatattctacatactttgagggatgccacagctctgcctctcccaactcggccttcagtcagttacgtaagaactctgaaaatgagagtctaaaccattcagtggatggtcaaaatgtgggctccatcacatcaaacgggaaactagaggcatttaaagatctcactatctgatcaaatcaaatacatccatcaggctaaagacacgtgcgtgttacccaatttggatgcttataaa

SEQ ID NO: 3374 - DNA, 476 bp, Glycine max
  Clone ID: jC-gmfl02220055f01d1
acaaggacaaacagttacctgaatttattatttctcgcagcatgaaagccacgatagacagtcaagtcaagcattatgatacatcagaccccaaaataccaacaacactactcagctgagcagttattatatcgtactttcacatgaaagtgtcataaaggcagataaaagcatatacattcaacacacacgaccataaggctcaagcacaaggcaatagtatgacttaaacggtgacacatttcagcaattattcttaaaacactgcagattttctgaatttgttcaaaatacaagagccttgttactgtagaaccacacattcttgtgaaccagccaccaccaccacagtagggtgttcgcttgtgctgactgcatcaacttcttttttgacactttgaacattgacatcctccaattcaccacagccaatggcttcaaaaacaagatcattgacttcttgaaacctctcttga

SEQ ID NO: 3375 - DNA, 556 bp, Glycine max
  Clone ID: jC-gmfl02220055f02a1
cacccaattgtctccccattaaacaataacatgaataatattaggaatggatacagagaagaaaaatcattctgctatttccaccccaaacaggtacttgttggggtgtgtcccctgtgcttgaatgagaggctcctcatactgtttgcaaaacaaggtcgccaccacaaccgttcttcttcttcatccatatcttcacacaggcttcaaagtaattccagacacagaaaaccaccctcttcttctattcacaagatctttgcttttggctctctcttcactcgcccagaatcccaccacaactatgactatgatgatgtctctcccactccagaagagtcattcatctcaatcaagtttgaagagaatggggtggcatcgtgggaaaagagcacagtgtcaaagaaggtgtcgtcgtggaaccatcaaaacaaggagaacaagagagtgatagagcatgggaagtcacgtgacacgtttaggtggcgaaagaggatagggcacatgctccagctcattcggtggaagaagagcggggtgtgtgccacgtgggcac

SEQ ID NO: 3376 - DNA, 481 bp, Glycine max
  Clone ID: jC-gmfl02220055f03a1
gatcaacatatttttgttgacatatcactttgacatacatcttaatatccttcaaatttttcagaaaaccaaaaactataaatcccttatgcagtaccaagcaccaaaatgctttcaattaattgacttctgagttatcacaacttggctcaattctatattagaaggtgaagtgtagaatagagctccattaacttacaaccacatcgccctcctcacccattgcaactgcagctcgcacagctaccctcctaatgtcatggagaaaaagtctatgaccatttggaagaggtggataatagtcattctctccatatttcaggtagtcctgcatcgtccatcctaccccagctaacatatcatccaatatgtccaatggatcttcactcttgggattgtcagatgtcagcatggtcacttcacttttatctggtgctatcttggtcatcacgggcctctttcccctggtcgccttaccaca

SEQ ID NO: 3377 - DNA, 521 bp, Glycine max
  unsure (1)..(521): unsure at all n locations
  Clone ID: jC-gmfl02220055f04a1
cacgatggttgaaatttgaagcaaagcacgtgtttgtgtgtgaccttctctctctctaaactccgatggctttctctgcaatcactaccttgccctctcctcaatttctccgccttcctcaatcttcaccctctcttcgattttcaccgccaattctcaaacgccccaaacccctctccattcgatcagtttcaatccccgctgcaccagcatctggttctctggcccctgcagtttcacttacggataatgcgctgaagcacttgaataagatgaggtctgaacgaaatcaagatttatgtttaagaataggtgtcaaacagggagggtgctctggtatgtcatacacaatggattttgaagacagggctaataaaaggccagatgattcaattattgagtatgaaggttntgaaattgtttgtgatcctaagagcctactcttcatatttggcatgcaattagattacagtgatgctctgattggnggaagcttctctttcaagaatcctaacgcgaca

SEQ ID NO: 3378 - DNA, 524 bp, Glycine max
  Clone ID: jC-gmfl02220055f05a1
cagagggtccagaatctctcgtgtcatcaatcaaaccttttgcagttactacggctaatcaagaaacctactcaagttcatctagtttgcggatagtttcaaaaacaaatccaccttcagcagaagaatagttagaccaacaggattgattcttgctcatattttcagaagcttcctgcattcttatcgaatgaggtgctcgatagtctgaagaacggttggatcacattcacttgatagactaattttttattgggaccatgttttggagggcatgaaacttctcattaattgggaccaagtcatggcaaccacagagcaacccggtcatgttacaatgcttctatgaaaaggagctatgatgcccatcaccgacacgcacatattgggcttggttgctaatttgaggcaaaataatgaaaggactttgatacgggcatgtgatcagatctaaagagataacttttgtctatttttgggtgttttttttttacaagttcacgtcattgttttccacgatctca

SEQ ID NO: 3379 - DNA, 584 bp, Glycine max
  Clone ID: jC-gmfl02220055f06a1
aagaaaagtcaaagacaatgtcagggatcattcacaagattgaggagacccttcatgtgggaggccacaagaaggaggaggagcacaagggtgagcagcaccatggtggagaatacaaaggggagcatcatggtgaacacagtactgaatacaaaggagagcatcatgttggtgagcacaagccggagcaccatggaggagaagagcacaaagaggggttcctagacaagatcaaggacaagatccacggcgaggagggtggcgccaccgccgagggcgagaagaagaagatgaagaaggagaagaagaagcatgaacatggccatgacagcagcagcagcagtgaacagtgattagattatcttccactgctgcatcacctatatatcttataaggtgtatgggaccatagtagtgagggctgtgtctttctctttttttcctacttgtcatttatatttatgagcgagagaaatagtgcgtgtatcttgttgctaattcgagtgctattagtctgcggtttcgttgttcgtaacccctttgcttggttatgctggaatgatttatccttaaagaataaatga

SEQ ID NO: 3380 - DNA, 61 bp, Glycine max
  Clone ID: jC-gmfl02220055f07a1
tctgaattcggctcaaggagctaataacttcattgctttttcaccacacatcgcatgatgc

SEQ ID NO: 3381 - DNA, 314 bp, Glycine max
  Clone ID: jC-gmfl02220055f08a1
gattgctaaagtgaatgtaagggtatcacatgaatacctatagcaatcagcagtctggctcggcatatcaaggataactggagggaatcaagaccagtcatttactacacactattgcttctcttgcttgtctggcttatctggctccttcttttcaggttcttcctcttcctctttcttttcttcctcctcttcatcctcttctggaggatctgctgtcaactgctagctgctatggtgtcttcttaggactatattgagggaattatatccggtcttcgtccaggtttattgcctttcccacttcatgggga

SEQ ID NO: 3382 - DNA, 104 bp, Glycine max
  Clone ID: jC-gmfl02220055f09a1
gaagttggttttttagtttctgtaaaatattttctatttgattcacacttttcataatgacaagtgtgaatcaaatagaaaataaaatattcataatttttaat

SEQ ID NO: 3383 - DNA, 491 bp, Glycine max
  Clone ID: jC-gmfl02220055f09d1
agttattccgatattcggacgcatcaacttgttatgaaatcacattgatagcctctactcgtgtcctagctcgtctaagagctagatttgcctcaattgtttgtctcttgccttccgccttattcaaattagcttctgctatttcaagagtttgctgtgcttcttgtggatcaatgtcactacccttttccgcatcatttactaaaacagtgatctcattattgtttattctagcaaaaccgcccatcagagccatcgttaaccattggtctttaagaagacgtattctcaaaatacctatatctacggctgtggcaataggcgcatgatttggtaatactccaatttgtccgctattagtagataaaatgatttccttcacttccgaatcccaaacaattcgattgggggtcagtacacaaagatttaaagtcatttcttcaaattgctctccatttctaagttcgtagctttcgcagtagcttcatcga

SEQ ID NO: 3384 - DNA, 571 bp, Glycine max
  Clone ID: jC-gmfl02220055f10a1
gtctccaatggcaagagctactgcaactacaacaacaccattaagcaatctcacgcgcccttcgcacaccaagctttgccacttctctgcaaacaacgttcccttttctatccaaccctttcattccagattctaccacaaccaccgtttaaagcccataatcaccaattgccatggcaagctgaatagctcaggtgggggagaggcatatgcgatggatgaagcgggttttgacgagtacgatggagttgaagaggaaagcgatgacgaggatgatgcagagagtagcgtggatttgttgatcagattcttgcagagcatgtttaagaaggtgtctaagcgggcaaagaaagcatctcgctctgttttgcccacagtgatatcgccccagctcgtttcttttgccgttgatgggactctgctacttgcttcactttctgttgtcaaagcacttcttgaggtcatctgcactcttggaggtactgtatttgctgcaattctggtcctgcgtgtgatttgggcagcagtttcttacttccagtcaagtgggaatagcttcatcaagggggga

SEQ ID NO: 3385 - DNA, 172 bp, Glycine max
  Clone ID: jC-gmfl02220055f10d1
gggttaatggggaaagttatgagtagatataactggcgcggcaacagacccaaaaacaaacggaaaaagagcataagaacccaaaagacaggtaataatacagtggaaataaaacaggacaaaaaacagggagaaaccaagcaatcgcagcaggagtactaaaaccaggccc

SEQ ID NO: 3386 - DNA, 570 bp, Glycine max
  unsure (1)..(570): unsure at all n locations
  Clone ID: jC-gmfl02220055f11a1
gcttaaggtctacacaagttctctgcttcttctccccctattgacctttggtcatcacaagcgaaaacccacttctggatcttctggtgtaaaggccattagaagctttagaaattttctaattgagttggtgtatagtgttgaagggggtgaaatctggagcccagtttgttagttgttactcacttcatctgtaagctcataggttgaaccctctttttttggagacttacctgggaaaagatgatgatgtttgaagatatggggttttgtggcgatttggatatgttatgtgtttctcttggagagggggatattgctgtgagacaaactgaaccggatcctgtagttgaggatgactacagtgatgaagaaattgatgtggatgaacttgagaagaggatgtggagggacataatgcgtcacaagcgattgaaagaacaaaccaagtccaaggaagggactgatgcaacatagcanaggcaatcccaagagcaggcaaggaggaaaaagatgtcatgagctcaagatggaatactgaagtacatgctgaaaatgatgaagtttgca

SEQ ID NO: 3387 - DNA, 407 bp, Glycine max
  Clone ID: jC-gmfl02220055f11d1
gtaaaaagcaagtaacattaagttggattgggatacacaagataattcacattatctgaagtacattgcaataacatatacttcaccaaacacaaatctaaaaactctcaaaagtccacaagtcatccttttctttcatgctcacttgccggggacgaagttggtggcgtaggcccaggcattgttgttgactgggtccgcaaggtgatcagcaaggttctccaatggacccttaccggtgacaatggcctgaacaaagaacccaaacatagagaacatggccaatctcccgttcttgagttccttcaccttaagctcagcaaaagcctctgggtcatcagcaaggcccaatgggtcaaagctgccaccagggtagattgggtcagtgacctcaccgaggggcccac

SEQ ID NO: 3388 - DNA, 528 bp, Glycine max
  Clone ID: jC-gmfl02220055f12a1
caaaacattcaacaatgtcgtatttttcaaggggacgtcgcgacgacgacgacacggtggacgactacgacgagtacgaccccaccccatacggcggcggctacgacattcacctcacctacggccgccccgtctctccttcagaagaaacctgctacccactcggagcctcttccgatgaaaacttcgattacgatcgcccccagtacacctcttacgctgaaccctctgcttatggcgatgaagccctggccactgagtatagcagttactctcgccctaagcccaggcccgctcctgcaggcttcaatcccgccgccggatccgggtatggtaggaagcaggagtcggaatacggatccgggtatggaaggaaggaagaaggagaatacgggtcaggatatggtggaagaaaggaggaatcagaatacggatccgggtatgggaggaaggaagaaggtgaatatgggtccgggtatggtgggagataggaggattcttgatatggatccgggtatggtagaaaac

SEQ ID NO: 3389 - DNA, 312 bp, Glycine max
  Clone ID: jC-gmfl02220055f12d1
agcaagcaaaaattggaaaaccccattaaaaccccaaagggacataattggggggaagtccaaaccttttacataaagaatcaaaaattctttttcctttgaaagaaacccggaatacaacagagaattttgggggtccaaacttaattccttttaacccaagaattggcataaaaaagttgtcccctccttccttttacggttggggaacaagtaaaagggggaaacttaaggttttttttccaaattggctggggaagaccccttacctttttgaagggggtaccccttagagctaaaaaattcgggggt

SEQ ID NO: 3390 - DNA, 489 bp, Glycine max
  Clone ID: jC-gmfl02220055g01a1
caacaactaatcagtggggattgtgtactgttatattgggcttctacatctatttgggacttcatgagcttattgtcatcggccttttatgccatatttctattttacgtctttgggctgcatcagtttgttggacgggtatctttggaccaacaatcctcatgcttttggaatatggacttgtaatcgcattattaacttattgccttacatttctcttttttgaccataccatggcgcataatgtggctctgttgatccacttgatctctggattgatactgatggtcatctcatatcattatgggactcatgccatcaacaatgaatgccaattctttaattaagaatgtgctcagaatatctcctgtaatgtgtttcgctgatggtcttgctttactagctcttttacggcaaggaatgaaagataaaacatgtgatggggtgatcgattggaatgctactggggctttcatctggaatcttgct

SEQ ID NO: 3391 - DNA, 489 bp, Glycine max
  Clone ID: jC-gmfl02220055g01d1
agaaaagagccacaataaattgaattaacataaaccaacccagatgtgtgcctatgatacattacaggttaggttcaaccactagacttataaatatcatgatgagggtgtaacagatctggtgttccgtccaaagccaagacctaagcccaagggagcattgtcatttctggttttgccatggttattattatggctacaatgcgtagaatgaacatgaccatgatttgttttggagtgggtactgttggaattggaattcacattaataacatgatggccatttccattgccccttgcatattcggaatggttatgcgagtctccatttgctaagttcgagcttcttgccatgtgcatcattcctataccctcctctgagctacctaattcttcaatgcactcaatatcttcgttgtaaccattgatcaagaaatcagaacagttcttcttgataccatgatcatatgggtttctgaatctaccacc

SEQ ID NO: 3392 - DNA, 537 bp, Glycine max
  unsure (1)..(537): unsure at all n locations
  Clone ID: jC-gmfl02220055g02a1
ctggcgcaacggggcaggctggtattcgcattgcacaaacgttgttaagggaaggttttagtgtacgtgctggagtccccgaacttgcttccgcacaagaacttgctcgtcttgctgctcaatacaagattatatcaaatgaacaggcaaagcgtctgaacgctgtgcaatcaagctttgacaatgcagacacaatagccaaagcaataggcaatgccagcaaggtggttgtcaccattggtcccacagagaacggtccaaccacagaggtctccgcatcagatgccttgcaagtggttcaggcagcacagctggcaggagtaggccatgtggctgtcatttacgacgagagcagcgccggggcctcaacctacaatgtgctggatggcctctcatctttcttcagcaacctcttctccaggtctcaaccgttgactatacaagagttcttgcagaaagtgattganacggatgtcaaatacaccttcatcaagacaagnttgaccgatgatttctcacccgagagtttctacaatg

SEQ ID NO: 3393 - DNA, 562 bp, Glycine max
  Clone ID: jC-gmfl02220055g03a1
atcgaaccagcagaatcagtccattaaggctcttaaggagcatgttgatgatgcccctaccattgcggatccatggtttcagagttacaactctaatgacttagaggtggaaagctctgaaatgggttattctgtggaggctcttcttttgctgcagaagtcaatgctggaaaagcaatggaacctttcctttgaaagagaagtgcttactgaaaattcgagtaagggaaaaaaatgtaggaaagtggcggtgacttgttctggggtgtctgcaaggcaaagaagaatgaataccaagaggaagaccgctattaaaacttgtggtgctatgcagctgaagtccaaaatcagtccagagctgcttcaacaccgtttgaagggctacgtaaaaggtctagtgagtgaggaattgctctctcatgcagaagttgtaaacctatcggagaaaataaaaagttgggctttccttagaggaacataaattcagactgaaagaaaaactatgatgtgaaccctctgatgatcaaatgcaacttctttgaagatttctcgaactgaacta

SEQ ID NO: 3394 - DNA, 497 bp, Glycine max
  unsure (1)..(497): unsure at all n locations
  Clone ID: jC-gmfl02220055g04a1
gaaagaaatcaagcgccaggcgctcatggacctcgtggacttcatccaatccggctccggcaagataagcgagaactgccaagaagagatgatcagaatgatctccgtcaacatttttcggtgcctcccgccggcgtcgcacgaaaacacaggccaagaacccaccgatcccgaagaggaggaaccttccttggacccttcttggccccaccttcagctcgtctacgagcttctcctcagatacgtggtttcctccgacaccgatacgaaaatcgcgaaacggtacatcgaccactcctttgttctcaagttgctcgatttgtttgactctgaggacccacgggagagggagtatttgaaaaccatactgcatcgtatatacgggaaattcatggtgcataggccctttattaggaaagctattaacaacattntttaccgctttatatatgagactgagaggcactctggtattggggagcttctggagattctgg

SEQ ID NO: 3395 - DNA, 512 bp, Glycine max
  Clone ID: jC-gmfl02220055g05a1
gccggcgacgccgtaatggcgcggtggttgcagtccgctggcctgcagcatctagcctctcccctcgcttccaccgccatcgatcatcgcctcctccctaaccttctcatgcagggttatggagcacagtctactgaggagaagcagaggcttttaaagttaatgagaaacctcaattttaatggggaatctggttcagagccatatacacccaccactcaatctttaggtgtggctgggtcggatgggttttattctcctgagttcaggggggagtttggagctgggcttttggatcttcatgctatggatgatacagagcttttgtctgagcatgtagtttcagaaccttttgagccatcacccttcatgcctggagatactagagtatctgaagacgatttcgatccaattaacaagcagctggaaagcggtgaagcagatactgatgcatcaatttccttacctatgaatagcacaagggaaaatatggtgctaagataaagttgtgg

SEQ ID NO: 3396 - DNA, 583 bp, Glycine max
  Clone ID: jC-gmfl02220055g06a1
ctcttcttttgttctttccatcatctcccacaactttctggttgccctggaatttccaacactaattcacataacccgaagttgaatgttaaggatctgacacttttttgagatagaatgagatgcatgtcctaagagtatttgccagactttgtcggaattccattgtaaattttcaagtgaaatctgttctggaaatttcctttgttcattgagatttttagaggtgcataagatttttcaagttttgaagatatatttctcttgagaaaaaaagacggattttgaaactctgaactttgtgcaagtcgtacgttacagggacgatcgctacttggccatcgtctcagatagaagctctgaagtgtcattattagttgagttttcggcatagatttacattttccatagctctggaactgaaatctggacaattttcctaaacggttgaaccagagtttcagcaggagcagatttaggaaatagaaaaattggctccttttccccttagtttcagaaggattgattgctcgacgactgttaattttgtaaggcacgggttcaagagatgggagaagagtca

SEQ ID NO: 3397 - DNA, 485 bp, Glycine max
  Clone ID: jC-gmfl02220055g08a1
atcttatgatgcattaagcaaggatctgcgcccatctttggactggtgtccagaagaaggttggactgtgcctgttcctatgcctatgggtggtgaatgcaggcaaccttgtgctcgtataatgaatccagcaaattcagatggaacagtaaaggttggccagcatatggcaaggacagtttcttctcctttgtctttaaatttgaaagactgtccagaaagatccactgcgaggagaaagcaatgcaacaatgctagaaatgatatggagattgatgagtctggtagtaaagttgaaagtgtttgtttctcaagtaaccgttcaaattcgcacataatggatgcatcaattgagaaattcggaaaaggctaccatcaatggtggatataatgagtatcccacaaagaagaggagcgccagaagcctttgtctgattccatgtcttccaatacggtagaagctgcactcatagacttggaggaac

SEQ ID NO: 3398 - DNA, 448 bp, Glycine max
  unsure (1)..(448): unsure at all n locations
  Clone ID: jC-gmfl02220055g08d1
aaacaatacatttcattcaatatataatttactggaaagagattgttgtaacatccataagcagttttaacagaattgaaatagtgtacaaaaacagtttatttcaccacctaagcagggcggcagggcagggggttggagaaaaaccaaaatgctaacacaagcacattgttctaaccacccattttcagacatagcaacctaagccattacggtggatattcaacagtcaacactacgcactagaaataggtcaggcaacattaaatattgtgctacctaatgccctctttcaaatncaatgcgagtcctacctgaacctncctcgttaccatcccgcatagatgatccagcacttgccctcatagtcctttcaccacccactttctccatggccttcttacccttctcacctcagtcaagaactgatccaaaccaaacggatcag

SEQ ID NO: 3399 - DNA, 575 bp, Glycine max
  unsure (1)..(575): unsure at all n locations
  Clone ID: jC-gmfl02220055g09a1
gtcgtcgtggtcgtgtcgcagcaaaaccaagccacccactaacttgtttggtccaagacatggctctgatcctgcatgctaccaaaacaaacaagaatgccttcaagactctgattgcggcagagtacagtggtgtccaagtggaattggcccctaatttcgagatgggtgtctctaacaaaactcctgaatttctcaagatgaatcctattggaaaggttcctgttttggaaacgcccgatggtccagtctttgagagcaatgcaatcgctcgttacgttgctcgactaaagggtgacaacgctttgttctcatcttctgccattgataatgcccacattgaccagtggattgatttttcatccttggagatcgatgctaatctcatgaaattgctcctaccaagacttggatttgccccataccttccttcagttgaggagggtgcaaattctgcgttgaagagagcatttgaggccttgaacactcatcttgcctncaatacttacctttgttggccattcctgttacccttgctgacatcataacaacatgcaacttgtatttaggattca

SEQ ID NO: 3400 - DNA, 447 bp, Glycine max
  Clone ID: jC-gmfl02220055g09d1
gccataattacatcaaattctatacccctgctttattgacatcaagtacaagaagtagcagcttcactctaataatttccccaccttattacctcaaatatacttacaatataagtaaaaaaaaacctgttggtaatggtattaatattcatatccataaaaactttcaacatgacacagaaaaaaaaatggcagcttatccttaaactcaactatatataaaaaaaaagggttacatgaattcaagtgccgatggaatcagcactaacccaagtccaataatgcttcttaacagaaacagcttcatccgcaacaattttgtcttcaaaaacccctccatactcatccacctcgtaggtgcaaaaatccccttcgggcaaacactccacggtggcactgagcgtgtgcaaaacgtagcaaccgggcaaacccgggtaagaacccgaa

SEQ ID NO: 3401 - DNA, 533 bp, Glycine max
  Clone ID: jC-gmfl02220055g10a1
gtggaagcacacaacatgtttggctatgagaccattcctgaagagtgcgttgaagcaacaaaggaatacatccatggcgaacaatatagatcagactacaaaacagttaaccaacaagcttacttttatgccagagacctcgaagtccattccaaggacacatttgtgttcagtatagatggcaccgtactctctaatattccatactacaaaaaacatggatatggggtggagaaatttaactcgaccttgtatgatgaatgggttaacaagggcaatgcaccggcactgcccgagactcttaagaattacaacacgctggtgtctcttggcttcaagattatattgttgtcaggaagaacactggacaaacaggccgtaacagaagcaaacttaaagaaagctggctaccacacatgggaagaattaattctcaaggatccacacgatccttccactgcaaatgcagatgcatacaaaacagcagcgagagagagactgatcatgcaaggatacaacatcggtgggatcat

SEQ ID NO: 3402 - DNA, 510 bp, Glycine max
  unsure (1)..(510): unsure at all n locations
  Clone ID: jC-gmfl02220055g10d1
aagttgaaaggcgttgatttatagtgataactaaagattaatcgttaaacaattaccaataataaaacaaaaacaagtgaaagaatttactctgccatcaactcagttatctgatttaacaacacattttttcatcatataaaacgagaacgccgtattttaatttctttcaccaagctaccctgtaggctgtgcagcatttagaagcatttcctgtgtacaattgaaggaccagcctcatcgtactcagcctttgcaatccacatctgttggaaagtgctgagagaagccaagatagagccaccaatccagacactgtactttctctcaggtggagcaaccaccttaatcttcatgctgcttggggccaaagctgagatttccttgctcattctgtcagcaatacctgggaacatggtagaaccaccactgagaacgatgtttccatacaagtccttcctaatatcgacatcacatttcatgattggaatgtangtggtttcatgaatg

SEQ ID NO: 3403 - DNA, 581 bp, Glycine max
  Clone ID: jC-gmfl02220055g11a1
agttttgttgcagagcttagcccaattcttgatgcgggtaaaggtgatgccctgagctccactggtgatttaaacttaccatctcacccgacagcagctgaggaaccattacgacaagcagatgtgcatcaccatcatcatcaaagaatttctgcggaggattcttcaagaagttctaaagttgaggtgggtacaaagaacggtgtttcaggtaatcaatgggattcaggctcagaaaattcacccattgttccatcccctggaacattgggcctggctatagacaccacttggagacttggcttagagaatacacacttgggatggagtggaatagatcaaggaaatgcaaatgtgggttggggagtaggacagactgcagtgcaggaaaacagaagttcaagttcgtacacttctacagtaactccaggccttggggatagtcaaacaagatatggcagtgatcgattttctgtgtccagagatcggcgttttcaaggtcatggtagggaatcaggtttagtagaagcagaattcttataacaggcaaccgtcatatggtgttggaaatgaggatcata

SEQ ID NO: 3404 - DNA, 452 bp, Glycine max
  Clone ID: jC-gmfl02220055g11d1
cattgattgccgagattcaaccatgttatattgagacaatcaatcaagtacacaactcacagcaaaaaggtttataagctgtaaaggtacatgtaaccataaacaaaaatagtctccaagactataaaaacattacattttagacaaattagtcttcttccacttcatcctccgtcaacacctactacaactgctggtgttgctgctgcctaacatgtatcatattcactacaaacatcttagtaggagtagcctttgacgaacaactccttcttggcttcctcagattcaccctcaccggtgtacttcccaagctgggcgagcgagttggacttggcacggaaaagaagtgcatcttgtgccgccttcacattctctgggcggcctccccatgtcttcaggcagtgttttggagggctctggcatacgagaacgacacgtgccacgggttt

SEQ ID NO: 3405 - DNA, 538 bp, Glycine max
  Clone ID: jC-gmfl02220055g12a1
ccaaaagaacaacatggacattgatctttctcctcagttgcccaagaaagtttacggtgccaatggtggctcctactacgcatggtccccctccgaccttcccatgctccaccaaggcaacattggtgccgctaagcttgctctcaacaaaaacgcctttgctcttcctcgttactctgactcttccaaagtcgcttatgttcttcaaggtagtggagtggctggaatagtgttgcctgaatcagaagagaaggttgttgcaataaagaagggtgatgccttggcactcccctttggtgttgtgacctggtggtataacaaggaagaaactgagttggttgttctgttccttggggacacttccaaggctcacaaggctggtgaattcactgacttttttctgactggttccaatggaatcttcactggcttttccaccgagtttgtgggcagggcttgggacttggaagagagtcatgtcaagaccctttgtggaaaacaaccagcccaagggattgtgcagctggaaggaaacatc

SEQ ID NO: 3406 - DNA, 506 bp, Glycine max
  unsure (1)..(506): unsure at all n locations
  Clone ID: jC-gmfl02220055g12d1
cttaaagtagtagttctagcggttgactcgcttttttcaaattgtttttcattattaagaaaaggtaacaaagataaaatacgagcttgttttatagcaattgttattaatcgttgttgttttaaggtcaatctatttacgcgtctggataatatttttccttgttcactaataaatcgactaattaaacccatgtttttataatcaattcggtcccccgattggatcgggggcaaacgcctacgaaaagatcgcttggatttcataaagagtcgcttagatttttccatggtttatttatccctattccaaaatcacatttattacaagaaatactataaaggatttgtttttttattctgactnttttaatatantgttgtatttttttaatatatgttgntatatactgatatttgtatatattcaactgtaaatgatagaatacagatagatctatctatatagattagaaaaatagatcattttacatgttaagttctttg

SEQ ID NO: 3407 - DNA, 490 bp, Glycine max
  Clone ID: jC-gmfl02220055h01a1
ggtcattccaagcatttttctccccgaagactggtccttcactttttacgaaggcattaatagacatccagactccattttcaaggagaggactgttgccgagttaggttgcggaaatggatggatttccattgccatggccgagaagtggttaccatacaaggtctatggccttgatatcaatcctagagcggtcaaggtttcctggataaacttatacttgaatgctttagatgaaaatggccagctaatctatgacgaggagaataaaactttgctggatagggtagagttccatgaatctgatcttctatcctattgcagggaaaaagacattcaacttgaaagaattgttggatgcatacctcagattcttaatccaaatccagatgcaatgtctaagatgataacagaaaatgcaagcgaggaattcctgcattcattgagtaattattgtgcacttcagggttttgtggaggaccaatttggc

SEQ ID NO: 3408 - DNA, 441 bp, Glycine max
  Clone ID: jC-gmfl02220055h01d1
aaatagtcttgcatgtcatctttaaagtaattattacaggaggtgagattttcaattatataacaatctaggatcatataacaaagtaaaaaatacacacttttgggtcttggaaaaggaacacagatattactaagccaattcgtcttccattctttccttcttctcttctcttggtccaacaactataagaaactaaatcaagctagtaaaaatctcccatgttcatcagcaaaaacccctaatttaacagaacatcttatttgccaaatatgtcactgcttctacttgcaagttgcaacactctactctagaagaacatgggcttcattttctcctcactctatggttaagaccttccctacgagttgaggaagatgaggaagacaccgtagatgaaaaaccagaatggtatttcagccatatccttgtgaaatgcct

SEQ ID NO: 3409 - DNA, 581 bp, Glycine max
  unsure (1)..(581): unsure at all n locations
  Clone ID: jC-gmfl02220055h02a1
cgcgcagcagcacgagctcgccgccacctccgactcctacctccagctccggagccgtcgcctccagaagcctccgattttggtccactctccgaagcgccctaagcacccgaaccctaaatccccaatccccgaacctcccaggctcggactcgcttcggagcgcgacgctaccctcaaccacaacaaggacaatactttgcatgagaatgccgagcctcaggaagcgtcgttcggggaaaatgttttggattttgaaggtagagagagaagcactagggaatccacaccttgcagtttgataagggactcggatactgtcaggactccgggttcaactaccaggcctacttgttcagctgaagcttatcgaagaacagagcatgcagctagaaggcaaatcccaacctcccgtgaaatggatgaattctttgctgaaattgaagaggctcagcaaaaaaaattcattgagaagtacaactntgatcctgtgaatgagaagccgctctcagggcgctatgaatggngaaaagtgaaaccctagaagggtaatgagtggtccatcaagacatccttgaagt

SEQ ID NO: 3410 - DNA, 556 bp, Glycine max
  Clone ID: jC-gmfl02220055h03a1
cttcttgttctgcaagtttaatggcgtgagagagtgtgtagagtacacctacggttcggttcggttcggttcccagaaaccgtatgagaatgttgaatctttgcatgcttcaccaactcctctcaaattaaaacccaataacccagatagatagatagatgtatgtgatcttgttgttttttctttttcaaatgctaatgcgattgtgagtcccttcatttgattgttcaacaaagtcctccactaccctacccacacgacgtcgtctcgttcttaatgggttaattttctttttccgttctgattcttctggggctccactgagtgagtgtgttagttttgtttttgttttgaaaaaatggcgagagagacgatagacaaagtgagagaccatggggaactggaggaggagctagaattgttgctggatgagatccctcacgccacatcacacaatcttcttcgccaccatcatcatcatcatcatcatcatcatggtgatgacgacgatgccgttttcgtaacgaaacagacacaccatggtcacgctcatgct

SEQ ID NO: 3411 - DNA, 553 bp, Glycine max
  unsure (1)..(553): unsure at all n locations
  Clone ID: jC-gmfl02220055h04a1
cgctgacagaataaggagagggccgcactgaacctttgccgcatggcacttcgatcctcgaaacttctctatcgcccttataatcttctctccgttcagttgcagatgcagatgcaaccctcttctcctcccctcactcgaaagatgagcacggatgcgcagagtattgcttcccagcttaatagttctggattgttgaggactcagggccttattgcagggaaatggagtgatgcttatgatggtaaaaccataaaggtttataatccagcaactggtgaatctgttgtagatgttgcatgcatgggtggaagagagacaaacgatgcaatttctgcagcctatgatgcatatggatcttggagccaaaccactgctgctgaacgaagcaaattactgaggaaatggtatgatttgctaatggtacattaaagatgaacttgcacagcttataaccttggagcaggtgaaacctcttaaagagtctgtgggtgagatagtctatggtgctggctttatcgagtntgcagctgaagaggcaatacgtatatat

SEQ ID NO: 3412 - DNA, 505 bp, Glycine max
  Clone ID: jC-gmfl02220055h05a1
tccaccttcaacaaaccctgtttctcttcttaaggaagcgatccatgtcatcagctgtggttacgaagacaagacagagtggggaaaagagattggatggatctatggctctgtgacagaagatatcttgactgggttcaagatgcatgctcgtggttggatttccatctattgcatgccacctcgcccagcatttaagggttctgcccctatcaatctttctgatcgtctcaatcaggtgcttcggtgggccttaggttcaattgagatctttcttagcaggcattgtcccttgtggtatggctacaatgggaagttgaagcctctgatgaggcttgcttatatcaacaccattgtctacccatttacctcaatcccattgattgcttactgtacgctttctgcattctggcctctcacaaataaatttattatttctcgggataagcaactttgccagcatgtggatcattcttctttcggctccatttttacactttaattc

SEQ ID NO: 3413 - DNA, 567 bp, Glycine max
  Clone ID: jC-gmfl02220055h06a1
atttcgcttcttcccccgcaaccctacccctcaatccccaaccctccgaatccgcaccagatccactcccccaatccgcaacaccaccctcatccacgcccatcgccacaaaccctaatcccaatccaacgcttcttcctccgccgcccgctctcctctttccggcgggcactccgccgcaggtccccggcgtactccctccctcattccgcccgctcgctccgcaattctcccccgtcccctcgcccaacccggccttccaaagccctgccgttcctccgcccggcgtgaccggcgccgccgtggcagttccgccgacgcagatgcagcagatgctttcgtaccagattcaacccggtaatccggccctgcggaccttcgctccgatccccaacggttacgctgcagctccgaccataactcccgcgggtgggtcattcattcattcattcaatcgtttgatgttcctttgtgaatccgcatttaaattcgatttaatttagtgtaattcaacgctccttcgttggatgcttcaatgtttatgactttggattattagtattatca

SEQ ID NO: 3414 - DNA, 540 bp, Glycine max
  Clone ID: jC-gmfl02220055h07a1
aagcactatagtaaaaaaaggacattcattcatctatggctacccttattgctcccagcaaccactctccccaagaagatgctgaagctctcagaaaggcttttgaaggatggggaactgatgagaacactgtcatagtaattttgggtcatagaactgtgtatcagaggcagcaaatcagaagagtttatgaggaaatttaccaggaggatcttgtgaagcgcctagagtctgagatcaaaggagactttgagaaagccgtgtaccgatggatactggaacctgcagatcgtgatgctgttttggccaatgttgccatcaagagtggcaaaaactacaatgtcattgtggaaaatgccactatcctctccccggaagagcttttggcggttagacgcgcctatctcaaccgctacaagcactccttggaagatgatgttgcagcttatacctctggccatctacgccagcttttagcgtggttggtgaccgcattcaggcatgttggtgatgagatcaatccaaatttggcacaatctg

SEQ ID NO: 3415 - DNA, 615 bp, Glycine max
  Clone ID: jC-gmfl02220055h08a1
gtcgtcgtggtcgtgtcgcagcaaaaccaagccacccactaacttgtttggtccaagacatggctctgatcctgcatgctaccaaaacaaacaagaatgccttcaagactctgattgcggcagagtacagtggcgtccaagtggaattggcccctaatttcgagatgggtgtctctaacaaaactcctgaatttctcaagatgaatcctattggaaaggttcctgttttggaaacgcccgatggtccagtctttgagagcaatgcaatcgctcgttacgttgctcgactaaagggtgacaacgctttgttctcatcttctgccattgataatgcccacattgaccagtggattgatttttcatccttggagatcgatgctaatctcatgaaattgctcctaccaagacttggatttgccccataccttcctccagttgaggagggtgcaaattctgcgttgaagagagcatttgaggccttgaacacttatcttgcctacatacttaccttgttggcattctgtacccttgtgacatataaaacatgcacttgatttaggatcacccgctcttagtaaagcttaccttgagttcctacgttgacgatctttggac

SEQ ID NO: 3416 - DNA, 403 bp, Glycine max
  Clone ID: jC-gmfl02220055h08d1
gcggccgccctttttttttttttttgtaaaatgcggtcagcctaattataaaggcaaagaaagtttaagagcacattgctcccccgaagatacaatgaagaaaccacttgcacagttgcactgtttgataataaattaatactaataactactatatgtttatcttatacgtaaaatttaacctgcaaattaaagtgcatacattcctctatgcactgagaatctataagccgtatcgaagatcctatttgaagaagaaccattatcctttaatcctgtggcagagattgctcctccattttacttgttctcaccatctttttctttttcttctgtgtcatcaactacattaaaagctgggtgtttgagaacgttgttgagcaactgtgtccctctgagagcg

SEQ ID NO: 3417 - DNA, 405 bp, Glycine max
  Clone ID: jC-gmfl02220055h09a1
aaaatctaccatagcggttccattttctgaatttctcgagcgaacttcgcccagttctagggttccccactgccatgtaccaggccgaattaacctccgaacaggttctgaggagggacatcccatgggagacctacatgtccaccaagctcatctcagggacgagccttcagctcttaaggcgctacgatcaccgaccagaaagtcacagagcacagctgctcgatgatgatggtccctcttatgttcgcgtgtttgttcgtgttttgcgtgacattttcaaggaagatactgtggagtatgttttggcactgatagatgaaatgcttgctgcaaacccgaagagagcaagactgtttcatgatagtgcccttgctgatgaagatacttatgagccttttctaa

SEQ ID NO: 3418 - DNA, 418 bp, Glycine max
  Clone ID: jC-gmfl02220055h09d1
aaaggaagaatttataaatatattaatttctcaagtagtaaattgttctacacaagaatatatatacaggaaaaatagttacatgaatcactttggcagtcgtgtagaagtagaaggccgtaggaagcaaatttatgaaatcttacttctgggaagtattttgtctcaacaagggatgatcaggtattcttctctaagacagagagtgctggtgtcaagtagttatttgctttgtcgggcaagtgtgcaaccagctcataaagctcccttccatcctcagcaatatactcgtaacatacatcaaagcttttgttccttgcagttgtatcatgtagtgccttcacacatatatcagctacatcagcacagctgatgccctgagatattctgtttccttgatcaaatattagagcacgct

SEQ ID NO: 3419 - DNA, 518 bp, Glycine max
  Clone ID: jC-gmfl02220055h10a1
caaaaacacaccacaacacaactcgttccagaattgccgactgaaatggaacgagttgtgttgtgctgtgtttttgtggaaaaagtcaaatcattctggaattttcattcatttgagagaaaagagaaaaacaagtgttctttgaatctgttgaaggtggtgatttgatttgatttgaataattcacataaccaattcatctattcattatctctccgatctttcaatggattctgacttctggacctcgcgtcttgccgccgctaaacgccaatacacgcttcagcatcaccatccaaactctcacttagatcggttgggaatcgatgattttgatatggaagaagaggtgagacccgatttcccttgcccctattgttatgaagactttgacatcgcgtctttgtgttctcatcttgaagatgaacattcttgtgaatcaagagtcacgatttgtcctatatgctccgataaagttgcacggaacatgttaagtcacataacgctgcaacatgggc

SEQ ID NO: 3420 - DNA, 492 bp, Glycine max
  unsure (1)..(492): unsure at all n locations
  Clone ID: jC-gmfl02220055h10d1
acaaaaatgattgaaatttatgacttaccaaccaattaacctttgcacttgtctagattcccaagagatagaagcaacttgatttctgtacacagacattgtaatattacaactatatattatgaaactaaacacataacttgcgagcctcaagctagccctagtagtattaggtcttcattcttgagatcaatttgattctctcaacgtggctttggatccacaatctcagagaaaacagtcccagacatcaacttatcactctctttgtagctactactaagctcttcgctatcagtactcacactcaccacaccgctactcttgttaaaatccgaaacctggcccacactggttccagtactaaacaaatcatcactagcctcctnctctcttctctcattaatntcattatcaacaatattagtattttcacgctgctcagcactctcctgcaactgcaacgcanactccagcatccaaacgacgtcg

SEQ ID NO: 3421 - DNA, 603 bp, Glycine max
  Clone ID: jC-gmfl02220055h11a1
agcatcccgacagagtgagttgtatagctaggcttagctatttcttacctcttggcatggccattcaaatgtcttcttttgtctttgtttctcttacaattttattttgcttctcttccttggagaagagttttgcctttcaaacaacaaaggaggacacagaaagcaacaatcttcatcaatatactcatcttgttcacctcagctcactccttccttcatcttcctgcagctcttctgccaaaggtcccaaaagaaaagcatcattagaagtggtacacaaacatgggccatgctcccaactgaataatcatgatggcaaagcaaagtctacaacaccacacagtgagattctgaaccaagacaaagaaagggttaagtacattaactcaaggatctcaaagaacttgggccaagatagtagtgtgagtgaattggactcagctacactaccagccaagtctggtagccttattgggtctgggaattactttgtggttgttggctttgaacacccaaggggacttgtactcatctttgacactgcagtgatctcacttggactcaatgtgaccatgtgcttgtcttgctacagcacaagat

SEQ ID NO: 3422 - DNA, 524 bp, Glycine max
  Clone ID: jC-gmfl02220055h11d1
ggcataaatgatgaaaacttccctcagcacagtcatttttaaagatcatattttgtttttcgtttgacagtcacagacaatcaaaggtactggaatgtgtgtgcggtacattacaacatgggaactgcttcaagagtagaaggaagtaaaagaacaccctatgacacccctgctatgcggaagttattgttagatgattcccaacttcagcagagaaaaagaatggcacataaaaagcaggcaatagatcgtggcaggccaaaaagatagaccgaaaacaggattacattattggtccaagtatgcagggagaatatcaaacgaagaaatgagaaatcctcgcctctcagcagctttaccctttgcaatctttgcacagggggttgacaactgatcataactattttcagattgcctacttggagtatgtggttggtccatgaagcttgtttcattatacagctcggtggaagataaaacattcagcagttgcgagtttttcaaaaatcgatgtctagtaaaac

SEQ ID NO: 3423 - DNA, 237 bp, Glycine max
  Clone ID: jC-gmfl02220055h12a1
agcatcccgacagagtgagttgtatagctaggcttagctatttcttacctcttggcatggccattcaaatgtcttcttttgtctttgtttctcttacaattttattttgcttctcttccttggagaagagttttgcctttcaaacaacaaaggaggacacagaaagcaacaatcttcatcaatatactcatcttgttcacctcagctcactccttccttcatcttcctgcagctctt

SEQ ID NO: 3424 - DNA, 441 bp, Glycine max
  Clone ID: jC-gmfl02220055h12d1
aaacacactcattgcacatagtaatgcgctttatttaagtgaataaaatattacatactagttcacaaatgcaaaaggacacttatcaaccagatatttgagactcttacagttctcaagaagtcgcgtcagcatagggttagtggcgttagaactcagaatttcattcttaacgccaaaaagaacagccagtaaagctactggaaaaggatcaactctagtaagaaaaacaattttcttacctttcccaagtgctgtgcgaatccttttgttgatatctgaggagcgattgttaactgcagaactaatccaagcagtgggtgggtaaaccaccacgttcactaccacatgtaacatttacaacgacagcttctgaaggtaattgacttacaggataaagacaattcacaaaattggtaaccaagaatccactggaaaatt

SEQ ID NO: 3425 - DNA, 515 bp, Glycine max
  Clone ID: jC-gmfl02220056a01a1
ctgaacctgctctgaatccaattcttcttcttcttgttctctgtttaaggcaatacaacatttactactcatactcaaagtagcttagtgttttgtttagcatatcatggagaataataatcagtcgttttggcaattcagtgaccagctgaggttacaggcatccaatttggcgaacctttctctaaacgattcgatttggagcaacaattacatctccaagaggcgtgatgaaaggattaattttgacatcaaagtggggggtgagatcaactctttcaagtcaaaggatccagcttgtgattacaacgataacgtgaatggatctcttcttgccatgccttacaacaacaacaacaacaacaacattattttgggtgttggtggagttggtctcaatggaggcttcaacaagggaatttactccaagcctgcctttgccaatctcaacaacaatattaatctcaatatcaatcctaagggacacaagggcaagggttgaagatgagcttttt

SEQ ID NO: 3426 - DNA, 485 bp, Glycine max
  Clone ID: jC-gmfl02220056a01d1
aaaccaaatcctccttagcacaaccacattcattatattacagagagttggcatgcacaattgcaccataagtgcaagaggctgtctaatgccatacatacagagagaggcaatgtatctgtgcctgtgccctccccagagttttaattattattattattattaaattgggccaggagtatgtatcttagcaggagaatacataaagcttaaggtttctcccaatcatgagatatacattataatacaagattaagctggaacagcttccggcactttgccattgcttgagagtactaagctatcatagtattcaaccagtaccttccaaccaccagggcacataaatccatcaggagggctttctttggtccttgccagtgtgcgcatctttgtgcctgatatgaacaggaagtcctgaggccttgaagggtcaaagaatgccattttaccctgagtcttgtcatatgcagcaaccctgaaag

SEQ ID NO: 3427 - DNA, 469 bp, Glycine max
  Clone ID: jC-gmfl02220056a02a1
ggaggttgcttctgtcgcttataggtataggaggtggaagcttgatgatgatatgtatcttgttgcgaggtgtgaggttcatagtgttgttgacgtgaacaagcagaggtcgttccttactttgaatgcgttgaatgagtttgatcccaagtattcgggtgtggactggaggcagaagttggagactcagaggggtgctgtgttggccactgagcttaagaacaatgcaaataagttggctaagtggactgctcaggctcttttggcgagcgcggatacgatgaagttggggtatgtgtcgaggattcatccccgtgatcatttcaatcatgtgattttggctgtggttggatataaacccagggactttgcggcacagattaatttgaacacgacgaatatgtgggggattgtgaagtctattgtggatttgtgcatgatattgaatgacgggaagtatgttcttgtg

SEQ ID NO: 3428 - DNA, 522 bp, Glycine max
  unsure (1)..(522): unsure at all n locations
  Clone ID: jC-gmfl02220056a02d1
gagggtcgacgagctcactacgcccttttttttttttttttggcataaatgatgaaaacttccctacagcacattgattctgcggaccagtaactataacttcattaattgagaatagtacataagtttacatgctcggtagcagacagccaaaatggctgattactattatttacaaaggaaacagatcatgagccactacacttgtcttgactcccttttaaccctttcatttttatgttcaagtgggaaaaagcagggcacacgaattggatttttcatacaaatgaccaatttatgaaagagaaagccaagcagtgaacatggttgtcttcccaagtaggaacttttccatgcaatggcttggtcatatgacacatggcgccccatcgtcgacatgcagatttcagctggcagattagcaaaaccctgctccattaacttggcaaagtctgtacacaatgccttgcgtncagcctcatcanatattttatccaatgtgatatcttgtaaggcaaacta

SEQ ID NO: 3429 - DNA, 524 bp, Glycine max
  Clone ID: jC-gmfl02220056a03a1
gaagcaattcctcactcctgaaaatctcatcctcttcttttacatttgttttggataaaacattttgctgatattgaatttttattttctcttgttttcgtttcttttcgacattttcttcttcttcttctgcttcggtgttttcagggagatagggataggagtaacaaagggagagtgcaatcagtttggttcttcgcttcgggactcgaatcttcgatgcctctctgttttttcttctctgccgcctctttttctgttctcaaattagggtttctgtgagagtgcctcttttctcgattctccgcaaactatcatcattgtaagggaaagcgatttgcgtttggacataatgtcgccaaaatatcagattctccacaatcgccccatcaatcagtggaaggttacagagctgaaagatgagctgaagaggaggaagataagtaccaagggtttgaaggatgatttggtcaaacgtttggacgaagtccttcgtctggaaaaggaggttgatgaggcttctg

SEQ ID NO: 3430 - DNA, 304 bp, Glycine max
  Clone ID: jC-gmfl02220056a03d1
gaataaaaacacacatcatattactatgtgttgtcatacatgcattgtaatgagtggatattccaaagcaattggtccctttatccctccttaatccttatgccgtaaatggcaccatcccttgtaaattgtaattgcttcttcagaaatagaattatacaaaggtagttgcaatatctatttgccaaactataaatgtaaagacccttcttcccaatcctagtagtgtcccaattgtatttacaaaggtgggacaagatatgtatatacaagtacaaccatgctcgagccgaatcggctcgag

SEQ ID NO: 3431 - DNA, 596 bp, Glycine max
  unsure (1)..(596): unsure at all n locations
  Clone ID: jC-gmfl02220056a04a1
attcgtttagtggtgctaaatggagttgagctgcctttaaaagcttaccttggatagattcgttaatagcattgtatactgaggaaaactttccagtcattatttcaacagcaagtgtacagagctattgagagaatatatgacaggtacagaactacagatcagagcccgtgtttttgtaaagagtgattgcatcctgtctatctagatttggggcacaattcaatgagtatttgcacaattgcttttggctaattttgcccggagcagagattggctggctgagcagcttcggactacttgcaaatgaattcttacaatagaggtataagcagcaaagaattgtatccataagctgctgatgctttcgttttgcactgctctcgcggtagatatagttttcaagaggattcacttgcaacaattcattgtgggacaacaganagatcaggcattttatggaagaaataaccgtgtcctttaatttggattcatagtcagatgtgtggtagttgctcaggaacatgtttaagttaatcaagccagctgacatagaatatatgtatttaggaatcaatttacccttcaaaagccta

SEQ ID NO: 3432 - DNA, 446 bp, Glycine max
  Clone ID: jC-gmfl02220056a04d1
attactagtatagtaatcgattccctaaatctatgaacccctccaactaaatccaataatttttttattttattattaatcaagaatttcgtatatagctagaacggccctcacaaattgcaaatactaatttgttaagaattaatcgaattgaggctatagcatcatcattagctggaattgaaatatcggcgaggtccgggtcacaatttgtatcgattaaacaaattgttggaatttccaaagttatacattctcgaagagccgtatattcttcttgttgatcgacgattattacaatatcaggtaaccccgtcatatatttaatgccgccaagatatgtttccaaatgagctaaatgtctcttcaatatagcggcatctctttttggaaaactattgagtctccccgtttttgttgcattctcaagtccctgaacttttgaa

SEQ ID NO: 3433 - DNA, 564 bp, Glycine max
  Clone ID: jC-gmfl02220056a05a1
gcggatgaggacacttttaggttggtatttaagaatcccggcatggaggatgaccccacttgtggccccatcattgacaacattgctattaagaagcttttcactcctgataaacccaaagacaacgcagtgatcaatggggattttgaagagggtccatggatgttcaggaacacttcactgggtgtgttgcttcccacaaatttggatgaagaagcgtcctcactacccggttggatagtcgaatccaaccgtgccgtccggtacattgattctgatcattactctgttccacaaggcaggagagccattgagttgctctcaggaaaggaaggaatcatatctcaaatggttgagaccaaaccagacaagctctacagcttgaccttctcattgggtcatgctgatgacaagtgcaaggagcctcttgctgttatggcctttgctggtgaccaggctcagaacattcactacactcccaattccaattccaccttccaaactgctaacgtcaatttcactgccaatgctgagaagactagaattgcattctatagcatatac

SEQ ID NO: 3434 - DNA, 525 bp, Glycine max
  Clone ID: jC-gmfl02220056a05d1
ggatatccaaacgaagccctatttcttgtcaaccagggcctctgaaaatttttaagtgcatagcatattttaactgtcatggtaaattattattacctacttcactgttccaaagaacaatctgattatgttttacagcacggaaaggagcgcagataagcaaagaaatggatttgtattatatactgtacatgatgctccacatccatgcaaaggagaaattttttccatcaagttgcctgcaataattctctgatatcgtacccttgaagctgcagaaaagtaagaaataatataactcctgagttccaaaaagaatggatagtgatgggagtgagaaggttgtgagtttgagcatatgaaaaccccaaagcagtccctagaacaaacaattggggaaattcttcaggagtgagatgtgcaagggcaaaaacagcagcactaatgacaacagcaactggcgtaggaacccacttagtgagggaagtcattaaaaatccccgaaaacagtcttctcaggagtgg

SEQ ID NO: 3435 - DNA, 461 bp, Glycine max
  Clone ID: jC-gmfl02220056a06a1
gaaagaagttctaaggaagagggaatatgcagaatacaaggtgctagttgtctatgtgcaataacaacatcagcgatccaaccttagtattcttcaacccagagagatttgtaataataaattacaacaacttaaacgatggcaggaggagcttatgtagattcgggaaatgcaaagcaatttgatgggaaggtcacggtattcgtattggttacatgctttgtggcagccatgggaggcttactcttcggttatgatcttggaataaccggaggagtgacttctatggaaccatttctcatcaaattcttttccggtgattataaacaaatgcatgatgatgttggccatagaagccaatattgcaaatttgacaacgagcttcttacactcttcacctctttcttgtatcttgctgctatagtagctactttctttgctttcaccactacaaggatgat

SEQ ID NO: 3436 - DNA, 353 bp, Glycine max
  Clone ID: jC-gmfl02220056a06d1
aggggaaaaaaccaaaaattccggggaaaaattccaaaaccccatttcccccaaagggaaaaaaatccccaaaggggggggcccgggaatttatccaatttttccccaaaaaaaaaaaaaaccccattttcgggaaaaaaaaaagggcccccgcccatggcacccaaaaaaaaacccctttttaaaagggccccccattccattttggggaaaaaaagggcccccaaaaaccagtcccccccattaaggggccccttttaggccccccgaaaaatttgggggccccatttccaccccccacgggggcccccctaaaacaaatgggcccccaacccatttttggggcccccccc

SEQ ID NO: 3437 - DNA, 466 bp, Glycine max
  Clone ID: jC-gmfl02220056a07a1
gagagagtatagtcttactacataacaaaggaaactccctaccattatccccttcaagacttcgtactataggtgtcgttggacccaatgctgatgctaccgttacaatgattgggaactatgctggtgtggcatgtggatataccactcctttgcaaggaattgcgaggtatgtgaagacggctcatcaagtggggtgtaggggtgtggcttgtatgggaaatgaactatttggggctgcagagaccatagctaggcaagctgatgcgattgatttggtaatgggccttgaccagactgtagaagctgaaacaagagatagagttgggcttctcttaccgggccttcaacaagaacttgtgacaagggtggctagggccgctaagggcccagttatcttgctcattatgtctggaggcccagttgatatctcgtttgccaaaaatgaccccaagattagtgccat

SEQ ID NO: 3438 - DNA, 452 bp, Glycine max
  Clone ID: jC-gmfl02220056a07d1
ctgactgttatctcggtcacgagccgactagccagtggccgccctttttttttttttttaacatgcatctcaaaagaaatatttttttaattctttaattaatgtctaaagacattaattaacatttcccttataatataagaaatctctagccattgaaactttttagcttataaaaaaataaaagaaaaaattaaaggaaattttcacacataagaactagttgaattgacctactaggctccactccagccttgaacaaatcaatcatcacctcaaaaccattgccattcatgtaaaactatcatcatctatcaaatattaattgccacaagtcaaattccctctacaatctcttgaagcctcatgcagaaactgtcaacataagatgactccaaatctttgttaagcagcaactctctgatcctagcatgattagccctaaccctttt

SEQ ID NO: 3439 - DNA, 418 bp, Glycine max
  Clone ID: jC-gmfl02220056a08a1
tttttccaagttgctgcatcgcgcttgcaaatggaggtttggttcctgtcagtgaagctctgaaggtttgtttcatagtcctatgattcttctttttttttttttttgaatttctaattctctcttgctgtgattccattggaaaaaaaaaaaacggttaaaacgcgattttagatcgtgttttctggaactttttttgttctgtatggtttagataattagaaacttcattggtatatttgtacgagacatttaactgttttacgtttgactctgttttcattccctaatttctgaagtctgtgctaatacatgaaaaattatctatgaagcgtctcagcataatcaattaattataattcttgcatcaaatttatagtaattgtatttatttccctagaagattgaaataaaaatg

SEQ ID NO: 3440 - DNA, 437 bp, Glycine max
  Clone ID: jC-gmfl02220056a08d1
agttcaaaacaaaattaagatgtcaatttgcaaaggactaacaagatagtttgcactaaaagatgtcatgtggcacaaaacatcaccttaaattgtaccaacaacatataaaagcaactaaagccatataaaaatctgggaaacactaaaatcaagcagcaccctttcccttctttttctggagttttttcatgtaaaactccaactccttaccttccaaaatgtagccgtcagctctgccacattgaccaggccgagaggaaatgcaagcaagcaaacgcccaccaccaaactgctcctcaatgtgagcatcaagcttacgatctttctggcgcttctccaattttctctgcagatgattactctttttggcttcttccacagcaacagcagcagcaccctcctctgcagtttccttcttggcagctgtcttcttc

SEQ ID NO: 3441 - DNA, 491 bp, Glycine max
  Clone ID: jC-gmfl02220056a09a1
tgcgcgagggggtttttctagggtttggaggctatgccgaaagcgggttgaataagctcaggaatttgagattttgtgggtggtacttgacatggattgaggaatgaagcgactttgtcatgttatttggttggcgattgtgtttgtgctaggaaattttcgaaaatgtgtttctcagttgccccaagtcctgattagtctttccccccaagtgtttggatatgttctatgttgtggagtatcggtgttagtcgaggctgggcacttcatggacgatttaagggatctgggacagtttgaactcctaggtgaagaaaatgattctcacaaagcagtaccgatgcatacactcagctagctgtcaatgtactaaagggcatttaagtgaagatgtgatattcttagtatttcataatttgaattggaatcccaagctaattgctactctatcatgtgtgtgcaaatggtttgatgatcttgccaagcgagtt

SEQ ID NO: 3442 - DNA, 428 bp, Glycine max
  Clone ID: jC-gmfl02220056a09d1
acaccatcagtctgacactaacaattttatatattttttgcctgtatgtataggatagaaaacgacagcgtttgtctagatggcataaatacccccataaagaactatccaaagggtttattccagtccctaaataaatcagtaaattatcattgcatccaggttgacacaatttacactatattcaaaagttgggatttgtctataagagaaattaatctcaaactaccatgtgagtttctttcaaagttgatgggatccccacgtccagccgcatggtcgatttatattgctctggttaaccagcaccagcctgaatgcacatttttactactgcaagcgcctggccataaaaattcctaagctctcgttctagcggtgcatttacattaggaacatgccacacaaatcttggagggatcaaatca

SEQ ID NO: 3443 - DNA, 374 bp, Glycine max
  Clone ID: jC-gmfl02220056a10a1
atagtcaccaaacgttatcctttttatgatccttggttgtcatgataaagaataatgtggtgacaaataatgtgaatagtaatttctatttgcttccctagcttgtctatgaggatactatcaggtgactaatatcaatacgagatgcagggatattgctgctggagaaaatggaatggatgtgatgttcaacttgcttacttctacatcctataagtggatccattcaccagaacttctgtcagcattaaaatcccctttgatgcgtttatgtgccaggtaccttctgcaagagaagaaaagaggaaaggctttggactcttgagcaaattttcacttgccaaatggagcgatggttgaaagaataaactgga

SEQ ID NO: 3444 - DNA, 269 bp, Glycine max
  Clone ID: jC-gmfl02220056a10d1
tggggtgcggaccaggccttcccgggtcgactagctggcggccgccctttcgtcctttttttttttttttttctttatttttttttttttccccttggatctaaaagagtgattcatacaacagagtttaaataacccgtattacacgcttaccttacctattcccctttctagtcctatcccccaaggtccaaagaatgcttacatgctggtaacttgcccaaggatttcttgaacaagcgagccggttgacctttgtgatacatggg

SEQ ID NO: 3445 - DNA, 502 bp, Glycine max
  Clone ID: jC-gmfl02220056a11a1
gttttgtttatttgaaattaacaagtagcaaagatgtttggaatcatcggaggaaacaagggtcacaagataaaggggaacttggtgattatgcgaaagaatgtgttggatatcaacagcattaccagtgttaagggtgtaatcggaaccggcattaacatcattggaggagtcgtcgacaccgttactgctttggcgtcccacatctccatccagctcattagtgccaccaaggctgatggacatgggaaaggaaaagttggaaaggctacaaatttaagaggacaagtgtcgttaccaaccttgggagctggcgaagatgcatacgatgttcattttgaatgggacagtgacttcggaattcccggtgcattttacattaagaacttcatgcaagttgagttctatctcaagtctctaactctcgaagacattccaaaccacggaaccattcacttcgtatgcaactcctgggtttacaactcaaaatcctaccattctg

SEQ ID NO: 3446 - DNA, 454 bp, Glycine max
  Clone ID: jC-gmfl02220056a11d1
tttcgttttttttttagttattccgatattcggacgcatcaacttgttatgaaatcacattgatagcctctactcgtgtcctagctcgtctaagagctagatttgcctcaattgtttgtctcttgccttccgccttattcaaattagcttctgctatttcaagagtttgctgtgcttcttgtggatcaatgtcactacccttttccgcatcatttactaaaacagtgatctcattattgtttattctagcaaaaccggccatcagagccatcgttaaccattggtctttaagaagacgtattctcaaaatacctatatctacggctgtggcaataggcgcatgatttggtaatactccaatttgtccgctattagtagataaaatgatttccttcacttccgaatcccaaacaattcgattgggggtcagtacacaaagatttaaagtcatttc

SEQ ID NO: 3447 - DNA, 401 bp, Glycine max
  Clone ID: jC-gmfl02220056a12a1
cgttaattcgcgcttttgatcttcgatgtctgtgggatgaatcaattgtgcggtggcatgtcggttgatatccaagaatatgtccatatatgtatgatggcatgtgaaaattatgggaattttggtgttggcatttgaattgtttgtttttcatggaatggcattgcagataactccattgacacttcaattctctaagatgttaagatcattggatcttaaaatgtcagctaaatcattattgtactgaaaacactgttgagaacaacttaaagaggattggcatatcgaatatggtggtggtggtgagaagaggaagttaatatcgactttaatggaagtctctttaggtatcttacaaagcggtgatggttgtagagagttgacgtttggggtgagtc

SEQ ID NO: 3448 - DNA, 426 bp, Glycine max
  Clone ID: jC-gmfl02220056a12d1
gatacgtaaaacaacgctttgaactttccatctttacatcatgcatttacaagggttttgagggagacatttgaagaaacagaacaagatacagaggaaacctttctcgtctattgccccttgacacaacatataggaaaaactatatgaatatagtgagacaaaatgattaaaatgaactatggacagctatagggaactgaggatgtcttttattattgacaaaatagggttgccaaaaggatattcttccaatgtctgaaactttattccatccatccgggcttgaactccatcagaaaatgtcaagccctgaagcagttcctttgccgttctgtcagctccaacgagggaactacctacgcctaacaaaatctcgggtagagaacggcttgctctagagatctccacaagtgtaacctgtct

SEQ ID NO: 3449 - DNA, 398 bp, Glycine max
  Clone ID: jC-gmfl02220056b01a1
gattgctaaagtgaatgtaagggtatcacatgaatacctatagcaatcagcagtctgttatcttgatgagcttattaagccttgtcctgaagccatatgaaatgatattggaatctcttggtgaattccagttccacatttttaagattaatcgaggcactaacgatcctatatgaattggaagtctttgttaatcttattaggcctatcctgtatcctatggaaatgagatcggtatatctcggggaattgcacttccacattttcaagatataacgatgcccatatgttcatttatgaattggaattattgggattcttattaggccaattctgaagccactggatatgagattggaattcctcgggggtaccgagcttgaatgccctattgtgag

SEQ ID NO: 3450 - DNA, 496 bp, Glycine max
  Clone ID: jC-gmfl02220056b01d1
gtcattcaaaagtctcaacttcactctagcactaaataatttacaagattaattcaatttggtctctgcactaaataagaaataaattaaatcgaattaaatgcaaacctgatcctgatgtgttatacaaaaatttacgacttctttttccccccaaacttgtcttgtctcccttttaaccctttcatttttatgttcaagtgggaaaaagcagggcacacgaattggatttttcatacaaatgaccaatttatgaaagagaaagccaagcagtgaacagtgttgtcttccccagtaagaactttccatgcaatggcttggtcatatgacacatggcgccccatcgtcgacatgcagattccagctggcagataagcaaaaccctgctccattaacttggcaaagtctgtacacaatgccttgcgtccagcctcatcaaatattttatccaatgtgatatcttgtaaggcaactagggttgtttccaacatgtcaa

SEQ ID NO: 3451 - DNA, 534 bp, Glycine max
  Clone ID: jC-gmfl02220056b02a1
cacttagtggtttcccttagaaaatttcctttgtatacgtgatacggttgtagcaagcacttgcatcgcatattctttcccttggaaaaatgcaatccaaggaagagacaagaaacatgagttctttgggcacaatcctcaagcctcatgctgtgtgcgtaccgcacccaacacaaggccacataaacccaatgctaaaactagcaaagctccttcacttcaaaggctttcacataacctttgtcaacactgagtacacccacaaacgccttctcaaatcaagaggtccagattccatcaagggtctcccttcatttcgctttgagaccatccctgatggtctaccagagcctcttgtggatgccacacagcacataccttccctgtgtgactccactagaagaacttgcttgcctcacttcaggaaccttcttactaaaatcaatgattcagatgccccttcagtgagttgcataagtttctgatggtgtcatgagcttcactcttgatgctgctgaagaattgggtgtccac

SEQ ID NO: 3452 - DNA, 308 bp, Glycine max
  Clone ID: jC-gmfl02220056b02d1
aatggtaacatgcaagtttttattatatattgttatgtatataacacatactagacctgccaagcttaaaatatttagttctactaggcctacaggattacatgtgaagaaaattgcagtgaaaccttttttggccaaaggaacttcacatgatcaggggtgccaacccttttggaaggaaaataaagagtccatgatagatgataatgatgatgaggtttccagctttaagctgtcattttcactgataccaaatagagatatctgcctgtttctgaagagcattcattccttcttcttcttggata

SEQ ID NO: 3453 - DNA, 93 bp, Glycine max
  Clone ID: jC-gmfl02220056b03a1
aaaacatgaacatacaaggtatgcttgtttcagcactgggcgaacaatctttaatggacgactgaaatgtttgagattactgttcattcatgg

SEQ ID NO: 3454 - DNA, 363 bp, Glycine max
  Clone ID: jC-gmfl02220056b03d1
aaatatcatatattatcttataaagcacctatggtccaggaagggaggcaaaaaaaaaaaaaaaaaaaaaccaaaccagaagggaaaccccaaaaggggggggaacaaaaggaggggggaaaaaaaaaaaagccccccccgaagaaaaaaaaaaaaaaaaaccccaaaaggggggcacaaccggcggaaaaaacccaacaaggggggggcaaaagaaagaaaaaaaacacaagaagaacccgcccacaaaaaaaacgcgcaccacacacgcccaaaaaacaaactccccaaaaaaaaaaaaagcccacccccggggggagaaaaaaaacggcggccggggggcgcaaaaaaacaaaagggggg

SEQ ID NO: 3455 - DNA, 515 bp, Glycine max
  Clone ID: jC-gmfl02220056b04a1
gaaaattactggtttttgcttgcggattctgtttcaaataatgtgtggttttctcagaaggttagtttcatggatgaagctgctgctgtaacttctgcatctaaggcaattgaggagtctatggaggggtcaggagcaaatgtgaaggagaccagtaaggcagttgcagaagcagttgagaaggtgaaagggggctctagattagtattgggcaagttccaggccccatcagagggtaactacagtttgacttgctattgtttgtgtgattcttggttgggctgtgacagaaggacaaatttaaagctcaaagttttgaaacggactcgggctggcaccagggctgctgttttggctgatgaaggacctatcatggaagatggagttgaggaggatgaggacaacgaggatgaagagtatgatgatgactacgagagtgagtacagtgaagatgaagaggatgatcagaacacataatataagcaacaagctgccaatggcactgtgaataaaca

SEQ ID NO: 3456 - DNA, 432 bp, Glycine max
  Clone ID: jC-gmfl02220056b04d1
aacaaatacaatgtcagtgaagttttattattaaatagaatacatggcacactgacgacaaccttacactacaggtagcaaacctgtattcacaaactggtaaacgtttcatcagatgtaatatttacagagggaggaagaatggtaaaagaacatcaccaactacctaatcaaagtacaattttcctaccttgatacccccttcaccaccagattgccaaacgatttggatattctctcaactcaatttcaactgatgacagaataactcaattcgtcaacaacctaacgtaaaatggagtaataatgtaacatgctgataaaatttgttaactacggagaccattacaatgaaaactagatttaaatccaactctggggcatggggtaacctttgattgggttaaaaggatcacttactagaccttttcc

SEQ ID NO: 3457 - DNA, 508 bp, Glycine max
  unsure (1)..(508): unsure at all n locations
  Clone ID: jC-gmfl02220056b05a1
cttgcggagagggttgtcttttgggtcatccttttcccaattcaataactctctctctctctcttgctccctacattttcgatcactttaaagtctcaaacgtaatggctgaaagcgcggtgacgaacaggaagcgcagcagcggggacgacgccgtttcggagaatgacagaaagcggaagaatatggtggcacgcaacatggacccggctgaggcgttggccttgacgcggcacgagttcggggagcacggtggcgtaaacatgtcgatcgaggcctcggcgacgttcacggtgatggagccggagaccctcggtcgcatgttcgccggcgagctgggcccggaccgcgatttcttcatttacaggcggcacttcaacccgacggttgtcaacctgggccgncacatggccgccctggaaggcacggaggccgtctactgcacagccagcggtatggccgcgaactcctcggtactccttcagctctgtagcaccggcgggcacgt

SEQ ID NO: 3458 - DNA, 365 bp, Glycine max
  Clone ID: jC-gmfl02220056b05d1
cccctattaattttggggaaaaaaccaaaaaatacggggaaaaatttcaaaacccgatttcccccaaagggtaaaaaacccctaaaaaggggggcccgggaatttatcccaattttcccaaaaaaaaaaaaaaacccctttttcgggaaaaaaaaaagggccccagaccagggcacccaaaaaaaaacccttttttaaaatggccccccattccattttggggaaaaaaagggcccccaaaaactaggcccccccattaagggggccctttaaatcccccggaaaaattggggggccccattagcaaccccccagggggcccccaaaagagaaatgggcccccaaacaatttttgggggcccccc

SEQ ID NO: 3459 - DNA, 583 bp, Glycine max
  Clone ID: jC-gmfl02220056b06a1
attccaatatattccattctctctgtgtatttccctacctctcccttcaagatgcagatcttcgtcaagaccctcaccggcaagaccatcacccttgaggtggaaagctctgacaccatcgacaacgtcaaggccaagatccaggacaaggaaggaatccccccggaccagcaacgtctcattttcgccggaaagcaacttgaggacggccgtacccttgctgactacaacattcagaaggagagtactcttcacctcgtcctccgtctccgtggtggcatgcagatcttcgttaagacactcaccggcaagaccataaccctagaggttgaaagctccgacaccatcgataacgtcaaggccaagatctcaggacaggagggtatccccccggaccagcaacgtctcatcttcgccggaaagcagctcgaggacggccgcaccctcgccgactacaacatccagaaggaatcaacccttcacctcgttctccgtctccgtggtggcatgcagatcttcgttaagacccttaccggcaagactattaccctagaagtcgaaagctccgacaccatcgacaacg

SEQ ID NO: 3460 - DNA, 452 bp, Glycine max
  Clone ID: jC-gmfl02220056b06d1
ggggaaataaaaaggcataatggattaagaaacattttccttccctttccctcgtacaaaaaatttaaaaccacacaacactgctatatgtatacatgaataaaagaaaggggagctctggtttcttgatactcaagtaaaactttctgagtgtttggacttatgggaacgccgtgcccattcaatggatgctcttggtgtggatccggtgcggttgagggattctggttgagcatctgatggtcgtggaacaagcttacacccgattttcctggcaaccaaccgaggcgagcttcgtgaactgtgagattttgtcacacttttcatttcttgctttattttactgaactcttcttcaagttctccaactctagaactcatcctatccatatccaccttcaaaacctggttttcacgcacaacagtcacccatccatccctttgtacaattt

SEQ ID NO: 3461 - DNA, 432 bp, Glycine max
  Clone ID: jC-gmfl02220056b07d1
aacacatcacaatatgcttattcattagttctcatccattaatttccattgaagtccgaaaacagaaaccaaaaatacaggatgatgaaatctcataaagcaaaaacaaatgggaatgtagtttaagtacaacaaacaaagtggggtggctacagatgctttgcaaatttttcaatgacttagaagcctgggggcttgtaagcgatgaagctgatgcactgtacttggcgaacgttgtcaaatccaatgatacggatgaagccattggggtatgcagtcttagcctcttgaagctccttcaacacctgagaagcatcagtgcagccaaacataggcagcttccacatggtccagtagcgtccatcatagtatccaggtgacctgttgtgctcacggtacacgaaaccgtgctatatgcaaacacaacaaaca

SEQ ID NO: 3462 - DNA, 106 bp, Glycine max
  Clone ID: jC-gmfl02220056b08a1
ccaatttccatggcttcctcggttttcgaggttttttgatcatgtcatcggatctagggggctacagcgaccagtactgaaccttggacgtctttgccgtctctgc

SEQ ID NO: 3463 - DNA, 334 bp, Glycine max
  Clone ID: jC-gmfl02220056b08d1
aaccaaaaagtcaagtatagcacattaaaatttcttgatagaacattataccatgccttattatattatttggatcacaaagtccatctagaagctatatatggctcctagtcttggcacaaagacaaagatcgttcttactgaggcgggggagacctggcaatgcttgaacatcaaggtggtcctttatcatcccttgtggcaatttgcaatcgacggaatgaagaagattcgctggaacaagtgataatatcacaactggcataggtaaacctgggcaacttctgcgacctgatccaaaaggaattacttggaaatattggccacgaaaatc

SEQ ID NO: 3464 - DNA, 473 bp, Glycine max
  Clone ID: jC-gmfl02220056b09a1
ataagactaagcaaaaccaaaggagaagagcattgtagagaaaataaaaaaaataaaaaatggaagggtgagtagagatagagagagcaaacgcaaacgctggttgtttcgtttttgttttgttgctgttttttttttatccacatatattacttgttaatattattaatttttgtttaacaaaaaatttccaactgatgatttttactttatatctctcttgtttttgctactttattgggtgttggagagagagagtcagagataagaccttcaagttgagttgagtttttttattgcaatctgtttttgtctgtctaataaaatatttttatttatttatgagccttctagagagaaagggagatgaatgttgttacttgttattagtggaggcttctgaagagagtgaagagtagtagcgtgtgttgtgttgttgttgctgctgctgctgcaatgggaacttcaccaac

SEQ ID NO: 3465 - DNA, 493 bp, Glycine max
  Clone ID: jC-gmfl02220056b10a1
ctgaaaccatgcctgtcacaaacttaacaacacctacagtggcagaacacatcaaatggagaaggcccagaaaccaattcaaccaccaccatcatcaccatcaccaccccatttcagaaacagatccaaacccttaaatccctttccataatccaatccactaggtgcaagtccaccatttcctccctgctcctctccactttctccaacaacacctccaataatgccactgcccacagcaagaaaaaaagcaacttttctgcttaaccttcagagggttgggctgcactgctggctcgtcgcagcaggtgtcggtgccggcggtgattcgctcctccgccgattggcaagggaagaaaacaagaaaaaagaagcacaagagaagcaacagaagcagcaagaacaagactttccatggtggggttctggaaggttccaatccagggtgtgtggattctcaagatgtttggtgtggccctggaattgtgttctc

SEQ ID NO: 3466 - DNA, 347 bp, Glycine max
  Clone ID: jC-gmfl02220056b10d1
ggatatgcagtaaggggactcaggcttaccgcgagactcgcttttcccaaatcgctgttcactattaagaaaatgggacgaagatgaaatgcccacttgttttatagcagttgtccttaatcggagttggattaagggcaatctatttacgcggacgggtaacagggcctcccgcacacttataaatcgactgatgaaacccatgtttgaatagccaaatcggccccccgattggaaccgggggcaacgcccactaaaggagcgcttggatttcataaagaggcgcttatattattccacggcacattcatccctatctcaaaaccctcatctattaccagaaatac

SEQ ID NO: 3467 - DNA, 390 bp, Glycine max
  Clone ID: jC-gmfl02220056b11a1
aaaaaagtttgtcattgtcccatattcctggcactggccttgtgcttgtgcatcctctgtgttgctgcagaggctgcagggcaaaatgatacactcgctctcaccgaattccgtcttcaaaccgaccatccacggctaccctactcaccaaactggacctggcgcctacaccctgttccggcgcgtggtgccgcgttggaatgctccccaaacggtagagtattgggcctcactctcccttccctcaaccttcgcggaccaattgataccccttccacactaacctaccttcggcttctgacctccaagaaaaccggtttaacggtaccatttaacctcttttaaactgcacaagcctggaactactgaacctctcccgcaacgatttct

SEQ ID NO: 3468 - DNA, 437 bp, Glycine max
  Clone ID: jC-gmfl02220056b11d1
aataataataaatagtgaatccagttgcgatatggacaaactgcataagagtactttgcaatattcaacagtttaatacagatttacaacggttgatgattcccacatttgtgaaaaatgggccttagaagaaaaaaacaaaagaggaaaaaaaaacacacggaaaacctgtgtagggcaagatattggcgccctctatcaggaagttcaaatactgagaagggttatataatgtagtataatatgaatgataacccctgaccggcacttggatattctggcagaaactttgaaaataaatgagctggaagaggtaaattttggagaaggggaaaatacagaattatttctcaggaatgtcatacaaaaacaacaactactaagctcaaaagcccaaaatagcagactgaagaataggagccagatacacccacgtt

SEQ ID NO: 3469 - DNA, 197 bp, Glycine max
  Clone ID: jC-gmfl02220056b12d1
gaaacgagagggtaccgttgcgatttggactggctgcttcagatgactatgatggatgcaaccgttccattcagatatacatcggttgatgatttcgacactcgtgaaatatgtgccctcgaagaacatcgcgaaggatgaaaatgatacacacagggaccactgcgtgggcaagagattggcgccctctattggga

SEQ ID NO: 3470 - DNA, 516 bp, Glycine max
  Clone ID: jC-gmfl02220056c01a1
acgaaattgaaagaatttaccaagaatttccctcctgaactcaaaggtttggccatcaataacagtgaggccatacgtacagcccataatagctttgctaggccagaaccttttgttcctgaagagcaaaaggttgctaccagagatgatgatgtttaccacttcataagctatctacctgttgatggggtactgtatgagcttgatggattaaaggagggtcccatcagccttggtcagtgctctggtgggcaaggtgatattgaatggttgaagatagtgcagcctgtgatccaggaacgcattgaaaggtattcccaaagtgagataagattcaatctcctggcagtcatcaagaacaggaaagagttgtatacagctgagctgaaggaacttcagaagaggagggagcgcattttgcagcagctagcagcatcaaagtcagacagactggtcgacaatagcagttttgaggcactgaacaattctctctctgaagtgaatgctgggattgaa

SEQ ID NO: 3471 - DNA, 496 bp, Glycine max
  Clone ID: jC-gmfl02220056c01d1
aagtgaagaacccccattttttgtctgataacacaaaacagttacaaattcaactagtaagggataagacgactaaaatggcactcaaacgcaaaggttgtataaatcacaaatcataataaaacacactggaacaagcaaagcttgtcaaaaggtgcaatagaattttatgccacaacttggaaaattgagagtttgggaccataactacccaagttgaccatcccacaaactaggatattttccatatgagtaactaaggcttcaggggtgctgctcccaccagaaagcctactattttatataatcattttagttggcacggcttttgaacacatcaagacccatctcagtaggatcagttgcttgcaactctacttgaattccatccagctccctcttgaatctgtctttggagcttgcataaatcatcttgctcctcacccttgatgtgtcaggggaccacgcaatgaaaaaaattctgcttttagggaca

SEQ ID NO: 3472 - DNA, 524 bp, Glycine max
  Clone ID: jC-gmfl02220056c02a1
gcaaccacattttgcttcttactccttcatgttattaaatttccaccaaagaacatgcagtatcctgtggtagatctcctatcaacaattgatcctacatagtcagcatcagtatatactttcatggataaattttctcctttttaaacaacaatctctttcctggagaagacttcaagtactgaatgatcccattcaaccaagaatgtcaagaagaccatggaagggagtgggtcagaatgctgcaataatacagaggtccattcttggacaagaaagcatgtcaagaagaccatattagggagtgggtcaaaatgctgcgataatacagaggttcattcttggacaagaaaggtgcagttagcaacctttgggggttgcaccaagggagaaacaaaagaggatcactttgtttgtgtgttacatcaagcatgagaaacagaacaatacaatgaagtggtgaatgagagcaagatagggagattatcagaattcttgaagctagagaagaagcttgttttctt

SEQ ID NO: 3473 - DNA, 338 bp, Glycine max
  Clone ID: jC-gmfl02220056c02d1
aaggaaaaacagcagtcatctaatattattggtcaatgaagattcaattattcaaccctgatattttgtaggatcataccggtggaaatggcaagtctagtaaaagaaagaagccaccacaatttttagaatccaagtctggttggactgcaatgaaatgcaaacctccacaagcttttttagcagcttcccaagcttcagcttcactagttgtctcaggagttttcttatagggagaatagatttcccgggtagaaattcccgcaaaaagaatcaggcgagcccgaggagcatccgtttccaccggggaaacctccaatccttttatcaaagctgcc

SEQ ID NO: 3474 - DNA, 394 bp, Glycine max
  Clone ID: jC-gmfl02220056c03a1
aaaacttatcagagtcaaccacggatgaagagttgatgataaattttggagaatatggtaccattactagtgctttaataatgagagatgctgatggtaaatcaaggtgttttggctttgtcaattttgaaaacccagacgatgctgccaaagctgttgagggacttaatgggaagaaatttgatgataaggaatggtatgttggaaaagcccagaaaaaatctgagcgtgaacaagaactgaaaggacgatttgagcagagcataaaggaagctgctgacaaatatccaggtttgaacttgtatctcaagaacttggatgatacaatcagtgatgaaaaacttaaggaaatgtttgccgactatggtacaataacttcttgcaaggttatgcg

SEQ ID NO: 3475 - DNA, 358 bp, Glycine max
  Clone ID: jC-gmfl02220056c03d1
actagcacatcattttcaatctcactacatcaaaaaacccaacggcacaatacaaacaacaggagatggatataagattacagagatagctgctactgcatatagtaagctaaataaaaggaaaatacaaagtcttgctaccaaaactactgcaaactatgatgctcaccacaggccaaatcctgcaactatgaaagcattatcttatatatatattgtacaaaccaagcatcacggaacatttgatctaggcaatcagtacctcgttctaccgtctccctccgttatcacatccttgaaggatccattactgggaatcatcggcaacacatgctcctgatgtggcacaatgacatca

SEQ ID NO: 3476 - DNA, 339 bp, Glycine max
  Clone ID: jC-gmfl02220056c04a1
gaggaaataatctttagctcctcacttgtccaactccgatagaaaaaatatattacgaaaaagctcatctattcagagtttagacgttgcgagtttgatgagatcctttcgaagaattttgccagatggatctttgggtatggagtcggacaagagaggagataatctttagctccttttttgctgtaattatctggcttgcttacttttgctgcttttatattatctgttctttgttcaacagtctattgtaatttgtagagaacaaagtgctgtgagtacaccttataggctataagattgtctctttgtgagactataaattacatttacttaaat

SEQ ID NO: 3477 - DNA, 405 bp, Glycine max
  unsure (1)..(405): unsure at all n locations
  Clone ID: jC-gmfl02220056c04d1
aagtaaaatactgattagatcaagccataagcacactagttattttgcaaacaagtagttcataggcatattacagattacagagtcaagcttatttattgatttcatttaaaattactaaggaattacttctccatccagaaacgggttaaagtggtgtgaaaacgtcttcacctttgctttgagttccctcagtcctcttaaatcttccatccatatactgtaacttgagttcttagcaagaacatcttcagacacctccttattatcaataagttccatagcatacttctcaaatttctcaatgttatcccacagcacagccaactttgttgtgtcactctcacttctaacactattcagccagtcccttgcttcctncaccctttgccaaaagcatgaatc

SEQ ID NO: 3478 - DNA, 427 bp, Glycine max
  Clone ID: jC-gmfl02220056c05a1
ggcactatgatgccagtgccccgatcgcagatcagggcattcgttgacagcatcacctgtggcatggtaagtgatgatgtagaaaattaacacaagctccaaaagccctctcaccctttaggggaatttaccccctggtcttggccctcttcataccaaggctgttgtggaagggtgaaacagaaccagacatgggagaacccttctcgcgaagagtgccattcagcattgctaactcccgaagttgctgcttcttgtagaaaccttggattcatcctgaaagataaacctttaaacaatcagaccaacaaagtccccattaagttgagtaccacaaccaatctcaatcaacctaacaagaacataccaccggtttgagcaaatcttcaagtatgtcacgtgcttgcatcatacgagcatctactat

SEQ ID NO: 3479 - DNA, 446 bp, Glycine max
  Clone ID: jC-gmfl02220056c05d1
aaaagcaaccgtaaatttacatacatactgaatctcaagttaaatagttcaaatacaagcatgcatgaaattatacaatcacatgacagggtgacaagtcccgcacattctatagatgcggtaactatttgtgattcacactattaattgccaaaaagtggggtttaataacctgcgtttgaatcaggaacaaccaaaacatcttcttacagagaaataaccagttggttgcggatctgcgtcagactctgattttttttgaggaagctgcttaaaaaatgctttcacagcttctgtcactccatcctaattttccatggcctttgcaggttacattgcacgttcctttaccttgggatccatcataagttttattgcatcaaccaacttgggaagtgaaaactcatacactgggatatgttgaggaccagctactctagcatgta

SEQ ID NO: 3480 - DNA, 544 bp, Glycine max
  Clone ID: jC-gmfl02220056c06a1
gacgaggaaagggttctgaagatgcacactctcaacacctcgtattgttacagtggggtcaaatgggactctataaatctcgagcatccttcaacttttgagacgctggcgatggagccggagttgaagaatgcggtgattgaggacttggataggttcgtgaagaggaaggagttttataagagggttgggagggcgtggaaacgtggctacttgctctatggccctcctggtactggcaagtctagcttgatagctgctatggccaattacttgaagtttgacatctttgacctccaacttgggaacatagtaagggattctgacctcaggaaactgcttctggcgactgctaatagatccattttggtcattgaagacattgattgcagtgtggatctgccagagcgtcgccatggtgatcatggacgtaaacaaactgacgtacagttgaccttgtctggattactgaacttcatagacgggttatggtctagttgtggagacgagagaatcatcatattcaccaccaaccacaaggaga

SEQ ID NO: 3481 - DNA, 559 bp, Glycine max
  unsure (1)..(559): unsure at all n locations
  Clone ID: jC-gmfl02220056c06d1
aagaaaaaagaaagttctaattattaataaattatatctatatatatatatatacagatagatattctatatcttttatcttaattaatatttgacccctccttataatgtgttatagttttctttatttttaggaacttatccattccttttttaatgtgcccgacaatccgaaagaattctgggggaggggtcatttcgtttttgatctagaataaatagagcttcaagaaatgagagaattaagaatacccacgagaaacactaatccaatccataatgatgtaccggaaaatacaacatttttgttattcgaccaaccttcaggagaagcaaatacaacaggtacactaatcaataaaataaatgaaatagcaattaatgcaaaaacagctaattggaaagcaatagtcatgtttctaatcctccaatttaccaacanaagaactttaccatttgatcccccaacccttgatccctttattgacaaaaaatttataataaaaaacgcagaaggtttatcatgaattcattgatttttttactattatcaaccttt

SEQ ID NO: 3482 - DNA, 483 bp, Glycine max
  Clone ID: jC-gmfl02220056c07a1
gtccagcacaacgatgggaaaaagatcatagatcctgaaagccagaaaaccttgtgttcatgcttaaaagaagagatgcttcatccgttgcgggtgacgatagtgaaccggggtccagacacagaacttctggttgctaattctgtggagctgagtggaaaggggagaccccgtgtattctatgatgttacgttgactttaaaagcgttgggagtaggcattttctcggctgaagttgttagacattcaacacaagaacgtcaatgggaagtgtatacatttttgttggaggaaagccgtgactttccattgaccagaagccaagcaagaactcagattgttgacaaagttagaagaacactgatgggctggttatctggttcagtatcaaatgaaaaagcactttccgttcagtttttatgttaaatatcaatttggtttgccgtttgaatatggttaagttagcagggtatctaattaacg

SEQ ID NO: 3483 - DNA, 510 bp, Glycine max
  Clone ID: jC-gmfl02220056c07d1
ctttcgtctctttttttgaatatatccaaaatggaagttatatatttcaacaaatagtaaataaccatatagttctgtaacgttgttcagatagtcgtaaataccgaaaggaaacattgtctggtaatgctaggtaattgaattacaacatagaagtactttagcatagacgacacataataatggcaccaacaaacagttctaaaataagctactaaactaccatcttcaattggagtcactatcatcccaagccaactatttttttattatcaactctcatacttttttataagcgcctaaagtagaaacatatctcatctccaacactgaaagcattgtctctcaaatattggtaccaaggttcagcaacacattgtaggcctttttgagcatcgtgcatggtactaaaatctgacagaccaagtctttcccaataattcatcacaatagggagggaaaaccttgatctcatcgccacttgcaatctactcttggagacattgatcg

SEQ ID NO: 3484 - DNA, 491 bp, Glycine max
  Clone ID: jC-gmfl02220056c08a1
ctcccaccttcatttcgaaatcttactcggcttcaagagttggagttggatcatggacccgaaagtgctgatcagttaatggactttgatgctgccaccctcatttcgaacatctgcatgatgccagaactatatgatattagtgctcgccgtttgcaatggaggctattgccagacgatgctttgaaattgacctcagtcgtgtgttcaagcgttcattctctcactttggaactgtcagatgagcttcttccgctatttctctcatggtttgtaaatgtggagaatttacggctagaagggagtaaatgcacagtcattcccgaatgcatcaaagaatgccgctttttatctatccttattttgagtggttgcgatcgtcttcaagaaattagagggattcctccaaacttggaaagattcgccgcaacagaatccccagacttgacttcctcaagcataagcatgttgctgaatcaggaactgcatga

SEQ ID NO: 3485 - DNA, 454 bp, Glycine max
  Clone ID: jC-gmfl02220056c08d1
ctttcgttcttttttttagggagaacccaatattaaagtagatataactatgtgtaactcatacagagaaataacaacgcaacacaatttaaagctatccaatacaaatctctcatacaagaggagaggggcatataagtggagccctcatcaccctcgatcttattcttaatattaataatgctactcatatactagtgagtagtttccggtttcctgcgtccatgactttctcttcaaaccttgatggtagcgcagacggtggaggtgctgatcttgtaggggatggagactccgcatttgccggggagcgaggcggcgttgttggctttgaagccggagatttggctggcggccgacttgaggcaggtgcacgccgtctggcggacggcggtggtcttggcggcggcattgaggctcttcactcacgtgcagcatgccgacggcggcgttc

SEQ ID NO: 3486 - DNA, 486 bp, Glycine max
  Clone ID: jC-gmfl02220056c09a1
caaaatgactcaagcccagattcaaccagttaaacttggaacccaaggctttgaggtttcaaaattgggattcggatgtatgggccttactggagcgtacaatgaccctctccaagaacaggatggcatatctgttatcaagtatgcgttcagtaagggaatcacattttttgatactgcggatgtttatggagccaatgctaatgaacttttggttggaaaggctttgaagcagctgcccagagaaaagattcagatagccacaaaatttggtattgcttcacgaggttttcctgatatgaagatcaagggttcgcctgaatatgtgcgatcatgctgtgaagctagcttgaagcgtcttgatgttgaatacattgatctctattatcagcacagagtggacacatctgtacctatagaggaaacagtgggtgaacttaagaaattggtcgaagagggtaaagtcaaatatattggattatctga

SEQ ID NO: 3487 - DNA, 311 bp, Glycine max
  Clone ID: jC-gmfl02220056c10a1
attgctatattaagcttacttgtacttacaccacttgctgaacctgtgatcttcattacaaaacaaggggtctttaagactggtccaacaattagaggactatagaaagctacatgatgcaatgtaactgagcttataatagcattataagacgtttcacgtgacaaaagcgcatatgacgcatgtccatagcactaacatgatggatcaaaccttacaagtctgaaactgaacaagtttgctgacatgaccaaccatgaatctatgagtacctatgctggctcaaaggttaatcaccatatgaggactca

SEQ ID NO: 3488 - DNA, 407 bp, Glycine max
  Clone ID: jC-gmfl02220056c10d1
aaaacaacatagttcaatattgccattcagtttaggtccctaacaggggcagtgaagcataaaagccatgcttccaaattaaaaccccatggggactgggacccatttgaaccttaaacccaacaaaaaacagaccccaggaacaagaatctgaagttgattttagtagtcttcatcctttttcgggcccttaccaaacttagcacccactttttaaaaatccttttgaagggctgcaagggccttacgggcttcaaaaaattcacctttttccataccctaacccacgtaccaggggacaaaagcacccttggcatacatgagatccaacttgggatcaatgcgggcaaacacttgaaccacactgggggagtttgaaatcatgcaaactgcccctcgagcccaat

SEQ ID NO: 3489 - DNA, 484 bp, Glycine max
  Clone ID: jC-gmfl02220056c11a1
gcacaacacacccaacaaggacctcccacagagcgcgtcttaatacaacgctcttctctgaagaaccccgcatttcttgtcgtctctcttcttctcttgcgcttcttcgatgcttcgatcttcgtcgcggaaaatgagagagtgcatttcaatgcacattggccagaccgggattcacgttggaaacgcctgctgggagctttactgcctagaacacggcattcaggcctgatgggctgatgccatgcgacaagaccgatggtggaggtgatgatgctagcaacaccttcgttcagagaaactggggcatgaaagcacgtgccccgtgcgattcttgcagatcttgagcccactgcgaatgatgaggttaggactgggacataccgacaactattccatcctgagcagctcattagtggaaaggaggatgcagcaaacaactttgcccgtggccactataccatcggaaaggagatcgctgagc

SEQ ID NO: 3490 - DNA, 221 bp, Glycine max
  Clone ID: jC-gmfl02220056c12a1
ggcaaagtatctataaaataacaaaggagctcttcaacttccttcctatatgttttattttgttctttttattcagggagtgaaccgatgtaggtgagcatttattaactgtaagatatgggaagatcaaatttaaataaagtgatttctggcggggcatgtaaataatgccctagggagtttgtaaaaaaaaaaaataaattaaaaaaatatatataatt

SEQ ID NO: 3491 - DNA, 332 bp, Glycine max
  Clone ID: jC-gmfl02220056c12d1
tccttttttttttttttttataaagaacacttcgattgctttatacctttttcgattaaaaatgaaaaataaagaacaatacaaaacattaacacagctcttattgtaagctgtatcaaaaccttttcccaattaacacagctttgtttgacaatttttgctatggccgaactgtaagatgatgttaacaatttttgctacaacaggattgtaataactaggttgctccatgtaatgtaactccacaacaaagcttatgcatggaattaatcaactgctactggctgcatgttttcagcttcttgacgaagctcttggaacaggacagatga

SEQ ID NO: 3492 - DNA, 440 bp, Glycine max
  Clone ID: jC-gmfl02220056d01d1
aaagaaaaacatcagtcatctaatattattgttcaatgaagattcaattattcaaccatgatattttgtaggatcatacaggtggaaatggcaagtctagtaaaagaaagaagccaacacaatcttcagaatccaagtctggttggactgcaatgaaatgcaaaccttcacaagcttttttagcagcttcccaagctttagcttcactagttgtctcaggagttttcttataggtagaatagatataccgagtagaaattccagcagaaagaatcaggcgagcacgaggagcatccgcttccaccggggaaacctccaatccatttatcaaagctgccaatgctgtagcattagaagacgcaacggacagtccagggatcaatgtcttgtcatcaatgtcaagacccaataattcaagatctagcccagaaccacaaact

SEQ ID NO: 3493 - DNA, 508 bp, Glycine max
  unsure (1)..(508): unsure at all n locations
  Clone ID: jC-gmfl02220056d02a1
acagtatatgtcattcattctgcttctccttctgtggtggctgaggacatgtaactcatcacaatggaggtttcttctgatgatggcaccccaacagttgaagactgaaactgttgcttgcaagtatgacatgctatttccataacagtggaacctatcttcttgatggcttgctttctcagctcttcagcccttgaaagttcagcttgtgcttgtttccttatccttttggcattctcaaactcaagttcagctatctcaatttgacgtttggcctctcttctagcctcttctgcataagccttttctgcaatggccaacttgagttcctctcctgcaaactcctgcaaccttgccacttccaacgtggaatagtcactcacattgttattattattattattattcctttcaggtgggctcctatgtgcttctgaacatgctctctctggtggttcactactatntcctttgtcgatactacatgagcctattgaaagtttcaagc

SEQ ID NO: 3494 - DNA, 415 bp, Glycine max
  Clone ID: jC-gmfl02220056d02d1
gccagtgaaggataatttttaggaataagtaggctatacttcaacaaggagtttatatagtaagaaaggtacatccttggtaaaagcataaagcaaagctaatctaatggcacacacaaccatgagttcatgaaatccagtcattagttacattcgttgttggtgtgacaatatcttagtaaagtactcaaaatataaattaatagatataataaagtatctaaatgatggttcccccatcagacaaaagaccagttcatgaatacgaaggcaaggcagtgattggaatcatcatcatcgagaactttccatgcaatggcctgctcataagacactggtcgattcatacttgatacacatattcctgctggcagatatgcaaatccctgttgcattatcttggagaactcaatgc

SEQ ID NO: 3495 - DNA, 456 bp, Glycine max
  Clone ID: jC-gmfl02220056d03a1
ctcgagccgaatcggatcgaggggcggagacagctgctttgtgcatcaacaaaaccagctcctgtactcgcttgcatactctctctgttctttctatacaaagatctgtcaattaatatattatctttgatcatatatagtattagtatagaccacttgattaaaccacctgtgtcgcatattctgaatcctatcatcttgtggctttgatgtctagagcattggaacatgattacataagcgatggcagagaatccgtcaatggatggtcaaaactcattatcactgaactcgaatgagacagagctgaggcttggcctccctggttgcgagtcttcagagagaaaatcacgttctgcactctgtctttctggcaaatagtttcagaacaacaataacaatgtttgtaccttgaacgctggggccaagaggggcttctctgatgccatagacacc

SEQ ID NO: 3496 - DNA, 515 bp, Glycine max
  Clone ID: jC-gmfl02220056d04a1
gatttcagggttgatcttctcttcactgggttccctccgtttcttgagcccccccccccccccccgtttttttcttttctgggccttttccaattctcaatggaggttccagaaatggaaggcaagaccgaaagtcatgtgacatcggcagaagcctttgtggaagggggggttcaagaagcttgtgatgatgcttgcagcatatgccttgaggatttttgcaaaagtgatcctgccactgtcactaattgcaagcatgagttccacctgcagtgcattcttgaatggtgtcagagaagctcccaatgtcctatgtgttggcaacctatcagcttgagggatactacaagtcaagaactgcttgaggcagtagagctggaaaggagcttgagggataccccatctagaaatgctgcgatttttcatcatccagcacttggtgattttgaatcgcagcatttacccatggctatgaatgaagctgatattgaagagcgaataatcaacatttgact

SEQ ID NO: 3497 - DNA, 160 bp, Glycine max
  Clone ID: jC-gmfl02220056d04d1
acttaagggtctcttttggtctatgatttttttactgcttttcctttttttgaaactcatacgggagatgtttcatcttatactcctactaatggaattccactacagatggtcccatatcctcatctgacgatctgttcaatgctgccatcaaacccgc

SEQ ID NO: 3498 - DNA, 533 bp, Glycine max
  Clone ID: jC-gmfl02220056d05a1
ggcgctagaatggcgtcgtccgaaggtggtgccagggcagtgcatgacgacgtcacatgtgtgatctgaagccgtgatgtatgagatccaccctagctctacactgcttatcacgctgaaggggaaaaaagcttccggactaggcacgacctatacccatgataaacagtgacacatcattcagacaaaagcattaacagcagcatacaaagctgactcttactctgtcatctctctctctgtctgtctctgtctcaagccctagtccagagtgttgtctctctctctctctctctctctgattctgcaattgtggtgactctattgtccattcacttctttcattaaaatcatcttcataacataaattgtgagccaccttgcccctattaatgatgctttctgcctctcttaatttccacacacaatttgagcttaggagctctttgcccttttaaatttgcgtttctttgttctgagtggaccactcaaattgtactcttgcgcctaactggtgcatgcaatcttatatt

SEQ ID NO: 3499 - DNA, 576 bp, Glycine max
  Clone ID: jC-gmfl02220056d05d1
gcggccgcccttttttttttttttttggcataaatgatgaaaacttccctcagcacagtcatttttaaagatcatattttgtttttcgtttgacagtcacagacaatcaaaggcactgtaatgagcatacagcccatatggctgattactattatttacaaagaaacagatcaagagtcattacaagttttgaaaccctcacaactgtaaccaggataattgtgtaatactttgctttcgacctttcttcacaaattcaatcataatagtcaacgaaaacaagtattttaagagagtagttatacatgaaaatttttagctagcaaaatttgcagagaagtcaggctcagggggttactgtagtttcactaactgactggcagattcgacatggcaattgagaaaaacacttgcttaaggtgtgcgcagcaaactttgacgcttacatggcagcacgcctattgtatgaactgtcaccggcaatttcatgagctccgtctgactcatcttccttttgacgaagcttcataattttcttattggaataccgacgccatgctgcttgaataaagcatg

SEQ ID NO: 3500 - DNA, 389 bp, Glycine max
  Clone ID: jC-gmfl02220056d06a1
ccaatcccagccgtggtacattctcttggggccagaaaaaccatgaacacgccgtggcgtcggaattgaatgcgcgcgtgcgcacgtgtcgaacgctacaacaattttcttctccaattcaatactagtactataacatagacgattagacggtttggcttccctcaaggctccctttccggccaccccatttctctcttccagacccagaacctctattcttccatcccaagccagttttcgtaaaagaagctcctttttatccttttctgttcatgcccaggtggagtctgatgatggttcagctgtagtagccacatctggtgaatctgtgacagaggttctgaaaattaaggagtgggaggtgggaatgttccaaaatgaggttg

SEQ ID NO: 3501 - DNA, 505 bp, Glycine max
  unsure (1)..(505): unsure at all n locations
  Clone ID: jC-gmfl02220056d06d1
ggaaatctggcaaaactaaaaacgtagattatgatagtgaagaaacaacataatacaaccataactctactcatctaacaaaacaggaaatcacattctcagaatgactactacaattatatttgtgaggaagattatctaaacctatacagggatacttctagctgagaatcttcgttttgctgtcaaaactgccattcccattttcagtgaattgccaaaactgtgaagaaatttattgccggtattgtacgacggaacattgagcaagatactcaattaaccatcaccgtaaagcattcacgaatgccgtcaatgaatcaacatctctcttttccgaagggtacttaattggttgagaagagtgtttgnggaagagtagtattgtgggggaagcttcccaactgcagttcagtctttgcatattccttctggtctccatacgctctgaattttgcaaccttcactcctgacccagctaacttttctgccaaatcaacatatg

SEQ ID NO: 3502 - DNA, 490 bp, Glycine max
  Clone ID: jC-gmfl02220056d07a1
ctcccaccttcatttcgaaatcttactcggctttaagagttggagttggatcatggacccgaaagtgctgatcagttaatggactttgatgctgccaccctcatttcgaacatctgcatgatgccagaactatatgatattagtgctcgccgtttgcaatggaggctattgccagacgatgctttgaaattgacctcagtcgtgtgttcaagcgttcattctctcactttggaactgtcagatgagcttcttccgctatttctctcatggtttgtaaatgtggagaatttacggctagaagggagtaaatgcacagtcattcccgaatgcatcaaagaatgccgctttttatctatccttattttgagtggttgcgatcgtcttcaagaaattagagggattcctccaaacttggaaagattcgccgcaacagaatccccagacttgacttcctcaagcataagcatgttgctgaatcaggaactgcatg

SEQ ID NO: 3503 - DNA, 330 bp, Glycine max
  Clone ID: jC-gmfl02220056d07d1
tgcctagtcggaattattcccgggtctgactagctggctgtcgccctgtcgtccttttttttttttgagcaatgcgtaaacagatttcatgaatgtaaaacaagccttgttaactacagtgaagatacgttcctttatacacctgacctaccatcttacgtgtcactttaacacgtgactatgggttattacaagcactcatacgagttgtttcctcgagttttagctatggcttcataccatgggccgatttatattgcagggagctccagacacttacgctcctgttaagctgaactgaatcattaagatgagcctgtttcctttacc

SEQ ID NO: 3504 - DNA, 486 bp, Glycine max
  Clone ID: jC-gmfl02220056d08a1
gcctcggcgccgtgcaaaccgtcgtggtttcatcggccagaatcgccgaacaaatcttgaaaacccacgacctcaacttcgcttccaggcctctcttcgtgggcccgagaaagctctcttacgacgggttggacatgggcttcgcaccgtacggcccgtactggagagaaatgaagaaactctgcatcgttcacctcttcagcgcgcaacgcgttcggtcctttcgaccaattcgagagaacgaggttgcaaaaatggttccgaaactgtcggaacacgaagcttccggtactgtcgtgaacttgaccgaaactttgatgtctttcacgaactctttgatatgcagaatcgcgttggggaaaagttacggttgtgagtacgaggaagtagttgttgatgaggtactgggaaaccggaggagcaggttgcaggttctgctcaacgaggctcaagcgttgctttcggagtttttcttttcggattatt

SEQ ID NO: 3505 - DNA, 286 bp, Glycine max
  Clone ID: jC-gmfl02220056d08d1
tttcgttcttttttttatttgaaccatcgtgtaaaaagtatcttaaatgaaatacaagccatgcatactactgtgaacacatgaccctttatccaccacacctacaatgttatgtggcactataacaggagattattggctggtccaacctcacaaacgatttgattcctagagataaggatagggcttaataacatgggccaattaagctgccacggaactccatagacttcagctcaagattagctgaattcaccgattgaggagggcctgattcttatacctc

SEQ ID NO: 3506 - DNA, 384 bp, Glycine max
  Clone ID: jC-gmfl02220056d09a1
caaaatgtcttaagcccacatgttttcacatcaactggtaacccaaggatctgaagtacgaaaaatgggatctggaagactgggccttcctggagcggacaatgaccctctacatgaacaagagggtctgacgcggataaagcatgctgttagccttggcaatcacatttgttgctactgcagatgattatggagcccatgcaaatgaacaagcgtcaggaaaggttttgaaacatgtgtacactgataagagttagatagccactgaaatgggctttgctatgctaggtagacctgatatgaagatcaaacttatgctggaatctgtactatcatgctgcgaagctagcttgaagcgtaattgatgatgaatacatagatctt

SEQ ID NO: 3507 - DNA, 442 bp, Glycine max
  Clone ID: jC-gmfl02220056d09d1
tttgtttttttttttatagatgacattaatagcaaaacactgtacaacaccatctacctttaaaccattagaaaaggcaacataaccactcacagtttattaaggactatgaaaattgacacaatttttcgacaacatatcaattatgtactctaacaggaacgtggctctaagagaagagcacactggaaactgatgttcacatacataaccatgaccatacactatctaatcgtcaacttgaaactttcaagatcgataaataaccatcaaactctgaattagtgcctttcagttcaagtcccttttacttaactttataatgggcctagtctataaaagaacatatgctaataactagctgccattgcttcaacactcctggccatctgcagtgtcttgattcttcttgagacgggtagaaccagcttctttcgtgatg

SEQ ID NO: 3508 - DNA, 479 bp, Glycine max
  Clone ID: jC-gmfl02220056d10a1
aattagaggaaaaagaggctgagatttcatcaatgcacaatgctttgtggcaaaagaagaaaactcctctttcagcatctaaatgagagatctttgacaagatagatggatcaaaatcctatgagagtccaaagaagatgatttggagccacatacttcagcccctatgagaaaactcttttatattattgatagtgttcctaggttgcatgatcaaataaactctctgtctcatgataaagaaaagctgcaatcaatccttgaaactagggatcttgacattaaggatctgaaggatgaagtcaaacaactcaatagaatctgtgaagactctaaaatgatcaagaatgaattgtctgagctcacctatgtattagaaaaaattatggatattttgggagctggtgaatgggttgtagataggaaatctaaaggttcgaaggaattaataccagcattggagaagcatatcattgcca

SEQ ID NO: 3509 - DNA, 494 bp, Glycine max
  Clone ID: jC-gmfl02220056d10d1
cgggagtagttagtcccgggtcgacgagctactaggtcggtggtcggcctgtcgtcttttttttttttttttttttttttttttttttttttttttttttttttttttttttttttttgggttgaaaaacagcctttttttttcaagacccgtttttttaaacccggaaacataatcattaccaaccaaaaacccaaattcatttgaacaacccaacacaaaacttactggggcgtccatggttttctagcccaggaaccatggcccccttaaaccaagtttttagcaaggtttgtagttgaacaacccatgggggcaaaaagacccttaattggaaataaagggccttacccaagctagcaaacttttgttacggggaatgggggacaaattattcttccccgggttctgaatctgcattttggagcccacccatgaaagggggggcctttttccaaaacccaaaggttttggtatcacccttaaggcccttt

SEQ ID NO: 3510 - DNA, 475 bp, Glycine max
  Clone ID: jC-gmfl02220056d11a1
gtcaatgtcatcgccgtgaagaggccgcggagaaggcacggttaaggctaagactcttccctctctttggaccattcaaattggctgctatacacgatagtttcttatgatctagactctaggcttagttaggcttttctgttatcgccatggatttcgagagtagaaggcttcatttgctcatctccgttgttgccatcgttgctcttagcttcacagctgaaaaatgcagggaacttgttggggaggaggggtcatctcagagtggaaagtttacgatcttaaattgcttcgatatgggttctggaactgtagcatgtgctgtcaaggaaggtgtgaagctctatttttacaatattaggtcttctcatgctgaaagagcaaggagccaagcaattgagtctgcccttgttgatgctgttgctcacgggatgtccccaacggattcggcaaaacatgctcagaaagaaggtta

SEQ ID NO: 3511 - DNA, 530 bp, Glycine max
  Clone ID: jC-gmfl02220056d11d1
acaaagtgaaagtgagaacacactttattatatgaaaaccgagagcatccaaatacaatagtgcagaagttcaggcaataattacgcatagacatgcataaagtctatgttattcagaagtacaacatagataaggaaaccacaaactctttttaattagatagagatactgttgggaattcctttgaaagtcaacccttcctcacttgaacgatggagcaaagtgtatggcagctgaactggcccagtccggtttctcagacttggatcactgttccttgcattgatttttgcttcaattccagtcagtttgcttccaaaccttttgaaagcttctaatgccttcttatcagtagtccaatttggagtctccctctctccaaggtatatctcatcagaagcatgccttgacaatatctctatcactgaaagatcaataagggtctcaaacttgggtgtgattgttctcagataagccttttgaggattcttcaccatctcatcatactctggggtccttcagctgggat

SEQ ID NO: 3512 - DNA, 486 bp, Glycine max
  Clone ID: jC-gmfl02220056d12a1
ggagacatctgtgactgcttagatcattgatgaacaaaaaaagatgctagcagctttcaaatctttgacatcattggccattttgctcaacccaatccccacacagttttgccaaagacaccaattatttgcaaaccatcagaaaatgccattgagttggccctcaagatagccaaccttaatccacaaagaactttgttctttgaggatagtgtccgcaacacacaagctggaaaacgtgtgggtcttcacactgtgctggttggaaaatctcagagaattaaaggagcagattatgcattagaaagcatccacaaccttagggaggcagtgccagaactatgggaagatgacataaaatcagaagttgcttatcctggcaagcttgctgtggagacatctgtgactgcttagatcattgatgaacaaaaaaataaaataaaaaaataagaaaaagagagagaaagagagaagtcctttgtgaat

SEQ ID NO: 3513 - DNA, 190 bp, Glycine max
  Clone ID: jC-gmfl02220056d12d1
tgtcgggcggccgcccttttttttttttttttttttttttttttttttttttttagcagttcaacaattgaaattacaccagcattttgtcaaaattggaagtgtatgttctgatttctgaagtccatgaatggtatctaccgtttttccacctgaactcattggcatggtgtactgccatggaaacaac

SEQ ID NO: 3514 - DNA, 504 bp, Glycine max
  Clone ID: jC-gmfl02220056e01a1
aaaatgcccactttttttcttccaacgctcctcctccttctcatagccttcgccacctctgtctccggccgccgtgacctcgtcggagactttctccggctgccctccgaaactgataacgacgacaacttcaagggcacccggtgggccgtcctcctcgccggttccaatggttactggaattacagacatcaggctgatgtttgtcacgcctatcaaatattgaggaaaggtggtctgaaagaagaaaatattattgtttttatgtatgatgacattgcattcaatggggaaaacccaaggcctggagtcatcattaacaaaccagatggaggtgatgtttataaaggagttccaaaggattacaccggcgaagatgttactgttgataacttttttgctgctttacttggaaataagtcagcactgactggtggcagtgggaaggttgtggacagtggtcctgatgatcatatatttggatactatactgaccatggaggt

SEQ ID NO: 3515 - DNA, 437 bp, Glycine max
  Clone ID: jC-gmfl02220056e01d1
actggttcattttccattttttagttattcccatatttggacccataaacttggtatgaaatcacattgatagcctttactcggggcctaactcgtttaaaagccagatttgcctcaattggttggctcttgccttccgccttattcaaattagcttctggtatttcaaaagtttgctgggctttttggggaacaagggcactacccttttccggatcatttactaaaacagggatctcattattggttattttagcaaaaccgcccattagagccatcgttaaccattgggctttaaaaaaacgtattctcaaaaaacctatatttacgggtggggcaataggcccatgatttgggaaaactccaatttggcccctattaggagaaaaaatgatttccctcacttccgaatcccaaacaattcgatgggggggcaa

SEQ ID NO: 3516 - DNA, 547 bp, Glycine max
  unsure (1)..(547): unsure at all n locations
  Clone ID: jC-gmfl02220056e02a1
aattcatcacttgttatattttgtccttggatcttgcagctacacatgggggctaggaaatatgggccagcttgggcattcttcactccagtacggggataaagagttactgccaaggagggtggttacccttgatggtattttcataaaggacgtggcatgtggcggtgtacacacatgttctgtaactcagggaggagcactttatgcctggggtggtggtcggtctgggcagctagggcttggcccccaaactggattattctcgtgtgttgctaatgactctcagacatttttccgaaacattccagttttagtagttcctaaaggtgtgcaacttgttgcatgtgggtattctcacacccttatctctatgagtgatggtcgaattcatggatggggttacaataattatggtcaggcagcaaatgagaaatgtacatatgcttggtatccatcaccaattgactggtgtgttggngaggttctgaaactagctgctggtggtggtcattcagctgtgttgactgatgcttattcattaaag

SEQ ID NO: 3517 - DNA, 150 bp, Glycine max
  Clone ID: jC-gmfl02220056e02d1
aggtataaccgggacctcttccatttaaaatgtatccccaaacttgaaccccttaactccaagtaaaaacacattgactggcgggtctcgtgtcttaaccacttaatacacacatgtacctaaaatgaatagctttcacattcctgctta

SEQ ID NO: 3518 - DNA, 607 bp, Glycine max
  unsure (1)..(607): unsure at all n locations
  Clone ID: jC-gmfl02220056e03a1
ttcaccatatggaaagacagatacatcttctgttctaaaggaggcaatggaatacataggattccttcataaacaagttaagctgcttagtgctccataccttgaaagttcaccagcagcaaagatgcagggtatggagccatgcagcctgaggagtagagggttatgtcttgttcctgtgtcatttactattggagttgctgagaccaatggtgcagatatctgggctcccattaagactactacttctcctaaatttgagaaggatgtctcccaatttcattgaataattttctcacctttacagcctaaaggttgctaaagttgctaaactagcatgaaaatgattatgatcatacatctagatggaatcatagtagctatatatatatatatataatagttatatcattaaaaaaaaactctagtcaagaagctgtcccacacctctaagatttaaacgggtgatggngctaagcttccaattagccatatgtgccccttactaattaattccatgtggtgattattaagtgatatttgaaaaatctagttgtataatgattcatgtactgatagcttaatggaagccgttctaggatggtgt

SEQ ID NO: 3519 - DNA, 396 bp, Glycine max
  Clone ID: jC-gmfl02220056e03d1
accatacccgctgctgtagcattatacacattattattactcttgctcccgtcaagataaatctgaccccttcccctgttcccacctacgtatataggatattttaagaaatgaacatctctctgagtagtgggatccggggaaagaataggaaaggttatttctttatatttttgaccaggaacagggcctaccacaagaatatttttttttgtaggacgatagttttgaaaagacagattgcctatcttctctttaatctcaggcgaaatacgatcggggggtgccaattcaaaaccttccggtaaaataagaacagcccccacattcaaagctccctttttaccattagcaagaacttgtttcacttgcatatcataaggaattcgaacaact

SEQ ID NO: 3520 - DNA, 288 bp, Glycine max
  Clone ID: jC-gmfl02220056e05a1
gctagttttggaggcaattgcttttggatcattcctatgggacaaagaaaactatgttgaatccaagtacccttttcttaatgagtagactagatgacagtacacagattctttcctttcactgcatggaacttggtaacttagtaatatgttaggcggcgtttgggtggtcttgctatatttactaggttgagattctgtatcatttacaaagtccacgcttgcatagattattatcatgtctacatgctaaatatggacattttcctacataactccacgcctcat

SEQ ID NO: 3521 - DNA, 158 bp, Glycine max
  Clone ID: jC-gmfl02220056e05d1
gaagttcaccacaaaacaaccagtgtgagtttgtgtcagtattccattaatatatgcaattgacaataaatttccaatttgtttcgggcaacatttgatgcccacacctatcctttgaaatgttcccaaacaattctgtacacataatgcccaggagc

SEQ ID NO: 3522 - DNA, 504 bp, Glycine max
  unsure (1)..(504): unsure at all n locations
  Clone ID: jC-gmfl02220056e06a1
gggatacaaagcagcggttgcaacttcccgctccgttgctctaaatcctaaactaaaataaaaccctagccagtggccggtgatcaccatggcgatgaaaactgcagaagaacacgaagtgggtatctcctgcttcatttccgaccttcgtggcttccgcggaattttaaagcaaagtggacagagatggagcagttgttcaattgtcctcacttgatgcccctctagaggagccagaggaaaatcgaaccaacacacacgacactgttgttagttatgcctctcagattgaatctttcaagtctcttgctgaggagtatgatgcaattcttttggaagaatttattaataagattaatgccggtggagaagatagtgtttctcccattgttctttctccagattctgataaatctcatagaaaggcaatgcataacttctntaaggaaaactntaagttcctggtcactgatgtggtcaatggacccgatgcttcatcgaaat

SEQ ID NO: 3523 - DNA, 483 bp, Glycine max
  unsure (1)..(483): unsure at all n locations
  Clone ID: jC-gmfl02220056e06d1
gtggatggcaaataagacagaccttgattctggggaccagattcattcaatttggtctctgcactaaataagaaataaattaaatcgaattaaatgcaaacctgatcctgatgtgttatacaaaaatttacgacttctttttccccccaaacttgtcttgtctcccttttaaccctttcatttatatgccaatgtgtgaaatatactatactgaatatttcgtacacgttattataaactatatgttcatattagcatgaatctgcttgaaaaaatctccagtcttgagcagtatcatggcaactggcgccatcccagcaagggtggtaatctatgtaggaatctctaatatgtagaaaccgaagttatcaagttccacgaagggagcggacacgatcttgaatcaagttcctttcccaatctgctatatcctcaaatgcatattctggaagattctcaaatgctnctttcacggatcattct

SEQ ID NO: 3524 - DNA, 473 bp, Glycine max
  Clone ID: jC-gmfl02220056e07a1
gttcattctctttgcgcagttccctacctctcctttcaagatgcagatcttcgtcaagaccctcaccggaaagaccatcacccttgaggtggaaagctctgacaccatcgacaacgtcaaggccaagatccaggacaaggaaagaattcccccggatcagcaacgtctcatcttcgccggaaagcagctcgaggacggccgtaccctcgccgactacaacatccagaaggagtcaacccttcaccttgtccttcgtctccgtggtggcatgcagatcttcgtcaagactctcactggcaaaaccataaccctagaggtcgaaagctctgacaccattgacaacgtcaaggccaagatccaggacaaggagggaatccccccagaccagcaacgtctcatcttcgccggaaagcaacttgaggacgggcgcaccctcgccgactacaacatccagaaggaatcaacccttcacc

SEQ ID NO: 3525 - DNA, 458 bp, Glycine max
  Clone ID: jC-gmfl02220056e07d1
gaattaaaaattctgatcgcatattaaattcccaagtcgtattcaaatccttatcaataaaaccatgaagccaaattaaaatatttctagtacacacccaaaaattcttcaaaagaaacttccgggaatctagcacgaccaaaatcataaattaatgaaattctaacccatcgataattaaatttgatgggaattatgatgtagcagtagcacacgtctcaccattaaaatcaaaataccaggtcaaagtttcaagtaacttaggacagaacgtaaaaaaaaactagattaaatgagtagatagctcggtacattaagtcacttagcacttgacctcctttaaggcatatgcaaagtacaggaatgttggatcagcagcgccgtccttgtagtaggcaaagaccaagcaagcatcatcacccatgctctcaccaacaaaaaattggaaatctttaatc

SEQ ID NO: 3526 - DNA, 481 bp, Glycine max
  Clone ID: jC-gmfl02220056e09a1
gcaggaacagctatctccacttcgccccttccgtacaacaccatggctagccagtgtgaatcactcggtacatgtgcaaggaaaaagctttcaaataggctggcctttgagaatcattacagccaagcacttgatgataaattcgtttttggcaattgctgatattaggaactcagcacctgagaaggtgacaaatggtggtgggcatgcccaattgccaagggaccccatgaagctgcctcctgctagcccctttgacaatttcctcaaggctgctgggtgttagattaggtggtttcatgcttacatctttctgctatgtatagttctaatgttaaatgttctttccagacaggagtttctagggtctgtatccttgtaaggactagtaggtagttccagtattttgacttcagtgatcagtgatatatataattgtagaatgacaatttctctactgaattgttcaagactttatggt

SEQ ID NO: 3527 - DNA, 485 bp, Glycine max
  Clone ID: jC-gmfl02220056e09d1
aggccaagtttccgtattttctcattgcagtggtagacaaatgccagtgtaacaattttgaaacaatgaaaagcattatctgacaagtatatttggatggcgaccaccaaaccagtaagttgacacatgaatcattctttcctttatatctacaaagtgaaaagaagaaatatatgtacaaaggttaagctttttatggaccccctccaagggggtccactgattttgtgaagggccacacagtacatattgtgaaattaattaaaaagcctcaagaaatgtcttctcttctgctattcaaatttgtatcaactgtggaatgagcttcaaaaggaaagacaactcctgctgtgaaaattgaagctttgagtttccctgcaccttcccacaacccttaaccaaaccctctccttgaccaccctttggtggctttatcatatccgcaactgcctcagttatttcttgaaccaaatccacaattaccc

SEQ ID NO: 3528 - DNA, 487 bp, Glycine max
  Clone ID: jC-gmfl02220056e10a1
ccttacttgatttcgctactttcgtaacaacagtgtgggttatatatatgattcgttttaagctcaaggctagctacatggaggagaaggataactttgcaatatactatgtggtggcaccatgtgctatgttagccttaactcatcatccatcaacttctcatcatttattaaacaggatttcctgggcattctgtgtatatctagaagctgtctcactcctgccccaactgcgggtcatgcagaacaccaagattgttgagccattcacagctcactacgtatttgcactgggtgttgcaagattcttgagctgtgctcattgggttcttcaggtgttagatatccgtgggcatttgttggtggccttggggtatggtttatggccatcaatggttcttatctcggaaattgtccagaccttcatcttagcagatttctgttactattatgtcaaaagtgtcttcggtggacagcttgttctacg

SEQ ID NO: 3529 - DNA, 506 bp, Glycine max
  Clone ID: jC-gmfl02220056e10d1
acgttctattatatatatatctatctatattctatatatagatatattgtttaggttatcaagtattaatctgaaataaataagaattgctgcttctaatacttataataattactacaaattctaataattactacaaaagggatatatgttagataaaatagattaattaatctatttcacaaaaaaataatgtatccatagcacagtttcgtcttataatacctcgggtgctaatgaaactattttagtgaaatttaactgtctcaattcccgggcgattgcacaaaagattcgagttccttttggatttccttcttgatcaatgacaactgcagcattatcatcatactgaattattataccgttgctacgtttgagttctttacaagtacgtacaattacagctctgatcacttctgatctttctaagttcgtatttggtactgcttggttgattacagcaacaacaatgtcaccaatataagcatatcgtcgattactag

SEQ ID NO: 3530 - DNA, 485 bp, Glycine max
  Clone ID: jC-gmfl02220056e11a1
caacattcaaaccctagaatccaaaacgggcaccaccaaatcgtccaaggactcgttcgacatttgcaaggaccagtacaagagcatgctcgacgccatcaaggaaaccaaagccgcgattgctaataaggacatcatcacggctaagttcaagttcagtgctgatttgtcgttccaagcggcgtgcaaggacgcgtttgaagatgggaaaatcccgttctttgaagactccgacgcggtttacaacctgggagggaattgcttggatattatcgctgatatggagaaagctcagggtcctcagaaaatgccaccggtgcaacaaagtgccccttctgcatttagcaacgtcatcggaaccgtctcataaatttttggtgacgaatccatttttttacgtgaatgatgatggaattgtcaagtgcagtattgtgtcattttctttttgttttcttttagtaaaacgaatgttttgggttagggga

SEQ ID NO: 3531 - DNA, 231 bp, Glycine max
  Clone ID: jC-gmfl02220056e11d1
ggcctaggattctcggtcgacgagctcactagccgactagtcggccggccgccctttttttttttttttttaatttaaaacgactgaagtattgcacatccatatactctataccctagcaacgactgatataaaaagcctatatattgcgaacaccctattaactgggctttggaccagctattgcaaacgacgcctgcactggcacctgttgcagaggcagaggcccac

SEQ ID NO: 3532 - DNA, 482 bp, Glycine max
  Clone ID: jC-gmfl02220056e12a1
ggccatgcaaatgttaccgaccaccgcagctatcttaaccttaacactggactacattgactataataatgaccatgacattagagtgctaatattcattgatgcatcgattgcagatactgatcttaacgacatcctcacgattaagagcacgacacaagatactgaactcgcactaactgggttcacagacatggatgcaaatcggaagcagctggacgtggaagaactgagccaaccgtaacggctacgtacgagaaggcaagtctatgatctatgatctggacaaagcgtcggctctaccataaaatgcctctggcgtcacgaaactgtccagtttacgaaaatggatatggtccctagcgctaatgtccactcctgtgaccataccatagaatacgtgaatgctaatgcgaatgggaccgataattatgacagggagttggaggatgtaatagataagcttattggggagtgtgata

SEQ ID NO: 3533 - DNA, 512 bp, Glycine max
  Clone ID: jC-gmfl02220056f01a1
gaaagaaatcaagcgccaggcgctcatggacctcgtggacttcatccaatccggctccggcaagataagcgagaactgccaagaagagatgatcagaatgatctccgtcaacatttttcggtgcctcccgccggcgtcgcacgaaaacacaggccaagaacccaccgatcccgaagaggaggaaccttccttggacccttcttggccccaccttcagctcgtctacgagcttctcctcagatacgtggtttcctccgacaccgatacgaaaatcgcgaaacggtacatcgaccactcctttgttctcaagttgctcgatttgtttgactctgaggacccacgggagagggagtatttgaaaaccatactgcatcgtatatacgggaaattcatggtgcataggccctttattaggaaagctattaacaacattttttaccgctttatatatgagactgagaggcactctggtattggggagcttctggagattctgggcagcattattaatg

SEQ ID NO: 3534 - DNA, 471 bp, Glycine max
  Clone ID: jC-gmfl02220056f01d1
atagaagggtgcaatgtaattcattatagacttatagtaaaggtccattcatattaaaatgtagcaccgaacatgacagacatgtcaccaaggatgcatgggttgactttcagtatttatatatattaacacttctatcaaatctgggagtaatcataaatagctgacacaatcgtgtctaaatgatatggcaaccattaatcacaatgcttaaacagatttcacacggagcaaatgaagaaacatctggcatactcaagatagctcatagacttagctgatgtaaccctatagaagaggtgggtgttgcgtagcctgctgccggaccctggtctggatctctgctgcatactgggtcaatagatgagagccttctgtcggggcaggatctgcaagatttggctgaacaagtaaggctcggatgcccacaagaatttgcttaactgtgatggctggtatgcagccactatc

SEQ ID NO: 3535 - DNA, 545 bp, Glycine max
  Clone ID: jC-gmfl02220056f02a1
acacaattcacaaccttcaaacatatttataagaataacaccaatggatactccaatgaccctcacgggcttgctccgcgacgtcgccgccaaattcccttcccgccgcgccatctccgtcgccggaaaattcgacctcacccactcccgcctccatcaactggttgaatccgccgccgcccgcttagtcgccgccggaatcaaacccggcgacgtcatcgctctcaccttccccaataccgtcgagtttgttgtcttgtttctagccgtcattcgagtgcgcgccacagccgcgccgttaaacgcggcttacacagccgaagagtttgagttttacttgtccgactccgagtccaagcttcttctaacatcagcagaaggaaacaactcagctcaagccgcagcttcaaaactcaacatccttcacagcacagcttcaataacccaagccgaagacaaagaagccgagctgagcctctcattaagccactccgagtcagagtcaattaactcggttgagtcacttcgaaacgatcccgatgacg

SEQ ID NO: 3536 - DNA, 408 bp, Glycine max
  Clone ID: jC-gmfl02220056f02d1
gtgtagggaaaaaaaatgaaaaaggttaatttaattagacctctaccaaacacttagggaatgtgtttctctaaaaaaaaattggactaaaagttcttagaaaatcttagacctctcccaatcagaatacacatagtccctcagagaaaacagaaattgccagattgagttccccaccgaaacagggataaagaaccaaagtaaactcagtactccaggtagccagccaggcacgagtagtagtagtagtagtagtaactttgattagagattataagccattttcatgctcaaaagaaagcagttttcagtactaaatacaatatgtaagaagcaatgaaaatccctcctttagccaaaaatttaaaaaataaaatacaattcccttcctttcttttcacaatattc

SEQ ID NO: 3537 - DNA, 544 bp, Glycine max
  Clone ID: jC-gmfl02220056f03a1
attgaataagcctgtcattgttgcctctcagctacttgaatccatgattgagtaccctacacctacaagagctgaagttgcagatgtttctgaagcagtcagacaacgagctgatgctttaatgctttctggtgaatcagccatgggccagtaccctgacaaggccttaactgttttaaggagtgtcagtttgagaattgagagatggtggagggaagaaaaacgctatgaagctatgttgctcccatcagttgggtcttatttttcagaaaagatatctgaagaaatctgcaattcagctgctaagatggccaataatttagaggtggatgcgctttttgtgtacacaaagacagggcacatggcgtctctattgtctcgttgccgtcctgactgcccaatctttgcttttactaccacttcatctgtgcgtaggcgactgaatcttcagtggggcttgatacctttccgcctgagcttcacagatgatatggagagcaatctcaacagaaccttttcattgctcaaggccagaaatctgatc

SEQ ID NO: 3538 - DNA, 441 bp, Glycine max
  Clone ID: jC-gmfl02220056f03d1
tttttttttttttttttttttttttttttttttttttttttttttttttttttattggaattttctttttaatattactcctaattaaattcccaccaaaaaatccacccaaaaaagcccacacccccccgcaaacggggccaccgcaaaaccagcacaaaaacaaaccccccaaaaaaaccccaccccccgacaaaaaacaaaaaaggcgaaaccaccgaaaccgcccccaaggggcaacacacaaaaaacccccggggggcccccgaggctcgccccaactaaaaaacaaaaaaaacgggcaccccaacaccccagcaaaacacgaccaaccccaaaaaaactcccgcccaaaagaggcaagcggccccaaaaaaggcgcgcggcacaaagccacccaaaaaatccaaaaatgccccaaaaaacccccggggcttaacc

SEQ ID NO: 3539 - DNA, 550 bp, Glycine max
  unsure (1)..(550): unsure at all n locations
  Clone ID: jC-gmfl02220056f04a1
gcgtaacagcaatggagctgtcttccagtgcatttgtggtaatattgttggcagtcgcagctacagcagtactctcaaatgggttggatctatctttcttgcccagcgatttcctctttggcattgcttcttcctcttaccagtatgaaggagcttacaagagtgacggcaaaggactgagcaactgggataactacactcacggaccaggtagaagtgtaataatggatggaagcaatggggatatcgcgattgatcattatcatcgctacctggaggatatagatttaatggaaactttgggagtaaacagctaccggctatccctgtcatgggcaagaattctaccaaagggtagattcggagagcccaaccatgctggtatcgagttctataacagactaattgatgttctactactcaaagggatccaaccctttgtaactcttagtcactatgacattccccaagagcttgaagacagatacgggagttggctaatccccagttacaggaagattttgttnttatgccgacctatgtttaaaac

SEQ ID NO: 3540 - DNA, 446 bp, Glycine max
  Clone ID: jC-gmfl02220056f04d1
ccacttaacactgagcaatgattaaaagattcgaagaattgcaaatcagttacaagaattcagaaattcaatatcaatcaatatatgggtgatattcattcagtcacgccaaaacttattattggctgcaaataaatataaactttgaaaatctctcctcagatagactgtctgaacaatttccttctttttcacatgatacgttagaaaaggagctctcctctattcataaactttgcattcctcatcagcagggtttgtctcgcagaaatcctccaatgggtctccactccccgctttaggtgcccctggccacttgcttgctactagatgtgccaaatcgaccactctttggctgtaaccccattcattgtcataccaagcaaccactttaaccatatcatctcccatgaccatagtcaaggaggagtcaatagtagaggaaa

SEQ ID NO: 3541 - DNA, 159 bp, Glycine max
  Clone ID: jC-gmfl02220056f05a1
tcttgttgacactacttctgcatcattcaatttcaaatcatggttaagaatgtatatgaataatgttatgcccagtctttttttcacatcagttttgacaataagaagagagatagagaggagagaaaaatatgatataagaagggtaatgcaatagag

SEQ ID NO: 3542 - DNA, 499 bp, Glycine max
  unsure (1)..(499): unsure at all n locations
  Clone ID: jC-gmfl02220056f05d1
ctgaagctagaacttttattgaaacccttttaggagtacatatactttatatagctacccctttacattttacaagattgatgaaccaacaaatacatttacaaaatatgctagcagttgccaacaatccaccacagccccaacttctaaaatatgtcagaaatatgggattcaaacacttgaagctttttgcagactagcagcatattgtcgagcccattggtcatagtgaataatttcttcgagtgacggagatgctactaattccttttgatgttcctgacaagttagttccacaaccttgaatatatccagataactaatcttttcttcaacaaacatttctacagctttctcatttgctgcactaagaactcctgtcatggtgcctncagcacgtcccgcagcatagcaaagattcaccgatggaaacttcttgtcatccggtgcataanatggtagagaaccatacttgctaagatcaagacgagggccagta

SEQ ID NO: 3543 - DNA, 367 bp, Glycine max
  Clone ID: jC-gmfl02220056f06a1
ggtagcgctgattcgatcgcatcataacattcattcacattcatatcctctctctccgatcccaatggcggatgagagccccaaaccagagaccttcgaactcaacaatggaagcatgcaggtcctcctcaccaatcttggcttgaccaatcatcttcttaatccgtacttggaaatgatggtcttttttccgttccaattttttcatatttcattctttatttcattgcctaatttgcggcttcaactctcctctcttttctggaatttcaagggtgtggttattctgacggttggttctttggccttggaatcttgctggaaatcctattcagaaagggtctttgcttccttaattttcgggctt

SEQ ID NO: 3544 - DNA, 481 bp, Glycine max
  Clone ID: jC-gmfl02220056f06d1
gaaaatgaaaatctcacctgatagattttgtcttcgaccctttattttacaatttcttgagtaaagaaaagcttaaatggcaagaaaagatctagaaagaaaaacttcaaacatattacattcattttttcaatctcgtgctttttcaaggtgcaagtgacatttcccgaaggttacaaaggataaggaaaatgatcacatgatgctaaaacgacctccaataactataacttgattaggttctcttctgaagtggcttccaatgatcaaaaccattccaaagttaacacgcacacaccccacagacacacacatatctagttctttggccatccaaatttgtacataaagtagttttgtgcccttagatacccaatcaactagtctttgggattcacaacgttggacacagtcttttccttcagatcttttgcaagcttgtctatggaatctgaaacttcaactctatctcgagccgaat

SEQ ID NO: 3545 - DNA, 491 bp, Glycine max
  Clone ID: jC-gmfl02220056f07a1
agaaaagcgcagcttgttccatccacgtcactctctccatctgaaagcagcgccgccgttgagttagtttatatccgagacgccaccacagtgaatattcaacttgaatactctttagggtttttccatggccaccgtgatccgcaaccctatcctcttcccttccacctctcaccaccccaaccaaaaccacacattcctcactctccgcttctctcaaaccttacgctcttctctccgctccaaatcccgattcgccgtttcctgctcccaatcggaacctcctcctcctcatccttcttcttctcggcggcgtcctccgtacatccccaacctcattccggacccttcctatgtccgcattttcgacacgactctccgcgacggcgagcagtccccgggcgcctccatgacctcgaaggagaagctggacgtggcgcggcagctcgccaagctgggcgttgacatcatcgaggccggcttccccgccg

SEQ ID NO: 3546 - DNA, 303 bp, Glycine max
  Clone ID: jC-gmfl02220056f07d1
gcctttcgtctttttttttttttttttttttttttttttttttttttttttttttatttttttttggtttgcttattttttcttttttttttttttccttttcattcttatttacaggggggggggaggggaaaaaaagagaaaactgttccccccaagcacacgacaaaagagggcttgaaacacacggggaacctaacaggggccagcgggtggcgcactatattcggaagcccccgtactgagaacgggaaaaaaacgctggggccgcagaacgataacccttcaacgttcccagaaaat

SEQ ID NO: 3547 - DNA, 492 bp, Glycine max
  Clone ID: jC-gmfl02220056f09a1
ccttacttgatttcgctactttcgtaacaacagtgtgggttatatatatgattcgttttaagctcaaggctagctacatggaggagaaggataactttgcaatatactatgtggtggcaccatgtgctatgttagccttacttattcatccatcaacttctcatcatttattaaacaggatttcctgggcattctgtgtatatctagaagctgtctcagtcctgccccaactgcgggtcatgcagaacaccaagattgttgagccattcacagctcactacgtatttgcactgggtgttgcaagattcttgagctgtgctcattgggttcttcaggtgttagatagccgtgggcatttgttggtggccttggggtatggattatggccatcaatggttcttatctcggaaattgtccagaccttcatcttagcagatttctgttactattatgtcaaaagtgtcttcgggggacagcttgttctacgtcttc

SEQ ID NO: 3548 - DNA, 489 bp, Glycine max
  Clone ID: jC-gmfl02220056f09d1
cgggatgtcggaatcggtcacgagctactagccggtggccggcctgtcgttttttttttttcatcaactagaagaattatttcattaatcgagtgcttattcattgccaattcctacaatttgatacatggccattggaaataaactagtgcgacctatacgtattaaatcatctatgaagctatctatcagtccccctaaaaataatcctagttcaaatatcatgacaagagagaatatcaaggcggcgaacaatataagaaaaccacacaaatgtccacgaaaacgatttgctttctcaaggaaattccagcctccatcattggtgtcccaaaactccgtgatagaagagtatcaaatatccttcaaccaatcttgaacttaacagaccaaatagcatggaaggcacaacccagaaagatgaatactcagaaaatttaccagacatctctaagataacgtccatccatctggagtgttttaactata

SEQ ID NO: 3549 - DNA, 534 bp, Glycine max
  Clone ID: jC-gmfl02220056f10a1
ttgggcacctttgcaaacacatctccacttatttttgaagcagtggtttggtatgtgttctcttttggaggtcctatgagcactgcccatatctgcatgcatgcatcatacaagaatgactcaccttgtaggtgcatcttgatctcgaacatctaatgccagacaaaattagggtacattgggttgcttcggttctctggttcttaccccataaatcaagggtcttgtttgctcctagcctctttaaaaagatgcctattaaacctacaagagttttatatgcatgaagttccatgggctaacaaataacaggctagatttggtatttgttgctggtgtcagatttgcttgattgatgtcaaatctcaaaatgatttatattctataaattaaatccttctacataaggagatgagttttaagtatatagattgtaatttcagtttgattcaatgttctattattatggcaatgaccacattggcagcagtggccacgtcaaccaccttcaatttcattctatttattctctaa

SEQ ID NO: 3550 - DNA, 541 bp, Glycine max
  Clone ID: jC-gmfl02220056f10d1
aaaataacacacacttcacacatcattacgacaattaaaagaggtgtggaaattttcaaatagacagagcatactcaacaagagggtcatgtctaatttcctttattgaattaaacaaacgaacaaacgaaagaaaacacaaattccagatcatgcagaggattccgcattttcagaagatctggcagtagcctgtggaacagaaaaagctggcataagagtattaccagcaatttcaaaatcttgagaaattcccaagagaatatcaaaaactgtagactgtttgggattgtcaataaggaaactcaagtgccatgaagtttgatttgcccactcagaactccacatttcaaaaccattattaggaccacatacctctattgggaagatcaattcccaggaatgtggttccgattttggccacttacatgcatcgaaatgctctgtactggtgctgtttgttaaaaacacttgtaccaatgaggcccaatcactccttttgactgctgcattcccagacatcacaattttaaccattaaa

SEQ ID NO: 3551 - DNA, 480 bp, Glycine max
  Clone ID: jC-gmfl02220056f11a1
caacattcaaaccctagaatccaaaacgggcaccaccaaatcgtccaaggactcgttcgacatttgcaaggaccagtacaagagcatgctcgacgccatcaaggaaaccaaagccgcgattgctaataaggacatcatcacggctaagttcaagttcagtgctgttttgtcgttccaagcggcgtgcaaggacgcgtttgaagatgggaaaatcccgttctttgaagactccgacgcggtttacaacctgggagggaattgcttggatattatcgctgatatggagaaagctcagggtcctcagaaaatgccaccggtgcaacaaagtgccccttctgcatttagcaacgtcatcggaaccgtctcataaatttttggtgacgaatccatttttttacgtgaatgatgatggaattgtcaagtgcagtattgtgtcattttctttttgttatcttttagtaaaacgaatgttttgggtta

SEQ ID NO: 3552 - DNA, 409 bp, Glycine max
  Clone ID: jC-gmfl02220056f11d1
attgcaatctctttactggtcatagatagcagtagttcaattgagaattcctcacaaaacttaaaaaaaatgaagagaattccacacaaaagtaaaggagatttcaaagcaaatgacttttcagtctcaggttacaatcaacgacaatcacacgaaacacaatagaacaacataacacacttgtgcccaactcacgcctagtcgtggctgatgcactttattcagcttttaacatatgaaattgatggaattaagggtcaattaagccccataatacatcaatttttatttcttagatagcattagtagagtaaaacatgagcttaatttgatgatttaattgtgcccctgagtaagggaagcatcaatttttttgctaaccacaacagccagttgcaacaaggtatga

SEQ ID NO: 3553 - DNA, 476 bp, Glycine max
  Clone ID: jC-gmfl02220056f12a1
tcccaccttcctctccttctttctttctgcttaaggtctacacaagttctctgcttcttctccccctattgacctttggtcatcacaagcgaaaacccacttctggatcttctggtgtaaaggccattagaagctttagaaattttctaattgagttggtgtatagtgttgaagggggtgaaatctggagcccagtttgttagttgttactcacttcatctgtaagctcataggttgaaccctctttttttggagacttacctgggaaaagatgatgatgtttgaagatatggggttttgtggcgatttggatatgttatgtgtttctcttggagagggggatattgctgtgagacaaactgaaccggatcctgtagttgaggatgactacagtgatgaagaaattgatgtggatgaacttgagaagaggatgtggagggacaaaatgcgtcacaagcgattgaaagaacaaacca

SEQ ID NO: 3554 - DNA, 400 bp, Glycine max
  Clone ID: jC-gmfl02220056f12d1
tgcctcgtattcccggtcgacgagctactagctactagtcggccgtgtcgtcctttttttatctctttttaattttcgcaatgtatttactggcactcgttaatttcttgataaaacggtataccctgccttattttactatattgagcacgaatgttcatctaaaatcaatgtatggtgcctactaatgacaccaaaccaagaggcgtcgttccaggaccgtgacacaactggcaatgcttgaacatcacggacttgcgttatcatcccttgtggtactctccaattgacggaatgaagcagattacctggaacaggtgatgatattacggctggcataggtaaaccttggcaacttctgcaacctgttccaaacagaattacatggaaacattggcca

SEQ ID NO: 3555 - DNA, 457 bp, Glycine max
  Clone ID: jC-gmfl02220056g01a1
accggcaccaagtcttgctccgaccaacacgccgatctcgaggctcaagactatgccggcgtgacccccatgcgccgcctcaccatgcggcggttccgtcagcgttacatgtactattcatattgctatgatactttaaggtaccctgtgccacaacccgagtgtgtcattgtaccctccgagaaacaaaggtttaaggagaccggaaggttgaaatttggcggcagtcaccaccggcaatctcgacggaggggccgtacaacaactccggtggatcataccgatcagggtgatatgtgatgattgatattgagatgtatataatagtgtcaattttttagatctttatttgtggttttttttttttacattatatatttatttgccgacaggcataaataaaccaatcgatttatatatggtctttatttttgtttaataaatgtgttttggtgtt

SEQ ID NO: 3556 - DNA, 312 bp, Glycine max
  Clone ID: jC-gmfl02220056g01d1
tttttttttttttttttttttttttttttttttttttttttttatttttttttgttttttttttttttatttattttttttgtttaaatttttttttttttttttttttttttggaaaaaggaaaaagggccccattgataaaaaaaaaaaaatggtttaaaaagggggtaatattttttataaaaaaacctaaaaaatgagggaaaaaaaccccggaaaagcattatttttttcgggaaaccaatttgggggaaaaatcttagcggagaattttttccccaaaattttttcgaggtaaaaacccttttttt

SEQ ID NO: 3557 - DNA, 539 bp, Glycine max
  Clone ID: jC-gmfl02220056g02a1
ctcccatattatagtacccttttatcccaagttacttaaatttaaaacctttattactgctcatacttgtttttcgctttgttaagttttaagaaaaatggaggcacattctccagttatagccaagaagctatggaatgtgttgaggatcaccttcttcatgatcaggaagggcttggtgtcaaagaggaagctgattatggacatgaatttgatgatgaagaaagggaaattgctcagaaaatctatgagcaatttcatgtcatctcatcaccatcatcattattcaaagagtttggcacgtggttatggcatgcaggaatatgaattctcatgcagcaacagtccaaatcctgtttttttccatgtgccaaagaggaagcatcatttcaacttcccttgcatgaacaccccagaggttgttgaagagcctaataataggcctgtggttctggtgcctaataatatgacacctgaatacactttcaaccttaggtttgataatattaatgcatctgaatttcgccctggggagagga

SEQ ID NO: 3558 - DNA, 364 bp, Glycine max
  Clone ID: jC-gmfl02220056g02d1
tttttttttttttttttttttttttttttttttttttttttttttttttgtttttttttttttttttttttttttttttttttttttttttttttttttggaaaaaaaaaaagggaaaaaaataaaaaaaaaaaaataaaaaaaggggggggacaaattacaaaaagggcccacccccaatttacaaaaccgccacccaaaaaacccacccggttaaaaaacaaccttctatataaaaaccccataaccccataggggagggaacccaatttttaaaaaaaacaaaccctaaaaaaaaaaaaaaaaccctccttaaaattccaaacccaaaaacccggggatcaaaaccggggaataatccgcg

SEQ ID NO: 3559 - DNA, 542 bp, Glycine max
  unsure (1)..(542): unsure at all n locations
  Clone ID: jC-gmfl02220056g03a1
caatgacgtccatggccactttcttcgcccaaacctccttcccctcccactctctctccaaaaccttcgatacccatttcgcccctgccccgaaagtcaacgtctttgtgaacttcagggcgaggaggcacgttggggtgcgagtttcgaacgcgctgatcgaaccagatggagggaagctcgtggagcttgtggtgacggattttgagagggatttgaagaagggtgaggctctttcgttgccgaggatcaagctctcaaggattgaccttgagtgggtccatgtcctcagcgaaggatgggccacacccctgaaaggcttcatgagagaagccgagttcctccaaacgcttcatttcaactcgctccgactcgatgatgggtcggtcgtgaacatgtcagtgcccatcgtgctggctattgatgatgcgcagaagcatcggatcggngataacaaaaaggttgctctttttgatccaagggagaccccgttgcaattctcaataatattgagatttataagcatcctaaagaagaaagaa

SEQ ID NO: 3560 - DNA, 288 bp, Glycine max
  Clone ID: jC-gmfl02220056g03d1
aaggaaacctggaaagttcctatttccggtaaattcgattaaataataaccaaaaattggtacctggtaccctgtcaccttggaattccaaattgcacgttaaggttaactcccgaattggacccaaaaaacaagggaaaattaattccccccggtttttttcttttttgggggaattttcaaacttttccaggggaaaaccctagggagcccaatttgctttaaccttttggaaccggcaattaaatgccccagggctgttatttttccccaaaaaggattcgtttt

SEQ ID NO: 3561 - DNA, 525 bp, Glycine max
  Clone ID: jC-gmfl02220056g04a1
atggaagtcctttagactacactactacagtaccaccaacgatcaatgcaatattcatcaaaatgggtacaagagatgttcatgatgatcttcatactgatgatgatgatcaagaagactcagagttagaggatcaagaatcagcaaaggcagagaaatggaaaaaccattactcatcaaatcacaggattctccttgttggagacggtgacttttcattctctctttgtttggccagagcctttggttctgctcacaacctcgttgccacttctcttgattcctatgatagcattggaaagaagtacagtaatggattgagcaacgtgatggaacttcaagaaagaggttgccttgtttttcatggtgttgatgccaaggaaatgagtcagcatttttttctcaagacccagaggtttgatcgcattgtctataacttccctcatgttggctttatatacccagaaaatagccactgccagatccagttgaacaaaaggttgctgaagggtttttagcaaatgc

SEQ ID NO: 3562 - DNA, 385 bp, Glycine max
  Clone ID: jC-gmfl02220056g04d1
aaacgaccactccatatacatggcggcagattaaagaatgttactagaagaaaagaaaaagacttcagagtcgtctttcacaccggagaggcatatcctaattggacagcacctagacagtctgcgcaacgggattctcgcccgcgacatgcgacgtgcccgcggcgatatgggccttttcgccctgttgctgcgcgttcttgatctcgacggggagcttgccgcccttggtgagacccatgtcggccgcatacgtcgagtgcgggacccagccgggcgacttgcgcggcgagccgacctcctccatcatgcggtcgacttgttcgagggtgaggcccttggtctcccacacaaagaggtaggcgtagatgaagcacaggacgca

SEQ ID NO: 3563 - DNA, 539 bp, Glycine max
  Clone ID: jC-gmfl02220056g05a1
ctgaagcagaagggttcctcactctcttcatctgattgaacaaaatgtacacctcgaggaagaaaattcacaaggataaggatgccgagcccactgaatttgaggagacagttggacagtacttgttcgacttggagaacaccaatcaggatctgaaaagtgacttgaaagatctctacataaaccaagctattcaaatggatgtggctggtaatcgcaaggctgtagtcatctatgtgcctttcagattgaggaaggcattccgcaagattcatcttcgacttgtcagagagttggagaagaagtttagtgggaaggatgttgtcttgattgccacaaggaggatcgtgcgaccgccaaagaaaggctctgctgttcagcgaccccgaacccgcactttgaccgctgtccatgatgccatgctggaggatgttgtgtatcctgcagagattgttggcaaacgggccagatatagaattgatggctcaaaaataatgaaggttttcttggaccctaaggagcgcaacaacactgagtac

SEQ ID NO: 3564 - DNA, 494 bp, Glycine max
  Clone ID: jC-gmfl02220056g05d1
gatagaagtgtagatcagattaaaattaaaaataaaactcttagatgcaaaccagtgcttgatattttacattcagaacataccaactcgctatcctattggatgtttttcgaaagtaaaagcactactgaaacaacgaacatagactacagttatgcctgaaattattacagctgggtcacactagctagggtgaacccttccaaaagcttaaaggatgcaatgctatacaggttagactttaattataaggtggcacacatgatatgctatgaacaaaatattgatttggaaaaaaagaataatattagccggttaaaaaaacgctgccttgtgcatagcaggaaaaatatggttcactcaaagggcaaaacaaactttcctcatccatcacccatagagggtcagaagaatattcccatgatgatggagaaggcacttgtggtgggcaagagaagttgcaaccctcttcactgttcccttcataaactggc

SEQ ID NO: 3565 - DNA, 501 bp, Glycine max
  Clone ID: jC-gmfl02220056g06a1
cacccaattgtctccccattaaacaataacatgaataatattaggaatggatacagagaagaaaaatcattctgctatttccaccccaaacaggtacttgttggggtgtgtcccctgtgcttgaatgagaggctccttatactggttgcaaaacaaggtcgccaccacaaccgttcttcttcttcatccatatcttcacacaggcttcaaagtaattccagacacagaaaaccaccctcttcttctattcacaagatctttgcttttggctctctcttcactcgcccagaatcccaccacaactatgactatgatgatgtctctcccactccagaagagtcattcatctcaatcaagtttgaagagaatggggtggcatcgtgggaaaagagcacagtgtcaaagaaggtgtcgtcgtgggaccatcaaaacaaggagaacaagagagtgatagagcatgggaagtaacgtgacacgtttaggtggccaaagaggatttgg

SEQ ID NO: 3566 - DNA, 282 bp, Glycine max
  Clone ID: jC-gmfl02220056g07d1
ataatgaacacttggaaagctatataccatttgggcttagtgattaaaaatactgaacaatacataacattcacacacgatcttatcggcaggctggatgaaaacacttttcgcaataaacacagcttttgttgaaaaatttttgctatggccgaactgtacgaggatgttaacaatttgggctacaacaggattgcaataactgggttgctccatgtagtgtaagtccacatcatagcttatgcatggaatgaatcaactgctactggctgcgtgttttca

SEQ ID NO: 3567 - DNA, 141 bp, Glycine max
  Clone ID: jC-gmfl02220056g08a1
ggttcagtccactgaggatccttttgaggttttcaagcgcaacgctattaacaagcttggggagatggttcatggcaacgtcgccgatttgaggaagaccagagaagatgaaatggaggggcttgtaagaatgcatggcct

SEQ ID NO: 3568 - DNA, 534 bp, Glycine max
  Clone ID: jC-gmfl02220056g08d1
catcacaaattagtcactactcatgtttcacttgagactgagactagtttatttaaatgaaacatcgttaaaaaaacaatatatatacatggttcctgatttgaatggtatattataccttgtatgaacataaaacagtgataaagaattcagccacccaatctgaaaactgtacaattgagcagtaccacaccgcttgcatagatgcaaacctttatctattttagtgtggtcaaacctctgcacgtatccaaagaaatgaaagccagttatgtccagacgcaaacaatcccattcttatcagctgaagctaggggttttgcaattccgctccacctacaacacagaacagaggaagtgtgttccttcagagtactgactatatcacctttagatattgaccaaatatagacagatccatcagcagacccagcagcaacatgattgtcatctgggctgatacaggagcgactccaattagaagccactctgtttcccatggctttaatgtgccacaaacttccaagatcgaca

SEQ ID NO: 3569 - DNA, 499 bp, Glycine max
  unsure (1)..(499): unsure at all n locations
  Clone ID: jC-gmfl02220056g09a1
atgcaaaatatcaatcgtatgttcaaaatcaaaacatgtacaacaacacaggatatactttgtttttttgcaggtttggcacctagcagggtaattatttgagggagcggggtcaggcttaattctccgggtctttaacttttaataacttttgttggagaagaattaagacatctaaatggcttcaaattccgataaggattccccaacaccaccttcacctgattcatcttcatcccaatccccgccatcatctcctccaccatcccaagatagttcatcgcccccaccatcatctcaggataattcgtcgccgccaccatcgtcccccccgccatcatccccaccaccatcatcttcgcctcctccgtccccgccaccgccgtcatcaaatgatcagaaatccccgcctccgccatctgactcatcctcctcccccccatctccaccaccgncgccacctcctgataaggattcaggcagccaccggtcgccaccg

SEQ ID NO: 3570 - DNA, 247 bp, Glycine max
  Clone ID: jC-gmfl02220056g09d1
cttcgtccttttttttttttttcttctgcattattcatcatagcatgaggtgcagaggtgaacggctccaacaaaagccacaaagttatatgaccttacaagcattctcatcatatataacacaggagctcgcatccggaatcacgcgcgagctgtccacttaggatattgaacgtcatatcctatcgactgagttgattgaagagagcatggcagacaccttactagactgagacatatagattga

SEQ ID NO: 3571 - DNA, 495 bp, Glycine max
  Clone ID: jC-gmfl02220056g10a1
caaaaccctcttttttctctctcttgcaaaacctaattttcatttcttccctcaaatttcaaaatgcgtgagatccttcacatccagggtggccaatgcggcaaccagatcggcgccaagttctgggaggtggtttgcgcggagcacgggatcgaccctaccggaaggtacggtggggactcggagttgcagctcgagaggatcaatgtctactacaacgaggccagttgcggtcggttcgtgccgcgcgcggttctcatggacctcgaaccgggcaccatggacagcgtccggtccgggccgtacgggcagatcttcaggcccgacaactttgtgtttgggcagtccggggcagggaacaactgggccaaggggcattacactgagggtgcggaattgattgattccgttctcgatgttgtgcgcaaggaggctgagaactgcgattgcttgcaaggttttcaagtgtgccattccctggggggaggaactgga

SEQ ID NO: 3572 - DNA, 409 bp, Glycine max
  Clone ID: jC-gmfl02220056g10d1
cttcgtcctttttttgatattttgcacgcaaagcttcagcatacaattggaattcgattacattctgacttacatgttccttgcatggctttcatcaaggaaccctgcgaagcatttgtaacaggattgatttcacacagacttatttacacacaccaaatgctggatatcgacgtctacacctgtacacaaaataaaccgctcttcacgtagacaaaacctaacagaacctatcattatggaagaagagccctgttccaatccctaaggcatttcttaagtggatcagtgatcttccctcggcacaatgcaatgaacactacgtcacactcttgacccagtgagatgacccgtgcaccagttagcaatgctttgtccaactgctcttgtacatacttgtacccggggt

SEQ ID NO: 3573 - DNA, 199 bp, Glycine max
  Clone ID: jC-gmfl02220056g11d1
accctggatagttatgataaactagcgatcccaacatgggagcattgactggagcaatttctggctgggatcttgaaaagcaaatgattaaaaatggaaaagaagggggtacataaaaggcccaatgcaagacaaaaagacatgatcgaggaaccaagtaatgaatctctcccattttagagtggggcatacccttttt

SEQ ID NO: 3574 - DNA, 487 bp, Glycine max
  Clone ID: jC-gmfl02220056g12d1
ttttttttttttttttttttttttttttttttttttttttttttttttttttttttttttttttttttttttttttttttttgggaaaaagccaaaagcaatcccttttcaaaaaacccttttcccttatggggaaaaaaggaaaccgtttatgaggcttggagcattaataaagccgcttataaaatatcccgatttttgggaaattagggggtccaaacaaacaaggtaatcaaacaatttggaaagaaaatttttttttctgggcttggaaaaaaataacccccctaatcccggggcaagggaaccttatttaaaagacatgggggggccttgacaggggcccaaaatttttggggaaactgggatgggaacccgaaaaacttggtgcaaaaagggggcttcaagaccttgggggagcccccccataaaaaggtccccaaggttgggggcttaagggtgctgaaaaacctcgtattttgggggg

SEQ ID NO: 3575 - DNA, 515 bp, Glycine max
  Clone ID: jC-gmfl02220056h01a1
cacaaaacttgctatcgcagtaagctataactcatttgaggctctgcgagaattgagaaatggctaaagatgttgaggttcaagagcaaggaggagagtactctgccaaagactaccatgaccctcctgcagcacctttgttcgacccagaggagctcacacagtggtccttctatagagccctcatcgctgagttcatagcaacccttctcttgctttatgtcactgtgctcaccattattggctacaaaaggcagactgatacaacggtaggtggcaccgactgtgatggggtaggcattttgggcatcgattgggcctttggtggcatgatcttcatccttgattactgcaccgccggtatttcaggaggacacataaaccctgcggagacattcgggttggacctaagacgcaaggaggtcgtgaatacggcgttgttgtacatggtggcacagtgtgcccgagctatctggaggactggattggccaaagggtttcaaaaagcatactac

SEQ ID NO: 3576 - DNA, 447 bp, Glycine max
  Clone ID: jC-gmfl02220056h01d1
aaaataaaaagatgcatatatgactcgggggttatttttgattttgcaaattacacaatcacagccgtacatcacacgtgagctgggccttttccaacttaaaagcagaggataacattggcccatgacgcaacacatgcaccacctaataatcataattttacatctttacatacaaaatacaaagactttaaattaaaattaaaaaaaaaaagataaacagatcatcttgatgaaatgaaaccgaaacccagaaacattggtttgattttttttggtggtcccaacttgattaagcatgaacggtttgattgaatcacttggacttgaagggaatggccctgattacgacctggtggtaaagtgctgcaagtgcagcaccaatgaaaggtcccacccagaagatccagtgatcattccaaccaaggtccttgttgaaaatgatag

SEQ ID NO: 3577 - DNA, 551 bp, Glycine max
  unsure (1)..(551): unsure at all n locations
  Clone ID: jC-gmfl02220056h02a1
caatgacgtccatggccactttcttcgcccaaacctccttcccctcccactctctctccaaaaccttcgatacccatttcgcccctgccccgaaagtcaacgtctttgtgaacttcagggcgaggaggcacgttggggtgcgagtttcgaacgcgctgatcgaaccagatggagggaagctcgtggagcttgtggtgacggattttgagagggatttgaagaagggtgaggctctttcgttgccgaggatcaagctctcaaggattgaccttgagtgggtccatgtcctcagcgaaggatgggccacacccctgaaaggcttcatgagagaagccgagttcctccaaacgcttcatttcaactcgctccgactcgatgatgggtcggtcgtgaacatgtcagtgcccatcgtgctggctattgatgatgcgcagaagcatcggatcggggataacaaacaggttgctctttntgattccaagggagaccccgttgcaattctcaataatattgagatgtatagcatcctaaagaagaaagatagcccgaac

SEQ ID NO: 3578 - DNA, 458 bp, Glycine max
  Clone ID: jC-gmfl02220056h02d1
acaacttgaaatgattttctcaaacaattttatgtaattaccattttttggcttgtaatgcattcaaatttcccatttcccatttgcatacaggcacgtactatagacatgaattacccatttgcatgatcataggaataattcagcatccattccctaagcaaaacgggttcagttatttaacgagctggggccccgacccgccacaaactccgctccacctctctgcggttcaaccgaacccgtcatcggtgtaaccgggtgaaccggaaccgaaccggtattcggcacgggatgatacccatgctgcttcaaaccatcatgaaccaccgcggcggaggggctgtaaggttgcagtggggtcacgtgcctcacgcccgccccatataattgacccgaacccggaaccaaatgatggtacccgattggaacctgaggtggcatcacagcatgatatg

SEQ ID NO: 3579 - DNA, 399 bp, Glycine max
  Clone ID: jC-gmfl02220056h03a1
tccaattgctcctcttcctatttcaatgctgcctttggcaagagaactgaaagattctggtctatgcagctgccagtgcttattgctgagatagtctttgctgatttcttagttagcattgtgtctataactgctgttttgtatgttcgctacaagctaagaaattgtcagtgctcagggccataggtgaagaaactaaaagggagctctataaaccaaaaggatcataaatgcaagatccgaccggacttggatgacttcaagattatgagggcacagatgttcccctacgaggagcttgatagggcaactagtggattcaaagactgagttcatattgtggaagggaagtttttcatgtggagtcaaaggaggtctcaaagatggtactgttgttgc

SEQ ID NO: 3580 - DNA, 464 bp, Glycine max
  Clone ID: jC-gmfl02220056h03d1
cacaaactaaattatgacacttcttatatatttgtcatttagggcataaataagcgttttacagatgtgcatatatacttgacacacttattcaaagtaaatagatataggagcatatatatatatatatatatttctgttagtttcaattagttgaaactaagttggtatttaggtgatttatcaggattgaagagaccaaaatgacgctcagtatcagcaccttgcttctggttttcgtcaaacatggcgaacaagtaagtctctatagactcaccaggcctctttggagttccattcccactcgaggcatgacgaatcaaattagcatagtaagtgcctgcattatcaattgaggctccagctccaccttcagatggccacccactctcagaaaccactatctgcaaattggacgctcccactttctccaaagcagcatatattgaatccaacatagcatc

SEQ ID NO: 3581 - DNA, 570 bp, Glycine max
  unsure (1)..(570): unsure at all n locations
  Clone ID: jC-gmfl02220056h04a1
aacacagaggagctatcccttccgttattgtgattggtgctggaatatctggacttgctgcagcacgaagtctccacgatgcatcttttaaggtgactgtactggagtcacgagataggcttggtggtcgcattcatactgacttctcatttggttgtccagttgacatgggagcctcatggctacatggagtttgtaatgagaatccattggctccattgattcgtggcctggggctttcattatatcgtaccagtggtgataactctgtcttatatgaccatgatttggaaagttatatgctttttaacattgatggtaagcaagttccacaacagatggtcattgaagttggagacatctttaagaaaattctggaagagacagggaaagtgagggatgagcataccgaggacatnttcagttcccaagctatttcaattgtgctagataggcacccagaactaaggcaacaaggaccttgcccatgaagtgctacaatggtttatatgcagaatggaagcttggttggctgctgatgcagatatgatttcattgaaaacctggatc

SEQ ID NO: 3582 - DNA, 489 bp, Glycine max
  Clone ID: jC-gmfl02220056h04d1
aatgatcatcaaaaattatttaatggaaaatcttgatactttaaaatatccaaattcacaaaaacataatatgtcaccacttaatattttctcaaacaagggaaccaaaggatgaaaatgtataacaaccaaaatcgattaggtaggcaaagtaaaaggtggcataagatctaatagcactagagaaagacataatgaacagtctaatcctcgtcttcctcgtctccgtctccacctgcggccttcttagcagcagccctttggtttcttctcttcactcttccagggcgtccgccaccaaggggacttgtaagtgagaagtcaatgtgcttctgtgagtcaaccctcaccaagaaagatgggatgttcaccacttgcctcccaaccctgatatgtctctgcttgatgagaaccctggcgtggtgaatggacttggccatcccggatttgaagacgagcgtctgaggcggcgctcgaggaaattctcga

SEQ ID NO: 3583 - DNA, 524 bp, Glycine max
  Clone ID: jC-gmfl02220056h05a1
ggaagtataccatttgctgcatctatccggtctaaatctcaaaactctcccctactatctattgggcttgtcattgtgggtgcaatccttctgattggttattgttacagcaattcaggtggagctagcggtggtattaaggatgtaagtaaacttgaaggtggtgcatcatgctcatcagaagtcctacaagcattgcccgttttgaagaaatcatatggagacagtttgcacaaggttttgcatgttggccctgactcttgttctgtgttatctagtttgttagaagaagaggatactgaggcttggggaatagaaccatatgagttagatgatgttggtgcaaagtgtaaaagtcttgtacgcaagggcattgttatccaggtcaacagagaactagaggtgaagaagtggccaaatttggtcgtccagccaaattgcgcagctcatcttggtggataaggtttttcgttcagtctagtttagatgaaaatgaaactgctggaaggaaagttgaacaggct

SEQ ID NO: 3584 - DNA, 496 bp, Glycine max
  Clone ID: jC-gmfl02220056h06a1
gccaccaccaccccttacctcaccaacctcggcttcggctactccatcgccatcgccctcggcgttctcttcctcctctccaccctcatcctctcctcctacctttgctgccgcaccctccgccgccgcaacaacaacaacaaccgccgtcacacccccgatggcgtcgtgctcccgcgcgtgatcttcgtacccgaggacgaggatgacgacgacgacgacacccgccagaacgacgtcgccaccggcctcgaccaggccgtcataaactcctaccccaagtttccattcgttaaggaaggtaattacgacagcacatgctcgatctgtttgtgcgagtacaaggattcggagatgctgaggatgatgccagagtgtcgacactactttcatctctgttgtctcgacccatggctcaagcttaacgggtcctgccccgtttgccggaactcccccatgccgacgccgctgtccacgccgctgcacgaggtcgtgc

SEQ ID NO: 3585 - DNA, 490 bp, Glycine max
  Clone ID: jC-gmfl02220056h07a1
ggttcagtccactgaggatccttctgaggttttcaagcgcaacgctattaacaagcttgtggagatggttcatggcgacgttgccgctttgaggaagaccagagaagatgaaatggaggggctgtttagtttgcagggcgtgctgaaacagcgcgaggagagtctcaataggggtgtgaaggagatgcagcaggagatggaggctttggagcagcagttacagatggtgttgatgaatactgatgttttggaggggtggttgagggataatcaggggaagaagatggccggtttggagaatcccgaggatgcttttgagtgtgcggatgtgctctccaagcagatgcttgactgtactgctgctgatttggcgattgaggacacgctttacgcgttggataaggcacttcaggttggaggtgtgccatttgatcagtacttgatgagcgtgagggccctgtccagggagcagttcttttaccgggccact

SEQ ID NO: 3586 - DNA, 484 bp, Glycine max
  unsure (1)..(484): unsure at all n locations
  Clone ID: jC-gmfl02220056h08a1
cacccaccgccgccacattcacaccacgcgccgccgcttccaatttccccggagacccaccctttgcatggcagtgagctttctggcgcgcgatgtatcggacctctgccttgggaagccgccgctgaggtcgctctccgccgncgncaccgtcgccgacgccttggccgcgctcaagagctccgaccacgagacccacgtcagcttgtggagcttctgcgagaacaagaacgaggttcgttgcgttgggaaactgtgcatggtcgatgttatttgctacctttgcagagaggacaatctcttgtctccttctaaagctctcaaagaaccactttcttcaattctccctaaggatcaatctctcgttgtgcatcttcaaccttcttctagcttgtttgaagctattgatcttatcctccaaggtgcacagaatcttgtggtgccaatattgccaacaaagaggagtggagtttcaagaaggaaa

SEQ ID NO: 3587 - DNA, 499 bp, Glycine max
  Clone ID: jC-gmfl02220056h08d1
catctcgtgagtctccactcaacatgatttttagttaggaaaatgtttaagatactaataatcctaaattatgttataataaacataacaattactaaaattctgcataagttgccacgttctttttttttttttcaaaatcaacgagaaggacaacacgcatttttctcttgatcacaaattgcgattttcaggttgctagctccaagggcaaagcatattccaagttgcattgaccaatatttcataatgaattagccaaatcatcctatggtcctatcttagcccatagaagcaactagatccagtgcagttgccaaccttgttgacatgtaaattagattgattgactgctagacagggtcctgtatatcttcctaatagtatccggagtcgttctgcaacaggcacctacaagggaagctcctaactcacaccatttatttacatatgagataaaatcttcatcttgtacaccagtattttgcacccactcctt

SEQ ID NO: 3588 - DNA, 496 bp, Glycine max
  Clone ID: jC-gmfl02220056h09a1
caaaaccctcttttttctctctcttgcaaaacctaattttcatttcttccctcaaatttcaaaatgcgtgagatccttcacatccagggtggccaatgcggcaaccagatcggcgccaagttctgggaggtggtttgcgcggagcacgggatcgaccctaccggaaggtacggtggggactcggagttgcagctcgagaggatcaatgtctactacaacgaggccagttgcggtcggttcgtgccgcgcgcggttctcatggacctcgaaccgggcaccatggacagcgtccggtccgggccgtacgggcagatcttcaggcccgacaactttgtgtttgggcagtccggggcagggaacaactgggccaaggggcattacactgagggtgcggaattgattgattccgttctcgatgttgtgcgcaaggaggctgagaactgcgattgcttgcaaggttttcaagtgtgccattccctggggggaggaactggat

SEQ ID NO: 3589 - DNA, 247 bp, Glycine max
  Clone ID: jC-gmfl02220056h09d1
tttcgttctttttttttttttttttttttatgctttttttattttttttttcttttgttgtgtgtttttttttttttcttttatacaattttgttactttgatttattgggggggaaaacaatatggtgacccataggcctaggggacattcctccccccaaaaaaaaggggcattatacgaattactttttctttgaaaactgttgttggatgaaaaaaaagacccccggattatcatcattatca

SEQ ID NO: 3590 - DNA, 497 bp, Glycine max
  Clone ID: jC-gmfl02220056h10a1
catttttctacttttgttctctctatctgtctctgttgttctcattgaagcaaaagcttttgagtcccattcccttggattttggttgtgcgatcttcatcttcaccttcagggtggttgtgcttctgggaacctttcaaaattctctgcttttctttgatttttgagttgaattgaattgcactcttgagctttcaattgactgcctcagcttcctcaatttgccaccactgtactgttaatgagaataccataacttttgacttgactagtcaacggccagggcaaaggacaagatacagtgagcctttagacatgggctgtgtggtgtcagctccgaaggactctggtggaaatagaaggaggccagggagtattggtgaactttcagtatatgttcctggtttgaggattcctaaacctgttgattttgctcaatcacttggtgattatttgtccaagaatatagtggaacgcctgtctgctcttaaaacgcg

SEQ ID NO: 3591 - DNA, 492 bp, Glycine max
  Clone ID: jC-gmfl02220056h10d1
aagtaaattaaccattatttatttggacaataatttattttatttcaagtccatatcgggtctacacatagacacaacataactcatgttgctagagtagttttctcacaaccatcgtgcacacaggccaaaacatctctgtagtctcttgaaatggtaaaggagtcgtagacctctccatcactacttttcttgtactcaaacaagagatatgaatgattgaaagcagtcaatttgccaaacccatagtcaacgtccctataaagactccaaatagggggtgatggtgtgaagtctgacaggtgacttccccctccaccaacaaccacatgaattgttccattcacagtgccagagtagtgatgcttttcttcattcacacattgattctgataaatggggcatactctttcatagttatggacatgaccataaaatccaatgtctactttgtacttttgccaaagcttctgcaaactttcccttcccatg

SEQ ID NO: 3592 - DNA, 479 bp, Glycine max
  Clone ID: jC-gmfl02220056h11a1
aaaacccaaagtgcttctctcctctgtctttttctctctcttgctatccttttggctagtggcactgctgcaagtgcaactccaagaagcgcagtgccaagccaccatgtttcaacattcaacagaagcctttttccttccacttttctctttggaattggttcttctgcttaccaggcagaaggagcagcaagtgtagatgggagaggaccaagcatatgggacacctacactagacagcatactgaaaagatttgggatcatagcaccggtgacatgggagctgatttttatcatcgatacaagggtgacataaaaatagcgaaagaaattgggctggactctttcagattctctatctcatggtcaagaatattcccaaagggcaagggagcagttaacccccttggggttaaattctacaacaatgtcatcgatgagatcctagcaaatggtttaaaaccttttgtcactctttt

SEQ ID NO: 3593 - DNA, 264 bp, Glycine max
  Clone ID: jC-gmfl02220056h11d1
attataaattttttgtttatttttaatttctttttttgtatggaccaagatacttcttgatctgtgggcaaaaacccaaaaggaaacgcttgttaattgaccgtaaaccattgggggggaaaaaggacactacctatgatagcacggagcgttaaaaaacgggccttacctgttgaaaagtgctggaaaactcggggcgctaaagggagaggggattcaaggaactgggaaaaaatgaaccttgttcttgcgaggacagaaaaa

SEQ ID NO: 3594 - DNA, 483 bp, Glycine max
  Clone ID: jC-gmfl02220056h12a1
ctgatgatgatcatcaccttcaccatcacaaacaccacactacagcacaagcccaagaagaagacgacgaagaacacagccaaggaagatccaaagttgctgctgcttcgctcatgcgcatgagaaaaaccctactttggtatctagctagctagcttcggcaacttacacacacacacacacacacacatatattgagttgtgagttaagggtcttggctcttttgctacgaggatcccaactactcacactcttggggaatcaagcgtctcggtccgatccattttctgttttgtttttgctacaagtatattaatttcatgttataaactaattaagtagccttttttttttcttttcaattttataccaatttttagtttcaaggattgtgttagtttgctttaccaccgtcttgcttctctatttctaagtgtgcaactgttctttgtgattgataaacttggtctagatcgaaattt

SEQ ID NO: 3595 - DNA, 539 bp, Glycine max
  unsure (1)..(539): unsure at all n locations
  Clone ID: jC-gmfl02220056h12d1
accgaaaactggttcttgcttatcattcaagttttgcttccactttctgtaaatactaaataccagaaactgtggatacaaaattacaacacaacacaagacataactctggattatcccaaccactcatacgagttatatcctcgagttttattcattcattcattccatataatgatataaattacagggaaatacatacaaagacgcacatgagaaattaaacagaagcagcaagaagagaatgaattaaattcaaggcacaatcttataagccttggtcttgactatccaacttatgaacgaattcttggagttcctgaatcccaaaaacccatgttccttggccttgatcatgctatccaacattccctcccctgagaaaataagatccacaaaccaccaatcagcaacctcgtcaagcttggtaggcagaagctgattctcactcacaatctcatcccaaacaggacccttatccttcatcaattccgacanactcaaaccttcttcctcaaacccatactnctcaatcccaa

SEQ ID NO: 3596 - DNA, 495 bp, Glycine max
  Clone ID: jC-gmfl02220057a01a1
gtttttcttatacagccactctttcattctcattgccgtcacacagagagagaagagacaatgaagtttaacccaagggtttcctcaagccgtcgaaagagccgcaaggctcacttcaccgctccgtcgagcgtgcgtcgcgtcctgatgagcgcgcctctctcgaccgatctccggtcgaagtacaacgtgcggtccattccggttcgcaaggacgacgaggtgcaggtggtgaggggaacctacaagggccgcgagggcaaagtggtccaggtctatcgccgcaagtgggtcatccacatcgagcgcatcacccgcgagaaggttaacggctccaccgtcaacgttggcattcacccttccaaggttgtcgtcaccaagcttcgaatggacaaggaccgcaaatccttgctcgatcggaaagccaagggtcgcgccgacggcgacaaggaaaagggtaccaagttcgctcctgaagatgtcatgcagaccgtc

SEQ ID NO: 3597 - DNA, 377 bp, Glycine max
  Clone ID: jC-gmfl02220057a01d1
aatacaggtaagacctgaaacacaacatgcacaaatcaactcaatataccaaaccaagcaaaatgaccgatcacaaaactgaataagccactgtaacaatacggatatctttcggagactcccgaatacctatacacatgcgtggaccaaaggcgtaaacgggcttacactggactgacctaccgaaaatgcccgggatacacgaagtgaaacgcactatgctcagcatatgtttaaaccttactgtagcaccagggagtttaaaccaccaaacctaccatctggctgacccggatcttacacagcggatcccactatgcgggagtcaacagcctaagacaccggcaccttgacaaattgtcgaagcgcaaccagat

SEQ ID NO: 3598 - DNA, 479 bp, Glycine max
  Clone ID: jC-gmfl02220057a02a1
ggaaaaaaaaaagtatgtgtggtggcatgtgttggaagaaatgaaagtagtaaagtacctgaagagagtcaggaggacaagaagcaagtggatcttcatcttcatccataattagtagagcaatttccttgctcaaatcagcaaaaaatagatcatcttccagttccatggcaacctccatatctttgtgatctaattgacaaccaaaagagtccctaatttggcataaaaccaagtacaagagtttctaattttcactttctcttttttctctctctctctctcttcccttctgttttccaaaacttatggatatacaagtttatataggggaaaaaaaaggtaaggatatggttgtggatgggccttattctctctccgtctcttctcatctcatcaaaaacagtaagttatggctctaattatttcatatgcatataggcgaaaaatgaatatttgtcccaaagattcttatccct

SEQ ID NO: 3599 - DNA, 487 bp, Glycine max
  Clone ID: jC-gmfl02220057a03a1
actgaaagcactcagtagggtttgcggtttcagagtttgtgacgcacgcatccatggccaccaccaccaacgccgccgcagccccgccgcgccagctctcccagaaggaagccgacatccagatgatgttagccggcgacgtccacctcggcaccaaaaactgcgacttccaaatggaacgttacatcttcaagcgccgcaacgacgggatttacattattaaccttgggaagacatgggagaagcttcagttagcagctagggttattgttgcaattgagaaccctcaggatatcattgttcaatccgcaaggccttatggtcaaagagcggttctgaagtttgctcagtacactggtgctcatgctattgctggaaggcacactcccggtaccttcaccaatcagcttcagacttcgttcagtgagcctcgtcttcttatcctcactgatccaagaacagatcaccagcctattaaggaagctgg

SEQ ID NO: 3600 - DNA, 393 bp, Glycine max
  Clone ID: jC-gmfl02220057a03d1
aagcacaaaagacgtggataacttgatattattttattacatacatgcatagatagcctgctctcaaataagtcggcaggaacaaagatagagagattcaacgatcttcaaatttcacatttgccagaaatatataacagaatagaggggtatgggatatgagttaagttttgatcacattcaactacactatcccaaaccgttactgttaagactttgaacttgacttgtactctaggatcatgtcgttctcaggagctaatccaacacaagccctcaggatgttttccagcatagctcgctgctttgacaacgcattcaccactggtgtacccggtggaaccagaggggccttggtcaggtaactaaggatggtcgcaactggatggaatg

SEQ ID NO: 3601 - DNA, 485 bp, Glycine max
  Clone ID: jC-gmfl02220057a04a1
gcttttgcagaattcaagtagatcaaagaagaaatggtttgggaagcaaaaattgcagacttcagaatcaacctcacaaacggataatgcaccacctcttcctccacctgagattattttaactcatgttgagagtgaaaatcagccatgagcgtattgaagttgcaactgcagtggatgctgtggaacctgttcctgctgttcagatggcagctgctgaagttcaagccaccacaactgttcagtttaacagtaaaccaacagaagaagtggctgcaatcaggattcaaaaagcttttcggggatacttggcaagaagagaattgcgcgcgttaagggggctggtcaggttgagatcgctgatggaagggccagtggtgaaacgtcaagccattagtactctccgttctatgcagacttttgctcatttgcaaactcagattcgttctaggaggctcaggatgttagaggagaatcaagaacta

SEQ ID NO: 3602 - DNA, 437 bp, Glycine max
  Clone ID: jC-gmfl02220057a04d1
accaacataatttaccttgttattatcgggataaacagaaatgagactaaattgcagggacttgtctgaagatagcaaatgatttttgctaaaagcagttagaaatagacaatgaattgcaggtttaacagattaggcaggatgatacaacagatgcaccacccttgagcctggatttaccgtacagggcttattcaaaccggattatctcatgcttggacccataagcaacttggggtctgaaatcaatgttactgatgactttggctagcgcagactgatgaccatcactggtggaacctccagttttgtcagtccagaaccccaagggggctaccttaaacaacagtcatagattggctttggctgatggtgacgacacgttggtgaagatttccttttcttctacaataatttgagtgacgtctggcgccatt

SEQ ID NO: 3603 - DNA, 516 bp, Glycine max
  Clone ID: jC-gmfl02220057a06a1
ctcaattgagaatgcgaaacgcatagaatcggacgaggggaaatgatattgagaagctaaggttacggattttgagagatggcgtgcactaagaagatcaccctgaagagttcggacggtgaggccttcgacgtggaggacgctgcggcgctggagtcgtagacgcacaatcacatgagcgatgacgactgcgccgacagcggattccgtgtgcccaatgttaccagctagattctggcgactgatatcgaggactgcacgaagcacgttgaggcgaacagtgctgatgagaagcccactgaggatgtgctcaaggcttgatacgtggatctcgtccacgtggatcaggccactctcttagatctcattctggctgcaaactacttgaacatcaagagccgtttggaccttacttgccagacagtagcatacttgatcacgggcaagactgctgaggaaatcgcatgacattcaacattaagaatgacttcaccccttgagaagaggaggaagttc

SEQ ID NO: 3604 - DNA, 238 bp, Glycine max
  Clone ID: jC-gmfl02220057a06d1
aaagacaaaaacacccatttaatcataataataattgaagtaaacaaatgactaaacaaaactaaaaaataatcaaaaaaaaaaattttcgcttatattccacccctacccaattgctaagctatctttggtatttgatgacacaaacatgactttttctaattaataaaaatttacaatgcaaatacggagggaaccatttctagatttcattgtgagcctttcccctgtgttcctc

SEQ ID NO: 3605 - DNA, 430 bp, Glycine max
  Clone ID: jC-gmfl02220057a07a1
gtagttgagaactaagaagaaggaaatggctgcctcaatgatctcctgcccagctgttaccaccgtgaaccgtgccggtgccggcatggctgctccattcaccgggctcaaatccatggctggctttcccacgaggaagaccaacactgacattacctacattgctagcaacggtggaagagtacaaggcatgcaagcgtggccaccaatgggctagaatgaagatcggactctttactacttgccagagctcgatgatgccccattggcctaggaaggcgcataccttctaaggaaaggatggattccttgcttggaattccaggtggagcacggattcgtgtaccgtgagcacatcaagacatctggatactatgatggacgctactggaccatgtggaagctgcctatgtttggctgcactgatgct

SEQ ID NO: 3606 - DNA, 289 bp, Glycine max
  Clone ID: jC-gmfl02220057a07d1
gggtgggaaacacagggaacaagggagagagcaattaggaaatgtccaaaatatcaatccaaaagtaaaacctgaaggcacatcgtaccttgagggtacaaatggcgtttaagtcacaactccctcattgggtttaccccctgtactaatgttcacaatggtggctgccttgcacagtccaaatgtcacatatcccatggctgagatcttccggaggcaaggactgaatccaccagcggtgatttgggaactgaagttgcctgcttcctggagccggtcgatccgagcc

SEQ ID NO: 3607 - DNA, 424 bp, Glycine max
  Clone ID: jC-gmfl02220057a08a1
gcacacagaccgagagagagaatgctctcaggggatatacctcccaatcagaccatttacatcaagaatctcaatgagaaggtcaagaaagatgcattgaacagatctctgcattgcttattctctcaatatggaagaattttggatgttattgctctaaagacacccaagcttcggggacaggcatgggtttgtctcagtgaagtcactgctgccagcaatgcagcgcgacaaatgcacaacttccctttctatgacaaacctatgagacttcattatgcaaaaacaaagtcagactgtattgcaaaagaagagggtagctctgttccaagggaaaagaagacgaaaccagaggagacagctgacagaaagcggcgtgttgcggaagcacagcaatctggtgaggctaatggaacacatagcg

SEQ ID NO: 3608 - DNA, 330 bp, Glycine max
  Clone ID: jC-gmfl02220057a08d1
tttcttcttttttttttttttttttttttttttttttttaccaacataatttaccttgctattatagtgattaacctaaatgtgactaaattgcaggtacttggctgaagaaagcatttatccttttcttaaagctgataccagtacacaatgcttcgcttgctcaacagtttaaggatcagccccaactgcttcaacacccttgtgcctggattttccatacagggtctcttcataccggattatctgattcttggacccatgagccaccagagttactggctaaacggtactgctgactctgaatggcacccactggggaccatcact

SEQ ID NO: 3609 - DNA, 553 bp, Glycine max
  Clone ID: jC-gmfl02220057a09a1
ctcgagccgaaaaattcaattacagaatccactgacatgttgcacaatgggaatacatcaaatctgaacatgatgtccagctcagcaggaaagcctttgcaagcagatggccataccattgatgatggatttgccccgccacagacatacaaacagttgcctgatacaacaattaaggtgaatccaaagttatcacagcatgtgaattctgagtcgaagcaagtgctagaagataataaagtttctagaaatgaggatcaggttcttagttctgaaaacgaaaccaaaggcaccgaacatcttgcatttcatcaagttccttctgttgaacaaaatcagaatctagcatctaaacttccagacctcaatttggctgaggtttctaccagggaagtctgataatgatactaaggtccaatcccagacttttcctttaactggaaacacaggccaagatgtttctcaagattttcccccagaagctaaatccagacctactcagggtgacattctgattgatatcgaggacaggtttccccgtgatttcctttat

SEQ ID NO: 3610 - DNA, 340 bp, Glycine max
  Clone ID: jC-gmfl02220057a09d1
ctattgcaaagtttaaacttgcacgattatcatcagaaaaaactatacaatattactatggaaatcaccccgtaacacaatagacgacttgctcatatacattcccaaaatgacaacactatataaacagtgatttctatatgcagtaaaatacaacaaaattgatatttcagccttcgtttccagaacagcatatatctgaacaacatgtgatgcagccgaagcatcctagaccaatgcagagttgtgtcaatgcagttgcacattggttgtttatccgggtacaacactggatgcagcacatgcaacaacagtaactgcacaaggtttcacaacaatt

SEQ ID NO: 3611 - DNA, 374 bp, Glycine max
  unsure (1)..(374): unsure at all n locations
  Clone ID: jC-gmfl02220057a10a1
gtctgcctgccntcatcttctctgccgcgttcctcgcctccgtatgctggtcatggctctcgggcctccgccggtgacgccgaatctatacgctgctaaccgccgaccctgaccgtaaggcggagcaggcctaagtgttaccgctcctggagcgagagcgccatcgggactcatcacgcgaagctgtatgtttcaacgaatgcgctgtcagacaagcagccgaccagaacgacatggagttggaagccattcgtgccgcaaaagagaacgcttagctggacgatgctctcagaggatccacgccccagtaccggcagattacatgggatgaaataatcctagctacttcatctatatctgacgatctgccaatt

SEQ ID NO: 3612 - DNA, 511 bp, Glycine max
  Clone ID: jC-gmfl02220057a10d1
ctctccttccgttcttcttcttcacgtttttccttttcttcttcttcaagaagtttcatctgcttttctaatgtaatgatttctttgcatgctacatgaactcgttcttccagtagtttcagtgcaagacaaacaaatatgctgtgcgcattttggcgtgctgttccttctctgaaagccttttcaacctgttctttaaatataacggtagcagcatctagaagaaattctcgagcaagttcaggactctttgcatgcttttgaggacgggagcattctccatcaagctcatttccctcttcatccatcaaatcatcatcctcttcttcttctgcctcttcagcatgctcaaagaatcttctgatactttccccttttgtaattgtaacataaccatcccctacaattagcctgcaatgtacacatcgttgaccttttaatgcatgagctttaacagaaagttcagtacagcgtccgtctagcttccaagcctcgagggtgatgaagcatg

SEQ ID NO: 3613 - DNA, 437 bp, Glycine max
  Clone ID: jC-gmfl02220057a11a1
ctttctctctctctttctttctcatgttctgcataaccatataacacccgcgtgaacgttcactctttttattgttttctttcttcgttcttgttgtggaacaaataaccaaaggattgaaccttcgaagagcaccatggaccctgacgtcatcgagattcctgcctcaattcaccaccctccaagattgcgcgagcagaacaaggtcattttgcatgatgtgattgacattgatgacgactctgaggatgtagtgataattggtgaaaaagttaataatagtaacaaagggaatacaattgacgccgttcatgatgatcatcaaagaacggctgattatacttactctctgactgatgtggaaaattttaaatcagtaagtgggattgcatcttctaacaattatactgcagtgtcacatagtatgatccacattg

SEQ ID NO: 3614 - DNA, 479 bp, Glycine max
  Clone ID: jC-gmfl02220057a11d1
aatcacgaattctgaattattaaattttcattgagctaagatggtaatgtcataatacaagaaacgccagttatatggcgcgaggttaagccaccagttgagatggcaaaagtggggtaaaaaatgaacttgatcctgtacacagaagtaataaaagctaagtgtacagtgggtgctatttttacaaggggctagcataagaggagacagcctctgatcaaattttttagttgcctccgcatgaatgcactgaaagaaccaacgaaaggcaacgtgtggattggcctattctatcgcaagggtgcctgagtggctgttagttaatcaaagttggttccaagactaagataaatagtactgtaatctttattcaagtctatttgctgaaaggtggttgcttatttcctcgatccaaggcattattccatagagtgtaccttatcccatgctagtcataggatactgtgaaattccacaca

SEQ ID NO: 3615 - DNA, 423 bp, Glycine max
  Clone ID: jC-gmfl02220057a12a1
cgctggcgtcagaatacatgagctatgctctcgtacgtacgcttacaattctcgtaatgcggctcaaggagctcctggagattgtaggccgcagtaaatgtcctgtgattagacagagacatgacacttacaggtagcaatgtaaaacgagaatcggacgtatgcagattgccttgacgggcttgtggtaaagctctacatgaaaccctgccatagagagactaagaatgcctgcgtgggaccctacattgcatctgcctccaagtggactcgtgagggaatggctacactagcagctctaaacgtgctggggaagatcaaagggtacccagattggtccgatgccaatagggctgaacccttcctcaatgagaatgctcaaccaccaactggatccacaagcattgttaatgcaaaagccct

SEQ ID NO: 3616 - DNA, 431 bp, Glycine max
  Clone ID: jC-gmfl02220057a12d1
ggatcacaaatcatatatcttcaattttttacttcaaataataatgtacaaaataaatccagcagaagggtatataatgacagtaatacatctgaccatgcaatcaagagatatatgggttccacagatccttggcttctcatcaataaatgcagaatcacaatacagtctcccatattctgtacagcaacatcacctgccaaaaaatagtctagaggctaaattttgtaccaatttcactttttgtttggcatctatatgaagttctaaaagaaacagttgacattgcataaattctttaactgaacgaactgcatacatatgattagaagaagtcattctttgagctaatcttaacattaatcctatcattctcatatcttaggtaccagagagaaatccaagctccctacttagcatgcactgatgct

SEQ ID NO: 3617 - DNA, 507 bp, Glycine max
  Clone ID: jC-gmfl02220057b01a1
agatgactacccttatgctgttgatggactagagatatggagtgctatccagacatgggttaaggactacgtctccttgtactatgccacggatgatgcagttaagaaagactcagaactccaagcttggtggaaggaagctgttgagaagggtcacggtgacttgaaagacaagccatggtggcctaagttgaacactcttcaagatctgattcacatttgctgcattattatatggactgcttcagcactccatgcagctgtgaatttcggacaatacccttatggcggtttcatcctaaatcgtccaactctaaccagaagattgctcccagagccaggaaccaaagaatatggtgaacttaccagtaatcatcaaaaggcttatttgagaacaattacaggaaagactgaggcccttgtggacctaacagtgatagagatattgtcaaggcatgcttctgatgaggtctaccttggacagagggacaatccaaattggactga

SEQ ID NO: 3618 - DNA, 354 bp, Glycine max
  Clone ID: jC-gmfl02220057b01d1
aaatatatagaaacactatattaaacactggttgtaaaatgaacatcaagttgtgacggcaaccgatataaccccacacaacaatcattgtatgagaataatactaaacttttcattctgatgtctgcctgcacaaactaaattccgccggccctaaggttaaccgggtcaaaactaccggagaacttataaactttctccaacaactgaatggaataacacaaggatctaaacaaagtccacctttacccctggattaaaacctttaatactactacaccttacaaatgggttagccagaacttacaagcccgaagtcaaccttggccagttaacctaccttcatatctggta

SEQ ID NO: 3619 - DNA, 423 bp, Glycine max
  Clone ID: jC-gmfl02220057b02a1
ccagttataaatatgatcgcaaagaaattaggaaagactccagcacaggtagctcttcgatggggactgcaaatgggccatagtgtgcttcccaagagttctaatccagcaaggataaaggaaaactttgatatttttgactggtccattcctgaggacatgcttgataaattttttgagattcaacaggaaagattactcaaggctagcttcttccatgaaccaaatgggggttacttaccagaagacgaattgtgggatgggggtatatgaaaagtcggttgaatgattagttaaaaaagtggatggaataaaagaaacgcatcttctgtttggggtgttaggctatatgaaaatactcttatctttagctatgtgcatcctttgtcactatcagtcttttaagttgcaacccttcaactg

SEQ ID NO: 3620 - DNA, 502 bp, Glycine max
  Clone ID: jC-gmfl02220057b02d1
agtggtcggcctgttcgttctttttttttcatcacaaagtttgtcactactcatgtttcacttgaaactgatactaggttatttaaatgaaacatcgttaaaaaaacaatatatatacatggttcctgatttgaatggtatattataccttgtatgaacataaaacagtgataaagaattcagccacccaatctgaaaactgtacaattgagcagtaccacaccgtttgcatagatgcaaacctttatctattttagtgtggtcaaacctgtgcacgtatccaaagaaatgaaagccagttatgtccagacgcaaacaatcccattcttatcagctgaagctaggggttttgcaattccgctccacctacaacacagaacagaggaagtgtgttccttcagagtactgactatatcacctttagatattgaccaaatatagacagatccatcagcagacccagcagcaacatgattgtcatctgggctgatacaggagcgac

SEQ ID NO: 3621 - DNA, 489 bp, Glycine max
  Clone ID: jC-gmfl02220057b03a1
cttgttcacccttccccttctccttacttctcactctctttccaaaacactccctttctctttccccttacccttcttctgtgtgtgatgatgtagatagagaataaaaagagaccagtgtgcagtgagaaagaggttgggcacttctttgtgtggctttgttatgttctttgtgttggaatttgttgatgggtgaagagggagaagaggtgtcaagagataaggaacagcaacacatgggagtttatggaaatgagtggttgtttagtagtttctgtgcaaattggcgccgtttaagacaccagaattcctgttctatgcctccttttgagtgaaaaaaaaaaaacatcaaaacaaaaacttgttctctctcagcttttcatcttccgatcttaatatacattgactaaaagaaaaataaagggatcaaatttaagttccttgatctaataagatccttgcttttaattgtactactcatgaagagac

SEQ ID NO: 3622 - DNA, 353 bp, Glycine max
  Clone ID: jC-gmfl02220057b03d1
ggcagtgcgcatcccggtcgcgagctactagtcggtggtcggcggccgccctttttttttttttttgagccacaatacatgcggagggctataatcggactgatcaacctgcaccacaggccatatacgtacactccacatagattacgttgctgaattcatattccatcaagactcggacgcactggccactgacagagcgtattacagcggtaacgtattggtctccgcatatgctccatcgctgcgggtctcgaactcgctgcacaggtatgcatgctatggatcagtggcgaaacctcactcgttgaccttcgcgggtctcatcatcgcatagcctgcatgggccacta

SEQ ID NO: 3623 - DNA, 482 bp, Glycine max
  Clone ID: jC-gmfl02220057b04a1
cgtgagattaagagtttacatgagacgttggctcggttagttagggagaaggatcaaattggttcttttcttaggagtgctttgtctaagagggtggcagttgatccgtcttctagaaagagtgagctgtttcaagctgcagaaaaatggtttgagagaggctggaatagattcaaattagtaagcttcttggagatgggaaagttgcagcttcaaatgacaagtctgatacaacggaaaaagaagaggatgaaatatactccctggctggtgctttggaggatgttgttaaggcatctcagcttgagatcatcgagctgaagcatactgtgggtgaattaagggcagagttgagcttacttaagcagcatgtataagctcatgccaaggagcttgaccatagaatgcatcgggtagaggaacttgaagagcaagagagagtggcaaatgaaaatattgagggactaatgatggacattgct

SEQ ID NO: 3624 - DNA, 224 bp, Glycine max
  Clone ID: jC-gmfl02220057b04d1
actggtaatttaaaaatattatgagtctaggataatatacaatcatacataacccaagtagcggggttacagaccaaccataccacagactaatagcactcgagttagcatccagatacacgcacaatttgtgacttttgattttctcactcataaatagatcacacgatagggaaaaaggaggaagagagcgagagagagagagtgggagagagagagagaga

SEQ ID NO: 3625 - DNA, 413 bp, Glycine max
  Clone ID: jC-gmfl02220057b05a1
caggaagtgagagaaaattcactgtctatgttttcccaggatatagaattcgtgcaggttcttcatcgccagttcaccgaagagatgcagatcaccgttttggttctgattataataacatgccacgaagccgtggatatggtggtgggagagacccaggaagatatcgagacccttcaccctcgtatggtcgaggtagagtagggggcaggccaatgggtagagcttttgacgggcctggctttgcttctggacttgctagaggggaaggcaacaatcgaaataatgccaatgtgcgtcctagggagggagattggatttgtcctgatcccttgtgtaataatcttaactatgcaaggcgggaccattgtaacagctgtaataggtctcgtaatgcacctgctagaagtcct

SEQ ID NO: 3626 - DNA, 386 bp, Glycine max
  Clone ID: jC-gmfl02220057b05d1
caattccaactagttcaaattcgatagagattatttaaaatcaaagtcccacacggaatttccttttatttctgtacatgaaaggactggcaagttaaattacaaatggcaaacaatggcaccaaaaattccactcgcccttaccaggctccccaactctgataattacactgcaagacttgagaagtatgacacacgacctcaatgagatattccatgtattgctctgaaaactcatttgcggaagatagatctgaatgtcttcccaacaatttgacaaccacgctaaattcagtgacaacccgccaggtaacttgaggcaccagctggtttcttcaagtataacaattgaagcagtgtaatgctgattaaacccctgctgcagt

SEQ ID NO: 3627 - DNA, 329 bp, Glycine max
  Clone ID: jC-gmfl02220057b06a1
cgtccgcagtgctatacaatagctattacacgccttcctcagctccgaattctgctcgtgctttctttgcattacatactctaaacccattttactccctatttcacaaaagaacaatatctgtattttccaaactacacacatcatttagaaccatgtctttctctaccaaattgcctttggttctatgattttcatcccttttcatccatgcatctttggctgagatggtgcgagaggacctgtcaaaggacgtgtgcgctttcatcacctacttgatcatggaacaggtgtttgctagagactgagaacgcaactgactgcatctg

SEQ ID NO: 3628 - DNA, 472 bp, Glycine max
  Clone ID: jC-gmfl02220057b06d1
ggttccacgggtctcactgctcggtggccgccctttttttttttttttttttatgatgaactcaatgcattttatgatagatgagcaaacgagtatttgtttaaacacaaacaaacaaaagggttagtgtctaatcatcctccccctcatctgtaacgaatttgccagttccaggattcaaagcagcaatgaagaagaaaagaacattgaacaacactaggggctcgatttcgttgattggtaccccagtctcaatgttgagttgggctagtgctacctttgcggttataatttctccaatcaatgagaaaacgaaacccaattgagccaatcttcccacaaatagctcgtttgctttcgtgaatccaaataaaggacctgaaccaagaccaagagcttccctgaagcctttgcctggaggaataacacctccagtagtaggttcgtcatcaacaaatcttccacggtcacc

SEQ ID NO: 3629 - DNA, 266 bp, Glycine max
  Clone ID: jC-gmfl02220057b07a1
catgcatcgaaagaatcaccatacatgcagcacaatgaagacgattaagcgtaggcgcataaataccacatgcattcttgatcactgctagatcaacgctattgcccctccggacgcgaccttcggcatatattacttcgcctatacatggtcccctaacgcctagaacgctatctgcaatgaagagattgaaattgatggctagaagggggattctgacagcctcaaagagtatggactacaaaaaaggggttggcctgagacat

SEQ ID NO: 3630 - DNA, 532 bp, Glycine max
  Clone ID: jC-gmfl02220057b07d1
gccgagattcaaccatgtttgttatatattgagacataatcaatcaagtacaccactcacagcagaaggtttataagctgtaaaggtacatgtaaccataaacaaaaatagtctccaagactataaaaacattacattttagacaaattagtcttcttccacttcatcctccgtcaacacctactataactgctggtgttgctgctgcctaacatgtatcatattcactacatacatcttagtaggagtagcctttgacgaacaactccttcttggcttcctcggattcaccctcaccggtgtacttcccaagctgggcgagcgagttggacttggcacggaaaaggagtgcatcttgtgccgacttcacgttctctgggcggcctacccatgtcttcaaggcagtgttatggagggctctggcatacgagaacgacacgtgccacgggtttggagattggatcatggcattcaagttgagggtagcttcaacctcagactgtccaccagacaaaaacataattccagggac

SEQ ID NO: 3631 - DNA, 456 bp, Glycine max
  Clone ID: jC-gmfl02220057b08a1
tgccaatatcaagagactacttgaggaaggggacttggtgatttgccctgaaggcacaacttgtagagagcctttcctcttgaggttcactgcactttttgctgaactcactgataggactgtcccagttgctattaacacacagcaaagcgtgttttacggaacaacgggtcgcggacacaagttgttggacccctactttgtgttcatgaatcctatgacaacatatgagatcactttcttgaaccagcttgccagggagctcacatgcagtggagggaaatcagcgatcgaagttgcaaactacattcatagggttcttgcagggactttgggatttgagtgcaccaatttgactaggaagagcacatatgcaatgctagcaggaacagatggaacagttccatctaaggagaaggctttgaaagagagagggcataattgagcccccttttg

SEQ ID NO: 3632 - DNA, 399 bp, Glycine max
  Clone ID: jC-gmfl02220057b08d1
tttgttttttttttttttttttttttttttttttttttttttttttttttgaacactgcaaatacaaagttgacatttaataaaccaaagcaacacaacgccacaaagtcctgaaactcggggtgctaaacaaaagtgataacaggggctccgaccaacgcaccacattgaaacacagttaaataaaagcgattttgaccccgcgggctaaaaacccagctttgggaacaacggtctcgagaagatgggggagacttcaaactttgaccgaaaaacaagcctcctcaaaaagaagacactcgagtccctaaaagaacccaccctttattgtaaccaacatcccttggggaaccagccgcgacaatacacttttttttctgggaagcctaggagaccttg

SEQ ID NO: 3633 - DNA, 271 bp, Glycine max
  Clone ID: jC-gmfl02220057b09a1
tctctctctacactcaccaatggacgactctcacaacaggaagcgacttcgccaccactccccaaagcacccccgactttgttctaactcctccgacactcacccacttgactcgccccagtttcaactctcccgcgtcgacccggaccttctcaacatgctcaatgatgccgagaacgtcacggagcgtgaccctaccatgcagggtcttgactctgctattaagagtttcgaggaagaaatactttctccgcttccgaacccgaatcta

SEQ ID NO: 3634 - DNA, 582 bp, Glycine max
  Clone ID: jC-gmfl02220057b09d1
acgcatgcctctgcggtcaggtccggactcgggtcgacgagctactagccactagtcggcgtgccgcccttttttttttttttttaaaattaaaatttataaaaattttatttcccacgagacctagtacaatatatagtaacacaataaatacaagagattctgcaaactgaaaaagggattcttactaaagcaaactcaaacaagaacaacttccactcatttggcatctaccgtagtaacacaagatcaaaagcagcttctctgatagaacacacgtacgtatgattcaacatctttcacagtagtggttcatttctaacagctagctattgcaacttaaaataattgcaatgcttctgcaaagtgctaactttttttcccccccttctttatggatatgacaatgtgatcagaatgaaacaataaccaatccattgaatttgaatctgattttgggtttggatcgataccaccattcttcatctcaggaaaggacaagaaataggccaaagcctactaattaagcgcttaaaactgcattagtggctggttaagtgtgatgttagtcacatcagcttg

SEQ ID NO: 3635 - DNA, 520 bp, Glycine max
  Clone ID: jC-gmfl02220057b10a1
tatctatacaccgattaagatggagaagagatcagcatccctgaagcagaaacttgcgtccatcacacctttggttgaagaactgaagaagaaaaaagatgaaagattgaagcaatttgaagatgtatagactcagatagaaaagataagtggagagatttttggattccattctgtcaataatgcttcgagcagcacagcagttgacgatgaacatgacttgtcacttacaagacttaatgaatatcaaacgcatttgcgaacacttcacaaagaaaagtctgatcgccttcaaaaggtcttgcaatgtgtgaatgaagtgcattctctatgcagtgtgcttgggttggattttggccagactgtgggtgatgtacatccaagtatgcgtgggactcatgtggaacaatcaactagtattagcaatagcacattggcaggtctagagcatgccattctcaagttaaaaatagaaaggaaaactagaattcagaagcttgacgatgtctgctctaaacta

SEQ ID NO: 3636 - DNA, 185 bp, Glycine max
  Clone ID: jC-gmfl02220057b10d1
aaggttataatttagtggctcaatattatccacgagaactatgaccgtatataggtacagtacatgtacaagaaagaatgctgactgacaaagggatgcttactcaagcggacttcatcgttagcacagtgcactcctttggcatctaccgttgatacacttgatcatgagccactcctctgatg

SEQ ID NO: 3637 - DNA, 129 bp, Glycine max
  Clone ID: jC-gmfl02220057b11a1
gtggtcctgcattctggcgttcacataagattgtatgacttttaacaagatgtacgctatggaacaatcttattcacctttggacactggtttcgaacaggtcttcaatacggatactactaaaagatt

SEQ ID NO: 3638 - DNA, 396 bp, Glycine max
  Clone ID: jC-gmfl02220057b11d1
aaattataatgtacaaaataaattcagcagaagggtatataaggacagttatacatgtgaaaatgcaatcgggacatatatgggatccacaaattcggggctactaatcaatgaacgcagaatcacaagacatgtttaccatattaatgtgagaaaaaacacctcccaaaaaatcgtttagaagctaacttgatgtaccaatgatactgaggacaagggatctatatgatgctgtaaacgaaacagaagtcatcgcataaattgtacaactgaaagaactggatacatatgattagaatacggcattcattgagatggtattaacaatgggcctatcattctcatatgttagggaccatagagaactacaagctccatactcagcatgcactgatg

SEQ ID NO: 3639 - DNA, 403 bp, Glycine max
  Clone ID: jC-gmfl02220057b12a1
cttgacggagtctctatgatttcgtatgacgtcgcacgcacgctcgcgaattggtctgaatggcggctcgagcttcctccaaattcagttgctagattaccatctttatacgaagtagcacttttagtcaatattagcagggagccactagtaagccatgatgggaaatatcagcgtaatatctagatattttagcattataacattacataactgaccatttcccactactcctgaggaagaagggatgccggcagatacaaggatcctaacattttcttttattttattaggtacctttatgatctattgactaaaggaagtgttgtgaggaagaagattccaatgcttattctctgcaacataacagacaaagtcactgctcatactaaagagtttatcc

SEQ ID NO: 3640 - DNA, 401 bp, Glycine max
  Clone ID: jC-gmfl02220057b12d1
aatgtaagtgaatatttgaatgcctgcaattctgagctatacaagctcagctatttctaggaaaagaaaatccgaggggacactgaatgtaaccaagcatcaatgcaaatttgacctgaagcaactagtaccaaccaaacttctgatatacaatatgcatttcatatgacaaccaataactgggcatggcaacctctttagtccaaacaagatcattataatatagatgatctaaaaggaaagtgaaagtatttaccagctcctgatcaatcaataggtttagaccttcaatgctaacttctgagctgcaagagcttcagcctccagagttggctcccacaatagtgtaggctctgcaagtcatgatgtcacaacatatggatccatgattgaagccggtc

SEQ ID NO: 3641 - DNA, 510 bp, Glycine max
  unsure (1)..(510): unsure at all n locations
  Clone ID: jC-gmfl02220057c01a1
gggagactataggatacggctttttatccgaactgaactcttggggaagggaattccacccactcatcaatggcatctactctcttcgcttgcccgtcgttgtgttcctcctcttcttctatattttctacttccgtcaaattctccttaaacccgaataaaatttctcttccgttcgccggaaacaaaaaacctctttcggctccaattcgaaggcggttcaatgtcattgctatggctccccctaaacccggtgggaaggccaagaaagtggttggaattataaagctggctcttgaagctgggaaggctacacctgctcctcccgttggccctgctcttggttccaagggtgtcaatattatggctttctgtaaggattacaacgctagaaccgncgacaagcccggttatgtcattcctgtggaaattacagtctacgacgataaaagctttactttcatattgaagaccccacctgcttcggttctacttcttaaagccgctggg

SEQ ID NO: 3642 - DNA, 470 bp, Glycine max
  Clone ID: jC-gmfl02220057c01d1
aaaaatataagatacaagtaatataaaaatagactcagcacaattcaatatgtctaaagaaaaagaatggctgaggctttagaaacaagtttattatcccttattttctacaagttgagatactgaatagaagaaaaaatgatcaaggagccaaccggtcaaccttccacagccgttgtccattgatctcatggggagtatattgcaacctgtcatgcaagcgagatttctgcccttgccaaaactggaaaagatgtggtgtaagcctatatccaccccagttcttacgtttagggattaaacttgcatcagagtattattcttccagctctttgaactcctgataaagaacatgcgtacccggcactacagtactctgcttgctgactattgctccaatctgactacctctagggcgggtatggaaatactgctctgattcctcatcgtagactttctgaacaggccct

SEQ ID NO: 3643 - DNA, 482 bp, Glycine max
  Clone ID: jC-gmfl02220057c02a1
attgtttgttgttgtaactcgttcttcttcttttgttgttctgtgtttgtgtttgttttttctctcacctgaaaatgtcttgctgcggtggtaactgtggttgcggaagctcctgcaagtgcggcaacggctgcggaggctgcaagatgtacccagacttgagctacactgagtcaaccaccaccgagaccttggtcatgggagtggcacctgttaaggctcaatttgagggtgctgaaatgggtgtgcccgctgagaacgatggctgcaaatgtggaccaaactgctcctgcaacccctgcacttgcaagtgaggtgttgggagagcaagcttcaagcagagatagcccttaattaggaataatgataaactattaatgtgtagctaaaaacttatgtattatgtctgtgatggttttcgtgcactctggtgttttgtgttaaacaaacatccttagaataaagtggtcatgtcttgcctt

SEQ ID NO: 3644 - DNA, 365 bp, Glycine max
  Clone ID: jC-gmfl02220057c02d1
gatagtcgtattttatcaaaaaaatatcaagacaacatcgaaacagagaaatgttaaacagtttctgtcacatccataaacacagttgataaaactagtctgacttagagtctccataactccggggtttaacaagatcatacaaaaatatataacttttgcataaatgaaaacagcaaactaccagcaattgaggctagttctttggcccaatatccttcagtgcacaaatctgctcctaacccattgcagacataactgacacaacaaggtccttaccctcagcagacccatcctttatctgagtaagcagactctcatctgtaggtaacttcaggtcatccttgggtgttcccattttcagt

SEQ ID NO: 3645 - DNA, 489 bp, Glycine max
  Clone ID: jC-gmfl02220057c03a1
gggtaccactaccacctttccgccttcagccgtttcaaccaccagcaaatggctgggcttcgtggcggccgtgtggattcaatgcatctccggcaacaactacactttctcaaactactccgacgccctcaaatccctcatgcacctcactcagctccaactcaacaacctctccgtcgctaaagacgttggcaaagcctttgggcttctcgcgggcctggcctccgaccgcttccccacttgggccattctcctcataggctccgtcgaaggcctaattggctacggaacccaatggctcgttgttagccaaagaattcaacccctcccctactggcagatgtgtgtgtttctgtgcatgggagggaacagcacgacgtggatgaacactgccgttttggtaacatccattcggaacttccgttcaaacagaagacccgtttcggggattctgaaaggctttgtagggttgagcactgcgatattcac

SEQ ID NO: 3646 - DNA, 408 bp, Glycine max
  Clone ID: jC-gmfl02220057c03d1
cggcactagtcggaataatcgacgagctcactagctcagctagtccggccggccgccctttttttatttatttacgatatacctatcgctacaaatcattcccaaggaaaaccgatagcctcgactcacatactagctcaactaacacctaaatttgtcacaatcgattggctttagcgttcacagcaaaccggattacactcctggtgttccaagacagcactgtgcttattgaggatcagagtcactacccgattacgcctcacttactaagacagcgaactcattactgggtaatctaataacaacggacatctgggccaagcctaaccataagtttttaagaacacgcatgctgaaaagaacgacatctactgctgtagccataggcacatgacttgacaatgc

SEQ ID NO: 3647 - DNA, 342 bp, Glycine max
  Clone ID: jC-gmfl02220057c04a1
attgcgccctacctatttctagctgtgtagctctttgaagacaattacacgagatatatcatttcatatcacctgcatgtgctgataaagattacgacgtttggtcatgtggcacgggtgactctcgtggccgcagtccccgatggtgcactcttaccaagactttgacatagcatggtgagcagagcgagccacattatatgagagtgagtagcttactaccctctccctagacagaggcttaaggctctggatttcgtggcagtaaggaatactggatcggaaaaattgacatgcagctcaagctagtgcctggtgactgtgatggaacagaaactgcct

SEQ ID NO: 3648 - DNA, 260 bp, Glycine max
  Clone ID: jC-gmfl02220057c04d1
tgtcgggcgtgttcgcccttttttttttttttttggcaaatgcattctttattaaaagaaactaatgctgaatgatgttctatttggctttacatacaatcccatcacatgaatcgaagtcatagtttcacattattgtgactgataggcctaagatacattcctaaaataaaatagcagcagcgattatgcgaattacttttttttgttacctgtggttggatgaaacttaagagcagtggatgatcatcattatcaca

SEQ ID NO: 3649 - DNA, 177 bp, Glycine max
  Clone ID: jC-gmfl02220057c05a1
ctgcccccgcaccgatcactctacatggatcacggtgaagactattacgcaaggtgtactacaggctagaccactcatgatcgcataaggatcatcgccattgggcatgtggcacgtgtccactgtaggccctccactaccactgtgcacgcgtttcacaagcatgatagcatcgac

SEQ ID NO: 3650 - DNA, 309 bp, Glycine max
  Clone ID: jC-gmfl02220057c05d1
gcctttcgtttttttttttttttttctgaggctataacttgtattgaaacccttttaggaggacttttccttgatatagctacgcttttacagaatacgagatcgatgacccaacgactacattgaccatatgtggcaacggttgccgacaacccagcacagccacgactcatagcatatgtgctaaatgtggaatgcaagctcttgatgcttggagcggactagcgggttattgctgagcccatgggtcttcgagagtgctgacttacggtgacggagacgcgaatgactcgtgacgcagatcctgac

SEQ ID NO: 3651 - DNA, 439 bp, Glycine max
  Clone ID: jC-gmfl02220057c06a1
ctggagccgaatcggttcgagcattagagttgatgctagagagacactatgcgttgagacacgtgtacggtcggcatgcggtagtgcatgatcattattgcacacaacaaaactcattaacaccataaagcaaacatgaataaatatattgaaaaataatcatggtaagtattctgtaggcatataattgagtagtatgtatagggattgaggaaggtgcattgagtcaacaagatttggcgtgacaaccaaaacagcacatgggagttatagaagctatgtgctgagttgcgaagccatgatcaatccaatcttgtgtgtgactataaggatttaacagcatagacattagacaccttcttcggatctggccaccctaaagtcaatacaatcttaacatgaaattcaactatgtggcactacgtgttggagtttgact

SEQ ID NO: 3652 - DNA, 547 bp, Glycine max
  unsure (1)..(547): unsure at all n locations
  Clone ID: jC-gmfl02220057c06d1
aaacccatgatcattgaatctccacgtcataattgttaataatggatttaattcatacaaaaccttaaagttaataataataaaatgcaaccgataagcattagaaactaatagcagggcaaaaagattcattaaagactgcagggtggagaaaggggtggcagaagaaagattgagggggaaccaaagtatcatagacaaaatcatgcagcaggctgctcctcagtggcaggagcttctttctggggttcttctgtgaggccattagaggtggcatcctttggctgtgaatcaggtgcaccttctgctgcagatccagttgcttttgatgctgctttctcttttccatccttattatctttggcgtctttagcaggagccggtggtggaggaatcatgtgaggtggtggtgtatgcttcagctttaacagtattngccggaacctagacagatccgtgggttagccaagctttgggcctcggatgaccgtaattgatggcttcttgtactgatccattttgactcttttcttttcaatggtgggaa

SEQ ID NO: 3653 - DNA, 277 bp, Glycine max
  Clone ID: jC-gmfl02220057c07a1
ctgcttgagataaggtgagcaccaagtgttgcgaggtgctggcttgtcacgcagaccacataaccgcgaggagcaatgggtggcagatcacataagagaacgttggtgcactgaaatgtgaaagtgaggcatgggcactagaatgtgaaaacgaatagggcaataggaggactccaagggcaactgggaacaaagtggaggacaaccccttagtgcagaaaaaagaactgtttcagagcctgtcctggcagttacaaaacctaagggaaactatctt

SEQ ID NO: 3654 - DNA, 441 bp, Glycine max
  Clone ID: jC-gmfl02220057c07d1
tttgtttttttttttagttgcgatcgtagcattacactaaatcatcgtatgctaccttttgatgatttgattagcacaaagttacattagtattatggcatcctatgcaaaaatgcttcagaaattaacaaagggatccgagttagcccgaaataattatacataatcatatacgacactgaccggaaaagtataaattgcgcaactaaatgcgccaacgctggtttcactttcattaggtgctaccccgtaaaacctttgtttccactccagtagaatcttcctgacagacctgtttctcagtcttgactggtggattgatcactgatccatgatgcatcgtggcactggatttgaaaggtcaagctccgttaggaagcaacactgatggatctgagggcctgtgaaacagtaagtgtgctacagaccgatcaatggggt

SEQ ID NO: 3655 - DNA, 366 bp, Glycine max
  Clone ID: jC-gmfl02220057c08a1
aaattagttcattctctttgcgcagttccctacctctcctttcaagatgcagatcttcgatcaagaccctcaccggaaagaccatcacccttgaggcggaaagctctgacaccatcgacaacgtcaaggccaagattcaggacaaggaaggaattctcacggatcagccacgtcttatcttggccggaaagcaactcgaggacggccgtaccatcgtcgactacaacatgcagaaggagtcaacccttcagcttgtgcttggtctacgtggtggcatgcagatcttggtctagactctgactggcaaaaccataaccctagaagtacaaagctctgacaccattgacaacgtcaaggcctagatcc

SEQ ID NO: 3656 - DNA, 435 bp, Glycine max
  Clone ID: jC-gmfl02220057c08d1
agcaattggatatcatgctttgatcttaaacatagtaaatattccgtacaaaagtaacattttaaccaactggaaatgaaacaaaaaaaataaaccaaaggttgatctatgcaatctatgggagcttcctaaatcatcagccatccctgccgtcatgggacatagaagatccaaaatttggatgacggttcattttacagttccgttacaggatttgtagcatggttgaagtcccttaaacgcaaaacacccaaatcttcataatacctagccgtagcagttctacagccatctagagccatgggataacagccagatccagcttcatcagttgaagagcaaagcagggaaattgattgacaccagggccaacttcccatacattcacataagcattgtaaaggccggcagtaactattttgcatggatccatgt

SEQ ID NO: 3657 - DNA, 423 bp, Glycine max
  Clone ID: jC-gmfl02220057c09a1
ctcaattgagaaagcgaaacgcatagaatcgaaagaggggaaaagaaaaagaaaagttagggttagggattttgagagatggcatcgactaagaagatcaccctgaagagttcggacggtgaggccttcgaggtggaggaggcggtggcgctggagtcgcagacgatcaagcacatgatcgaggacgactgcgccgacagtggaatccctctccccaatgtcaccagcaagattctggcgaaggttatcgagtactgcaagaagcacgttgaggcgaacagtgctgatgagaagcccagtgaggatgtgctcaaggcttgcgacgtggatttcgtcaacgttgatcaggccactctcttcgatctcattctggctgaaactacttgaccatcacgagcctttgggaccttacttgccagacag

SEQ ID NO: 3658 - DNA, 426 bp, Glycine max
  Clone ID: jC-gmfl02220057c09d1
tccaatatgtgcagtaccaatttataatttattcgccggatctccctgctcactggtcggcgttcgtccttttttttttttttttacattctttttaaagaccattcatcttatcacattttcaacagaacattagacgaccaatgtttaatcgaatctccagatgtgataacaaacaaattgcacaattataaaagaaaccatactcgggtgaatcacgataactgtctatataggtcccagagcttgctggacatcagccttcaaattctccaaagcttcaactgcggagccgcatcgaaccattgttgtgataaattttgcactgggccctttctgactgcggatgacccccttacgaccacatgcctgggagatccacaatgctctaacaggcaccctacgaggccgtcatttatcggattt

SEQ ID NO: 3659 - DNA, 340 bp, Glycine max
  Clone ID: jC-gmfl02220057c10a1
caggccgactcggagtgcttgaggtggctggacgagcagccacgtggaagtgttttgtttgtttccttcggaagcggtgggacactctcgagtgcacagatcaacgagctggctctcgggttggaaaaaagtgagcaacggtttctgtgggtggtgaagagcccaaacgaagaaatagccaacgcgacgtacttcagcgccgagagccaagcggatcccttgcagttcttaccggaagggttcgtggagagaacaaaaggaagagggtttttggttcagtcttgggctccgcagcctcaggtattgggccatccatccacggttgggttcttgacccact

SEQ ID NO: 3660 - DNA, 351 bp, Glycine max
  Clone ID: jC-gmfl02220057c10d1
agtgaaaaaagcgcaaaactagaacatgtttgatagcaaaagccacatatgccttgatactacatgccatattttcacatcattacatagactgtgcaattccaaaagcaagatttaacttaacaagattaccactaagtaaaacccctcaatatcctactacccaccctttaacattgttttgtaatttataatgaaaagcacaataaaacatcgatcacccactgtgaatactctaaatcaaaagcaaaatgaactcttcactttgacaaaatcatgattgcagctcaagggtcgaagtcctcttggtcatcttcaaactcctcctggttctggtaaccttccatggag

SEQ ID NO: 3661 - DNA, 247 bp, Glycine max
  Clone ID: jC-gmfl02220057c11a1
caagaatttggacagaggaattttattattagctattaaggtgagatgatgtcatatgatagatagagtacaggtcattgagaagacgagcaacgacagggtacttagcttggaatttgttctcccagtcgttgagaacgccgatctccttgtaggataggccgtcgagggagggggagatgtcgtcgtagttcttgctcatgctggcgagggcgcctggtggcgtatgtgccggcgaacatggtgt

SEQ ID NO: 3662 - DNA, 454 bp, Glycine max
  Clone ID: jC-gmfl02220057c11d1
cctatcaacgcaatctgtgtaaaaagcaacagttgttgctttcccttcctattttatatatatatctgcatgtgccacttaactcctttcaacaaattagtccatttttaaatatcagacaactaatattatggacacgtaccgcagtaccaattgttcaaacatagttacctagaaaccaacatggggacatagtttatacattgacaaaagttgctgtagtttgtgactttgttacattattatcacaatattttctctcaagtgaatctaacatgcgattcatggaactcgatgaattcggtatggaaaacgcaagattacgaaaagcttaatgggatccatgttcactggagctacctgtagacaaacttctcaacttctgccagaactgccttttcttcccaataattagaggccctgaacgagaatactgcctgaacgactcaaattc

SEQ ID NO: 3663 - DNA, 318 bp, Glycine max
  Clone ID: jC-gmfl02220057c12a1
ttgaggtctctgttacagttcagtctcttgttaaagcataacggtcttagaagagtgtgtactgcatgatgtgaggctatcctcagttgggccatgccgggccaccaggtcggaggtgttccacagaccgggtggcttggacttggccatgaagcttcactatcttaaggtggtgtacttccttgctagtgaggctgcacaagacctaaccattatgaaaatttacgaggccatgttcactttgcttaaccattacttcatcacatgtggccgcttccggcgatcagatttcggtaggcccttaatcaagtgcaatga

SEQ ID NO: 3664 - DNA, 402 bp, Glycine max
  Clone ID: jC-gmfl02220057c12d1
aattgggtaccggtcgaggacgacggtatcgatcggcgggcgccctttttttttttttttttttttttttttttttttttgttttttttttctttttttttttttttttttttttgaaaaagaaatcccgttttgattgacacaaaaatttttatcacggtctcacgaggggaatttctgaaactggaccccgcacaatctaaccatttcccccacgtgaccctcccaaaccccaacatttgttggaaccttatgacccttacaaaaggttcaagggcggtaaaactggggggaaggccgcatttttgaaaacctgaaaagccgggtacaagggggtaaaaaacgggccccggctttaggggagcccccatttgaagcgccctatccatggcgcaatgggga

SEQ ID NO: 3665 - DNA, 173 bp, Glycine max
  Clone ID: jC-gmfl02220057d01a1
ctctctttgtgcaaagatgggaaaattaaaaagctatatttcagtacttgctgtgacatttgtattggtgataggagtagctgaatgcagaaaaataaaagaaaatgagttagttgacagttttggaggaggtggattaggtggtggtggcggtggaggttttggtggatgat

SEQ ID NO: 3666 - DNA, 473 bp, Glycine max
  Clone ID: jC-gmfl02220057d02a1
caaaaaccctaggtagagagctcttcctccctttctcacagcaatggccgccgcagcacgccctctcgtcaccgtgcaggccctcgacggtgacatggcaaccgatgcctccgccaccgttcccatccctgacgtcatgaaggcctctatccgccccgacatcgtcaatttcgtacactcgaacatctccaagaacagccgccagccatacgccgtcagtcgtcgcgctggtcaccagacctccgccgaatcctggggtaccggccgagccgtctcccgtatcccccgtgttcccggcggcggaacccaccgcgccggccaaggagcctttggaaacatgtgccgcggcggacgcatgttcgccccgaccaagatctggcgccgctggcataggaagatcaacgtgaaccagaagcgctacgccgtcgtcttcgccattgctgcctccgccattccttccctcgtcctcgccc

SEQ ID NO: 3667 - DNA, 372 bp, Glycine max
  Clone ID: jC-gmfl02220057d02d1
cttcttgtatacattgaactccccatcatcttctttgccatcatcctgttctttatcttgtgattcaccatgctttgaggtggcttctatatcaataatcccttacggaaactagcaacctgggtgtgctctttctcaccctaatgttttacatcctccttctttgcttaaaatgtgatccttgtctctctccttcttatccttgaacatatgcgtcttaatagcttcatcatcctcgcctatggaatgggggccctaggcctataaagtgtctgtgggcttcaccttttggccttcttaaacgttttcttggcctagtaattgtttttcttcaaatgttaaccattaccagattttccctttacctttaat

SEQ ID NO: 3668 - DNA, 499 bp, Glycine max
  Clone ID: jC-gmfl02220057d03a1
aaacaaaacacacaaaccaattttaaataaccaaaaagaaaccacaagtttaaaaataaaaccgcaacaacatgattggtagttgagtacaacgcggcatgttataattggttgcaagatgttaccgaaggtttaatgcgacacgtggaccccattcactggttggaaatccagtttattctccaccctcacgcacgtaatcatatccctggagtcaagttcaagcatcgataggaccaaaaaagtaaaacagagaaaggggagggacatatttgacatttcacaaccgcgttcttttctacggagcctcgaccaagaagaatcgcagtgagaagaagagggggtcagagtgagaaagagatagagagaattcgtaaaccctaatttcggaaagatcggcgatgactgcctccaaggatcgcgagaacttcgtctacatcgccaaactcgccgagcaggccgagcgttacgaagagatggtggaatcaatgaagaacgt

SEQ ID NO: 3669 - DNA, 467 bp, Glycine max
  Clone ID: jC-gmfl02220057d04a1
gagacatgcaaaaaaccaaaggttgttcaagacgctgggctagctttggcaacaatggtaatttgcgaggaagcacttgagcgagaaatgattatatcatcttcttatgttccaggaatggaaattacattatcaagccccttaaaaagcctttatagtttatacagcaagatgaaacgaaaggatgtaagcattgataaagtatatgatgcacgtgcattaagagtagttgtgggagacaagaatggaactttacacggtcctgcagttcggtgttgatatagtcttctcgacattgtacacaggctttggactcccatagatggtgaattagatgattacatcattcatccaaagcctagtggctatgagtccttgcacactgcagcccaaggttctgacaacttaccttagaagtacaaataagacacagaggatgcttgagtgtgctgaacatggacttgctg

SEQ ID NO: 3670 - DNA, 286 bp, Glycine max
  Clone ID: jC-gmfl02220057d04d1
cacactaaaaaatttatatttatttatgtaccataaatgagttatataaaatcaaattctacctcgtacataacaaaaatccatatttcaaactacctagcaatgtaatagcgactaatgtccgcctcgaatctaccagatattttgaactctatggcatacaaattctaagggtatgtttggatgaggggaagaaaaagagaaatggatggaaaattaaaaaactttaaggtgtgcctaataattgatgacattctattctaattcaaattttaccttaaattta

SEQ ID NO: 3671 - DNA, 501 bp, Glycine max
  Clone ID: jC-gmfl02220057d05a1
agagtgggaagggaaggaggagagggagagggagagagaaagaaaggtgaattggattgcatctctctctgtgtgttggaagaggggaatcgtagatctgatttctttctttctttttaataattttgtgatcagaattattgagctgaacaaaagacaatgggattgtgggaagcttttctcaattggcttcgcagcctttttttcaagcaggaaatggagttatctctaataggacttcagaatgctgggaagacttcccttgtaaatgtagttgctaccggtggatatagtgaggacatgattccaactgtgggattcaatatgaggaaagtgacaaaagggaatgttacaataaagttatgggatcttggaaggcaacctaagttccgcagcatgtgggaacgttactgtcgtgccgtttctgctatcggttatgctgctgatgctgtcgatccagataaccttagcatatcaagaagtgagcttcatgatttgctg

SEQ ID NO: 3672 - DNA, 380 bp, Glycine max
  Clone ID: jC-gmfl02220057d05d1
aaacccatgatcattgaatctccacgttataattgtaaataatggatttaattcatacaaaaccttaacggcaataatagtaaaatgcaatcgacaaggattaaacactaatagcagggcaaaaagattcattcaagactgaatggtgtagaaagtggtggctgaagaatgatagagggcgaaccaccgtattatacacaaaatcatgctgtaggctgctggtcagcggcatgagcatctatatggggtgcttatgcgaggccattataggtgggatccttaggatgtacatcaggtgcaccttctgatgcgtatgcagttgctcccgatgctgcgatcatatccacattcggattatctttggccgattaagcacgagc

SEQ ID NO: 3673 - DNA, 495 bp, Glycine max
  unsure (1)..(495): unsure at all n locations
  Clone ID: jC-gmfl02220057d06a1
tttgaaattaacaagtagcaaagatgtttggaatcatcggaggaaacaagggtcacaagataaaggggaacttggtgattatgcgaaagaatgtgttggatatcaacagcattaccagtgttaagggtgtcatcggaaccggcattaacatcattggaggagtcgtcgacaccgttactgctttggcgtcccacatctgcatccagctcattagtgccaccaaggctgatggacatgggaaaggaaaagctggaaaggctacaaatttaagaggacaagtgtcgttaccaaccttgggagctggcgaagatgcatacgatgttcattttgaatgggacagtgacttcggaattcccggtgcattttacattaagaacttcatgcaggttgagttctatctcaagtgtctaactctcgaagacatttcaaaccactgaaccattcacttcgtatgcaactnctgtgtttacaactcanaatcctaccatgctgatc

SEQ ID NO: 3674 - DNA, 437 bp, Glycine max
  Clone ID: jC-gmfl02220057d06d1
ccgccgtgcgtagcgtaccagtttggaactgagtcgacgagctcactagctcactggtcggccttcgtcctttttttaattttttttgggattgaacatgttaaaacctttatagctacataccgatgctatacacttaccctgcttatgttgactgctatgaccgtaaaacagtgaccaacactgacataacatgctgcgctctccacaaaacttgacgctcccttgaaccatgtcttgactccagcttgagcctggcaaatgaacagtcatggatctgtttacaggggctctaattatgtggcgctagccaccttcgtgcacatcagcggaccttgtcaccacagtcagttgatacttaggttccgcatcggtcactggggatgccgtcccttaaatgtgcaccgtgggcaccgacttcggttcaaagctacact

SEQ ID NO: 3675 - DNA, 144 bp, Glycine max
  Clone ID: jC-gmfl02220057d07a1
gctgatcgtggggaggccagtgatgtgcgaaatgaaggagatgcagcataatagctatagtggttacaaaaggcaacagataacagacgagaacggaaaatatagggtttggtgatttaccctggatataggatgaagagagag

SEQ ID NO: 3676 - DNA, 176 bp, Glycine max
  Clone ID: jC-gmfl02220057d07d1
aaactattggatataatgctttgagcttaagcatagttaatcttacggacacaagtgactttttaaccaacttgcaatgaagcttaaaaaattagccaaaggatgctttctgcgatcatgggatccaccataatcatatgcgacgcttgccatgttcagacatagggtaccataat

SEQ ID NO: 3677 - DNA, 483 bp, Glycine max
  Clone ID: jC-gmfl02220057d08a1
aagacttggagcagaagaacttgggtttattaattgaatgtcaaaaacacatggaggcatcaaaattttctgatgaagttatctctgagttggagagtgaaaaccttatgcaacagatggagctagagttcttgttagacgaaatcagaaagttcacaatggggattcatcaagttcttgcagctcttcagattgattcaggtggggggcatggcaaagggatcaagccagaggaaatgcctatatcgcatattctcaataatatcgagggcttgaaaggctctcttgtgaaaacccaagaggagaagctgctgctacttgtagagaatgctatcctcctaactgtacttttgcaacaagaatccgagggagaagaactggtgttagagaaaaggatcctagagcaagagtttgaaaatacacgagagcaacatgcaatgttgcagaaggtttagcttgaacttgtggagatgaacaagcaac

SEQ ID NO: 3678 - DNA, 409 bp, Glycine max
  Clone ID: jC-gmfl02220057d08d1
gctgtaatcaattgtttattcaaatgtacaacgcaagaaaaagaaaaagaaatccatgaattgtaaattaatttatttaattaattatttctttacttttccaactttttttaatagcccacgattttcaggcggctaatataatataaccactacgcaacaacgcgggactacagaaaaagggtccacccgcgttatcctgtgatgccgccgcaccggatcgcgctggtcgccggaatattccttcgccggaaaactgccgagcactccggcaactcgccgagatcggcgaatagcgactcgtcctcttctctcatcggcaccggcacgtcatctacctcgccgcagatcgggctctctaggacgccggtggacgctacgtcatcgaaccacccgaagtggtggtggt

SEQ ID NO: 3679 - DNA, 540 bp, Glycine max
  Clone ID: jC-gmfl02220057d09a1
tcgctgcgtaatcagatcatatggtatggagcatggcagaggcggtcgagtaaggaaaaagaggagctgacctcaacccttgtaagttggacaatgacttgactattggcgtgatctctttgctttctaggatcattaatacaggaaaattaaagtatccttttgctaataaagctcatttgaaaacagtggcatttgctccaaccaaattcactacaaaagggaaaaatacatgcagtatcattttaaggactggtcggctagaattcggctcacactgatacatgacgcttttcgagtgagggagaactccatagaaattagaaggagagagagaaatagaaactaaattttgaattcttttttttcctactcttgtatcagtcattacaatagtatatatagccatgccacacctaagaacaaaatacaataacaaaatgcagttacagaatgctaacaattgccaaatgctttctagaacctactgacttattactcgggcttaggcctcatatctaaaagaaacatatggaaata

SEQ ID NO: 3680 - DNA, 457 bp, Glycine max
  Clone ID: jC-gmfl02220057d09d1
gtaaaaagcaagtaacattaagttggattcggatacacaagataattcacattatctgaagtacttcaccaaacacaaatctaaaaactctcaaaagtcatttcgttctttgacgctcactttccggggacgaagttggtggcataggcccaggcgttgttgttgacagggtcagcaaggtgatcggcgaggttctgcaatggaccctttccggtgacaatggcctgaacaaagaagccatacatagagaacatggccaatcgtgcgttcttgagttccttcaccttaagctcagcaaaaggccttgggtcatcagcaaggcccaatgggtcgaagctgccacctgcgtagatcgtgtcagtgacctcaccgagggggccaccagcaatacggtaaccttcaacggcacccattaggataacttgtgtggaccagatggcgaggatgctctgggcgt

SEQ ID NO: 3681 - DNA, 578 bp, Glycine max
  Clone ID: jC-gmfl02220057d10a1
gcctcgctctggtagacaggctaaattgggtgagaaaaacaagttctattatgatgagaagctgaagagatgggtggaagaaggtgctgaacttccagctgaagaagctgctgctctgccaccgcctccaacaactgctgctttccagaatggttcatctgaatacaacttgagatctgcattgaagactgagagatcacctcctattgagggctctaacataagaactactagccctgagcttagtccagggatgccaccgataccacccagcgcagatcaattctcagcccggggtcacttgcgtgttcgatcaaggtatgatgacacctttaaccaaagtggtggaacctctgcaaacttgtctcagttccctgctgctccatctgtgaaaccagctgttgctgccaatgcgaagtttttcgttcctactgccgcaccatcaaatgagcagacaatggaggctatagcagacagcacgcatgaagatagtgcaacaaatgagtgttcgtaccaatcccttaatcatcaacgaccatacataggtaccagtttgggaacatctcaaaccgggagca

SEQ ID NO: 3682 - DNA, 487 bp, Glycine max
  Clone ID: jC-gmfl02220057d10d1
agagaaaagggggttataaatttatattatacaataaaaaaaattcagcatcctttggtcaacgtttctccaagtcttccctgatctagaagttggaactcccgtttgaatctctggattaacctgaactttgttctttgcaacatatgtcatcctatccctaataatattgtgtaatattggatagtagaagcatttcagatgaataaaatagttaaataagtaaatcaactttgtgagaataaccaagaagcattgccatggcagccctagctcatgctaccatctgctcctgctctatatacagctgctccatccatggtggaagcatctctttactgagatcatattggtgcttctcagcaccaaatatctcagacctctcggagggaacatctttaaccaatgaatgaacccatgagacatacggctcagcaccaaattcaggctgtgctatgggggatgcagttaccccactgattctgaa

SEQ ID NO: 3683 - DNA, 399 bp, Glycine max
  Clone ID: jC-gmfl02220057d11a1
gcagaatgagtctcatggtattgttaatcaacttcctgagcaagggatccctgtcatgattacatggaactatggtggtaacaatgtggctgtggagggatcttgggataactggacatctaggtgagatttaacgactgcttttttggtaacagtagtactgaattgtatttgacatgaaaagttatcataactgcaaatgatctacaatgagattagtaccagtgaattctattacttgcaggaaggcattacagcgatctggcaaggatcactcaatccttatagtgcttgcaccagggatatatcattacaggttcattgttgatggtgaagagagatttactccagagctatccaatgtagctgatgagatgggacatgtgtgcaatcttcttg

SEQ ID NO: 3684 - DNA, 300 bp, Glycine max
  Clone ID: jC-gmfl02220057d11d1
aagtagaaaaggtacaagtaataatcatcattaaaaatagtgtccaagactatataaaccacaaacacaatttagacaaattaatgttggatccttgggttactgtagcatgtgtggcaagatgatcttagtaggagtaacctttgacgaacattccccgagtggcttcctcagattcaccctaggcagtgtactttccaagctgagcgaatgagttggacttggcacggaaaaggagtgcattttgagcagcctttaagttctcaaggagtccaccccatgttttcaagcaagtgtttt

SEQ ID NO: 3685 - DNA, 293 bp, Glycine max
  Clone ID: jC-gmfl02220057d12a1
acatgacagacacaacatgatccttgccctgaaggatattgggccatagaactagctattggtgctggcagcctgttgattctattaaagcaaaaatcctttgtgtagcctatatattggtttgttcaaaacctggcttatggctgatatattctagtccgactagtcttaacagtggtggttatggatgaggtacagactctatatgacatgctttgtggcaatatctgctgtcctatgactatgacatacctgtgggaattcattgtgcaaaagcttattttgactggatt

SEQ ID NO: 3686 - DNA, 324 bp, Glycine max
  Clone ID: jC-gmfl02220057d12d1
aacacaggataaataacattttattacaaagtcctccatagcatacaataacaaagttacatggaaattcattaactaccactaacaataccgttatagccgggtcaaaatgctgaatttaaacaaaactaaagagatgaagcacatgtacatttatttttatttttatgaaacttagattgaaacaatacaacttaactatatgttgatgctttgccaagtgattctgcaatcttactggcaatacagtaagatgtagactgaatggttaccatggggttgacaccaactgcactaggcaaaacactcccatcacacacatac

SEQ ID NO: 3687 - DNA, 506 bp, Glycine max
  Clone ID: jC-gmfl02220057e01a1
gtctaaatatggagtcctctaggaggtacaaagtggttgcacagagaaaggccttgtacagatgatgcttgctgtgttaagcgtctgagattatgtggcgccatacttgttgggaagactaatatgcatgaacttggggttggaattagtggtatcaatccacattatgggaggttcttctagtggatctgctactgtggtgtctgcaggattgtgccctgttgcccttggtgttgacgggggagcatgcttgttcaggttctgtgagggtgcctgcatctctttgtggtgtagttggtctaaaaccaacttttggccgtgtacctcattccggagtccttcctctaaactggacagttgggatggttggaatactagccggcactgttgaggatgcattgatcacttatgcagccattagtggagaaatttcatcccatcagccctctaatatgcttaccaagataaatctttcactgctgcccttgacgaaatccatatgtgac

SEQ ID NO: 3688 - DNA, 268 bp, Glycine max
  Clone ID: jC-gmfl02220057e01d1
aaaaccaattagaatgacgtttagattacaaagcaaaaaagaaatggaacaaaagcgaagggacaagcaagaaggaagcaagagctgatggacgagatcacgagaagaaggacccgcgagaatgcaggttgaacatatcaggcggtggggtcaagagcgagaccgccctagacccgggagttaccattgagggtagccgaagaccggatgaccaaagcgctgggccctggaagaagatagagtgtgctgtagaatgcaaccggcgagc

SEQ ID NO: 3689 - DNA, 479 bp, Glycine max
  Clone ID: jC-gmfl02220057e02a1
cagccacacttcttcgccgtttcagctgaagagccatccgcaggtaagcaatggttaagcataataatgttatccccaatgggcacttccggaaacactggcaaaactatgtgaagacttggtttaatcaaccagcccgaaagaccagaagacggttggctcggcagaagaaggctgtcaagattttccccaggcctactgctggatctctcaggcctattgttcatggccagactctgaaatacaacatgaaagtcagagccgggagaggattttcactggaagaattgaaggctgcaggaattcccaagaaacttgctccaactattgggatttctgttgatcaccgcagaaagaatcgttctttggagagtctgcaggccaatgtgcagaggctcaaaacctacaaggctaagttggttgtgttcccaagaagggcacacaaagtcaaggctggtgattctagccttgaagagctg

SEQ ID NO: 3690 - DNA, 443 bp, Glycine max
  Clone ID: jC-gmfl02220057e02d1
tttattttttttttttttttttttgggaagaatcattattttgctctattaaccatccatgtttacaatccaggaaaatataacagttaaaaaaatgatcatgaaaaaatcttaaaaaaaaataactatctaaaatttaaacaggcgcccgtacctaggtccgctgttctacatttacaagggcacgagtatattgaggtcaaagccctacatgaaggtgctatatataaactctagtaaattgtaactgaccctaaggaatattggacataccacgcgcaaaatgactaaattcagggcactacaaaaccacaacaccaggaaacaaacaaccagttcataaaatctttatctggcaccttgagaagaccttggatagaaatcccagaagctggaaccaactgggttgatgggacctaccgatgtggagcaagcacccactg

SEQ ID NO: 3691 - DNA, 136 bp, Glycine max
  Clone ID: jC-gmfl02220057e03a1
attgcatccaatatattaatatatgttgagcacgttgaagatgattaacgaagatttataatttgacgagggccctcatgagcgcataaagattatctcgtttggtcatgtggcacgagtggcccttatgtcctca

SEQ ID NO: 3692 - DNA, 358 bp, Glycine max
  unsure (1)..(358): unsure at all n locations
  Clone ID: jC-gmfl02220057e03d1
accatacccgctgctgtagcattatacacattattattactcttgctcccgtcaagataaatctgaccccttcccctgttcccacctacgtatataggatattttaagaaatgaacatctctcttagtagtgggatccggggaaagaataggaaaggttatttctttatatttttgaccaggaacagggcctaccacaagaatatttttttttgtacgacgatagttttgaaaagacagattgcctatcttctcgttaatctcaggcgaaatacgatcggtgggtgccaattcaaaacctttcggtaaaatangaacagtccccacattcaaagctcccttttaccattagcaagaac

SEQ ID NO: 3693 - DNA, 381 bp, Glycine max
  Clone ID: jC-gmfl02220057e04a1
cgaaaaagtaacaaaatcgtaagaaacagacgcataagtgatccactgaaaccctaaacgcatcagtctcagccgtcgatgccgtccagcaagtgaggtcgcaccgtcgtcgcaagacgcactaccctggctgccggacaatttgggctcaaagtctccagccaattgatatgcacaaccctagcaggcagtgagtgaatgagtcaagatgggaagatgagggaggaagagatggctaagcatcgatgagtggtgcgagactgcgagagcaggcacctctactgctacgcatcttcttggccgacacagtgggagtcttaaccggcgacctctgatacatatacatgcaagctcaggtcctatttctcagacgtcactacc

SEQ ID NO: 3694 - DNA, 543 bp, Glycine max
  unsure (1)..(543): unsure at all n locations
  Clone ID: jC-gmfl02220057e04d1
ccttcttctcctctatctattctcatactatctctgtctacttcatatactccctcatctttccatcctcctattcttattatgcagttcatacatccttcataatatcgctccctactctccacatttcgacgaccagcacacgccgcgtgtttaanaaaannaaannaaaaaaaaaaaaacaacctcactagaacactagacggcccgccgccctttttttttttttttctattgcaaagtttaaacttgcacgattatcatcagaaaaaactatacaatattactatggaaatcaccccgtaacacaatagacgacttgctcatatacattcccaaaatgacaacacctatataaacagtgatttctatatgcagtaaaatacaacaaaattgatatttcagccttcgtttccagaacagcatatatctgaacaacatgtgatgcaaccgaagcatcctagaccaatgcagagttgtgtcaatgcagttgcacattggttggttatccgggtacaacactggatgcagcacatgccacaa

SEQ ID NO: 3695 - DNA, 394 bp, Glycine max
  Clone ID: jC-gmfl02220057e05a1
tgcatttgctggtgaggcgactcatctctctctctctctcatctctccctctctgtcatctctgccttccaaaacaaagcaccaattgtttcgaacgccaacgcgaatcacgaagagggtcaccgcgaaaatgggtgtttgcgggtcgaggcccaaagtgaaccaggacctctcagagaacaagaagaacatccaccaccgaagaagaagagagtgaatcctcctaagacgcgttgcttctataaagatcgaagctcacaacgtttctcactgcaatggagctattcaagcttctaatggcgcttctgatgctgcttggactgattctacttcggcattggactctgagtgtgatgacgaatggtacacgtgtctattatggagaagtgtctac

SEQ ID NO: 3696 - DNA, 427 bp, Glycine max
  Clone ID: jC-gmfl02220057e05d1
tgtcgtccttttttttttttttttttttttttttttttttttttttttttttttttttgtttttggttttttttctttttttttttttttttttttggaaaatttccacctttccaaaaaacccacaaaagccaaaaaaaacccgggccccaaaatagaaccgggcccaaccccaccgggccgaaaaaccccccggggggcccacccccccgggggggcccccaataacccccccaacaaaagccccccccaaaccgaaaccccccagagggggacccccccaaaagccggttacccggcatccccccccccaaaagtttcgggcagaaccaaaacccgggcaccaaggaagcccccggacccccggccccctccaagcccccccccaacacccgggtcaaacccccctccagggaaacaaaaaccc

SEQ ID NO: 3697 - DNA, 503 bp, Glycine max
  Clone ID: jC-gmfl02220057e06a1
ggaagttttatttttcgggtgtgtagagattaaagagaggaaggggagggggctgacacattgttaccttgtaataggggtttactgaaggtcttggctggtgtgaacacaaacttcactgtgacgtcaaaagcagcagatgatggagaattctcagaactctacatcttcaagtggacatcactcttgatccctccaatgaccctactaatcatgaatattgttggggtggttgttggggtctcagatgccatcaacaatggttatgattcatggggacctctctttggtagattgctctttgcattgtgggtgatcctgcatctctaccccttcttgaaggggctgcttggaaaacaagatagaatgccaaccattatattggtttggtcaattcttctggcctacatcttgactctcatgtgggtcagaattaacccgtttgtgtcaagagactgccccgtagtagaaatttgttgattgaattgcgacgagtcttgaat

SEQ ID NO: 3698 - DNA, 481 bp, Glycine max
  Clone ID: jC-gmfl02220057e06d1
gccacgaacaaaaaagttggctttttctaaataaaacctttttaacttttcaagtatatatacataaaatttaaatgttatcactcgtacaaaatcacttggctgataataagactaacctgtagggtccaaaatctaatattgtttctcctcttcactgccatcatctccatttgtcttatccccatccctgatttctccatcactcaactgcatatcagcagagttttctcttgctggacttgactgcctttgtattaatggttcgtcatcatcagattctgataatgcttgccttcgccgggctatgcttgaggaaggtgcaggcgcttcctcatctgcatcggaatcttcaagcccagctgctgcaagaagaccctgagcattttcctcagcatcatcattcatctgagtttggggctcctctctgtagtttatgtcagcttcttcatcctccatttcctgatcatccatcatatca

SEQ ID NO: 3699 - DNA, 433 bp, Glycine max
  Clone ID: jC-gmfl02220057e07a1
gcaattgctctgagagagaaaagcgcagcttgtatcatccacgttactctctccatctgaaagcagcaccgccgctgagttgagtaatatccgagacgccaccacagtgaatattcaacttggatactctgtagaggttattgcatggtcaccgagatccggatccctaatctatgccctatcagctctaaccaccgacagcaagacgacacattgctgactatccgttgctgtaaagcgttacgctcgcctctcctctccaaatgcgggatgtcctcgatactggctccaattggaagctggtggtccttattcttcttcttattggcggcattcctcgtacattgcctagctcattacgggcccttactatgagcgaatttgcgacacgactctacgcgacggcgagcagtccccgggcgccttcatgacc

SEQ ID NO: 3700 - DNA, 420 bp, Glycine max
  Clone ID: jC-gmfl02220057e08a1
ggttgatttacattggaaatcaaagatgccaagttccgacatgccttccaaaactgtaaaactctctctctccgacaacaagtccttaccctctttgcaactacccttccgcaccacagatatctctcacgccgcaccttctgtctgcgccacttacgactactatctccgtcttcctcaactcagaaagctttggaactcctcagattttcctaattggaacaacgaaccaatcttaaaacctatcttgcaagctctcgaaatcaccttccggtttctgtacattgttctctccgatccaagaccttactccaaccacagagaatggactcgcaggatagagtctcttatcacacatcaaattgaaatcattgccctacttcgtgaagatgaggaaccaaattccgacccacgtggcac

SEQ ID NO: 3701 - DNA, 330 bp, Glycine max
  Clone ID: jC-gmfl02220057e08d1
aacccaataaacaaagggggggcctttttaaaacgtttttggccccctttaattccaaaagggagccaatacctacattggaaatattccccaaacctttaggggcattaaattttccccccaaaagaaaaaatggccccagaaaaaaaaaaaaaaaaaactattgtatgaaattagaacactgttatataacccccaaaagttttttttataagtatggcgctttttcttacctatctaaacgtttttaccaaatgagatcttaaccgggagaaatttgatcaaaggacaaaacctttggggatttcgcagggaaggaaaaagggaaag

SEQ ID NO: 3702 - DNA, 60 bp, Glycine max
  Clone ID: jC-gmfl02220057e09a1
aaatatgataacctgatgcgcttctctcctgtgtcattatctctgtcttgctatgctttt

SEQ ID NO: 3703 - DNA, 419 bp, Glycine max
  Clone ID: jC-gmfl02220057e09d1
ataaccaacttaggctgtacttaaagggacaaaaatgaaataaattaaccaacggaaaaagccggtaaaacggtcagatccattaaagggtgtgggaaacaaacggagtggccccaaaatacaagggggccaagacaagggaaaaacttgaaaacatgcaggaagcggatgccaaggaaacggagctagattcgcaagggaccgccgcgcggccattaaaggacgcattctgaaacagcgacctacctgcaggttacgggaacgaccagccggtttttgaaagggtaacaggtggggcagcgaaaagctgtatacaccccaattacccggggggggtcaaaaacacaaatctttacaaccgggaagcttgaacaatatccctaagcgggggatcccagagagggggaaatgaaacggaa

SEQ ID NO: 3704 - DNA, 283 bp, Glycine max
  Clone ID: jC-gmfl02220057e10a1
aattactttctctctagacgttactttctctattctcaaagtcacacacagcactttctctctcatcttaactctctcccatgtctcctcagtttcatcgatggagagtgaagccttaactctgcttattccgtgtcccagatctagctgttgcttccgagtctttgattcttctcttatttcttctgctcacttcacattccgattcggcgcagattcttttggctgctaaacattaggatctggactgactgcatcggtgagcgctaattgcaggcatggg

SEQ ID NO: 3705 - DNA, 513 bp, Glycine max
  Clone ID: jC-gmfl02220057e10d1
acaagaattaagaaataccatatcaatcaatatatgggcgatattcatgaatttcagtcacgccaaaatttattattggctgcagataatgttaaactttgaaaatctctcctcagacaccgtctgaacgaacaatttccttctttttcacatgatacgttaacacaaggcaaagagtaaaaatggtttgctgctggtaatggtaatcatcaaatcagaaaaaggcgctctcctctattcatatactttgcattcctcatcagcagggtttgtctcgcagaattcctccaatgggtctccactccctgctttagctgcccctggccacttgcttgctactaggtgtgccaaatgcaccaccctttggctgtaaccccattcattgtcataccaagcaaccatcttaaccatgtcatctcccatgaccatagtcaaggaggagtcggtagtagaggaaacatcagagctgcggtagtcgatagacacatgtggaacatcacacacgttcaacac

SEQ ID NO: 3706 - DNA, 402 bp, Glycine max
  Clone ID: jC-gmfl02220057e11a1
aaagaaccctcaattttccgggaaaacccttcccacaatggtttcccgggaaaacaccaattggctcttcgattacggcttgatcgacgatattcccgttccggacgccaccttcggcgtcaattcctccgccttcacatggccccctaacgccttgaacgcttcctccaatgtcggcgttgaaattgatggctcgctgggggattctgacagcctcaaagagtctggctcatagaaaagggttaggcctgagtcatgtgctggttttggcatcaaggcatgtctggagacagtgagacgggatcggcttaatgacaaggctgttgaactcggcgccattttggagcctggaaagcctgccagaacagacaaggctgctatactgattgatgctgttcgaat

SEQ ID NO: 3707 - DNA, 379 bp, Glycine max
  Clone ID: jC-gmfl02220057e11d1
gtctaactggaaccatataagatatattttacgaacattattgatgtctttcgccaactctagaactaagtgtatatactgcttagtatcctgaaaactctcaactgtggtacatgctgaaactgtcaatgcctcacatatgacactacatatgcttcttgcactaactgctccggaaacaaatgatacaatggttcaggacttatactgcacaacatgcttaaacatagctatctccattcataaaagaatcttattatggaatccagttcgtgatcgaacttccatattcactatgacactagtactggagcatatgggctatcgattgctacttgactgccacaatgcaatgataaatgcgtcatatgagattctc

SEQ ID NO: 3708 - DNA, 435 bp, Glycine max
  Clone ID: jC-gmfl02220057e12a1
gttgaaacacaaagaagaaaaaatgggttcctctttgtggacttgtctgattttgttatcacttgcttctgcttacttcgccgccaacccaagaacaccaattgatgtgccatttggcagaaactatgtgcctacttgggcctttgatcacatcaaatacctcaatggtggttctgagattcagcttcatcttgataagtacactggtactggcttccaatccaaaggatcctacctgtttggtcacttcagcatgtacataaaattggttcctggcgattcagctggcacagtcactgctttctatttatcatccacaaactcagaacatgatgaacatagactttgagttccttgcgaaacagtacccgggcaagcttacatttttgcaaactaaatgtgttcactgggtggcagtgatgacagagaacaaag

SEQ ID NO: 3709 - DNA, 303 bp, Glycine max
  Clone ID: jC-gmfl02220057e12d1
atagagaaatctacacgaatatcttttattaaagcatatactcactaaagaatcacattgtaaatttaagaattataacagataaaaatcgctgtaaggctactaatttaatgtgataatttgaacgtcgaccaaagttcaaacttgcaagaaatttagaaaatcttgctaatgatcggacgtgctttacattgggcatccaatggaatggccttgggcactatagttccccccccttcgggcatatctactgtttcctcaccaatccttttccactcaaaacattgaatcaacgaaccttaa

SEQ ID NO: 3710 - DNA, 500 bp, Glycine max
  Clone ID: jC-gmfl02220057f01a1
gcaaaagttgtcattgataggctaactggccggaccaagggatatggctttgtaaggttttcagatgagagtgagcaagtgagggctatgactgagatgcaaggggttctttgctcaacaagacccatgaggattggacccgcctctaataaaacccccaccactcagtcccagcccaaaggtatgtctctttctttatcttgtttgttctttttgctgcaaatatctctttcatatgctgcttaagggaaaattgagctgtccttgttagatgagtgatactggttgaatttaatgctgtgtctcagaatgttgtttttggtgtatgctaaatgttattaagttttgattcttttcagttacacacttgaagattcgcagtcaaactcatttcttcctgcaatttcctttaaaaatttgggcaaaataaattatatataataataaaatcttatagaactcatgttgtctcgaagcagggtgtcaagaggctctgtcat

SEQ ID NO: 3711 - DNA, 156 bp, Glycine max
  Clone ID: jC-gmfl02220057f01d1
tttttttttttttttttatttttttttttttttttttttttttttttttttttttttttttttttttttttttttttttttttttttttttttttttttttttttttttttttttttttttttttttttttttttttttttttttttgaaactttt

SEQ ID NO: 3712 - DNA, 401 bp, Glycine max
  Clone ID: jC-gmfl02220057f02a1
ctccaaacccattggattcccctttggcaaacccaggttccacccatttgttcacagtagccaacaacaactccatcagcaccaatcctcagcatcttgaaagatatcaagctcaagactagtgctatatattttgagttgaggcttggaaattgatttgatttttgtatatagggaagttaattaattctgagaggcttatagttttttttttggtgggggtggagacggttatatagaatttggataattggttttttttccttgtttgaatctctctctgtattttccttcttttactggttttatccatggtgaaatcagaaagaaggcagaagaaaattttagacagtgaagatgatagatatcaaagagaaagggaaatgatactggttttttgt

SEQ ID NO: 3713 - DNA, 400 bp, Glycine max
  Clone ID: jC-gmfl02220057f02d1
acaagggcaaacagttacctgaatttattatttctcgcagaatgaaagccccgatagacagtcaagtcaagctttatgatacattagaccccaaaatcccaacaacattatttaggtgagcagtttttatatcggactttcacatgaaagggtgataaaggcagataaaagcatattctttcaacccacccgaccatgggggtaaagcccagggcaatggtatgacttaaacggggacccatttcagaattttttttaaaaacactggagatttttggaattggttcaaaatccaaaacccttgttatgggaaaacccccctttttggggaaccagcccccacccccaaaggggggggttcgcttgggctgactggataaacttctttttggaccctttg

SEQ ID NO: 3714 - DNA, 478 bp, Glycine max
  Clone ID: jC-gmfl02220057f03a1
tgtctctatctttggttcttggagtggccaatagctttgattttcacgacaaggatttggcgtccgaggaaagcttttgggacttgtacgagagatggaggagtcaccacacggtttcgcgaagcctcggtgaccagcacaagcggtttaacgtgtttaaagcaaatgtgatgcatgtccataacactaacaagatggataagccttacaagctgaaactaaacaagtttgctgacatgaccaaccatgaatttaggagtacctatgctggctcaaaggttaatcaccacagaatgttccaaggcacgccacgtgggaacgggaccttcatgtatgagaaggttggtagtgttcctccttctgtggattggaggaagaatggtgctgtcactggtgtaaaagatcaaggccaatgtggtagttgttgggcgttttcaactgttgtagctgttgaaggcattaaccaaatcaagacaaa

SEQ ID NO: 3715 - DNA, 143 bp, Glycine max
  Clone ID: jC-gmfl02220057f03d1
atactcctcacatttattatatgacgggcaacatgcctcggatgcgaacgcccattggcttagaatccgtaccttgaaaatttgatctaacagctcatgttttccatgctgcacctccctatcggaggacctctcatcaaacc

SEQ ID NO: 3716 - DNA, 254 bp, Glycine max
  Clone ID: jC-gmfl02220057f04a1
gctgtctcgagtctttgtatacactcaccaatggacgagtgatacagcaggaagcaagacccggactggtacctaaagacacatgggactgtggtctaagtaacaggaccctcagccacttgagtagccccaagtatcaactactgccgtgatggacccggacgttctgaacatgctcgacgatgccgccaacgtcacggagcgtgagcctaacatgcagggtgtcgactctgacattgacagtaccctgggga

SEQ ID NO: 3717 - DNA, 233 bp, Glycine max
  Clone ID: jC-gmfl02220057f04d1
ggcggccgccctttttttttttttttcaacaattttgctgttttatttgaggaatcgcacaatgcaccatactaacgcaggacgatcgcaggaacctaaaccggataacgagcaatgcaagcaggcccgggcccaccaaccggggccatggcgcttacgcagggctgtcacacagcactgacccatctaaaggcacttccacaatctatctggcacaccatgtcaccctcctt

SEQ ID NO: 3718 - DNA, 506 bp, Glycine max
  Clone ID: jC-gmfl02220057f05a1
gctaaatgacctaagcaagagacgatcagaagaaaccatgagaatgaaagagatcatttctaaggaggagaaggcaaaagaattagcaaaactagaaagagagaaatatcaagatgcatcacgagaagctgaatatttgaaagaatgtgctgaaagagaagcggcagaacagaaagaaatggagttgagagccattcgcgctgcaaaagagaaagaaaagctggaggatgctctcagaggttccacgccccagtaccggaagtttacatgggatgaaataatcttagctacttcatctttctctgaagatctgaaaattggaatgggagcgtacggagtagtatacaagtgcaatttgtatcacacaactgtagctgtgaaagttctcactcttaacactaacgtatacagcataagatagcaattccagcaggagttagagattttgagcagaattcgtcatccaaacttgcttcttctactagtgcatgtgcggatcatggatg

SEQ ID NO: 3719 - DNA, 341 bp, Glycine max
  Clone ID: jC-gmfl02220057f05d1
aagggaaggatgggccgtacatatctggtatgaaaggcccaaaaacagatgggacccctatctgtacatgtgccatatctggcaaactaagggaagattttatgatctacccagggacaagttagccttgaaagggttttgggggcaaaaagattttaaaatacaatacccccaaacaaacacacaaattttttaataaccttttttttttagtttgcaggaacaatacccggctgaataaaaaggtgttcaaacaaagatgagaggcgagcaacttttgcttttaccttttaaaaacattcagggtaatgggggccggggataaaacggggggcttttta

SEQ ID NO: 3720 - DNA, 347 bp, Glycine max
  Clone ID: jC-gmfl02220057f06a1
cttgacgagcagtcgatagcaatagcttgacgcgccatgctcgcctacgaattctggtcgtgcggctgcagaatgcactgctacactgttgagagaggcacatccatgtcagttacgtgaggccatgaggattcgaccccttgcaggagataggcttggtggatctattgatcagcggccaggtatgttcgaacaggtctctagacgcatagatctggccgtagagactcttactgcatacgatcggggacgatattgcgagggacacctcctatgactgtatgggcctgcgcgtgtcggggactctaaccgtgcataacctgtaggcaaaagtgacggaggaggca

SEQ ID NO: 3721 - DNA, 390 bp, Glycine max
  Clone ID: jC-gmfl02220057f06d1
ggaggcatattgcattgaaaaggggaaaaaagggaaagggacatatatacctggatcactctactttgggagatggataaaaatcatttacaattcagtagactaaaaatttaaatagaaataattatctaaactgaatcaagtgcaggaatcaccaaactcaataaacaagaacttcaaattttgagaacaaaaaatgtcactcagacctccataatctggttctatatggacaaacttgctgtcaataactacactacactgtacaacattttcctgatcaagtaaaagtgagcacttctcatataaaccttcctttggcgctagattcaataagcaggatctaggagcagacactttatactgcccaatactgaaactttcttgatc

SEQ ID NO: 3722 - DNA, 454 bp, Glycine max
  Clone ID: jC-gmfl02220057f07a1
aagatgaagaaggaagcaattcttataaactgcagtagaggacctgttattgatgaagctgcacttgtggagcatttaaaacagaacccgatgtttcgagtaggccttgacgtgtttgaggaagagccctacatgaaacccgggcttgcagagttgaagaatgccattgtggtaccccacattgcatctgcctccaagtggactcgtgagggaatggctacactagcagctctaaacgtgctggggaagatcaaagggtacccagtttggtttgatgccaatagggttgaaccattcctcaatgagaatgctcaaccaccagctgcatccccaagcattggtaattgcaaaagcctgtggtttgccaactccaagctataaacatacatggttctatcctacaagggccttcaattgcacaaatgaccaattttggcctgttgagttgggctct

SEQ ID NO: 3723 - DNA, 246 bp, Glycine max
  Clone ID: jC-gmfl02220057f07d1
ttcgttctttttttttttttttttttttttttattttttttttttttttttttactggaaattttattgttcaatgtatatgcaacagaagggtataaaaagacagagatacgattggaccgggaaacagagagaaataagggacaaaaaaaaacgcggcaaaacaccaagaaaagcaaaacaaagacacagaaacccataaaccgcccggcacaaaaaccgggccaaaaatagaatagaagcaaa

SEQ ID NO: 3724 - DNA, 475 bp, Glycine max
  Clone ID: jC-gmfl02220057f08a1
cggaaactcgatcgtcttgcctagcctaatataattggccaccatgaccgatgaacaacgagaaccacaagcttccccgagcaatggcgtccacaagttagaaagaaaacaaatagctgaaagagaaagaaaacaaatagctggaagggatagatcggtttttagaggcaggcgtgcacgacctgggttttctgattcattttcaagcactgacttggaagctttagagattgaagagggctctcctaggagtcaagggtctgaaaccccaagttcaagggccagcacttctgattcggagagtcagggatcttttgctggggcacctaataccaataaccaatggcggggtttctttaaactactcaagaaaggatcacaaatgcctttccaaccttttcacccacttaaaaatgttccaaaactgacacgaagaaaaagcaagaggatcagggaggacctcattccttctctg

SEQ ID NO: 3725 - DNA, 482 bp, Glycine max
  Clone ID: jC-gmfl02220057f08d1
ttcgtttttttttttgacttaattacacatttgattatattgaaggatttgtgatccaaatagaactgacatccttagcagcatttggagatcatcctttgatcttagacagggagatttcacttgagaaaaatcccgtactaaagtaacattctaaccaactgaaaacaaaaatattgatcaatacaattttgggagctacctagattatcagtcatcactgtcatcatcggacatagaaatccaaaattttgatgacggttcgttttctagtttcgtaacaggatttgtggcatcatggttgtagtccctaaagcacaaaacacccgaatcttcagaatagctagttgtagtaattctacacccatctacaaccatggcatcacagccagatccagcaccatcagttaaagagcaaagcaaggaatttgttagtacaccagtgtcaacttcccatacattcacataagcattgtcagggc

SEQ ID NO: 3726 - DNA, 299 bp, Glycine max
  Clone ID: jC-gmfl02220057f09a1
ctttgttcactcttcttctcttgctgctagggttttagcgcagcttcttctagatttaaggaagatgggtaaggaaaaggttcacatcagtattgtggccattggccatgtcgactctgggacatccactaccactggtcacctgatttacaagcttggaggcattgaccagcgtgttattgcgaggtttgataacgaagctgatgagatgaacaagaggtctttcaagtatgcctgggtgctggacatacttaaagctgatcgtgcaagtggaatcaccatcgttagtggcttgtgga

SEQ ID NO: 3727 - DNA, 404 bp, Glycine max
  Clone ID: jC-gmfl02220057f09d1
ggagggaatgtgcatgttactagcatttctctttatccatatacaatacaataaccctgctgctgatgaatttgatgaccataacacagtgacaaataagatcataagatgcaatgatttttgatatacaggacaataaaagaagcaatgcattaaagctgaaagtagagtgtatgttcatcttcaaaggagtgtaaaagagggtaatatatattttacagaatttccgaaagagcagaaaaaaggaagtaaagacaagaatgacttgtgactcaaatcctggaagggatcataggaatagtgtcctgtaagtatgcactggcagcagcaactccacttccaagctttacaggatagcccacatctttcagtatcatcttcacaccagctagacatcccaacag

SEQ ID NO: 3728 - DNA, 184 bp, Glycine max
  Clone ID: jC-gmfl02220057f10a1
gatgcatcatattgcattctctatattgagcacggtgaatatgattgaccactgggcatctatagttactgcatgctgcatcatattggggtgacggccgaaaactctgtgttaccaaaggcgccgctggcccgataatgatgaaatgcacgacctgcttcaggacatggtatcatacaatgag

SEQ ID NO: 3729 - DNA, 404 bp, Glycine max
  Clone ID: jC-gmfl02220057f10d1
ggagggattgtgcatgttactagcatttctctttatccatatacaatacaataaccctgctgctgatgaatttgatgaccataacacagtgacaaataagatcataagatgcaatgatttttgatatacaggacaataaatgaagcaatgcattaaagctgaaagtagagtgtatgttcatcttcaaaggagtgttaaagagggtaatatatattgtacagaatttgcgaaagagcctaatataggaagttaagacgagaatgacttgtgactccatcctgtaagggatcataggaatagtgtcctgtaagtatgcactggcagcagcaactgcactttcaagctaacaggatagcccacatcttttagaatcatctccacaccagcttgacttcccaacagtt

SEQ ID NO: 3730 - DNA, 365 bp, Glycine max
  Clone ID: jC-gmfl02220057f11a1
aagacttggatccgatgatcttgtgtttattagttgaatgccaaaaccacatgggggcatcggaattgtctgatgaagggatctccgagcttgagagtgaaaaccttatgccacagttggcgctagagtgtctggtagaacaactccaaagttcaatatggggattcattgagttcttgcagctcttcagattgatccaggttggggggcatggcaaagggatccagccagaggaaatgcctatatcgcatattctcaataatatctgagggctcgaaaggctctcttgggaaaacccaagaggagaagctgccgctacctggtgagaattctatccttctaactggaccttttgcacaagaatc

SEQ ID NO: 3731 - DNA, 273 bp, Glycine max
  Clone ID: jC-gmfl02220057f12a1
atcccctgttccttttctgttgcttgttcctctcttgaacgcaaacccatcaccacgtttgggtttgtgtaccacattccataacataaccttgttgtcctcaaattccagtcgttggattcgtactacaaggcgaaaatggtagggtttagaaaaacaccagcaccaactgaatcagataagaagacaacccttactgcacaataaagaactgcttcagaacctggactgacagcttcaaaatgtaacggaaactatttggagtacgatgac

SEQ ID NO: 3732 - DNA, 495 bp, Glycine max
  Clone ID: jC-gmfl02220057g01a1
ggaactcttacttggataaatggggactcatacgaaggaaactggttaaatggcatgatgcatgggtttggagtttatacttggagtgatggaggatgctatgttgggacttggacatttggtctaaaagatggcaaaggaaccttttacccgagaggtagccgtcttccttgggtgcaagaaatttacctcagtgccttgagaaaaagagggttgctgccagatttgagaaaacagaaacaggtgagagatgtcaaggtaccagagaaccatatgtcaagtcatgtttcatctgataagtttgcaaaaggaaacctgttaaatctggaagagtctaatagaagaaatgtctctctcgaaaggcgttggagtcttgaggtgtctattgagaaggtgattggggatgattcagcattaagatttgcagaatctgtaccagaaagtagagatggagaagttgatgcaatgatcccaattttggaacgagagtacatg

SEQ ID NO: 3733 - DNA, 384 bp, Glycine max
  Clone ID: jC-gmfl02220057g01d1
aacaaaggaatttaataatcatttggaaaaacctgtcttgaaggtgtacattattacatgaggagtgccaacagagcatgagctgaatattcgattcaaagcaactgcgtctagatacctgaatgcatatctctagattcagtaccacggctagctatgataagctgcgcctcgacaggtaatatatgaatatgattagctaagcctcgctagagccttataggtatcgtattatgggaacaggtacacaactgtgcgatttggacgtgtgcagctatgatgatcgagctgactgattgtaaacactgtctgggcgcattcacatgttagtcaaccagttagcacgcctcctcaccctctgcatgccagttgctatcttctagc

SEQ ID NO: 3734 - DNA, 480 bp, Glycine max
  Clone ID: jC-gmfl02220057g02a1
gaagcattagcaaaagcaagaagaactagtctaagcagaaatggcctcttcagtgatggcatctgtggccctcaaacctgcccctttcactgttgagaagtcctcagttagaggccttccctccctctcaaggaactcctcttcattcagagttgtggccagtggtggcaagaagatcaagactgacaagccttatggaattaatggtggcatggctttgagggaaggagttgatgcatctggcaggaaaggaaagggaaagggcgtttaccagtttgtagacaaatacggtgctaatgtcgatggttacagtcctatctacgacaccaaggactggtctccaaccggtgatgtctacgctggcggtacgactggcttggctatctgggctgtgactctacttggtcttcttgctggtggtgcacttcttgtctacaacacaagtgctttggcgcaataaactttgcaaatcgatgtttt

SEQ ID NO: 3735 - DNA, 452 bp, Glycine max
  Clone ID: jC-gmfl02220057g02d1
aacaaaaaatacaatcttcattctattagcttaagcatcggcatctacaatcatacatactgctgctagtcaatctcgcattcagtatcagatatcttggtatatatgtagtaccattttcaatacaactgattatgcaaattactcggggacaaattgtatgggaataaaaatggaaaagcctaccaatttggagagatgcctattgcctatatattaagatataatatgtcacaatgtcatgcagatagatccgattatgcaaaagaaatattcgcacgtgattctacccaacagttgcatcactatcttacaagttcccaggcctctttagacatgtcataaattacaacacagccattctcaaacatgatcgaacgtgttcgggcatattcatcacatcgctcaatagttccaaacctgtcatttccaagtacgtgtatcctaataac

SEQ ID NO: 3736 - DNA, 479 bp, Glycine max
  Clone ID: jC-gmfl02220057g03a1
aagattgcctcaataaagatgttaccagtcaacatatgatgaaaatgaatgttaagcatgaagaagcctatgctcaacttccatctggtgatgacctcttcgatgttttaggtatggatttgaaaaggagactactcaatgggagctggaataagttgcttgccacagattcagatgacaacacagaacatctagataaaaaggcaacatgcatgaatttgcaaggtgtaggtcctgataatagttattcagttaatgaagcaatatcagaaagtggcatcttctctggaacaggcacagaccaccttttagatgctgtggtttcaaaagctcaatcttctgcaaaacagaattatgatgaaatgtcatgcaggacaacattgacaaggattagtacagcctccattccttctcctgtctgcaagcaagttatgcctgatcatgttgtcccaaggggattgtttgattttcctaagacc

SEQ ID NO: 3737 - DNA, 152 bp, Glycine max
  Clone ID: jC-gmfl02220057g03d1
agcattagaatgcaaacacagtacatacccatggacactgacacactcagatatgactgcacatgtaacaaaaaatcaatatatatactacgatagcaatcaatttatcggggcctgtaaacgtgaaggggctagaaagggcgatcatcata

SEQ ID NO: 3738 - DNA, 144 bp, Glycine max
  Clone ID: jC-gmfl02220057g04a1
ctatacgtcaagtgcaccagcttcgcatgaaagtgcaggtgatgatgatggagctattagtgtgaacattgagagagatgctagtttgagtggacaaagtgacgagatgtcttctgggggaggcttgactgcagatgcggcaga

SEQ ID NO: 3739 - DNA, 200 bp, Glycine max
  Clone ID: jC-gmfl02220057g04d1
agggaaaaaagcgcaaaactagaacatgtgagattgctaaagccaaatagaccttgatactactagccttatacgacgtaattacatagactgtgcagttccaagagctagatttagctgaaccaggacttcattacgtaggacccctgcatatcctactacctgacctttaacattgacctgtaagttataatgaaaag

SEQ ID NO: 3740 - DNA, 323 bp, Glycine max
  Clone ID: jC-gmfl02220057g05a1
tattcattcaccgattaagatggagaagagatcagcatgcctgacgctgaaacttgcgtccatcacaccatggggtgcagatctgcaggagagccttgacgagcgaatggcgctaccagaggatgtggagacgcacatagacaagcatacaggcgagattctgggactccattctgtgagtaatgctttgagcagcacagcgtgtgaggatgaacatgacttgtgccttaaaagacttaatgaatatcaaacgcagttccgaacacttgatatggaaacgactgatcgcgttcagaaggtcttgcattgcgtgaatgaggtgc

SEQ ID NO: 3741 - DNA, 224 bp, Glycine max
  Clone ID: jC-gmfl02220057g05d1
gatagaagagtgcatcggataaacttgcacgattatcctctgagatgcctacccgagcttgctatggaacatacacagcatcccaactggctactcgatcggatgcattcccaaaaggacaagcacttctgaaccagcgaacatatacgccagatatgcctgcaaatatgacagctgggccacactatctagggcggcctctatctgaacctcatgggatgcaa

SEQ ID NO: 3742 - DNA, 327 bp, Glycine max
  Clone ID: jC-gmfl02220057g06a1
ctttaccataccattacaataattatcaaacctaaccagtaaaaatggtgaccgtggaggaaatccgcaacgctcagcgttcccatggacccgccaccatcttggccttcggcaccgccacgccgtccaactgcgtctcccaagccgattaccctgactactacttgcgcattatcaacagcgaacacatgactgatctcaaagaaaagttcacgcgcatgtgtgaaaagcccatgataaagaagcgatccatgcacctgacggaggagtttctgaaagagaacccgaacatgtgcgagtacatggcgccatcgctggacgtgagac

SEQ ID NO: 3743 - DNA, 473 bp, Glycine max
  Clone ID: jC-gmfl02220057g06d1
aaggtaaatttgtcacatttattcattatcatatatgcatcacctagtatcagctggtttattcttaattaagagaaaactaaaatacaatatcttacatgctatttttgccggacttgaattagaataatttcacctcgataactttcaaaatcctttaatgcaaattaccgaaataaaactctagttctagttcaaacaacacctagctataataattaggggttgataccatagagctttcgaatcccgtctatatcatcttgcgctagattcaccttcctagttcgaggtggtatagaaggatacatgatggctcttaggtccgacgagtggcctaatccgagcaagtgcccgatctcgtgcactgccacagattcaaggtcaaacgcacttgtcaccggcgatttggtgacatcgccagacgccacccaatattcgtcggcgtcaaagtggcacctcccatcagtggg

SEQ ID NO: 3744 - DNA, 188 bp, Glycine max
  Clone ID: jC-gmfl02220057g07a1
cttcctccaaattcagttgctagattaccatcgctatacgacgtaggacttctaggcaagattagcacggagccactagtaagccatggtgggacctatgagcgtgatatccagatgtcagagcattgttacattacataactgaccattttcgactacttctgaagaagaagggatgccggcagata

SEQ ID NO: 3745 - DNA, 545 bp, Glycine max
  Clone ID: jC-gmfl02220057g07d1
tctttttttttttttttttttttttttttttttttttttttttttacattagtaaacaaatttattgcatagaaagatacctgcgtgtatggaaaaaaattcaatttttgttaagttgaagggaaatatccaaatacatgtcttattcttttaaataatccatatttgtagcaatgaaataaattcctccccaaaataaaaaatgattgggattaccaatatctatgatccatattcactattaaggaccagaaatgccttgcttacgtatcattaaaaagggcattaacataaataccgcagtaagaagaggtaattcaaaagtttgcaaactataaaaacgagttaaggtagattgtcccacactggaacttccgcgtaataactttaccaaagacgatcctattacaggaatagcgtcgggtacgcctgttacaattttgactgcccaataaccaatttgatcccaaggtaaggaataaccggttacaccaaaagatgcagtcaatacagccaaaacttcacccgtaacccaagttaatttc

SEQ ID NO: 3746 - DNA, 234 bp, Glycine max
  Clone ID: jC-gmfl02220057g08a1
gcaagcttggcacttgccgagaatggatacccacctgtacactcttgagtacatgaactgatggtcatccctacaagctgtgtgatcagatatctgatgcagtgcttgatgcctgactggagcaaagaccctgaaagcaaggttgcctgtgagacatgcaccaagaccaacttggtcatggtatttggagagatcaccacaaaaggcaatatagactatgagaagattgagcgc

SEQ ID NO: 3747 - DNA, 517 bp, Glycine max
  Clone ID: jC-gmfl02220057g08d1
tgactgctcggtggccgcccttttttttttttttttcatccaaaagcatttttgcagattcttttcctttccttcaacagaaaaatagaggatgtatttattacaagtagccatatattaacaaattccttaagtaacatagtatctcttcatgaatgggtccatgctgaaataatcatggaagaacatctgaagaggtatagaagagtctgtcaaatcttcaggaacaagtttcaatgagctttttagccttgaaaggacccaacattggatggaaatatacaaatgtaatcaacatgtgtagacatctcaaaggaaaggtatcagggcagaactaagacccttgaaacaagaaatctgctgaccacacagttcttcatttcctttttcctgaaccaagtgacaggagttcaaagctcctgagtgtatcatcacgaccacctcttgttgctgaagcccgtgataaagatgttttggattcaaaaccaggttgaagtctctgagttggtgataagtc

SEQ ID NO: 3748 - DNA, 186 bp, Glycine max
  Clone ID: jC-gmfl02220057g09a1
attgcatgcaatttattactatccatagagcacgatgaaggcaatggaccgagtgtcaccctgtgatacggcatacgggaacccttcatctgaatgccatattaccctctgatacttttgagctccacatcatcgagcagaacaattcacactgatcttgaggaaagcgtcatctcattttgatca

SEQ ID NO: 3749 - DNA, 505 bp, Glycine max
  unsure (1)..(505): unsure at all n locations
  Clone ID: jC-gmfl02220057g09d1
acatatataactaaagaatcttgttttgttctattatttgttattttataatattctaatgaatctttattttcctttttattattagttattagaatattttttattattagaaagaataaatagaattggcaaaaatgaaaaaaaaattcaatgaaatcaaaattatcgcgggcgaatatttactcttttattatcaatcaaattcagatgtaatgtagggcacaactcctaaaaaaaggattgctttttggtttcttccgccatcccacctaatgaatcattaagattcgtttttaataaaatcttaagtatttgcaggtttcgtcgttcccatcacttctcgattaatggttaggtctgaattcgacaatggagcctttctcatatcttaaaattaataatctttttttttttcgaatattgatttgatttttcgtgaatcaatattctcagtttttattgattcagagctcttaatttggttacgttatanattaattca

SEQ ID NO: 3750 - DNA, 185 bp, Glycine max
  Clone ID: jC-gmfl02220057g10a1
tgcgagtcgtgatggatcgacatccatggttggcatcataccgaggaatgcaggggtgacacgattaaggggaactcggtgacaatgcgaaagactgtgttggatattaactgcattaccagtgttaagggtgtcacaggatcctggatttacataattgactgtgtcattgtcaccagttctgc

SEQ ID NO: 3751 - DNA, 507 bp, Glycine max
  Clone ID: jC-gmfl02220057g10d1
agacaacttcaaacatagatagcacttaaggtagatttacacatagcagatatatataaccagctattattgaagatttttaagcaacactgaaagaacttgctgcactctccacaaatcttcttgctcccttgaaccacctcttgtctccagcttgagccttgcaaatgaacagttttccatcttttacagttgctctaattatgtggtgcttgccaccttcatctccatcagcagtccttgtcaacacagacagaaaatagtacggcttcccatcaatcacaggtgttgccgtctctaagatgttagccgtggccaccgcatttggatcaaaaccaccctcggcttgtgtttcgccgaagaaggcctgttttcctagtaaataatccaccttagagaggaactcttcgggtgaaccatagtcagtgatagacttcttatcagtcggagtgatggtgacaaccacgttggtggttggaatcaaagtatcctcatatctaacaacct

SEQ ID NO: 3752 - DNA, 357 bp, Glycine max
  Clone ID: jC-gmfl02220057g11a1
ggttgatttacattggaaatcaaagatgccaagttccgacatgccttccaaaactctaaaactctctctctccgacaacaagtccttaccctctttgcaactacccttccgcaccacagatatctctcacgccgcaccttctgtttgcgccacttacgactactatctccgtcttcctcaactcagaaagctttggaactcctcagattttcctaattggaacaacgaaccaatcttaaaacctatcttgcaagctctcgaaatcaccttccgctttctctccattggtctcttcgatccaagaccttactccaaccacagagaatggactcgcaggatagagtctcttatcacaca

SEQ ID NO: 3753 - DNA, 385 bp, Glycine max
  Clone ID: jC-gmfl02220057g11d1
atctaacacatattcataaacaaaataagctacaatgaggatgcagcaagttacaaagaaaattgaacatcacgagacaaaatcaagaggagaggaaagcaaaacagacctcaaggatccgcgtcaaatatcctacattctatacattttttgtgatttttaggtacaagaatcctccaccttaccacttcacgtggtggcatcatcttcatttcaaatcactagcctttgtcattcttccacttattatctccattgattgtttgcttcttcatttcgtagtcttccatttctatggaagcataattaggctatgatatcatctcagtttctattttcatcacagcacccacaaataaatgatgggggcaacaagttactcagc

SEQ ID NO: 3754 - DNA, 385 bp, Glycine max
  Clone ID: jC-gmfl02220057g12a1
gagataactagaaacagtgtgatgaaaatgaaggtccttgttttcttcgttgctacaattttggtagcatggcaatgccatgcgtacgatatgttccctctccgaatgaacactggctatggtgcccgtactccggaggtgaaatgcgcaagttggaggcttgctgtggaagcacacaacatctttggctatgagaccattcctgaagagtgcgttgcagcaacaaaggaatacatccatggcgaacaatatagatcagactcccaaacagttaacccaccaagcttacttttatgccagagacctcgaagtccatcccaaggacacatctgtgctcagtatagatggcaccgtactctctaatattccatactacaaaaaccat

SEQ ID NO: 3755 - DNA, 242 bp, Glycine max
  Clone ID: jC-gmfl02220057g12d1
gcaattgaaattcaaccttctatgcaaatattatcacaaccttcaaaagaggatcaaacgagtcaaaattaagaagttgaattcaacaagcattgtgtaaagcacctatcacaaatcagccagttcaaagtcaaatttgaagccagatgctcttttgaatgataagctccaatctttaaggggtctcgcgaagatcaccatgggtctctaggacgaccatttgcgcttacaggaagaatgac

SEQ ID NO: 3756 - DNA, 499 bp, Glycine max
  Clone ID: jC-gmfl02220057h01a1
aaacaaaagaaatcacaatctgtggcttcattatccttgggtgcaccatctcctgcggttcatccatctatgcaaccatcatcatccgcattgaagcatggacctccatcaggaactaagaccaaaaagcaaaaatcattcccttctacaggacttacaagccaaagccaggtcactaatcaggggggttcttcaggtgcctttgcaacaaaaggacctgctgaagcagcttcttatgatccctggattggaaggaaagtttggacaaggtggcctgaagacaaccacttctatgaagctgttataacggattataatgctgctgagggactacatgctttggtttatgatatgaattcagcaaatgaaacatgggagtgggttaatcttaaagagatatctccagaagatattctttgggagggtgaagatcctggaatatcccataaaggatgccagcccggtccaggtagaggattgaagaagtctatgcctcacg

SEQ ID NO: 3757 - DNA, 484 bp, Glycine max
  Clone ID: jC-gmfl02220057h01d1
atccagaaacatttattatttattgctttctaccatctctgcatctctaattgctgtaaaaacactggctctttggaaaactcagaggatgcaattcctactgattgcaaagaaattgacgcagtaattttgataataaaaaccaatctgttattgtacacccatattattgccacatttaagactagcccgtctttatatccttaatgctctcttattgccaaaatcacaatatgtaatcaagttcaagccgcaactttcttggatgtgactgaattgacaatggtagcaaactcaggaccctttaatgaagcacctccaacgagaaatccatcaatatcttcttgctttgctagctcagcactgttccctccatttacagaccctccataaataattcgcgttttagatgcaacttcatcagggacattcttttttagccaatctcgaacagctacatgtacttcctgagcttgctggggag

SEQ ID NO: 3758 - DNA, 483 bp, Glycine max
  Clone ID: jC-gmfl02220057h02a1
gagagagagagaggcacttggaatccaaaaatgagagaaatcatcagcattcacataggtcaggccgggatccaggttggcaactcctgctgggaactctactgcctggaacatggcatccagcccgatggcatgatgcccaagtgactcctccttcggtgtagcccacgacgccttcaacaccttcttcagcgaaaccggatccggcaagcacgtccctcgcgccgtcttcgtcgatctcgagcccaccgtcatcgacgaagtccgttgtggcacttaccgtcaactcttccaccccgaacaactcatctccggcaaggaagatgccgccaacaactttgccagaggccactacaccgttggcaaagagatcgtagatctgtgcttggatcgcgtccgaaagctcgcagacaactgcactggtctccagggcttcctcgtcttcaacgctgtcggcggtggcaccggttccggtctcggatc

SEQ ID NO: 3759 - DNA, 323 bp, Glycine max
  Clone ID: jC-gmfl02220057h02d1
attcttatcatgctttactttgacgtttatggaaaacaaagcgaactcgaatccagcaagcgaacaaacgagtgattacaccgggggcatatcctgcgggagaagacgattttcagaacaacgggcaatatcctgtgggacacactaagctggcatacgaggattaccagcaaggtcaaacacttgagaaattcccaagagattatcaaaaactgaaaactgtttgggatcggcaatacagaaactcatcagccgtggagtgagatttggccactagaactcccctgctgggaccattaatgcgaccacataccccgattggg

SEQ ID NO: 3760 - DNA, 482 bp, Glycine max
  Clone ID: jC-gmfl02220057h03a1
tagatgatgtgatatatgtaattgattgtggaaagcataaagagaatcgctacaatcctcagaagaaattgtctagcatggttgaagattggatttctcgagcaaatgcaacgcaacgtcgtggtagagctggacgttgtaaaacctggaatttgtttttccttgtacactcgtcatagatttgaaaagctcatgcgcccatatcaggttccggagatgcttcggatgccattagttgaattgtgtttgcagattaagttactgtctcttggatatatcaagccatttttgtcagaggcattagaacctcccaaggttgaagcaatggattcggcaatatctttactgtatgaggttggtgctcttgaaggggatgaggagttgacaccacttgggcatcatctggcaaaacttcctgtggatgtgttaattgggaagatgatgctgtatggtgcaatgtttggttgtttgtctccaattct

SEQ ID NO: 3761 - DNA, 216 bp, Glycine max
  Clone ID: jC-gmfl02220057h03d1
attcatagattggaggcatattgcattgaaaaggggaaaaaaaggaaagggccctaaataccagacatacttcactttgggagatggataaaaaacatctacaattaaatatacttacaaatgaaatacaaattattgtcccaactgaatcaagtgcacgaattaccaaaatggatacacaagaactttaaatttagagaaccaaaaacgtgacta

SEQ ID NO: 3762 - DNA, 404 bp, Glycine max
  Clone ID: jC-gmfl02220057h04a1
gaacatcgacgctgagataaagggtgaataattagcagctccttctagttccggtgtcggtgtgggtgtttgaatctggtgaaggatgtcaattgttccaatcaaccagggtgatgccaacggctccaaccccttcgcttcgtggggtcaattcgtggattttcctctccctccttccatctacggcttcttacccggcttggaattccgattcggattcggatcatccgtgaacacacgtgcggactggagggagactcccagagcgcacgtgtggaagctggcgcttaccggcttctccaacgaggacgtgctggttgagctccaagacgagagggtgctccaagtcaacgtggaaagcggctacttcgtcacgaggttcaatgttcccgacatcggatacc

SEQ ID NO: 3763 - DNA, 326 bp, Glycine max
  Clone ID: jC-gmfl02220057h04d1
tttgttttttttttttttttttttttttttataaggggctaataattatatatgatggaatagattaaataaaacaaactttgagcaaaagacatccaatataacctgaccaaaaagttgcatctaccgaacggatcactgccttaacccgagcttggaacgttgcaacataggtcatactatcccttactatattgctagatagtggatcctgcaagcattccaagcgaatactttagggaactaagttaataaactttgttacaatcaccaagaagcattgccatggcacctctagctcatgcttccatatgctcctgctctat

SEQ ID NO: 3764 - DNA, 363 bp, Glycine max
  Clone ID: jC-gmfl02220057h05a1
tcgaggcaccactaccacctttccgacttcagccgttgcaaccaccagcaaatggctgggcttcgtggcggccgtgtggattcaatgcatcttcggcaacaactacactttctcaaactactccgacgccctcaaatccctcatgcacctcactcagctacaactcaacaacctgtccgtcggtaaagacgttggcaaagcctttgggcttctcgcgggcctggccttctaccgcttacccacttgggccattctcctcataggctccgtcgaaggcctaattggctacggaacccaatggctcgtagctcgccaaagaattcaacccctcccctactggcatatgtgtgcgtttctgtgcat

SEQ ID NO: 3765 - DNA, 278 bp, Glycine max
  Clone ID: jC-gmfl02220057h05d1
tttcgttttttttttttgattttttttttttttataagggaacttagctacatcaagggattaagatatatgcataacctagttgaacctggatgctatgtaattaagagaaacctgaactgcgctatgtcacatgctatatgtgacgtcccagaattaccactaatttacctcgataactttcaaactacgcaaatgttaatgacggaacggaaactcttatgataggcccaacaacacactggctggtccactgcggaggcgataccatagagctt

SEQ ID NO: 3766 - DNA, 481 bp, Glycine max
  Clone ID: jC-gmfl02220057h06a1
cgcaagcaaaaagaaagaatcccaggcgaggagaaagatggaggggaaggagcaggatgtgtcgttgggagcgaacaagttccccgagagacagccgattgggacggcggcgcagagccaagacgacggcaaggactaccaggagccggcgccggcgccgctggttgacccgacggagtttacgtcatggtcgttttacagagcagggatagcagagtttgcggccacttttctgtttctctacatcaccgtcttaaccgttatgggagtcgccggggctaagtctaagtgtagtaccgttgggattcaaggaatcgcttgggccttcggtggcatgatcttcgccctcgtttactgcaccgctggcatctcagggggacacataaacccggcggtgacatttgggctgtttttggcgaggaagttgtcgttgcccagggcgattttctacatcgtgatgcaatgcttgggtgctatttgt

SEQ ID NO: 3767 - DNA, 533 bp, Glycine max
  Clone ID: jC-gmfl02220057h06d1
gattccacgagctcactagctcagtggtcgcccttttttttttttttttttttttataataaagtttttataataatatcaattgaccaaattagcagaaataatccaccgcatacaggtggctaagggcatgcttagttaaccatttaaaaatacttttggtacacccaagacaccaagcctcttggaaacaagattctaggaccctttaaatccaagccatgtttagcgggtaatctgccacaaaattagtctccagcaaactcttgcaccaataccagagtaacaatgagagggaggacaacttacattgaggatactgcgagctttcaacaaataaactctacaaaatgcacagttccaaagtgaggactgatgtaattcctatgctgcgacaatgaatatggcttcatttatgggcatcgcatatatatttgcaactgttaattttgaacagaaaaattctaagccaattatatcctcatttcctcatggatgcgcttataaactattagatgtcgttaattctttga

SEQ ID NO: 3768 - DNA, 412 bp, Glycine max
  Clone ID: jC-gmfl02220057h07a1
agtgcaactgcgaatatctgtaccgggcccccccatgacgcgtacgtaatctgctcgagcccccaattcttccccctacacccacccagcatatctctctattcctatttattagcacccctcacattaccttgtgtcaccaactactttgactcctttaccataccattacaataattatcaaacctaaccagtaaaaatggcgaccgtggaggaaatccgcagcgctcagcgttcccatggacccgccaccatcttggccttcagcaccgtcacgccgtacaactgcgtatcccaagccgattaccctgactactactttcgcattaccaacagcgaacacatgactgatctaaagagaagttcaagcgcatgtgtgaaaagtccatgactaagaagcgaaacatgcacc

SEQ ID NO: 3769 - DNA, 338 bp, Glycine max
  Clone ID: jC-gmfl02220057h07d1
tgtcgttctttttttatgacatttttttaaaccagattaagtgactacttgtacaaagtatagttacttttaaggaaacagtaccccaaagtctatgattacgtacacaatgtaaaagggtcacaaagtagaagttttatgtgcatacaatacagaacactataatacataattttacatcttcaaagccacaaacctgggctgacggttcactaaaactttcacacagcctgcttgtgacttattcctaagccctattaccacatggatgttcaacaattctcagtgcataatcactgcagactcttgcacaagaggatgagtaacatgcacaaaat

SEQ ID NO: 3770 - DNA, 379 bp, Glycine max
  Clone ID: jC-gmfl02220057h08a1
tggaggcgaaatccgttcccctatctgcttttggagttgttgctaaagagtgatggactcaccgtccagcaatcaccacgcggtcgacggagacgccaacgacgtcgatagatccttttcccaccgcgacgacgatgaagacggcaagccccaaccgatcaccggggactgcgcctgtcctggaaagatattcatagggggcttagcgagagaaacgacgattgcgcaattcatgaagcactttggtacatacggctagataacggattgcgtcgtcatgaaagaccggaagaccggtcagccgcgtggcttcggcttcataacttacgctgatccctgcgaggctgatacagtgattgaggacactcacattatcaat

SEQ ID NO: 3771 - DNA, 389 bp, Glycine max
  Clone ID: jC-gmfl02220057h08d1
tagctcagtggtcgccctttttttttttttttatgacatttttctaaaccagataaagttactacttgctcaaagaaaagaaactatgatggatacagtacccgaaagtatatgattacgtacacattgtataagggtcacaaattgaagttataggtgcatactgtacaaaacacggtaatacatattatgacatcttcaaagccacgaacctgggctgggggctcactaaaactttcacacaacctgcttgtgacttattcctaagccctattaccacaaggatgttcaacaattctcagacgcttcatcactaaaggcctcttgcacaagacgatgagcatcatgcacagaatgctcaggttcactcatcacttctttccaacact

SEQ ID NO: 3772 - DNA, 525 bp, Glycine max
  Clone ID: jC-gmfl02220057h09a1
aattcacacccaaagagaaaagaaaaaaaaaacaacagtggtacgtgatgccaccgaagttcgatccctcgcaggtggtggacgtgttcgtccgagtcaccggcggcgaggtcggcgcggcgagttctctcgccccgaagatcggtcccttgggactctccccaaagaagatcggagaggatattgcgaaggaaaccgcgaaggactggaagggcctccgcgtgacggtgaagctaaccgtgcagaaccggcaggcgaaagtgacggtggtgccatccgccgtcgcgctggtcatcaaggcgctgaaggaacccgaaagggacaggaagaagacgaagaacatcaagcacaatgggaacatctccctcgacgacgtggttgagatcgctagggtgatgagcccgcgctccatggcgaaggatcttagtgggaccatcaaggagattctcgggacttgtgtttcggttgggtgcaccgtggatgggaagggaccccaggatctgcagcaggaaatttctgatggag

SEQ ID NO: 3773 - DNA, 338 bp, Glycine max
  Clone ID: jC-gmfl02220057h10a1
agtcctgaaacttgggtgcgattccttcactcacaacaacaacacatcactatggctcttctgagtcgagcctcttcacgcttccctcagctggtttcccctcaaagggtagtttcactccacacaacgctcccatctctgaacgcatacccatccacagccacgcctacaccatatgccccgccaccgcctgcgtccgcttactctcccgccggcgtttacaaggcggcggagttcgagatctcgcaggcggacgatctgattaactgggcccttcgcggcttcatctggcccatgaccttcggcctcgcctgctgcgccgtcgaaatgatgcacac

SEQ ID NO: 3774 - DNA, 142 bp, Glycine max
  Clone ID: jC-gmfl02220057h10d1
gacaaattacaaagaatatccactttaaaactaaaagtgggcccgaagacccgaaaaagcggctgaaaataagacttacagaaacggggcaaaagcttggaacggacacaatctccactgaacacgagtgcatctgagcaag

SEQ ID NO: 3775 - DNA, 238 bp, Glycine max
  Clone ID: jC-gmfl02220057h11a1
gtttagttatctactcttttctgcatgtttgttctctcaacgactcctccgcgaaagagtattattcaatattctgggtgggtcgaatcccggggttgaagcgttgcagacatcacggctgttctcagagtgtctcgctccctcattcatgtccgatctgcacgactgacgacggtgagttgcgtgactgaccgtaacccttggccgtacggcgggcgtggtgctttgccttctgaat

SEQ ID NO: 3776 - DNA, 525 bp, Glycine max
  Clone ID: jC-gmfl02220057h12a1
cgcccactctgccctagcttcaatccctctagcttatttcttagactgtgggggcaccaaagaggtaacggtagacaatctcacatacattcctgatgaaagttacatcaaggtgggcaaaaccaccaccatcaacaagccagacttgttgccaatactctcaacattgcgatactttcccgacacgtcggctaaaaaatattgttattcattgcccgtcattaaaggcagcaaataccttgtgaagacaatgtactactatggaggttttgatggaaggaataagcagcctccggtgtttgatcaaatcattgaagggacaagatggagtgttgtgaacaccacagacgattatgccaaagtcttagttcttactttgatattgtggtggtgccatcggagaagactttgagtgtgtgcttggcaaggaatgcacacacgggtggcgcaagccccttcttttcggcctggaggtgaagaggttggatgcttctttttataatcctaccgactttaacaaatatg

SEQ ID NO: 3777 - DNA, 427 bp, Glycine max
  Clone ID: jC-gmfl02220058a01a1
tgttaaccggccaagattctccgtaactactacgagctatgacgtctcatgcagcctactataagctgggcgtcctgctcgagttgagagaaagatgggcagacaggaacctgaaactatgaacatttgcatcttgaaattcttgattgacggtcacatgatgcctaccgaggccatggaccccaaaatacccacaacggtactgaaggtgactgttattactacagtactttaacatgacagtgatctacagcgccattggagcatatacatctaacggacacgaccttcacgttcaagccctagggaatacttttacttaggctgggacacatgatggctgtgattattccgacactgcacattttctgaaattgttgaatatccaagagcctggctactgtataactccacattcttgtgaacc

SEQ ID NO: 3778 - DNA, 465 bp, Glycine max
  Clone ID: jC-gmfl02220058a01d1
cattggttcaagaacatcctaaagaaacactagtaatatgtgtttatggaaattctggtggtttaggcaccagtttatgtgactatgtgtctatcttatgtttaaattaaaaacccataccggtttaggatcatacttcacacataatatcagtttgactttgtcaacttaaatagatatactacagggaacccccattccagtcacacctggctttgagaaaggtttcaaaagctcgtacggtacaatgccagctccatttctgttcttcaactttgtgtttccattcctctcatcaatcagtgtttctagtttcttcagtctctctctaaatctttcaaaggaagcctttatgacaggatcttcaccccatgatggttccatcttttctcctatgtattcctcatctggtgaatgagttgagagtatggccaagacagccatgactctagttgcttgaaattg

SEQ ID NO: 3779 - DNA, 425 bp, Glycine max
  Clone ID: jC-gmfl02220058a02a1
tggtcgtgcggatactgcttcagccggcttagcttaagcttactgatcagcttgacacgatgcacatctataaccagatgcttactcgagcaatggcgtacacaagttataccgatgacaaatagctgccagagacagactacagatcgctggaagggatagatcggcttgtagaggcacgcgtgcacgacctgagttgtctgattcattaggaagcactgacttggaagctttagagattgaagagggctctgctatgagtcacgggtctgaaaccccatgttcaagggccagcacttctgattccgagagtcatggatcttttgctggtgcacctaataccaataagcaatggcggcgtttctttaaactgctcaggacaggatcacaaaagcctttccaagcgtttcacccgcttaaaaatg

SEQ ID NO: 3780 - DNA, 339 bp, Glycine max
  Clone ID: jC-gmfl02220058a02d1
ggagatcattctttgatcttagacagggagatttcacttgagaaaaattcctgaaaaaaagaaacattctaaccaactgaaaacaaaaacaccgagcagacaatggagggagctacctacattatcagacatgacggtcatcaccggacatagaaagccaaaaaaaagaaacagggcggtggaaaaaatcggaacaggattagtggcatcacggccgcagtccctaaagcacacaacaggggaatcttcagaagggctagttgaagtaaggctacacgcacctacaaccatggcatcacagccagaaccagcaccatcagctaaagagcagagcaagga

SEQ ID NO: 3781 - DNA, 321 bp, Glycine max
  Clone ID: jC-gmfl02220058a03a1
aatgcaaagagatggcctatttttggcctttgaagcttggaacttctgcaatgaagttggtcaagaagctccttacatgggtagtccaagagctgctgatcgttttgatctttcaggttctctgactcacaaggtcacagaagctgataacagacttggggtgggggactcatttactggttctatccagaaaatatcaacaccacagacctttatgcaattgaaaaggaatagtattggggttctatatagtgaagttgctgacaccccatgcccctggccgttttggatggtgatgctgaaccatggccactattacac

SEQ ID NO: 3782 - DNA, 286 bp, Glycine max
  Clone ID: jC-gmfl02220058a04a1
gtgacaaccagcttgttccatattatgctgtctttcttggagccctttcgccttgggcagccgatgcagaagagaaactgagagttgccgctaccgaaaccaacgaagagctacgtgcccttaagggagatccccccgatgcgaatgatgtccgagcagtcctgtccattggcaggcggcaactatctcgtgagttggaggctactccaatcgaagctttgcactggatatccccccttcctaaacagtggtcgcactgtgggaaggcaacaactgaatgacatat

SEQ ID NO: 3783 - DNA, 279 bp, Glycine max
  Clone ID: jC-gmfl02220058a05a1
taggaggggggcggcgactgtgtcgcgcgctttagaggatgaaagattataagggggatctattctacccggtaacggcgatggactcttcctcctacgaatactatcgcagtgcttcctataccgacgccgatattgtgttgactgtgaatgacagtcatatcgccgacaggatccttcgacccgagatcatgggggacctcggcacggccacacccgattactacggttgccccactatcgacgactgctactaccaccgcatgaggaggcgcgagg

SEQ ID NO: 3784 - DNA, 293 bp, Glycine max
  unsure (1)..(293): unsure at all n locations
  Clone ID: jC-gmfl02220058a06a1
gccaattcttactcctccacccacccagcatatatggatatttctataaattagcacccctcacattaccttgtgtcaacaactactttgactcctttaccataccattactaattatacatcaaacnctaaccaacaaaaagatggtgaccggaggaggataatacggatacggtcagcgataccatggacccaccaacatcttggccttaggaaccgccacgccattgaactgtgtttagcaagccgaataccgtgactactactatcggattaccaaaaacgaacacatg

SEQ ID NO: 3785 - DNA, 406 bp, Glycine max
  Clone ID: jC-gmfl02220058a07a1
ctcattaattgcaagaatggcacttcgttgcttggtgatgtccctttctgttctcttcactcttggtcttgcgagagaaagccatgccagagacgaagatttttggcatgctgtttggccaaacactcccattccaagttcattgcgagatcttctaaagcctggccctgcaagtgttgaaatcgatgatcaccctatgcaaattgaagaaacacagtacccgaaaaccttcttgtataaagaagaccttcatccaggcaaaacaatgaaagtacaattcagcaagcctgcctttcaacaaccatggggtgttggtacatggttaaaggaaattaaagacactactaaagaaggatatagttctgaagagctatgcatcaagaaagacgccattgagggagaagag

SEQ ID NO: 3786 - DNA, 399 bp, Glycine max
  Clone ID: jC-gmfl02220058a08a1
agaaacacttcgagtcagggagaagggaattggaacttatacggcttcttgaggatggcccaggaaccttgatccaaatggtctacagaagaccacgatcatatgccagagggcgagatgcgcggtgtatctctatgtgaggggaagatggggaagactctggtgagaagctatgggccctaacaactactcctgactctgattgaagagctcgcaccgcccgtgaatgtgatgctgacaattcaccgctctacttatgcaaagggggagcataccaactctgtaattgcgtcttctttcggagtggcagcttcagctctatgtcctgatgtgaaagacatcactgtggatgacgacctcaagcagatacgtctaaggtgcagaggctagcttataagc

SEQ ID NO: 3787 - DNA, 416 bp, Glycine max
  Clone ID: jC-gmfl02220058a09a1
gtcacactggtgaaaacttttgctgtgataagaggatattggaacttactcaatcaattctgtggatgatccacaaaccttgaacagaattgtctacattagaccaccaactaataccttgtcgtttaacgagcattggtgctctctgggagggaaagactggacaaacatctgcaagaagctatggtccagaagaacgactcctgaagcaaattggatagtccgcaccacccgtgaatgagatcctgtcaattaacctctcttgttatgtgaagggggatcattctaactttgagattgaagcctgttattgcgtggaagcgctgactatatatcgtgatgcaaaatacatgactggggatgcgctccctaatcagtgcgtctaacgtgcaaagcctacctgatcggtttgatta

SEQ ID NO: 3788 - DNA, 301 bp, Glycine max
  Clone ID: jC-gmfl02220058a10a1
gatttacatgagacacctttcactacaactgttgctctacactatgcaaccttttttcctctgcattgggacccctgccagctacccctgtctataaatctgactttgactggcccatggagccagctagagcctacagatggaatctgacagcacatgctgctaggcctaacccacaatggtcattccattataggatgactactactgcgtcagtagggatggtggccacgacagcacctttgatgaatgggaaggtcccatctgtctgtaacagtgactcctatgctcaccctgacac

SEQ ID NO: 3789 - DNA, 489 bp, Glycine max
  Clone ID: jC-gmfl02220058a11a1
gatttacagagacacctctcactacaactgctgtactacactatgcaactctttttcctctgcattgggacccgtgcctgctccccctgttgataaatatgactttgactggtccatgaagcaagctataaccctacagatggaatctgacagcaaatgctgctaggcctaacccacaagggtcattccattatgggaagattactcctacaaaagtaattaagttggccaattcagcacctttgatcaatggaaagctccgttatgctgttaacagtgtctcctatgttaaccctgacacccctctcaagcttgctgattacttcaacattcccggaatcttcagtgtgaatttactccaaaactctccctcaaatggtccaggatacataggcacctcagtgttgcaaacttctctccatgattttattgaggttattttccagaacaacgaaaacaccattgcatcttggcatcttgatgggtatg

SEQ ID NO: 3790 - DNA, 440 bp, Glycine max
  Clone ID: jC-gmfl02220058b01a1
aattagaggaattagatgataacctcaaataaatgcacaaagatataccagcccaagtggatgcctatgacacatcacatgtgaggttgaaccactatacttctaaatatcatgaagagggtgtcacaaagcagaggtcactgaacgataattagacgtcacatactggaggcattgtgagaaagcgctttgatatgattgatagtgtggctacgttgcgtgaacagaacatgactatgactcatgatgaagaagagctcggatgaatcctagatactatggatcacgtcattaccgatctgatggacgaaggcatacaactcaagggaatacgagaatactttagcttgatcacgactgaatggcatgagcttacttatgattcacaggtatgagcggccatattgggagctgcgcaatgagttgtagatgggccattg

SEQ ID NO: 3791 - DNA, 449 bp, Glycine max
  Clone ID: jC-gmfl02220058b01d1
agaaagtatcatgcttgattactgattgatggacagtctaaataacaatgtaaaaccatcgtagttcctctgtacatgaaaatagacggatcataacaatcatgcccaaatcacttctaaaaattcatccattcaggattacacgagaaggacacaggcttatccatgtcattggatacaaacttagtagccacgaattgtattgatgatggtgttgtgccacgggtcagagaggtgctgcaataggttctcaaatggtcctttgcctgtcacgttgtgttgaactatgaatcccaagaatgccaacatagccaatctcccattggcaagttccttctccttggcctccaaagtaggtgcaaagttcaaggggttaaacacactaccagggtatccacactcatgttggggcaagctgtattgcttgaagatggggtcttggttgacag

SEQ ID NO: 3792 - DNA, 254 bp, Glycine max
  Clone ID: jC-gmfl02220058b02a1
ctcgagccgaatcggctcgagcattcttataggctaattaacatacactctcttccaaagttgagtactttgccaaaaaaaaaaaaaagttttccctttgagaaagaaaacccaaagacagtcttttgatcattttgagcagttgcattccttgatttcttccattttgggtcccctcaaaagtagtttcaaaagggttcctcttcctccacagatatcatggcagatcataccccgggttcaggaacccgttt

SEQ ID NO: 3793 - DNA, 404 bp, Glycine max
  Clone ID: jC-gmfl02220058b02d1
attacgaggtttctttttttaacaaattccttaagtaacatagtatctcttcatgaatgggtccatgctgaaataatcatggaagaacatctgaagaggtatagaagagtctgtcaaatcttcaggaacaagtttcaatgagctttttagccttgaaaggacccaacattggatggaaatatacaaatgtaatcaacatgtgtagacatctcaaaggaaaggtatcagggcagaactaagacccttgaaacaagaaatctgctgaccacacagttcttcatttcctttttcctgaaccaagtgacaggagttcaaagctcctgagtgtatcatcacgaccacctcttgttgctgaagcccgtgataaagatgttccggattcaaaaccaggttgaagtctctga

SEQ ID NO: 3794 - DNA, 511 bp, Glycine max
  unsure (1)..(511): unsure at all n locations
  Clone ID: jC-gmfl02220058b03a1
cgaaacgacagcatgtggtggccgttcagcagaaaagagaaagagggttctggattttcatcttcttccactgccgaggaagttactgaaggaatcgatggcactgccctcactgctattgttacaggggcatctagtggtattggtgctgagactacccgtgttcttgctatgcgtggtgtccatgtaattatgggggtgaaaaatatgaatgctgcaaaaaatataaaagaaacaatacttaaagggattccctcagctaaagttgatgctatggagttagaccttagttcaatgacatctgctcgaaaatttgcatcagagttcatttcttctagtcttccactaaacattttgataaacaatgcaggaatttgtggaacccctttcatgctgtctgaagataacatcgaactacaatttgccacaaatcatataggtcattttcttttaacagatctgttattggatactatgaagaacnacacacatgaaagtaagaaacagggaa

SEQ ID NO: 3795 - DNA, 257 bp, Glycine max
  Clone ID: jC-gmfl02220058b04a1
agaactgcaaatatacactgcaatgtatgccatgaaaggctccgaattctggtaatgcttttccagaatgcagaaagattgtttattgttacgtccattgtacaccttggacactgcgggctcatggaggggtgtttataaacactagtaacctggggtgcccaaaaacatctgaacgattactggcatcagggaccctgactcacaagggcacagaaactgaacacagaccttgggtgggggactcatttactggt

SEQ ID NO: 3796 - DNA, 396 bp, Glycine max
  Clone ID: jC-gmfl02220058b05a1
atcttcttcttcttcttcactcagtcagatccaactcctcagataacacaagaccaaacccgctttttctgcatttctagactagacgttctaccggagaagcgaccttagaaattcattatggtggcaacagctgctacttcatcatttttgcctgttacttcaccctcgccggactctggtggagcaggcagcaaacttggtggtgggcctgcaaaccttggaggactaaaatccaaatctgcgtcttctggtggcttgaaggcaaaggcgcatgccccttcgaaaattaatggaaccacagttgttacatctaaagaaagcttcacgcatgatgatgatctacctctgcctccccccagaacttttatcaaccagttgcctgactggagcatg

SEQ ID NO: 3797 - DNA, 410 bp, Glycine max
  Clone ID: jC-gmfl02220058b06a1
gtacctagcaacagtagcagcggatataccgagacggagatagaaaaaatattacgcaggaatcgaattcttaattttatcagatgatgcgacttcacaaactgtatcatcgcttcactcttgtccccctttcgctcccttctaatccctctcttcttcctctcgctcctccgttgcgcctcacgctccgtcaccgaacctgtgtgaacttcgcttccatggcttcctcgcggctgcgcaatttatcacctctcgctgctgcgcccactgaagacgccgacgctgcctccatttcttgctctcccaacgccgttgcttccgttgactacgatgatgagtcaactgtaggagtaaaggatcgcgttcctccatctgtgatcagtgatcttgttgatgctccacctgtacct

SEQ ID NO: 3798 - DNA, 423 bp, Glycine max
  Clone ID: jC-gmfl02220058b07a1
ccaaacccttcttctctcttcccctgaaacatccctcctcttccaacaaaatcagtgaggatctgagaagaagcattggccagaggtggtcagctttttccttctacgcatgactgcaaggggcagcgaccccataaggggtcgtctttggccacaaatggccttggcattggccattgctttcatttcttccactgtggtttccgtcaatgctgatggatatccttactattctcctccaccaccttatgaatacaagtcaccaccttctcctccttacgtgtacaagtgtccaccacctccaccatatgagcacaaggatccaccatactattacaactcaccaccaccttcctattactataaatgtactacaccaccatacgcctctccttcttccccctactactaccactccccacc

SEQ ID NO: 3799 - DNA, 235 bp, Glycine max
  Clone ID: jC-gmfl02220058b08a1
agacatgcccgtcgaataccactgctaatgctcgcgcatcgcacgcgtccgtaatctggtcatgcctttctagcgaaaaatggactgctccatctactggctggcgcttcgaatggcgagaggcataatttcttggtaacgataaccacatggttcaactgtaacgcacacatgtggtcggtactccttgttgagcgtggccctggtcttggtttagagtgtcaccatccaccta

SEQ ID NO: 3800 - DNA, 527 bp, Glycine max
  Clone ID: jC-gmfl02220058b09a1
ctgctcagagcctcattaagtttttctctctttcacttatttattgactctccataagcccttcaaacctctctctattcctctctactagtcaccttctcccttccattcactccacttcttaacacccccaaacagaacaacggcagagcaagcagccagaaaaatggtgttgctgtccaaagcaacaacagaacaatactcctacatcaagaactacatgccaactgcattctcctcaacaattcccatagtggacctctccaaacccgatgcaaagaccctcatagtgaaggcttgtgaggagtttggattcttcaaagtcatcaaccatgggtgtgcccattgaagctatatcccaattggaatccgaagccttcaagttcttctctatgccactcaatgagaaggaaaaagcagggcctcccaaaccatctgggtgtggtagcaagaaaattggacacactggggatgttggatgggttgagtaccttcttctcacaccaatcaagacacaacttctcttt

SEQ ID NO: 3801 - DNA, 477 bp, Glycine max
  unsure (1)..(477): unsure at all n locations
  Clone ID: jC-gmfl02220058b10a1
acaacctcttgtttctcttcttcttcctcttcttagcctccgccgccgccagcgtccccgcccacaacatcacccgcatgcttgccaaacaccccggcttctccacctataaccactatctctccctcacccacctngccgaagagatcaaccgccgacagaccatcaccgtcctggccctcgacaatgccgccatgtgctccctcctggacaagcacctctccctccccaccatcaaaaacgtcctctccctccacgtgctcgtcgactacttcggggccaaaaagctccaccagatcaacaacagcaccaccctggtgtgctccatgtaccaggccaccggctcagactccggcaccgccggctacgtcaacatcaccaacctcaaggccggccaggtcggcttcgacgacgaagacaacgacggctccctccactccttctacgtcaaatacgtccaggaaatgccctactaca

SEQ ID NO: 3802 - DNA, 359 bp, Glycine max
  Clone ID: jC-gmfl02220058c01a1
aaaccaacaaagccataagaaagaatggatgggatgcttatgagcatatctacacctaaagggacagcctcaaaactgacaccatatgggattatgttaccgatgctgtacctcacgcgttaatgctctgtcacaggcaactgacgaactcccaacccaaagtaggccacgatactcactggcttatctactctcactcccatggctctaatacacatcatcactctacccataatatcacatggtgatcctgaaactccactacattcacgctgcctcttacgacacaacgatggaacaggtttgacacgcaaggttccacgacttagcctagaatgtcataggcgaaatcgaactct

SEQ ID NO: 3803 - DNA, 494 bp, Glycine max
  Clone ID: jC-gmfl02220058c01d1
aatggcggaacaatacaacattttttttacacagcaaagctatggtcaaacaggaagtttggtatcttttgctttccacgagaatttgatatcaaatattttaatgaacggcgtgtaaccaaaacagagaaaacagagcactctttttaataaacaaacacagctttagttcaatgaaaaacttttccagactcttgatgatgatggatggatgttgcgggtgtcgtgctggtatactttcttttactaatcaacaagtttgctgcctttgacatccactacaaacctgtatctcacatcgttcttctccaacctttcaaaggctttgttaatgtaatccatgtttaccacttcaatcatcgaactcagacccttctctttccagaactccaacatctcctctgtctccttcatgctcccaataaagcttcccgtgattgacctcctccctagcatgaccatggggctaacaaattgaagaggggtgttgatga

SEQ ID NO: 3804 - DNA, 213 bp, Glycine max
  Clone ID: jC-gmfl02220058c02a1
agctcggaattcggctcgagggaccaacaattccatctgttgtaatggcttatccttatgatcataatactggttatggttcaccagcagagcagcttgagtttgggactttgggaccaatggggttctcaggtgtcaatgagctgtcacaggcgaatgagggaactcaatctactggagcacatgaagatcagaggttatgtggtggtcaca

SEQ ID NO: 3805 - DNA, 396 bp, Glycine max
  Clone ID: jC-gmfl02220058c02d1
ggaaaggatccataggatttgccccttaggacattcattcccagttctatattgatcttagaaattttgcttcaacgccatgaaattattggaaaaaagagtctccctttcctttctcacctttctggtatgcataatcccctataatgactaaaaaatttaacttattctatgagaacatagtatgcctaatcagttgtccaaggatcgctctctgcaatgacttcagaaggttcataaacttctggctctgaactttcttcacttgtgcttgaatcagcagcttcaacagaagcatctgcctactatgcttctgatctaccccatcttcctcccaaggccaatgccatcatttcgtaaatcttatttcctaactcagcagggctgtcaggagaa

SEQ ID NO: 3806 - DNA, 461 bp, Glycine max
  Clone ID: jC-gmfl02220058c03a1
cgaaacgacagcatgtggtggccgttcagcagaaaagagaaagagggttctggattttcatcttcttccactgccgaggaagttactgaaggaatcgatggcactgccctcactgctattgttacaggggcatctagtggtattggtgctgagactacccgtgttcttgctatgcgtggtgtccatgtaattatgggggtgaaaaatatgaatgctgcaaaaaatataaaagaaacaatacttaaagggattccctcagctaaagttgatgctatggagttagaccttagttcaatgacatctgttcgaaaatttgcatcagagttcatttcttctagtcttccactaaacattttgataaacaatgcaggaatttttggaacccctttcatgctgtctgaagataacatcgaactacaatttgccacaaatcatataggtcattttctttaacaaatctg

SEQ ID NO: 3807 - DNA, 483 bp, Glycine max
  Clone ID: jC-gmfl02220058c04a1
ctcacactcatcatggaccgttttccgattttctttctcgtgagcaccctcattagggtcgccggcggtgcccgtcacgatattctccggttacccttcgaagtttgcatggactgtaaagcacctgctaatgccgatcaaaacgatgagggcaccacgagggccgctttagttgccggttccaatggctactggaattacaggcaccagtgtgaaggccgtcatgcatatcaactactgaggaaaggtggtgagaaagaggaaaatattgatggcctatagcggaggacgttgctagcaatgaggaggacccacggcctgtagtctctattaacagtccacacggaaatgatgttcacaagggagttcctaaggattacgttggtgaagatgttactgctgacaactcttttgctgctatacttggaaataagtcagctcttactggaggcaaggggaaggttgtggatagtgtgccccaat

SEQ ID NO: 3808 - DNA, 499 bp, Glycine max
  unsure (1)..(499): unsure at all n locations
  Clone ID: jC-gmfl02220058c05a1
atcttcttcttcttcttcactcagtcagatccaactcctcagataacacaagaccaaacccgctttttctgcatttctagactagacgttctaccggagaagcgaccttagaaattcattatggtggcaacagctgctacttcatcatttttccctgttacttcaccctcgccggactctggtggagcaggcagcaaacttggtggtgggcctgcaaaccttggaggactaaaatccaaatctgcgtcttctggtggcttgaaggcaaaggcgcaagccccttcgaaaattaatggaaccacagttgttacatctaaagaaagcttcaagcatgatgatgatctaccttcgcctccccccagaacttttatcaaccagttgcctgattggagcatgcttcttgctgctatcacaacattnttcttggccgctgaaaagcagtggatgatgcttgattggaagccacggcgacctgacatgcttattgaccccttgggat

SEQ ID NO: 3809 - DNA, 506 bp, Glycine max
  Clone ID: jC-gmfl02220058c06a1
ggaatttggcaaaaagtagccatcgccccaacgatcccatttcccttgacttctctacgtgaagatccttgtgtcgcatagagctagttaaaatgtctgagggaaatgcagggaaaggaaagagaatcgccatcattggcgtctcagccttattgttggtggctatggttgtggcaatcacagttggggtcaatctcaatgagaatggttccaacaatgatacagaggacaacaagaaaaatcatgttgtttcttctataaaagccgtccaaaccctttgtcatcccacaaattataagaaagaatgcgaggaaagccttatagctggggctggaaataccacagatccaaaagaacttatcaaaattttcttcaacatcaccattacaaaaattggtgataaactcaaagaaactaatattttgcatgaggttgaggaggaacccagagccaagatggcacttgaaacatgcaagcaactcatggatctatctattggggaatta

SEQ ID NO: 3810 - DNA, 427 bp, Glycine max
  Clone ID: jC-gmfl02220058c07a1
gtggagaccagcttgttccatattatgctgtcattcttggagcccttttgccttgtatagccgatgcagaagagaaacttagagttgttgctcgtgaaaccaatgaagagctacgtgcctctaaggcagatccacctgaagcgcgagatgtaggagcactcctgtccattgccaggaggcaattatctagtgaattggaggctactctaatcgaagctttgcactggatatccacccttttaaacaattatcggactgaggtttggcagtaacagaatgacatatttggcactctgctcatggcactttcagatccatctgatgaggttgctcttggagttcttgatgttcatgcatgcattgcttacgactctcagcactttcgggcacgtgttgacttgatggtgcacagtttccgggtagacaa

SEQ ID NO: 3811 - DNA, 380 bp, Glycine max
  Clone ID: jC-gmfl02220058c08a1
gacaaaaaaagtggatgtatataaagcctatcacatgactggtggtgagggcctaactcgcttatgtctataactctctactacagaccatggaccttgcataagctacactcattatcacccacacagaggacgaccgctgccctggcacccctacaaagggcgtaggcgtcgatagctagggctgatcctttgtaccacacaccgaactacatgtcaactgtatttttctggccattcacggtagtggacctatgaatacgcgacgactcacaatgatagggagtgctgcgatgagcttgcaacatatgacgtcaattaccatggcgaggccattgcagctatacaacaattggtatggcaagacatgaaaaacgggt

SEQ ID NO: 3812 - DNA, 458 bp, Glycine max
  Clone ID: jC-gmfl02220058c09a1
ctgctcagagcctcattaagtttttctctctttcacttatttattgactctccataagcccttcaaacctctctctattcctctctactagtcaccttctcccttccattcactccacttcttaacacccccaaacagaacaacggcagagcaagcagccagaaaaatggtgttgctgtccaaagcaacaacagaacaatactcctacatcaagaactacatgccaactgcattctcctcaacaattcccatagtggacctctccaaacccgatgcaaagaccctcatagtgaaggcttgtgaggagtttggattcttcaaagtcatcaaccatggtgttcccattgaagctatatcccaattggaatccgaagccttcaagttcttctctatgccactcaatgagaaggaaaaagcagggccctccaaaccatttgggtatggtagcaagaaaattg

SEQ ID NO: 3813 - DNA, 448 bp, Glycine max
  Clone ID: jC-gmfl02220058c10a1
ggtgacacacacctactacaattgataaagtcctttcttgtcatagcaaaaatgaagcttgccttggccaccctactgaaatggtctctacttctaagctcctctttcttggagccagtcatcccctatgaagactagctttattgcagcaacaagtgatcagacagatgctcatcggccggggctaaagatccgtatctgaggtactgtggaatatgctgtgctgagtgcaaatgtgctccttactgggacctatgggaacaagcaccactgagcttgctacagggacatgctcaacaagaagggcaagcccaaatgcccatgaagtcttgaactcaaagaccaagtcacacacagacttatgagaataacactagtgtgatgcgtttacaactacatcgtgaactcccacacataatgtgggatggatatacgctagatctgcacg

SEQ ID NO: 3814 - DNA, 441 bp, Glycine max
  Clone ID: jC-gmfl02220058d01a1
ggaccaacaatgccatctgttgtaatgttttatccttatgatcataatactggttatggttcaccagcagagcagcttgagtttgggactttgggaccaatggggttctcaggtgtcaatgagctgtcacaggcaaatgagggaacttaaatctactggagcacatgaagatcaaaggtttcgtggtggtcacagtcaacgatcttccccagatcaaccctcctcacctcatgtctcaaggggtccctgattctgcggtcaggtcaagtggccaggaggaattcttgaaagaggaggattgatcctcttcattctaggactgggcagggcatgtaaccggggaatactatctgtccatttcatggcattattggtctttaaaaagaaaatgaatgtagcgtcctttgctgattgtgcccaggctcttacatgtacacttac

SEQ ID NO: 3815 - DNA, 310 bp, Glycine max
  Clone ID: jC-gmfl02220058d01d1
aaaacccatacaaaaaaacgtttaatgaaatacaaacatttataacaaggggaaaccaaaatttccccaggggaaaatttaacccttaaaaacatcttaaaaaacaaccagagaacggaatttattattgctaaaagtaaaggcaagcgttttgaaccattatgcccaaaacacccaaaaacaggattaaggggggccagttttacaagcttttttcaaaggaaggcgttctaaggggtgataaaagcaaatccgttccctacgggcccttaggggtaaagccccatcaaaaggtttgggactaaaacgg

SEQ ID NO: 3816 - DNA, 260 bp, Glycine max
  Clone ID: jC-gmfl02220058d02a1
ggaccaacaatgccatctgtttttatgttttatccttatgatcataatactggttagggctcaccagcagagcagctcgagtttgggactttgggaccaatggggtttctaggtgtcaatgagctgtcaccagcaattgagggaacctaatctactggagcacatgaagatcaaaggtttcgtggtggtcacagtcaacgatcttccccagatcaacccttctcaccttatgtctcatggggtccctgattctgcggtca

SEQ ID NO: 3817 - DNA, 513 bp, Glycine max
  unsure (1)..(513): unsure at all n locations
  Clone ID: jC-gmfl02220058d03a1
gcagcatgatggtggaagaataagaccagcagaagcttccagatctggtgaaggaactagtccaccgcctcctctcccaaaacctccccccaaattcccctcccctaaaccctaactcccccgaattccgcaactccctccgctacgccctccgcatcctctccagccgcctcaccccctccgtcgcccccgacgccgccgccatcgccgactccatcaagcgccgcctcgctacccacggccactcctccgaagccctctccttcgccgacctcttctccaaattctcctccaaagcccaaagcgtcaacaacaaattcgccgtcatctacctcctcaaaatcgtctccgaagatcgccacaccaccaccgcaaccaccacccctctcctccccaacctcagtttctccgaacctacctccaacaaaaaaccctggaacgacaacggcgccctcctcatctncaggaccccgagaaccgccgcgacgtcgcgtttcgcgagttcgtcgatct

SEQ ID NO: 3818 - DNA, 192 bp, Glycine max
  Clone ID: jC-gmfl02220058d04a1
gcaaaacaacatggccccgggattcactacactatcaatgcacgccctcctcagctacgaaagctggtaaagcggcttgagcgaaactactatttgcagcgttccctcatcaaaggacaaaaggggggggctgatttcaatctgggggcaccgcccaagaagatactgaaggaatataaggctctggcctca

SEQ ID NO: 3819 - DNA, 559 bp, Glycine max
  Clone ID: jC-gmfl02220058d05a1
accacttccattctcaatcaccacactgatctggatcgaggttctcgtaattggctacatagagttccagaggaacgcagagctggacccagaaaagaggctgtacccaggtggcagttacttcgacccactgggcctggcctcagatccagagaagaaagccacccttcaattggcggagatcaagcacgcccgtctcgccatggtgggcttcttgggctttgcagtccaagctgccgccactggcaagggcccgctcaacaactgggccacccacttgagtgacccactccacacaaccatcattgacaccttctcatcctcctcttaagaagaagcaaaagaagaagaatagtctttcttgtgcctggcattctagttatattgaaaagtctttttcttcttcttcggctttgggttgtaattaaacattttctacatagctggattagtagtacttgtgaaaaacttgtaacgtgaaattggagaggctaagcagaaatgcttctgcttgatggtaagtgttctcctgtgaatgttaattatgcacgaaatcgag

SEQ ID NO: 3820 - DNA, 500 bp, Glycine max
  Clone ID: jC-gmfl02220058d06a1
atcttcttcttcttcttcactcagtcagatccaactcctcagataacacaagaccaaacccgctttttctgcatttctagactagacgttctaccggagaagcgaccttagaaattcattatggtggcaacagctgctacttcatcattgttccctgttacttcaccctcgccggactgtggtggagcaggcagcaaacttggtggtgggcctgcaaaccttggaggactaaaatccaaatctgcgtcttgtggtggcttgaaggcaaaggcgcaagccccttcgaaaattaatggaaccacagttgttacatctaaagaaagcttcaagcatgatgatgatctaccttcgcctccccccagaacttttatcaaccagatgcctgattggagcatgcttcttgctgctatcacaacaattttcttggccgctgaaaagcagtggatgatgcttgattggaagccacggcgacccgacatgcttattgacccctttgggat

SEQ ID NO: 3821 - DNA, 346 bp, Glycine max
  Clone ID: jC-gmfl02220058d07a1
cattagcgaagtatgttaaagttgtgtattttactccagtttcagttggtatgcgggtcaggaggctgtttgaaacagaggagtcaagtgtgcggagatacatgggtacaataacatggcattagtgacctggatcctgtccggtggcaaaactcacattggcgctgcgtcaagggtggctgggatgaatccactgctggagacaggcaacctacagtgtctctttgggaaattgagccattaactacatttcctatgtatgcatgtccattcccccttaggcttaaacgggcatggtctgcaggactgccttcattccatggcatgaacgatgacgattttgtcc

SEQ ID NO: 3822 - DNA, 379 bp, Glycine max
  Clone ID: jC-gmfl02220058d08a1
tccacagcctacgtatgctgggaatgcggatagagatcacggaccgctttccgatccattttctgagaaacaccctcatcaccctcggctccggcgcccgacacgatattcttcggttaccctacagaagactacatgctctgtacagcacctggtaatgcctactataacgatgagggctactatgtggtccgacgtaggagccggatactatggctactggaaatacaagcaccaaacggaggtcggccatgcatatgaactacagaagaaagggggagcgaaagaggaaaacgttgaagtctatatgtgtggcgacattgcggtcgatgaagaggacccacggtctggattcgttgttaacagttcacactgcaaa

SEQ ID NO: 3823 - DNA, 569 bp, Glycine max
  Clone ID: jC-gmfl02220058d09a1
gtagaaccttcactctgctatcccccatattcctgtgtttcctttgaaaaaaaaagaagaagaaaaaacatgtctaggttttttggattcttctttgtgggtcttacgttgatgttggtcggtgtggcaaatgctatggctaactcttccaacaaatttgatcaactcttccaaccaagttgggcttttgaccactttattcatgaaagggatcttctcaaactcaaacttgacaaattttccggggctggttttacttccaagagcaagtatatgtttgggaaagttaccatccagcttaagctcgtggaaggtgactctgctggaacagtcactgctttctatatgtcatcggacggtccaagccacaacgagtttgattttgagtttctaggcaacatcacaggggaaccttactcggtccaaaccaacgtgtatgtgaacggtgtgggcaacagggagcaaaggctcaacctctggttcgaccccaccaaggattttcactcatactctatcttctggaatcaacgtcaaagtgtgtaagcacccattccccttcttaattatgc

SEQ ID NO: 3824 - DNA, 502 bp, Glycine max
  Clone ID: jC-gmfl02220058d10a1
cgaaaggtagggttttgcagagcctcgtcctcctctcacggtttcttctttttatcttctcacctttcttcttccactgctctaatctaagatgggcaagtcaagcaagaaatcagctctcaaggtcgacgctgttccagctgtggttccgccatccaagtctgccaagaagggaggcaagagacaagctcaagatgaaattgagaagcaattgagtgccaaaaaacagaagataaatgaggttgctcagaaacaaaaggaggcaaaggtgcaaaagaaggaaagtagttcagatgattcttcttcagaatctgaagatgagaaacctgcacccaaatctgctgttctttcaaaaaagatacctgctaagaatggtgctgcccctccaaagaaaggcaagctcgcctccagttcttctgaagatgactcctctgatgaggatggtgtgcgtgcaaagaaccacagataatggttgctgagaaacacaagaatggagcaactg

SEQ ID NO: 3825 - DNA, 506 bp, Glycine max
  Clone ID: jC-gmfl02220058e01a1
attgaattcttcttcctgcaatgccaggaaccatcatggtttcagtactggaattcatggatcttccattatcttcatcaacattcataagggcttccttggggaaaatagagtaccaagtgaatgacaagggaaacttatccttccccttaactagcctccgtgatgatttgatcttcaaaattcttgattctgaggggaatgaaatatcacgtacaggtgttcaaataaattgatattggagaaaggtgttttggaagacaactttccccttggaggtggccatctgcgtttgaagttgcaattcatccttagtgatgaagagcgcgacagaattcgttcattgagacaatctgcattaaagaaaaaacatgatgagcttcttagttccagtagaagaggtgaagaaagcgatagtagaaccgtgattggaaatgctgcattgccctttcgcagaaatgatgaggtctcaggctttttcctgatgttttaagtgctccatcttc

SEQ ID NO: 3826 - DNA, 518 bp, Glycine max
  Clone ID: jC-gmfl02220058e01d1
tgtgcttgcaggaaggtttcccgtcatcactgtatgacgtcctccttctttgggggggggggggggacaaaggtgtaagtaccaaaggcggtatagagaacctaaagaaatgatattaggggttctaggcacaccaccagaccaaacagacatgaaaaaccaaggcggggggagaaagaataggacaaacgcaaggaaagggcacgagaggcaatagaagtcgttaccgcgaccccgccgaaactatggtatgggataagtcgttcagtgatgataaggcatggcctaggccctaattgttgtctgcagggggggagtatacccaacagtaaaggacacttggaaaagggcttagataaacacagcgtgctaccgctgccaaaaccggaaacaagtgaaggcaattaaccaggtgttgacgaatcggggacggataagcaaggtacgacagtaaccaaggtgcaaacggtggtaggtgtgggaataattgggtgcatgcgcggtgggcctaatgaaat

SEQ ID NO: 3827 - DNA, 283 bp, Glycine max
  Clone ID: jC-gmfl02220058e02a1
gaaaaaaaaaaacccttagccaacacaaccatcatggccacctctgctattcagcagtcagcattcactggtcaaactgctctgaagcagctcaatgagttcgtccgcaagaccggtggcgccggcaaaggtcgcactaacatgcgccgcaccgtcaagagtgctcctcagagcatttggtatggccctgaccgacccaagtacttgggtccattctcggagcagattccatcatacctgaccggacaattccctggtgactacggatgggacactgctggat

SEQ ID NO: 3828 - DNA, 348 bp, Glycine max
  Clone ID: jC-gmfl02220058e03a1
atttcaatattattaaacaacaggtggagtcgtctatattgatgaatgcaaacttcaattcttgtttcaatctatgccatttaggaattcgtaaacctatatgccttaatggatagagaatcactactgagaatagctttgtctgatttagaatcaaaccttcctaggtttttcttattcttaagaatatagtgttcccatgcaaatacatgaaaatatgatatatttgtttctttgtccttcctcaattcatatgctgtcttgtgcaaaatgctcttgattgaaacccaattcaattcatatgtagtatataacaactatttatggcttcagctcaaaaatattttt

SEQ ID NO: 3829 - DNA, 391 bp, Glycine max
  Clone ID: jC-gmfl02220058e04a1
tgggtatgctgatccagttgctatttctttttcagataataggttaagagcggctatactgcgggctcaggggatatgccattagcgcggaactaacaagcagaaaattgtaccaccacattgtggctactggtccaccttagatggaaacaactttggcaacagcgataggaaaagaagctggaacaattattataacaggaactgtaacatttacaatgactaccgaacaaaatttggggaccatggttgcccctttcatttttacacctctgaacatgctgatgatgctcgataagatgctgatccatcatctttggaaaggagaaaatattcactgtctgcttggcaagaaagccagcaatactatgttccaccccatggaccatga

SEQ ID NO: 3830 - DNA, 499 bp, Glycine max
  Clone ID: jC-gmfl02220058e05a1
ctgcacagtagtgtggtacgatgatttgattttgataagataggtctgtgctgtggggaaaattggaagcatcgatcggaaaatgcaatcgttatcgttgagtatgagtctgaggagtagtagcttagtgaattttcttttgctgggttcagagacgagagtgagaagcagaaggagtgtcatcgtagcgtgtgcttcagagggagacagtggcagcagtagcacaagctcgtttctctctcggacccaaacctacgctcttcttaagcaacaattgcaagtagctgctaaatccgaggattacaaggaagccgctagaattcgagactcgttgaagctatttgaggacgaggaacctgttttgcgtctgaggagactattgaaggaagcagttgctgaagagagatttcaggatgctgctagttatcgtgatgagctaaacaaaattgctccacactctcttttaaaatgttgcagtgatgctacaacattgggaatc

SEQ ID NO: 3831 - DNA, 458 bp, Glycine max
  Clone ID: jC-gmfl02220058e06a1
atttgagggtggtgttgatgcaggagagcatgcctccattgagcttgcattgttgaacatgggtcttctacacagagctgtaaagagaaactgtaggcctatggtagaactactgttaagatttgttccagttaaaacctcagatggtgcagacagtgaaatgaagcaagttgccgaagcccctgacagattcttatttagacctgatactgtcgggccagctgggttgactcctcttcatgttgcagcaagtatgagtggctcagagaatgtgttggatgcattaaccaatgatccacgaatggtgggaattgaagcatggaaaagtgcccgggacagtacaggttttgacccctaacgaccatgcttgccttaggggctattactctttacattcactagtccagaacaagaaccacaagaaaggtgaagacaacatttgttgatatccctggaac

SEQ ID NO: 3832 - DNA, 558 bp, Glycine max
  Clone ID: jC-gmfl02220058e07a1
ttcacacccatcatggaccgttttccgatcctctttctcgtcgccaccctcatcaccctcgcctccggtgcccgccacgatattctccggttaccctccgaagcttccaggttcttcaaagcacctgctaatgccgatcaaaacgatgagggcaccaggtgggccgttttagttgccggttccaatggctactggaattacaggcaccagtctgatgtttgccatgcatatcaactactgaggaaaggtggtgtgaaagaggaaaatattgttgtatttatgtatgatgacattgctttcaatgaagagaacccacggcctggagtcattattaacagtccacacggaaatgatgtttacaagggagttcctaaggattacgttggtgaagatgttactgttgacaactttattgctgctatacttggaaataagtcagctcttactggtggcagtgggatggctgtggatagtggccccaatgatcatatatctatatactactctgatcatggcggggccggagtgctagggatgcctactaatccatacatgtat

SEQ ID NO: 3833 - DNA, 475 bp, Glycine max
  Clone ID: jC-gmfl02220058e09a1
atcctctgcttgtaccaaacccatcttcccctctgccttcaccgtctctaagtcaaagctctctcgtcatgttcatgtctccttcacctcccccaaacccatctactaccactacagaaagctctctcatgcctctcaacgttccttggtggtcaacagcgttttgaaaacagttgacccgacacaaacctctttgcggagatccaactccgaggatgttgggtctctgggagaaaagcccaccatcctggtctccgagaaacttggagaggcagggctgcacgtgttacgtggcgttgggcacgtggaatgcgcgtatgagctctcacaggaggagctatgcacgaagatctcgtgctgtgacgctctgatagtcaggagcgggacgaaggtgacgagggaatgtgtctgaagctgggaaagggaagttgcaggtcgcgggaagagccggcgtggggattgacaacgtggatct

SEQ ID NO: 3834 - DNA, 424 bp, Glycine max
  Clone ID: jC-gmfl02220058e10a1
atcctctgcttgtaccaaacccatcttcccctctgccttcaccgtctctaagtcaaagctctctcgtcatgttcatgtctccttcacctcccccaaacccatctactaccactacagaaagctctctcatgcctctcaacgttccttggtggtcaacagcgttttgaaaacagttgacccgacacaaacctctttgcggagatccaactccgaggatgttgggtctctgggagaaaagcccaccatcctggtctccgagaaacttggagaggcagggctgcacgtgttacgtggcgttgggcacgtggaatgcgcgtatgagctctcacaggaggagctatgcacgaagatctcgtgctgtgacgctctgatagtcaggagcgggacgaaggtgacgagggacagtgtttgaagctgggaaagg

SEQ ID NO: 3835 - DNA, 503 bp, Glycine max
  Clone ID: jC-gmfl02220058f01a1
aatgcaaagagatggtttaagggtggcctttgaagcttggaacttctgcaatgaagttggtcaagaagctcctcacatgggtagtccaagagctgctgattgttttgatctttcaggttctctgactcacaaggtcacagaagctgataacagacttggggtgggggactcatttcctggtataaatccagaaaatatcaacaacacagacctttatgcaattgaaaaggaattgtatttgggttctctatgtgaagttgcagacaccccaagcccctggcagttttggatggtaatgctgaaaaatggaaactatgacaccaggtctgggttatgtcctcaggacgggaaaaaggtacccccttttagcccgggaaggtttccttgttttggacaagggtgcatgaaccaacccatcttgtgtcatcaatggacgcagcttaaagatggcacaatgcaaggggggttcagtggtacttatgatttggattctggttgtggag

SEQ ID NO: 3836 - DNA, 458 bp, Glycine max
  Clone ID: jC-gmfl02220058f01d1
tcatatggaaggtttcccgtcatcactgtatgacgtcctccttctttgggggggggggggggcgagcagaataagtgttggaaggcaataccccacccaacaaacaggaacagaaacacaaatgcggaaaagagcgtttgaaagcgcagcatcaatggagtaacgaagatcggctaaagaggagcgggctcgaaagatgaattacgaattaccttatagagagaagaacagcgatttgaaataacagagtaggtagggtgacacaccagaagagtaattatgaccaaggatgccatacaggaaagacggattaatgatgatttgtgcggttgttatagttatgcttaggattacacctacgcgtaggtggcttttagttgcacggtgtagggttgcatttactagggttcaagttttaatgcattagggttgcgctgtgtgggcgttggcggttgggt

SEQ ID NO: 3837 - DNA, 405 bp, Glycine max
  Clone ID: jC-gmfl02220058f02a1
atttctaccaaggtgcaatgttaaagcaaagcagctaacccagtgaacttttccatgagttactcacaagatgaggacgcgaaaaacaatcaacacctttctcaccttgggtataagaatccttgggttgatgcccaggctatggatcaaattaaaaacaatccttgcatagacatgtcagagaatgcatccaacacacatgaacttgaagcctctcaatgaagaaagaggttgtcccgaaatctgagggctgaagtcaagtcgatgcttattttttgccatgctttagaaggcatagtatattggtagcggcattctgataatgcactaaattcgtgctgtaagattaactttctaatatgagtaaaaatactatgggccttgcgcccagcttgagtgctttgt

SEQ ID NO: 3838 - DNA, 353 bp, Glycine max
  Clone ID: jC-gmfl02220058f03a1
ctcattaattgcaagaatggctctccggggcttggagatgtccctttctgttctctgcactcttggtcgcgctagagaaagccatgccatggacgaaaattgtcgggtgctgttggggcatgcgctcccattcgaagttcattgcgagatcttctaaagacctggccctgcgagggtggaaatatgtgaccaccctatgcacatagaagaaacacagtacccgacaacgttcttttataaagaagaccttcatccaggcttaacaatgaaagtacaattgaggaagccttcctttcaaccaccatggggtgctggtccatggttcacggaaatgaaagacactactaaagaag

SEQ ID NO: 3839 - DNA, 496 bp, Glycine max
  Clone ID: jC-gmfl02220058f04a1
gaaaaaaaaaaacccttagccaacacaaccatcatggccacctctgctattcagcaatcagcattcactggtcaaactgctctgaagcagctcaatgagttcgtccgcaagaccggtggcgccggcaaaggtcgcactaacatgcgccgcaccgtcaagagtgctcctcagagcatttggtatggccctgaccgtcccaagtacttgggtccattctcggagcagattccatcatacctgaccggagaattccctggtgactacggatgggacactgctggattatcagctgacccggaaaccttcgccaggaaccgggagctggaggtgattcacagcagatgggcaatgcttggtgcccttggctgcaccttcccagagatccttgagaagaatggtgtgaaattcggcgaggaccgtgtggttcaaggccggtgcacagatcttctcagagggagggcttgactacttgggcaacccaaacctgatccatgct

SEQ ID NO: 3840 - DNA, 264 bp, Glycine max
  Clone ID: jC-gmfl02220058f05a1
agacggcggaggttgcggcggttgtgctaacacggcgtgacggcgatctcttgagataaatgttggttgaaagaggaagaagaagaagagttgtattgtagaatgagccaaccaacggtgatacttgccactggaagctatgatcacactattcgtttttgggaggacaagagtggtcgttgtttccgcaccatccaatatcctgagtcgcaaggtaaccggctggagatcaccccgtgtaaacgcttcctggctgcagctggc

SEQ ID NO: 3841 - DNA, 451 bp, Glycine max
  unsure (1)..(451): unsure at all n locations
  Clone ID: jC-gmfl02220058f06a1
ctgcacagtagtgtggtacgatgatttgattttgataagataggtctgtgctgtggggaaaattggaagcatcgatcggaaaatgcaatcgttatcgttgagtatgagtctgaggagtaatagcttaacgaattttcttttgctgggttcagagacgagagtgagaagcagaaggagtgtcatcgtagcgtgtgcttcagagggagacagtggcagcagtcagcacaagctcgtttgtctctcggacccaaacctacgctctttttaagcaacaattgcgagtagctgctcaatccgaggattacaaggaagccgctagaattcgagactcgttgaagctatatgaggacgaggaacctgtttcgcgtctgaggagactatngaaggaagcagttgctgaacaagagattcaggatgctgctagttatcgtgatgagccaaacaaaattgc

SEQ ID NO: 3842 - DNA, 422 bp, Glycine max
  Clone ID: jC-gmfl02220058f07a1
cccaaatagatgggctacttttaacaccatatcatatacaagggaccaattggtggggctaactccattttgggggatacgcccgatatgatatgataattccataattctcatgcacaacgagcatcgatcgaactacggtgtgggaaggaatatcttaaactagcgctagatcgtaaagatttgaaaagggtgattgagagagaggattaactaggaggagaatggaagcacgtatgagcactctaatcaatgctttcctcccaccattagctggtagctcagggcaagtaataccacatgaggcgagggtgtcaggccttgggacttagagtttaattttaatttatacagacagcattataaacatagatgtagatagatatggagggctatctaattctggtgagttattactgcgc

SEQ ID NO: 3843 - DNA, 465 bp, Glycine max
  Clone ID: jC-gmfl02220058f08a1
aggactgcaatgactgcacagctctggtacgcgatgcacgcctacgaatgctggtaatgctgcttgtgcgatacttctatttccagcggatccttagaaaacgagcataagaggattctgaggactctctcgttgcaacaggcgatgacgcgacaaaatgactattgatctgcgccgtctcttctatggatacagcggcgtcggtcgaacacaacgctgacgctgccgctaccgtctggatctccgactgccctgagtatgagagatcagtgaaccacgccctttctcaccaaaacctataaactcgaggactagcaagccatcaacaactttatttcctggaacgacgactggtcatagattatagactggtgccctaccacttgcatcagagaccagctttctgaagctttcactcacaatgatgattctagcttgcatggccaactggacacttacggattc

SEQ ID NO: 3844 - DNA, 378 bp, Glycine max
  Clone ID: jC-gmfl02220058f09a1
gaaactgagaaccccatctaccacggctggcagattgatccctatctccgtgtcaggcaaatactaacactggctttcctgtgttggttggcacaaaactttactgaagcatgacagtacttccacacttggagagaccgacgcacagcgcatggcagcaaccacgcacggcaccctgcgggcgcgtggtttattctgtcaccatcctgatcatctagcaagagggcccttgaaaatggagcagcgcatcccatggcggttagtgattcaacaaccccgggatgctccaaaacacatactctctgtgggactcatagcccaggtcgacagagtcatcaccgtggcccagattgaggatcggatgcttgacaaagtttc

SEQ ID NO: 3845 - DNA, 308 bp, Glycine max
  Clone ID: jC-gmfl02220058f10a1
aatgattatggctactctccttactggtcgtagtacgctcaccctacgcgctactatagagagaatggaggagcatcccgcacattgtccgcgcataatggaagtggagctgacgatggtacgtactcactattatttgcacgacagacattggattgtcgatgcctgacctagcaccgtctacaggcattgacagggctatggattagatctaccctgctgaggctcagctcttgcaagactaacacattacttccactgtagtcgtgacagatgggtatgcgcaccactatagaacaccagatatg

SEQ ID NO: 3846 - DNA, 504 bp, Glycine max
  Clone ID: jC-gmfl02220058g01a1
gtactttgcaaaaaccctaaaccctctctttctctctccgcgactctgtactcatcaatggcgacgcaatcgttagacgaagaaacaactaagaaagtcatacgacaggtcgagttttatttcggcgacagcaaccttctcaccgatggtttcatgaggaagagtatcactgaaagcgaagatggcatgattagtttggcgctgatttgctcgtttaatcgaatgcgaaaacaccttaatttgggtgatgttaagcccgatgaagtggcccaagaaaccgtgaatactgttgctcaaactttgagaaattcggcttcactcaaggtctccgaagatgggaaaaaagttggcaggaaaactgaacttccaaagctagaagatgttgagcaggtggagataagaacacttgctgtatcaccatttgaatatgatctgaagcttgaagatgtggagaaattttttggtcaatatgcaaaggttaatagtgtccggcttccccatcat

SEQ ID NO: 3847 - DNA, 481 bp, Glycine max
  Clone ID: jC-gmfl02220058g01d1
gctgcttccaggaaggtttcccgtcatcactgtatgacgtccaccatctttggggggggggggggggggggggcaaaagaagaaagttaacttaataaataggggaaaagccgatactgaatgtgacaaccatagggttgaaagcgcgcatttttatctaggaagggggagatgatagagagctagtttgtcacgatgcgtggccagagcccgggcatgacgtgcatgggctttagacgtgagcgcgtaccgatgaaatggaaaaacatggcaaaagtagaaattataggggcaggaaatgcgccgcgtaacccccccacacccacaccgattaatccttgtaaggtgaaatagtagcaagttgatgttttcgtggcaattagtggtagtagtagcctaggtagaacatcaatttattagctctgcgtaaagttaggtttctcactgtagtagtttggcaaaggtgtaatacgggtagtgg

SEQ ID NO: 3848 - DNA, 446 bp, Glycine max
  Clone ID: jC-gmfl02220058g02a1
gaaaaaaaaaatggatgtagagaaagccttccacatgactggaggagttggcaaaactagctatgccaagaattcctcactacagaagaaggaatctgataaagtgaagcacataatcatacaaacagttgaggagctctaccttgcaaccactccaaagagcataggcattgctgatttgggctgctcctctggaccaaacaccctatcaatcatcaaagatatctttcaggccatccaaggcataagccacaggatcatgcaccactccacagagttcagggtgtacttcaatgatcttccaacaaatgacttcaattcaatcttcaaggccatcccagagttccaaaatttgcttaggcatgacaggaaaaatgggttcccttccattttcatgggaggctaccctggctcatattatggaagactgttcccaaacagttact

SEQ ID NO: 3849 - DNA, 314 bp, Glycine max
  Clone ID: jC-gmfl02220058g03a1
acgatctagcgcaagattggctgtccgttgtttggggaggtgcattgaatggtctctgggactcttggtcttgcgagagagacccattcgataaacttaacacactcgggtgccggtcgtgctagctcatccagcccaaggttagtgagagaacttacatgggccgtccctgcaagtgtaggaatcggtgatgaccctacgcatatcgctaaatcccggttcccgaaaaccttattgtataaagaagaccttggtgcaggccaaacaatgcatgttccattcatcctgcctacctttcaacaaccatggggcgt

SEQ ID NO: 3850 - DNA, 536 bp, Glycine max
  unsure (1)..(536): unsure at all n locations
  Clone ID: jC-gmfl02220058g04a1
agccactactcctacttcatataattcacattcacccctcttcttccttccatcatcgaagtgccctaacaacattcacgcgctcttcgtcttttccttcatcaatccgcgcgacaccaaaaccctagatccggctcaatcatcgggagagagaaaggttttgactttgagacagtattgctagagagaggaacggtggtgggcttggcaagaaatggatcctggtcgctatgctctgcatcaaggctgggataataacagcgctcttgagggatacggtgccgtccacgaccccaacttccgggttggtggttcctatgacgagcgaaggtttatagatgaaagatatccaagggatgctgtttaccagagaaataatttccaccgtgacattttggatagggaggcctatctgccacctggacctcctgttggccactggagtcaagccaaacggagaggttatgatgaagattatgcacttgacagggaatctagacgttntcagaggccctatcatgaatcgtataatcaga

SEQ ID NO: 3851 - DNA, 337 bp, Glycine max
  Clone ID: jC-gmfl02220058g05a1
ggcacgtgtagttgagtactaggccgccgttacacgctactggtgtccgccgtcaccgcatgaatcacccaccgtgtcttagccgcagttttttacctttacctctaattgtcccttaccttccttggcgctgaaatggagagtggtccgaacatcacatccctggcacgtgacggtgccgctaagcccaccctcctcatatgcagactctctctcaaatgctgagctacgtcctcttcctccacactctttgacaacgcccaggagcctctaagctccatcagagaagagaacgaccaccctctgttcctgtgtgtatcatgccaccagctcactc

SEQ ID NO: 3852 - DNA, 255 bp, Glycine max
  Clone ID: jC-gmfl02220058g06a1
ggaccaacaatgccatctgttttaatgttttatccttatgatcataatactggttgtggttcaccagcagagcagcttgagtttgggactttgggaccaatggggttctcaggtgtcaatgagctgtcacaggcatatgagggaactcaatctactggagcacatgaagatcaaaggtttcgtggtggtcacagacaacgatcttccacagatcaaccctactaacctaatgttttaaggggtccctgattctgc

SEQ ID NO: 3853 - DNA, 222 bp, Glycine max
  Clone ID: jC-gmfl02220058g07a1
ctctttctgtcagcctgatgtttgcagcagaacctcctcaaagcaccataacggtggggataggtccagtcgcggggcaacacccccaacgcgtagaaatacacattgatctgctgctcctagctcatgggtataccgtaggtgggggaacagaacggtgagtatgctgttaaggcgtctgactccgtctggggggagtgacagcgacgacatcgcagactc

SEQ ID NO: 3854 - DNA, 152 bp, Glycine max
  Clone ID: jC-gmfl02220058g08a1
cgaaactactgtatgaggcgtccgctcagcagaagcgagaaagaggggtgtggataatcatcttcttgcactggcgccgaagtcactggagggatcgatggcactggcactccctgctattgatacaggggcatctagcgggattggtgctg

SEQ ID NO: 3855 - DNA, 512 bp, Glycine max
  Clone ID: jC-gmfl02220058g09a1
tgaaaaaaaaaaacccaaccaacctcagcttcttgattgctcattttctccgtgcttggtaaattaaacacatcggatccctcttttgctggacataaaagaattcggtcgaaagaaagacttcacacactcacatagattgtcacacattgcattgtagaaacaacacaaggaaccattttgttgcatagctaatcaagttaattactagataatagagagaaaagggcagggaaaaagaagcctcacatagcattggggtgagtgaagcaccaacaagcggcgttacaaaaaccctcagacgatgctggctgggtgttctagttcgacattgttgtcaccgaggcacagattgaggagcgaagcatcagcacagcttgagcctgccactttcagctaccttctttcatgagcacgcacagattggacctgccatgcaccaccaccaccttcactcgcatcaacagagacaccagctcttcacgctctgttctttcagtggatcagaaacc

SEQ ID NO: 3856 - DNA, 491 bp, Glycine max
  Clone ID: jC-gmfl02220058g10a1
aaaaaaaaaaacccaaccaattatcagcttcttgattgttcattttctccgtgtttgttaaattaaattcatcggattcctcttttgttggacataaaagaattcgttagaaagaaagttttcacacactcacatagatcgtcacacattgcattttagaaacaacacaaggaaccattttgttgcatagttaatcaagttaattactagataatagagagaaaagggacgggaaaaagaagcagcacatatcattggggtgagtgaagcagcagcaagcggcgttacaaaaaccctcagacgatgttggctgggtgttctagttcgacattgctgtcaccgaggcacagattgaggagcgaagcatcagcacagtttcaagcctgccacttccagctaccttcttccatgagcacgcatagattggacctgccatgcaccaccaccaccttcactcgcaacaacaaagacaccacctattcacgctctgt

SEQ ID NO: 3857 - DNA, 391 bp, Glycine max
  Clone ID: jC-gmfl02220058h01a1
gttcattccagcttgtgtaagatttgcctggctttattggcgtgctattgctccgaatagttgatgcataagatataatgagactgaccgacatgaatgctcaagcctgtcaacatccatgatacgcaaagtaatctgaagacgattgaagtaggatactgtccggagacctgtcaatgaactatattctagttaatagaaagctactttcttcgattagaagcactggaggtcactcgctgttataccttaatcggactattgtatgggagaacctgaatcatatatgcggctcctgacttggggaattttgggcacatctgcagagcatgtaattgaatagatgagagcacatggctacttcgcgtaaggatcttatcctatcacacta

SEQ ID NO: 3858 - DNA, 521 bp, Glycine max
  Clone ID: jC-gmfl02220058h01d1
gctgcttccaggaaggtttcccgtcatcactgtatgacgtcctccttctttgggggggggggggggcgactaaagttcaatactggggtgaaagataacgccaaagatggaaaaggcgaaagaccaaaacgggagatcatgaataaccatgtggcattaacaaggagcggtagtgcggcaccaaagtaccttgtgggttcagagcgagttgtgattaaacggttaccggcgatcaacgtgctgacatttgtgataacgttaaaggtaccggttaagttacctatgtgtgggctgggtgtaatgcagctgtgcattcaaggttgcctggatcgatgtacgtagcgtcatcgtagactgtggtgagacgcgtattgaaaggtaaggtatgccttcgtcggggataatcgtcgcatgcccaaaatttccatcggatttaatggaagtcttggctactataggttttgggtcttcgtgcctcgaagactcaacaccgtttctattcagatctttggtttaatacg

SEQ ID NO: 3859 - DNA, 241 bp, Glycine max
  Clone ID: jC-gmfl02220058h02a1
ctcacgaatggttgacattatgttgacgcaggtcacaagattggagtggatgcgggttttttaccaggcgatgttcataagaacattgatgacggtcaaacgaagattacttcttgggctgcagacctttcccgccagactaacgagtatccagagacaggtggaggtgtcatatatgcaatgcgactggctctggatattgatgctgctgctatgctctttcttgcatgtatcggattct

SEQ ID NO: 3860 - DNA, 288 bp, Glycine max
  Clone ID: jC-gmfl02220058h03a1
tggtaaagctgctcaaggaaaaaaataaattgatgaatcaaacgccttccacataactggaggaggaggataagtaactatgcctagaactccctactacagaagaaggcatctgctcaagagtggcacgtgaacatacacacatgagggggagctctaccttgcaaccactccaaagagcgtacgctttgatgatttgtgctgctgctgtggaccacacaccctatggatcatcaaagatatcttccacgccatctaaggtataagacacaggatcatgcaccactt

SEQ ID NO: 3861 - DNA, 364 bp, Glycine max
  Clone ID: jC-gmfl02220058h04a1
taggaggggggcggtgattgtgttgtgtgctttagaggatgaaagatttcaattcggatctattcgacccgggaacggcgatggactcttcctccttcgattactctcgcagtgcttcctcttccgacgccgattttgggttcgctttcaatgacagtaatttctccgacaggatcctccgaatcgagatcatgggggaccccggcgaggcccgacccgattacgacggttgcaccactatctgcgactgggcttgccaccgcaagaggaggcgcgaggatatcaagaaggataacgatggtgatcttactttattggctgacgagcaaattttgaacgggaatcagcctgatatggatgattt

SEQ ID NO: 3862 - DNA, 452 bp, Glycine max
  Clone ID: jC-gmfl02220058h05a1
attagaagtaacaaaagaccctccctctcaaaagaataaacaagtataaaaaagaaggcacttccctcaaacagaaactaccctctatctctctcttttcaagccttaaatgagtaaaaaagagtgaagaaaggaaagaaaggagcaccatttttggtttgagaaacataattagcaagagagttcaaaatggggaagagagagtttaatggggtggtgctgatgatgctgtgtctgtgggtactgtggtgtcacagcctctgtgacttatgaccacaaagccattgtggttgatggcaagagaagaattctgatctctggctccattcattatcctagaagcacacctcaaatgtggccagaccttattcaaaaggccaaagatggaggccttgatgtcattcacacctatgtgttgtggaatggccatgaaccttctcctgacaatacta

SEQ ID NO: 3863 - DNA, 379 bp, Glycine max
  Clone ID: jC-gmfl02220058h06a1
ctcattaattgcaagaatggcacttcgttgcttggtgatgtccctttctgttctcttcactcttggtcttgcgagagaaagccatgccagagacgaagatttttggcatgctgtttggccaaacactcccattccaagttcattgcgagatcttctaaagcctggccctgcaagtgttgaaatcgatgatcaccctatgcaaattgaagaaacacagtacccgaaaaccttcttctataaagaagaccttcatccaggcaaaacaatgaaagtacaattcagcaagcctccctttcaacaaccatggggtgttggtacatggctcaaggaaattaaagacactactaaagaaggatatagttttgaagagctatgcatc

SEQ ID NO: 3864 - DNA, 391 bp, Glycine max
  unsure (1)..(391): unsure at all n locations
  Clone ID: jC-gmfl02220058h07a1
gaaacagctgtgcagtatcttctgcgtctccatccagatcaggagggacttagcaagcaggaggctgtccgtgcaaaacttggtcagtttgggctaccaagacataaccatcttactcctattgccaaactatcaggagggcagaaagctcgggtggtcttcacatctatcttcatgtcaaatccacacattttattgttagatgaacccaccaatcatctggacatgcacagtattgatgcattggccgatgcactggatgaattcaccggnggagttgctcttgttagtcatgattcaagattgaaatcacgtgtatgtgaggatgaagaagggagtcaatctggggttgtcgaagagggcactgtcaaaaatttcccatgaacatttg

SEQ ID NO: 3865 - DNA, 406 bp, Glycine max
  Clone ID: jC-gmfl02220058h08a1
gtcaaactgttgagaacttcatttgagataagaggataagggcgcctatactgtctattctggggatgagccaagagcctggaactaaattgtatacaatagaccaccacctaatgcctacgtggttcaactgagcttgatactctctgggagggaaagattggtaaaactcttgagagaatctatgttccaggagacacgactcctgaagcagatcgaagagtccgcaccagccgagaatgtgagcctgtcaattaaccacccttcttatcgtgcgggggatcatacatactatgctattgcatcttctttgggagggagagcatcagctgtgtctgctgatgtggaatacatgactgaggatgagctccccatggaccatgactaaagtgcatcgtcctactga

SEQ ID NO: 3866 - DNA, 415 bp, Glycine max
  Clone ID: jC-gmfl02220058h09a1
cagaatccttttgtaactattctctgaatttccattcattctatgtagattcctcttttgttttctcttctttttccttgaagcaaagtgaacttgtggtgtatctttccaattgaagtgaaagagtaaggatgtcaagagggacaacatactggtgttacacatgcaggcagccaatctggcttgaagggagggaagccatctgcccctactgtgacggaggctttgtgcaagaacttaatgagctgctgaggagctgcgcgccaacactgcttctcatcgcggaggggagatgctcatcaaatgcctgacattatggatgctgtaagagctgatatggagcaaagatgttctgagacgaggatcctggttagagatgctggtgactactttatgaggcagataatggctggaa

SEQ ID NO: 3867 - DNA, 491 bp, Glycine max
  Clone ID: jC-gmfl02220058h10a1
gatttacagagacacctctcactacaactgctgtactacactatgcaactctttttcctctgcattgggacccgtgcctgctccccctgttgataaatatgactttgactggtccatgaagcaagctaaaaacctacagatggaatctgacagcaaatgctgctaggcctaacccacaagggtcattccattatgggaagattactcctacaaaagtaattaagttggccaattcagcacctttgatcaatggaaagctccgttatgctgttaacagtgtctcctatgttaaccctgacacccctctcaagcttgctgattactttaacattcccggaatcttgagtgtgaatttactccaaaactctgcctcaaatggtccaggatacataggcacctcagtgttgcaaacttctctccatgattgtattgaggttattttccagaacaacgaaaacaccatgcaatcttggcatcttgatggttatgat

SEQ ID NO: 3868 - DNA, 343 bp, Glycine max
  Clone ID: jC-gmfl02220059a01a1
gtatgattatgtctagctatctcgatcgaactgtccaaggtgctgtcacattacctctatcggatataaatgagtagccttatctaatactctgcttattgcgttgggagccccatctcggtctactgatgttcactcgctcacctattttcaatctggtctacaaaaactgtgcttttaaaacttgtacccagtccttccatattcatcattttgggcgagttcctcttaatgtttaagattgcacccagtgcgtcacatgtccagcagttgggcctgaccaactttccacgattctagacactgcatgtcgcattcaattgctcacaatgcctgcccatag

SEQ ID NO: 3869 - DNA, 333 bp, Glycine max
  Clone ID: jC-gmfl02220059a01d1
catgctatccataggaaggattatcccgatgcatcagctgctatggacgctccatccagtgctttggcgggtggggtggggggggagggggcgggcggggaggggggcgggggggtagaacccagatatacaagaacgggcgatgcctagagacagggaggccccttccggaggacttgaacaatttcgtgggcagggagggggggcctggggggcaagggaaaggcgagatcccggaacaggaccaagcggcgcccccctataaaaatgaggggatggggcctagtgattaggattgtttaaaccccctgtgtgaggccaaccaaaagtgaa

SEQ ID NO: 3870 - DNA, 137 bp, Glycine max
  Clone ID: jC-gmfl02220059b01a1
tgagtatggtctagctatctcgatcgaactgtccaaggtcctgtcacctaaccgcattaggtgccaatctgaacaaacgtggcttgagcgtaagccataattacgtcaatatcagaggtaccgtataacggaaatac

SEQ ID NO: 3871 - DNA, 514 bp, Glycine max
  Clone ID: jC-gmfl02220059b01d1
gtgcttccaaggaaggtttcccgtcatcactgtatgacgtcctccttctttgggggggggggggggacaattagaggggggagggagggaggctcgaactgctgcgctgaaggcggggggtgttggcaagggcagaaaagaaggaggcaggtggatacgcgataacgtacaacggaggggagacgataaatagaaggtgcgcatggctcgcgagcaggaggtaatagagaaggtcctggggttagtaagcaagccatgtagcaatgtggtattagttatacgggtgggggtgagcacaacggcagtacgtggcgcaaccagagtaagcgcacggcacagaagagcgcggcgtttgacaagacgtgtgtgtgattacggtttgtatggtcgtagttatgatagttctacggcttagccacgaagttggggctcagcatagtgcgggatttaacaaccgagggttattaccgttattaagcctaatggcgttaagggggggctgcaagttaaagtg

SEQ ID NO: 3872 - DNA, 375 bp, Glycine max
  Clone ID: jC-gmfl02220059c01a1
gtatggtcaggtctagctatgtcgttcggattgtcctagtatgatgtcacaaatctttgagccaaatttccggggttagctttctaaacgtgacgttagcgtatgaggaaagtagaatttttgtctgctaatgttgtgtaggtgtgctatacccatgatacgataaggattgagtagtgtcgtgatagggcggcgtagccggtggaagtaatatatggggattaaacaccagcgattgcagccaggtagatagtatatgagttagagtctgcgcgtaggtgtgatagacgaatgagttgaaagctgtgtgtagtctaattactacatctaatagagatagcctttcatatcatagctatgacgttggtattgaag

SEQ ID NO: 3873 - DNA, 248 bp, Glycine max
  Clone ID: jC-gmfl02220059d01a1
tcacggtttcgttccgctatgtcgttcgaactgtccatgatgctgtcacccgtctgtgagcggagacgcactggtggagtgcagggctaccaaggtaagaagtcgccattaacgaggttccaagacaaaatgggttgatattcagactgctgcgtggaaccaagaaatcattgcagccgccgagtaattcaagatagtgctaagggccacagtgcacgtagatataggcgcatgcgatagccctagtt

SEQ ID NO: 3874 - DNA, 270 bp, Glycine max
  Clone ID: jC-gmfl02220059e01a1
gtacatggttatgttcagctatgtcgatcgaactgtccataggtgctgtcaccacttcgttgggtgcccgaacaggtcctgcatccaagtagcccagttgagcatgcctgcaccaatgacccagtttaaggcaggagagacatatacgggtattaagcgggacttttaagcagtttctaagattggggttgcatgttcagctgtgcgcttagggctacatggggatttcgatttggcaaagaggtagggcttagcacggtctcgattaga

SEQ ID NO: 3875 - DNA, 431 bp, Glycine max
  Clone ID: jC-gmfl02220059e01d1
gctgcttcctagaaggtttcccgtcatcactgtatgacgtccaccttctttggggtcgttgggggggggcgtaaatagagacctattggggaggtataaatgcaggaactagaaaaggtagtagtctagagttaataggcagatagtattacaaagacagctgaagagagagcgcgatagtatgcgtgcaacagaaggcttaagcagggattggataatgtgggtcgcaacaattggcgcagaaaggtagccaattctaagggttgagaaacactgctgtcagttcaaggtttcgtggatcgatctacgtagattatcgtagattgtggagagacacatattgaaccgtaaggctatgcctttagtctgggatactcgtcgcatgcccaaaatttcctccgtatttaatggaagtcttggctaatataggt

SEQ ID NO: 3876 - DNA, 368 bp, Glycine max
  Clone ID: jC-gmfl02220059f01a1
atcgagttatggtctagctatgtcgatcgaactgtccaaggtgctgtcaccgcagataaagccgccgcagccaccagcccgggaacacagcacgagccatcaatgaataacactgccaataagggtaggcggtgatagcgctctaggaggaacgtcaaggaacagtagtagtatagaggaaggcgttcttataatggaggtagcttttaggggacaatactagggtagagtatactggggaacctcatcgagattacttttatccggtagtacagagcgatggccgtatggctggtatatggaaagacggtgtgcggttttaggtgctgacggtatcattaaaattatgatcgggaatgttgttttag

SEQ ID NO: 3877 - DNA, 551 bp, Glycine max
  Clone ID: jC-gmfl02220059f01d1
gcatcttccatggaaggtttcccgtcatcactgtatgacgtcctccttctttggggggggggggggggcagataagaagccaaagagaggagcggtggcgatgggctaccaactgctaaagagaggaaagcagcacaagctctctggctgggctttggtaagcatgagaaaacgattttaaaacgactataacgcgacagggctggcaaaggtggcaaagcataaaaacggtaccctgtgtgtagtttgagaggaccattaaaacaagtgggggcgcaggggggtgggaataagcgcggtagtactagcgtataactggagcgtaagttcggcgaaccggagagcgttattagagtggaaacccatgaaatcaaagatatgtgcaccgaccgtaggccaccatgggcaaggctaacaagtcctgggtgtggggctgaatgtggcgctgtgggtaagctttttataatgtggcattaaaggcagcctggttgtaacccaattaattgtatgcaaggtacatgtcagcagagtttgtaagggctcggtgggtg

SEQ ID NO: 3878 - DNA, 153 bp, Glycine max
  Clone ID: jC-gmfl02220059g01a1
catagagatatcgtctagctatctcgatcgaactgtccaaggtgctgtcacctacgattggaccagaatcatgaatacctagggaagttaatagtggtattcagatgagtagactagccagaacgaggtaaattggctgaagtaagaatctag

SEQ ID NO: 3879 - DNA, 511 bp, Glycine max
  unsure (1)..(511): unsure at all n locations
  Clone ID: jC-gmfl02220059g01d1
atcctggaaggtttccgtcatcactgtatgacgtcctccttctttggggggggggtggggggagacgctagagatgaaaccaaccagtgcaggcaataaggcgttaagaagaccaataaaaataaagcaaaacaagggatgcgtagtaaggtacgtaatggagggaataatatagggggagtagagaaaatcaccatattcgaggggtgggtattacgttattggctaataggtacaagtagggttgcgcgataaggcaaccattanttgtagtagatgtagttggggtaagttatagtgcggccaacgcgtggacacaagttaacagacagttattaagttacatatgcggatgggtgtgtaccgccagtaattattggaagtggtacgtgatgccccgttacgtgcacagggttgcatgtaggtgcgtactcagattgcccaatagccgacagttattatgcacaataagcgggttagataacgttggttgaagcgtcatagtatatgg

SEQ ID NO: 3880 - DNA, 537 bp, Glycine max
  Clone ID: jC-gmfl02220059h01a1
gtaatggtcatcgtctagctatctcgatcgaactgtccaaggtgctgtcaccttacaaacaaacaaacaaccaaagccggagtataattggtaatccaattcctcggccagggcggggtcctagaccggcgtgcgggtccgagaccagccccggggtccaccgtgcgcattggaggggatcaattcggggacatagggtgagattggagctaagggaagggtacgatctaaggagcagttgtcatgtatgcagtggacaaggcacgtgggggttttgcgagcgggatgggtaagtgggggaagtgcgcataagtagggaggagttaagggacggctagatggttaagggtggggggatgggagccgtgaagcagaagtggcggtcggttacagcaaggtcggacatagcgtgcgtagaaggcaggcgcgagcgtgagggcctaaggaggcacgtgccagaagacacaggacacaccgacacctcaaagccacgcacgatcaaagcggggaagtggtatgtggatgggtggacgagac

SEQ ID NO: 3881 - DNA, 531 bp, Glycine max
  Clone ID: jC-gmfl02220059h01d1
gctgcttccaggaaggtttcccgtcatcactgtatgacgtcctccttctttgggggggggggggggggggctgttagtagaagtagtatgggtgatacgagaaaaaactatagttattagaaagacctatctgtacggtttagtagtcgaaataggggtagcatcaaacgtgaaaagactatgttattaacagcgagccgatgcaggtaagcattaggaaaaaaaaatgcggaaagagtcgagacatgtgcaacgttagagaatgcaagggggaggcgcgttataacgggttggggcctaccagagggcagcgagaatgcaacgatttgtcacacggagtaacaaacaatacgttgcatgtggggggtaataggaaatgcgatcgttataacgttgcggaagattagtacgaaggcggggatttgtgggtatcccgttaatatttccccgaggattacggacgagcatagtgttggtaaataagcgtagcatacactggatcgactgaagtacaaaccgcagtggaaagag

SEQ ID NO: 3882 - DNA, 483 bp, Glycine max
  Clone ID: jC-gmfl02220060a01a1
gtaatgatcatcgtctagctatctcgatcgaactgtccaaggtcctgtcacttggttgtgtttcggtgtgtgttattgtttttgtgttgtttgtttgtgttctctgtgttggttgttcttctagtgttcggcttcttaattttgtttgttattctctttgttgttttaatgtgtttgtttgttctctttgtgttatatgtcttatgattgttgtttgtaatcattttattttgaatgccgttaattcgtttttcaacaaattagtggctgtcatcatgctcagggtcaatatccgtgtcgtcgtagccacaactttcacccagattttatatgtcagcatagtagtcagcgtgatagtaaaataggccttaacagtagtccaacgcaacaccacgtcacaagcaacagagaggtccgtgtcatgccgtatgatgggctcgaccccatgtggcacgtcaacactgggtggataacaggaaacaa

SEQ ID NO: 3883 - DNA, 545 bp, Glycine max
  Clone ID: jC-gmfl02220060a01d1
gctgcttccaggaaggtttcccgtcatcactgtatgacgtcctccttctttggggggggggggggggggggggggggggggggctataatagctaccggtaggaaaaaagacccacgaatatcgaaccatgaagacaaggtgaagcgttggccacaaatagacctagaacatgtgcgtgggtggcccgtatataggtggctcggaggtgataggccatgaccaaacaagtggtaccgcgagtgtattttacaagagcccgggtttattaccgccggttgtttagagtttgctggcctatagtgtgatgcccaataggcggtcattagttgcaaggggcgcgaaatttgtttagcggtgccggcgagccgccatttgtttagcggtttgcgtcgacggaggtgcaccgtatattattattcccattagcgttattattgctaggaccacccgaattgttgctcctcggccacaacaagagttccgcgaggccacccctagacttggtagcgtgtctaccctagaattcgtaggctgctcaccgatt

SEQ ID NO: 3884 - DNA, 450 bp, Glycine max
  unsure (1)..(450): unsure at all n locations
  Clone ID: jC-gmfl02220060a09a1
atcacatcttatccagacaaaacaactgttatggataggtatcagagggtagagaagcccaaggcagagagccctataaacgagaacgagatacgcgttacttctcaaggaaggacgaggaattacatcacctacgccaccactctccttcaggagaaaggatctagtgaaattgttctcaaagcaatgggacgtgcaataaataagactgtaatgattgctgaactgatcaagagaaggattgttggtctgcatcaaaacacccaaattggatcaactgatataactgacacatgggaaccactagaagaaggccttctttctttggagactactcgccatgtntcaatgatcacaattaccttgtcaaagaaagaattggatacgtcatccacaggataccaaccttctctttcagttgatcaagtagaaccttaatgaatatgatga

SEQ ID NO: 3885 - DNA, 516 bp, Glycine max
  Clone ID: jC-gmfl02220060a09d1
aaatcaaacttagcttactgcaacaattcctattaaaaaattttacaattgtgatttttacgagtctttaaacaaagaaaacatatctaacttaacctacccaacgtagcaaaattatacaggttacagggggtaaacactacatcaaaactgcagaaacatggctgcaacactgaacgcttcaaataataccaaaaatacaagtaaatctcacaaagaactaaacagagaggcaacatctaacttaacatatacatgataagcaacaaacacttgatcaagcagctggtacctggtcccttccccggccacggcctcggcctcttccccttccacggccacggccacgtggtggaggtggagcatcatattcaccatagtcatagtaaccaactggctgcacaccatagcctcgtcctcgtcctcgtccccgaaaagcatgcccccttgcacgaccacgccctcttcaccatagccacgttcaccatcccaaccatcaccatattccatacccca

SEQ ID NO: 3886 - DNA, 448 bp, Glycine max
  Clone ID: jC-gmfl02220060a10d1
caataaagaatagtttgtaacttcggaaaaagagaatctagtttattttcttacatagaatcctcatatatgtgtgaataacacatacattttttctatagatacattcgaaatctttgattagtgctcgagccggatgatgaaaaattatcatatccggttctttcggaggatggatctataagaattcacctatcccaataacaaaaaaacctgacttgaatgatcctgtattaagagctaaattggctaagggaatgggtcataattattatggagaacctgcatggcccaacgatcttttatatatttttccagtagtaattctaggtactattgcctgtaacgtaggcttagcggttctagaaccatccatgattggggaacccgcggatccatttgcaactcctttggaaatattacccgaatggtatttctttcccgtatt

SEQ ID NO: 3887 - DNA, 577 bp, Glycine max
  Clone ID: jC-gmfl02220060a11a1
cggctcgagagatgatgagatgcatccgcagtgcttcttaacatatattatttgaattttgattatgttttcttgagtttaaatcttgtctatcaataattgaaatcatcttaagtattaattttcaaatgattattacaaaataaaaattcttattaacaatcaccatataattcttccattacgcactctaagtctctaattaaattctattaaagagttatacagtcacgaaacttgtgctgttttttttgacaaacaacttatttgttagttgctgcccaaaatcttcagtagcagtagtactgggtgaattctactttataaccctgaaaaaatgaaggagctaagtacatcatcatgatgttaaagttagttgatggtgttgtgtaattggagaaataacgaggcagtgtcccatttaatttcaggaaaaaattccagtagaggaagtgtttgagtcgctgaaatgttcaagagcacgtttaacatcagacgaaggagccagtcggcttcaagtttttggaccatacaaattggaagagaaaaaggagagccaacttttgagtttctgggt

SEQ ID NO: 3888 - DNA, 599 bp, Glycine max
  Clone ID: jC-gmfl02220060a11d1
gagccttaaagtgacctagatatcattaacattctcaaaacaagacgaaaagtaaatcctatcaaccacgttatttggtatggaatagaagagtaaaccattcagattttgactgacaaaaggaccttcatcctaatctaaagacggattaacttaggtcttcattacatttgttgttcttgttcttggataagcaccaaagtgtgttctgcttgaaggttgtccaaattccttaaactgtataatgctgttggattgtatcaatgtcaagtcccttcagcttcactactgattcaacatgtcctttcagagtatgaagctccctgagccttgcaacctcggcacgtctcttagcttgctcagcaatctctgaaagctccctgtaactgttcttgtcattgaaaaggttggttgtttcaggtggctgaagaccatgaagagtcctctgagcagttgcccactgtgcttctctctcttctttgccatagtctttctttgtagtgaaggcagtcttgttctccaaaagattatcccaagccttcccacttcagacgtatcggattgcaaattgagatatcaagagggattatgtgactaac

SEQ ID NO: 3889 - DNA, 575 bp, Glycine max
  unsure (1)..(575): unsure at all n locations
  Clone ID: jC-gmfl02220060a12a1
tttctctctcgatacaaaaatacatagaaatggcctcttctcttgcatcctcatcaactgttctctggatcctttttctaaccattgcaactcttcatttgagttcagccaggaagttgtccgggtcagacccgcagttgcagtttcaataccacagaggccctctcctcaaaggcaaaatctcagtaaacctcatttggtacggtaaattcaaaccttctcaaaaagccatcgttgctgatttcatcacctcgctctcctctcccaaacccgtcaccgcccaaccatccgttgccacgtggtggaaagccaccgataaatactacaaaaactcgtcccccaaactcgctctttccctcggcaccacccaaatcctggacgagaattactccttaggcaaatcgcttacgaataaccaaatcttaaaacttgcatccaagggtccacagagaaacgctatcaacattgttctcacttctgctgacgtggcagtggaggggttctgttcagtaggtgcggaacacacggatcctncgtggnggcgcgcgtgaacggaaagagatacaagttggcgt

SEQ ID NO: 3890 - DNA, 501 bp, Glycine max
  Clone ID: jC-gmfl02220060a12d1
ccaataaagagcttttattacgaatattattggtgtaaccaacgtcgttacaacattacttctaacactataattttgttttcaagctataacaaaaagaatgaagaaatgaaagaatctctggtattgcctaacaagtaacaactaagcatggatgaaaactagtttgagtggtagttttacacgagtgtggagcaagctgaggtttcagggtcaacaagagctggcaacagatacttccttccgttgactccattagcgttgtagctggcaccagtggtggggtcaagcaagaggttccctgcatagccagggtacgcgcccttaccatacaccccagtgcaagccgaacctgcttccaacggagcctctttgggtccttgaaagtaaccatttccaaaagggttagtgacagtgccagcaaggagactagccacattgatcagcatgccgtcaagtcccacatcgttgttgggtgcaaccaaaggtggattctgggga

SEQ ID NO: 3891 - DNA, 462 bp, Glycine max
  unsure (1)..(462): unsure at all n locations
  Clone ID: jC-gmfl02220060b01a1
gtaatgagcatcgtctagctatctcgatcgaactgtccaaggtcctgtcaccaaagcctcagcctaagcctctggtctacatgggtagtggtaaggcataacttgtgctctttgtgtggtaagcttccggtttgtgatgataacgtcgtgggcttggagcaactgcgggatcataaccacgtcatttccacggatagccttcaactacggcaacgtgttatggcaccgtcgccagttgcacagcgtgcagaggaggcactggcacaacgtgacataagccaacccntgacaagcgagattcgtacacaagggtattgtgcactgtgcacaggtacgtccgcgcagtccggaggattaataaagatacgcacccggatttccacgtaagagaggagcctccaaagcacgagaggcatagcgtgcaaatatgcgcttaaacgtcgctttgacacgtggggacag

SEQ ID NO: 3892 - DNA, 534 bp, Glycine max
  unsure (1)..(534): unsure at all n locations
  Clone ID: jC-gmfl02220060b01d1
gtcttgcaggaaggtttcccgtcatcactgtatgacgtcctccttctttggggggggggggggggggaacaaagggccgagggcgaacttgggaggatagagcgtagtgagatagggtaatagaatcgagtaacaggggtgccaggtggatagagaaaccctggggcataggcgggggaaaagagcggcgtcgttgtgattagccagtaccaaaatgcagtggcggcaaggctggcttacgaacattagcccagcattgaagccaaaaggggtggggtgtaaggtgcacgtggtagccggctgggagtaaaattaagccggccaaaggcggggctagatgttgtaatagtaacgtccactgggctgagtgttcagcaaaccgacaacagcatgtaagcggccgttacaacgttggtactgggcggttgggctgtgtgtttggaagtggtatcntgagtggtatgctggtagtaaaaaatgtgcgtgattggcataaaagttgttgaataaagttgtgcaacgaacactacccgg

SEQ ID NO: 3893 - DNA, 545 bp, Glycine max
  Clone ID: jC-gmfl02220060b09a1
atccaatcccactggaaaggttaccttgtacgtaaagagtcaaaagaacagttattggatttgcgtttgaggatgcagaagtctgctagaaatgtggatgacagcaagcgtctcataaacagactcttggcagcgctttcagagctacttaatatgaagagtcttagtaacatccttcatacttgttcaacattggatatggctacaggacattctaagaaatgttgtgaagaacttgtggctgcaggggctatcaacaccttgttgcagctaattcaaacagtcagccggagtatacctgaccaggaggttctaaagcatgctttgtcaactctccgaaatctcgctcgctatcctcatctactacaagtgttgatccagagtcgtagttctgttcagataattgtcttggagttattgaggaataaaaatgaaggctatttcgttgcttctgaacttttgaagaagatatgttcaactcgggtaggccttgagacaatattcaagtcccctgccctgctaaaacgattgcacagtcttgttga

SEQ ID NO: 3894 - DNA, 391 bp, Glycine max
  Clone ID: jC-gmfl02220060b09d1
tttttttttttttttttttttttttttttttttttttttttttttttttttttttttttttttttttttttttgggttttttttttttttttttttttttttattttttttttatattttctttttttatcttttaggaccaaaaaatccttttaaaaccaaaaaaaaaaaaggggaacaaagtccccaagaaactaaaaaaaaccacttttaaaaaaaaaaaaaaaaaaacccttccaaaacccccaaaaaggggaaaaaaatctaaaataaaacccccaaaattttacccccaaaaaaaaaaattttcaacaaggcccaaaaaaactttgggggggaaaaaaaaatttccacagcccgtgaaaaaccctaaaaaattccacaccctccc

SEQ ID NO: 3895 - DNA, 586 bp, Glycine max
  Clone ID: jC-gmfl02220060b10a1
cttctacccctgtatcttgctgttcttttgttctttcttctctctttctctctccttcaacgcatcccaaccctgtggcgctataccctcctagatctactctctaaccgctatacaggctggtactaagagctgtggttagtcatagatggcgctctcagcttcacgggcaatgtcaaagggtgtggtggtatctgtgcctgttctggttctatctgctttagtggctactgttttcctgttcttccttttgtcctctctttcatcctgctcctgccctactccttcagaaatctctgcctccaatgttaggagtgttggtgttggtattggtgttcctgagtctagcagcggtaatgttccgttagccacaaggaaggagtctagcagcagtaatattccggtatcaacgaggaaggaggatgttgagtgggtgaagaatcaaatccaagcaaatgggcttcatatgcatgacaatgtgcttcgcaagggtattaaccctcgcactcgggctcagcaacttgatgatcttaaaccatttaaaggcatatctcactatgagggacctgattcagataatcacaca

SEQ ID NO: 3896 - DNA, 544 bp, Glycine max
  unsure (1)..(544): unsure at all n locations
  Clone ID: jC-gmfl02220060b10d1
gcaagatagtaagactgctaaatacaactataatatgagaatctacatagaaacagagtgaaaatgtaaacttcaagctagcactattacaaaagggccccaaaaaataatacaaatctccttgcctttgtagagtcctcaatcaaaattacatatggttcttctctctttagaattaagatttctggcacgagatgaaccactgagtaaaaaaaatgccacctcttagaactcaaagcaaggatatcatcgaattgctgaagatttctcgtgatgaacaaagcacatttagttccatgaggacatttagagatgtttctgatgcctctttatagaatcaatccagatattatgcctttgaccgtctaaattcaaaccatatctcatagtgattgaatagtaagctatcatgagtatgcttcccaagatactcaagccccaaacttgcaagcctctttgtgcattcctctccttccaaccttgaacagaactttatattatgtgatacanagattcgtccttcataaggttccatttagatgct

SEQ ID NO: 3897 - DNA, 578 bp, Glycine max
  Clone ID: jC-gmfl02220060b11a1
cgatcaaacacaaaatggaaaagaatgtggggattctcgccattgacatctacttccctcccgcttgcgttcagcaggaagcattggagactcatgatggtgccagtaaagggaagtataccattggacttggccaagactgcatgtcattctgtaccgaagtagaagatgtcatctcaatgagtttgacagtggttacttctcttcttgagaagtatgggattgatcctaaacaaatcggtcgtctggaagttggaagcgagaccgtgatagacaaaagcaaatccatcaagacattcctgatgcagatcttcgagaaatatggaaatactgacattgagggtgttgattcaactaatgcatgctatggaggaactgctgctctgtttaattgtgtcaattgggtggagagcaattcatgggatggacgctatggacttgttgtctgcactgacagtgcagtctatgctgaaggacctgcccgacctactggaggagctgctgctattgccatgctaattggtcctgatgctcccatttcttttgaaagcaaattgagaggaagtcatatgtctcat

SEQ ID NO: 3898 - DNA, 467 bp, Glycine max
  Clone ID: jC-gmfl02220060b11d1
ttgtggtctgttcttttttttttttttttttttttttttttttttttttttttttttttgggactcatgtggtacatttttctatctacctcttaaaaattagaaaaaaaaacaagcgcaaccgaaagcaacaagggaagccccgaaaaaaaaccaacggaaaaaagggccaaaaaaacaaccagggagacgaaaaaagggcacacaagggggcaacaacccggggaaaaaagaaacaagaaagcaaggagcaaaaacaaaaaggcgcccgggagcggagaaggcggggggggccaggggggagcacaagcgccaggggcgggcgaaaaacaaaaaaccggacgggacgggcaccaacgggggccccggcccccccaaaacggaggacgcccatacggagggaaaaacccccgcccccgggggcaagggggggaacaccccggcgaagggcccccccccgggggggg

SEQ ID NO: 3899 - DNA, 578 bp, Glycine max
  unsure (1)..(578): unsure at all n locations
  Clone ID: jC-gmfl02220060b12a1
ctatccccttcttctctctcaatcagaatgggaagtgctggaagaactgattatggggcatacacctatgagaatcttgagagagagccttactggccatcagagaagcttaagatttccatcaccggtgctgggggttttatcgcatcacacatagctcggcgcctcaagacagaggggcattacgttattgcttcggattggaagaaaaatgagcacatgactgagaacatgttctgtgatgaattccatcttgttgatctcagggtcatggataactgcctcaaggttacaaagggggttgatcatgttttcaatcttgctgcagacatgggtgggatgggttttattcagtctaaccactctgtcattatgtacaacaacacaatgattagcttcaacatgattgaggctgccaggattaacggcattaagaggtttttttatgcctctagtgcttgtatctaccctgaatttaaacagttggaaactaatgtgagcttgaaggagttcgatgcatggccagctgagcctcaagatgcatatgggctatagaaactngcaacagaggaattatg

SEQ ID NO: 3900 - DNA, 499 bp, Glycine max
  Clone ID: jC-gmfl02220060b12d1
cacaaggaataaaaaattatttgcttagtaatcaattatttagacatcaaaattcaaaacaaataatttagaacttctagtgcagtaaaccatcttaagcaccacgaagtgccttaaaaaactattaaaatacatcaaggcttccgttccagacatgaactaccagcagagacataagaaatccttagcagctaattaaacataaccagataccgctatttagttgctatatataatataatccaactcttcacttgaaacattaaggtgaatcctactacagccatatgttgaccacctcattctttgccatctgcagctcgaagtgagcctagttgaactggggcttgagtctgcaccactttggaagacccatacacagatatatcaataccttgagccttctccttctcgatctgctccttaatccagaagtatgtgattctcaacccatccttcaacctcatagttggagcccaaccaagtttttcttttatca

SEQ ID NO: 3901 - DNA, 290 bp, Glycine max
  Clone ID: jC-gmfl02220060c01a1
gtaatggtcatcgtctagctatctcgatcgaactgtccaaggtcctgtcactactaatagaaaaaaaaaaaagacaaacaaaaagcagctgtccacaatattagtctcccaagttcatccgttgtcgcttattcgccattctttatcatgagttcatcctgcacagcgatgttctcggtggaataaatcatcgtaacgtgccgcacgatgtgttcgattagtggtaacacgtatgaatcctctgctactcggggtgcttcgtaaatgaaatccatctacatgtccatgtt

SEQ ID NO: 3902 - DNA, 471 bp, Glycine max
  unsure (1)..(471): unsure at all n locations
  Clone ID: jC-gmfl02220060c01d1
gctcttcctggaaggtttcccgtcatcactgtatgacgtcctccttctttgggggggggggggggggctcggcaccaagctgcgggaaaattagcagcagcagaagaagaagacgaacgtgaatgagataaaaaaccacaggtggcgtggtggcgtggtggtgtggtacttagcttagagggataaccatgcctggtgtatggaatacgtgttcacatttatttaacagttccacgtcaacttcacgtcgtncacgaaggtgttgcggcagtggtgtaaatagtggactttggaggttttgtttgccatgttatttgtggtagaattccggttgttgtaaaatgtgtagtttaaatagtaaaatatggtattttacattgaatttcggctggaaggcgtcggcggccaacctggaaaaaatttccgtccacgattcagttttgccgtcatttcattcatatcgggtgagga

SEQ ID NO: 3903 - DNA, 451 bp, Glycine max
  Clone ID: jC-gmfl02220060c09d1
gtcagtggactcatcaggatcctcatcagcaatcctacggatcatatcaagggctttcctaataagtttcttcttgattgtctttagactactatgttgctgaagcatttctcgcgatacattaagtggcaatgtgtcagaatcaacaagacccagcaaaaagtttaggtacttaggcaacagttcattaaattcatctgaaatgaacacacgtctaacatacaacttcaggttggatttgtttgcgttataatagctctcgtataaatcttgaggtgccttaggtggtacaaacaggactgccttgaactcgacatcgccctcagcagtgaaatgactccatgctaaaggtttctcatcactgaaatccttggcaagagagtggtagaacttggtgtattcttcttctgtaaccttctttggattcctcagccatatagctttcacatca

SEQ ID NO: 3904 - DNA, 623 bp, Glycine max
  Clone ID: jC-gmfl02220060c10a1
gcggcgaacaggttctcccttcggccaccaccgtcgccgccgccggctatcccaacgtctctcctcctccgctcgctgatcctgtcggtgcttccgatctcgctgctgctgcctcggacgacgttgttgcggaacctgaaattcacgcgctgatttcagacgaagagcacgatcacgatcacgatcacgagcatgagcatgagcatgaccatgacctcgagcacgatcacgagcatgagcatgaccaccacgaggaccgcgatgatcacgccgccgtggcagctgtctccttggaagatctcaaactcaagatcattaagcaggtggagtattatttcagcgatgaaaatctgcccactgacaagtatctgttgggttttgtcaagaggaacaaggaagggtttgttcctgtatcagtaattgcttcttttagaaaaataaagaagctcacgcgagaccatgcatttattggtgctgcattgaaggagtcttcactgcttggtgttagtggtgacgggaaaaggttcaagccgctcaacccacttcgttcaatgaattagagatcataagtatatactgctttgtagagatttgccagagatcattcatggagacattcacaa

SEQ ID NO: 3905 - DNA, 527 bp, Glycine max
  Clone ID: jC-gmfl02220060c10d1
aactagaaccaagaaaatttcaattggttatcaaacacagctttctttcatcccctttaacaaatttctcgatatgattttgttacacagattcctcgtaaggtgaggattaccacaactagaacagttctatgtttcccagcctaataatcttaaaatgggtatgtacttcaccaccaacactcacttccaaagattgagatacataatttaccagtccaacaaacccatgttgactcaagcgaacacgcatagggacccaagtaaaaactagtacatcactaaagcatcggacacataatactgctaaatacaatccctcatttgtggcgtccaatctttgctaattcgaagcagggacaggaaaccgacctcgtcctattgcgaagccacgtgttccatctggcattcttggtccagggggtggcttcgatgcttcggcagcatgagttgatggtgtacttccatggcccattccatttccagcacgatatttatggtttcttgatcttccttgatttctatac

SEQ ID NO: 3906 - DNA, 569 bp, Glycine max
  Clone ID: jC-gmfl02220060c11a1
gcacagccaaactcaaagaagaaagaagaaaatccagcgaaagtaaaaccagcatccgaaaaagatgagcagcatcggaacaggttacgatctctccgtcaccactttctcccccgatggccgtgttttccagatcgagtatgctgccaaagccgtcgataacagcgggactgttattgggatcaagtgcaaagatggggttgtgttgggcgttgagaagcttattccgtcgaaaatgatgcttccgggttccaatagaagaatacactccgttcatcgtcactctgggatggctgtagcaggattagcagctgatggcaggcaaattgttgctagggccaagtctgaagcaactaactatgacagtgtatatggcgaaccaattcctgttaaggaacttgctgaccgtgtggctagttatgtgcacctctgtacgctatattggtggctcagaccttttggatgtggtgtcatactaggaggttatgacagggatgaaccacagttgtacatggtcgaaccttttggtggttcctatagatatatcggtgctgcaattggcagggcag

SEQ ID NO: 3907 - DNA, 597 bp, Glycine max
  Clone ID: jC-gmfl02220060c11d1
caataaaggtcagcttctatagaacttcaaaacaattgtccaagaaacaggaaatcaataagggcattaaatcatcaagaagaatacaatatccaactatcgaagccttgtgtttcctatagatgtttcaaatgctcaattacaaagttatgaaatacaactttgaaataaacatttctagtccattaatctgcatccatttcttcaagagctgctttggccgctgcctttgctaattcaagaagctcatctggtaccttctcatgttggcggtttgattcatcacacacccagctcatttctaattcgaaatctttgtccttggcctcgtcatgaactccatatataattttagccacttcaataagcccttgtcgacatgtcatatcagcaagctttaacttttcaatctctgttttagcagcctgcctgcccttgccaattgcagcaccgaaatatctataagaaacaccagaaggttcgaccatgtacaactgtggttcatccctgtcataacctcctagtatgacaccacatccaaaaggtctgagccaccaatatagcgtacagaggtgcacataactagccacacggtca

SEQ ID NO: 3908 - DNA, 512 bp, Glycine max
  Clone ID: jC-gmfl02220060c12a1
cgtgtagcggagtactaggccgccgttacacgctactgctgtccgtcgtcaccgtttgaattacccaccgctactttgtcgtcattcttcttcttcttcccttttcattgaccttttccttccttcgtcctccaatggcgactgttccgcacccattatccctcgcaagtgtaggttttgctaaccgaacctcctccatctccagatccactctcaaatgctgcgctcaatctccttctccttcactagttgacaacgcccagaagtttctcgaagcttccaagaaggggaacgtcattcctctcttccgctgcatattttccgatcacctcactccggtgcttgcgtaccggtgcctggttaaggaggacgagagagatgctccgagttttctctttgaatcggtcgagccaggccaaatttctagcatcggacggtacagtgtggttggagcacagccgtgtatggaaattgtggcgaaagagaacgtggttactattatggaccacgtg

SEQ ID NO: 3909 - DNA, 490 bp, Glycine max
  Clone ID: jC-gmfl02220060c12d1
atcattaaataccttattatgttcatcacttctgtcataacattatcaaagtttcagattctccgtaattcatatcccctatcatctgcccacaccacaaacttcctctctaccatttaaaaaggatgcacacctcagttatcaaggagcatcactgatgatggatcaatccaaattatttatcaacaaatgaagattctgcaagatcaatggcacgagcaagagctgcagctttgttctcgcactctctttgttcatcagcaggatcactgtcagccacaattcccgctccagcctggagatgggcaacccattctctgcgtttgttcttatccttgtaggagtacattgtgtcataacgagcatttgtagggaaaactatggtcctcagagcaagggctatgtccatatcgccattgaatgatatacctccaaatcccccactatagggcccccttcttgcgacttccaactcatcaatcaactgcat

SEQ ID NO: 3910 - DNA, 432 bp, Glycine max
  Clone ID: jC-gmfl02220060d01a1
ataatgagtcatcgtctagctatctcgatcgaactgtccaaggtcctgtcactttatgacctgggccgaaccagcacaacgttggcaaccagggcaactgtaccaacgcaacaagccaaccggcctgagcggcctaagtggccctggatgggcggtaacatgtggcgtatacccgcggccgtttagattaaaattgttgcagtaggcctgcatttcacctataataatagtggcattacgtgtaacggttatgcaagcgaggagagcggaggggatagaggtgggatcgcgttaaaatgtaatgattgggtgattgggtgagagtagcgcccataggggcggttggccgcgcatgtgcgaacaaagcatagcggaaaataatgcgaaataggtcatagtgggtggcgctggagtgtgggcatgtcggacagg

SEQ ID NO: 3911 - DNA, 597 bp, Glycine max
  unsure (1)..(597): unsure at all n locations
  Clone ID: jC-gmfl02220060d01d1
gcatgcttgcaggaaggtttcccgtcatcactgtatgacgtcctcgcttctttggggggggagggggcgggaagctgaatcacataaacgaccagaagtataaccaaacagggtcaagggggtgaccggcggggatagggtagggtggatacctcttatattaaccgaataaaagcgcttatagcgagagaccaaaccagacaaaccgacggcacggggcctaatcgaaacaagagcgaaaagaatagagaagataggtacgccaatggcacatgccgtaatagcggcagcgctatccccgtagttaaagcagtgaccaccggggccgagccgttaatattgcgcataacagtggcaataaacgaatttaacagcgttaatagacttaattggttaggtggtatggttgcgcntggtaaagttggtaaccatggtgtagttggattaaagttgacgccctgtcacttcaaggttcactggatcgatctcgctagctcatcgtagactgtggtgagacgcgtattgaaaggtaaggtatgccattcgtcggggataatcgtcgcatgcccaaaattcgcctcggatttaatggaagtc

SEQ ID NO: 3912 - DNA, 567 bp, Glycine max
  Clone ID: jC-gmfl02220060d09a1
cctcgcagttccttgatctctcctctcaagatgcagatattcgtgaaaactttgaccggcaagaccatcacccttgaggtggaatcctccgacaccattgacaacgtaaaagctaagattcaagacaaggaagggatcccacctgaccagcagagacttatctttgcgggtaaacaacttgaggatggtcgcacccttgccgattacaacatccaaaaggaatcaaccctccatctcgtgcttcgcctcaggggtggcatgcaaatctttgtcaagactttgaccgggaagaccatcacccttgaggtggaatcctcggacaccattgataatgttaaggccaagatccaggacaaagagggcatccctccagatcagcagaggctgattttcgctggtaaacaacttgaggatggaagaacccttgctgattacaacattcagaaggaatccacccttcacttggtgcttcgtttgagaggtggcatgcagattttcgtcagactttgacaggaaagaccatcaccttgtagggtgaaagttctgatacatttgataatgtgaaag

SEQ ID NO: 3913 - DNA, 474 bp, Glycine max
  Clone ID: jC-gmfl02220060d09d1
gtgagatgataatggttttttattcttttgcacgagaccgtgcatagcaagctatgtcacagacatagccttaaaactaaaaacattaaagcagcacctaaataacagctgcaaccaacgagttcaacatacactggacataacaacagagaattcaactaatattggacataacagacagactcagaaaccaccacgaaggcggaggacaagatgcagggtggattccttctgaatattgtaatccgccaaggtacgaccatcttccaattgcttcccagcaaaaataagcctctgctgatctggtggaataccctccttgtcctgaatctttgctttcacattatcaatggtatcagagctttccacctccaaggttacggtcttccctgtcagagtcttcacaaatatttgcataccaccacgaagcctcaacaccaaatgcagagtggattccttctggatattataatc

SEQ ID NO: 3914 - DNA, 593 bp, Glycine max
  Clone ID: jC-gmfl02220060d10a1
gaaaaacgttgtcgttaccatctcttcggacaaaggtctttgtggtggaatcaattccacgtctgtcaagataagcagggttttgaacaaattgaattctgggcctgataaagagacaaaatatgtcatattgggagagaaggctaaggctcaattgttgcgtgactcaaagaaacaaattgcgctcagccttactgaattgcagaaaaatcccctgaactacactcaggtgtctgtcttggcagatgacattctaaagaatgtggagtatgacgcattaaggattgttttcaacaaatttcattctgttgtacaatttttgccaacagttgcaactgtactgtctcctgaggttattgagagagaggctgaatcaggaggaaagcttggggaattggattcatatgagattgaaggtggcgagacaaaagctgaaattcttcagaatctggctgagttccagttttcttgtgtcatgtacaatgctgtgttggagaatgcttgtagtgagcaaagagcaagaatgtctgcaatggacagctttagcaggaatgctggggatatgcttgatcgtctaccctcacctataacag

SEQ ID NO: 3915 - DNA, 515 bp, Glycine max
  unsure (1)..(515): unsure at all n locations
  Clone ID: jC-gmfl02220060d10d1
attaaaattagaaaaatcttattatgagtcatttcaaaaaaagacagactccatcttcaactgcaaaaacacaattccagaaatatctagtctcaaccaagaaatccccacaatgggtttgaccttggaacacttattacagaagtcaagtaagattaaaaaaatgacaccaacaaatttcaaaagaatccaacgatattatcttaatatcgcgccactgttgaatatattacacagattgctctcctgtaattaaccttccagtgctgaagctccagagataatctctatcaattcagtggtgattgatgcttgacgagttctgttataggtgagggtgagacgatcaagcatatccccagcattcctgctagagctgtccattgcagacattcttgctccctgctcactacaagcattctccaacacagcattgtacatgacacangaaaactggaactcagccagattctgaagaattcagcttttgtctgccaccttcaatctatatgaat

SEQ ID NO: 3916 - DNA, 491 bp, Glycine max
  Clone ID: jC-gmfl02220060d11a1
catctagctagctagctagctagcaaatagcaatgttaaaaaaccaaccacaaccagattggcctgagcccattgtccgggttcagtccttatccgaaaactgcgaagattcaatccctgaaaggtacatcaagccttctactgatagaccatccataaaaagttgtaattttgatgatgccaatattccaatcatcgaccttgggggactatttggtgctgaccaacatgtctcagcctcaattcttaagcaaatctcagatgcttgcaaagaatggggcttcttccaagtcactaatcatggtgtcaaccctgatttgatggacaaggtcagggaaacttggcgtgaattctatcacatgcccatggaggtgaagcagcaatatgcaaactcgccaaaaacctatgaaggctactggagcagacttggaattgagaaaggtgctattcttgatcggagtgattactactttcttcactatcttcccttt

SEQ ID NO: 3917 - DNA, 511 bp, Glycine max
  unsure (1)..(511): unsure at all n locations
  Clone ID: jC-gmfl02220060d11d1
aagtatccaatcaccattacatatccttactctgtggctcaatgcgcaaacaaatcccgatttagttacaggatttacaattaattatacatcaataaggtatagcgtgcttgtaaactcttgagaagtaagaaaatacaattcagacataaaaatcatatataactattaatttcttaaaattacatccaaacatgttgtataaatgtgaaaccaatcacgataatagtgacttactatttgatggacataaaatgtaagcaataaaagcctatgagagaatggatcatctgggagactttaaagattcaatttgagatttgcctcgaggtcctctcattctaatgaagagtctgtattcatcgaaggtcattgctgggtagagtgagggccttttcggtgttacaagctcttttattggttctatgggtatgtcacttttggggttgtagaaaaacgcaagagagactctctctttatctgaatntactatcactctgtgctccacact

SEQ ID NO: 3918 - DNA, 593 bp, Glycine max
  unsure (1)..(593): unsure at all n locations
  Clone ID: jC-gmfl02220060d12a1
ctcgagccggttccaccataacctccctttccatttggataatctaccaaaatgttccacaaatattttttaaataagccttaagctcaatcaaatttcaaacaacaaattaacaaaggagctaagaggaagaggatgatagcgggttatgtttgattgatgtgttacagtgatcatcaatatgagaatgttgcctgtttgctcagccaccccaagttattccacatcttcccagattcccttgtttgggggattgcacccaattcgaaaggatcttgagagcagatgtgtggctgaagaaggtgtgcatttggcttcacaatatggagctcattcactgagaaattcatttgcagtgcaagctacaaagacagtattgggcagtttttcttctacaagtgaatcaggataccttacaagcacgtggggttattcaccagtgctgacagatggacatcattcactgagtaacggngaagtcagacacatggaaagttatcatttatctactgtgccagatgaacttgcggacttcgcagaacaggccacttgaggatcntacacattagtgacaccagcacaaccagaaacac

SEQ ID NO: 3919 - DNA, 544 bp, Glycine max
  Clone ID: jC-gmfl02220060d12d1
agaccaaaacagcaatgagtttattgaaggattagtttgcaatactataagttaaaccaccacaaatttttggtacaaattgcatcacgcaaatacattcttattattttgacagtggaaattgtacccagcccttttggcgtggcatgcatgcaacaaaatcaaacataatcatcctcatgaaatgtttttttttctttctatattgtcaaaacgcctacaggcagggcagagtccgtggcagcacagagtttggataatttcaacttgcaatttttcaatcgtggaagttaaatttgttgtgaccatattaatctctcttctaattttcatgttagcacatgacaatctagaatgatctcatacattctgattgagaggaactgtcggttcaggaactggatcttggttaccttcactatcagatggttgggattcatgtttggcagcagcctgcaatacccggttctgaacatctgatgatgaaggtgatgtaggtaatcctaatccatttgattctaattttccagcagcccatgaaaat

SEQ ID NO: 3920 - DNA, 357 bp, Glycine max
  Clone ID: jC-gmfl02220060e01a1
tgatcatcgtctagctatctcgatcgaacatgtccaagcgtgcctgtcaccagtaacacagcagagctggcactgtgagcgtggcaaacaacattcaggcatgatagccagcctgcatcagaggcacgtgtgtacacagagggataaataatgcccatgtatacccaaggtaatactgctaaaacgccgagtaacgatgcgtacaggtaatacaaactggggaactgagcatgaacgatgagagccgacggttgtggatgcattgacatgttagaacggtaggacgggcgaagttacaaattacgttggagaatgcctgtgtaagtgcgccatgaccaagggcatgcgtagcgaaag

SEQ ID NO: 3921 - DNA, 501 bp, Glycine max
  unsure (1)..(501): unsure at all n locations
  Clone ID: jC-gmfl02220060e01d1
atgctaaggaaggctttcccgatcatcagctgctatggacgntcgctcgctgtgctattgggggggtggaggggagggcgcgagaccagctggcaaggcgggatggcaatgaaacgagtccaataggcatggataaggaaagtgttaagaaaggtagctatatatacaggtagagagatagatagaagtaaggatgtagtaaggggtgtagcattaggcgctaccacgcagacagagatcaacatatgctagaccgctgtgatatagggagtgtagcgagccgtcacatcgtgtgcgttatatcgatcgcagcggaaatatgacaatcacaccagtaaaagttagaccccacttcggaacgcacattatgccaagagttgaggcgcacgcacgtacacaaaagtttaaataggccagggcgtagcatacagtaacacgcaaacatagacataaatatatgagacgcagccacattatgacgagaaaaacgaaaaatgcaga

SEQ ID NO: 3922 - DNA, 535 bp, Glycine max
  Clone ID: jC-gmfl02220060e09a1
caagtttgtgttgtgttgtgtgtgcatgaaaggttgaaccccattttccattgacaattgaactgatggcgagcgccatgttaggggatgctaccacgagctttgaagatggtaagttggcgtctatgaccaccgatgacgtcgtcagagcctctcgtattctcgaaaacgatattcgcattctcaaggaagaggtgcagagatcgaatcgggaatgggaatcgtacaaggagaagatacaagataatgaggagaaagttaaacttaataagcaattgccctacctcgttggtaacattgttgagatattggaaataaatccagaagatgaagcagaagaagatggttccaacattgatcttgactcccaaaggaaaggaaaatgtgttgtgctaaagacatctactcgacagacaatctttcttcctgttgttgggcttgttgaccctgccaagttaaaacctggtgatctggttggtgttaacaaagatagttacttaatcttggatgccctgccttctgagtatgattcacg

SEQ ID NO: 3923 - DNA, 381 bp, Glycine max
  Clone ID: jC-gmfl02220060e09d1
cccaaaagccaaaaaaaacaaattttcaaaaaacccaaaacccgggggaaaccccccccgggtgaaaaaaaccaacccccaaaccccgcccccccgaaaaattttttaacggggaaaaacaaaaaaaaaaaccggggccccccatgccccaagggcccttccctacccaaaggcaagggggggggaaattgccccccccccccccccggaaaaaccaaaaggggttttcccggatccaaccccctgcccaaaaagtccccaggggccaattttcccggggccccaaaaaccaaagattatttaaaaaaattcccccccccgggaatttcaaacccaagcccaaaaaaccatttaaaaggccgcgccaaaaaaattgccccc

SEQ ID NO: 3924 - DNA, 73 bp, Glycine max
  Clone ID: jC-gmfl02220060e10a1
gttcaatgaagttctcggtgtgatcgtttgtagatcgattatattaatgtaatagatggtaccagttattcct

SEQ ID NO: 3925 - DNA, 73 bp, Glycine max
  Clone ID: jC-gmfl02220060e10d1
aggaataactggtaccatctattacattaatataatcgatctacaaacgatcacaccgagaacttcattgaac

SEQ ID NO: 3926 - DNA, 559 bp, Glycine max
  Clone ID: jC-gmfl02220060e11a1
ccctggcatcatattccgctctgacaatgagccctacaagtttcacatgaaagccttcgtgtctaagattatacagatgatgaaggatgagaagctctttgctccccaaggaggtcccatcatcttggctcaaattgagaacgagtacaatcatatccaacttgcatacgaagagaagggagacagttacgtccaatgggctgccaatatggccgtggccaccgatattggtgttccatggctcatgtgcaagcagagggatgcccctgatcccgtcatcaacgcatgcaatggtagacactgtggtgataccttcgcagggccaaacaaaccatacaaaccagccatatggaccgagaattggactgctcagtacagagtacatggagatccaccatcccagagatccgcagaagacatcgcattctcagttgcccgtttcttctccaagaatggaaatttggtcaactactatatgtaccatggtggaacaaactttggcagaacaagctctgtgtttagcacaacccgtattacgatgaggcacctcttgatgaat

SEQ ID NO: 3927 - DNA, 533 bp, Glycine max
  Clone ID: jC-gmfl02220060e11d1
aaataaacgctgtaattttgatatattgatttaaaaggatgtaggcattgaattgaagtatgatggtacaaaaatccaatgacatgttgagctcctggactcttctacttggccaagttaaaccacgaaacaagacctaagcacacctcacttggactgcaagttgcttcaccaaatctgggcaagcatccacgccattgttgttgaacaccgcacggtccaatgcaagcgtgcaagcttcttgccctaagcattctcgctccacgatttgcttgctggcagcagcattgcagcttcccattgcaaagtctccgcaataaccactggggtttccaaagcttgcgaactccactgccactatccttttcccagttgcacacgccatcgaagctgctgctccaactgatttcactacaggatggaaattgcccctcctagacacccatgaattcacgttcgcagggtccctctctccaactacgctgcagattgtgtctctgttcacatttaggatctcaacctgtgctggaact

SEQ ID NO: 3928 - DNA, 607 bp, Glycine max
  Clone ID: jC-gmfl02220060e12a1
tttggttggtaacatatagctacctttctcacgaacaaattttgactcactgaggtttgttatttttatttcttctttccatctccatggggaattgcttgttcagctcgtacgaaacgacgacgacgacggtgaaggttgtagttcacgacgggaggatggaggagttctcatacccggtgaaggtgtcgtatctgctgcagctctatccggcgtgtttcatatgcgactccgacgagatgggattcgacgacgtcgtaacggcggttcacgaggacgaggagttgaggcccggtcaactctacttcgcgctcccgttgagccgcctcaagcgtcacctcccgccgcaggagatggccgctctcgccgtcgtcgacacctccgcgctcgccaaatgcggctcccgccggaagcagattgtgtttctctcctgctgcgatgtaaatacgaagcctggccggaaagttgcgccggaaggtacggtctgtaataatgacgtggcgaggaaaggaaggagtaaaattggaggtaggggtatgggcaagttcactgctacgttgagttccatacccggaacaagggtagttttggcaagagatacaaatat

SEQ ID NO: 3929 - DNA, 555 bp, Glycine max
  unsure (1)..(555): unsure at all n locations
  Clone ID: jC-gmfl02220060e12d1
aatcaaacgcgtatacttcaattcaattgttgttctaaacttttaatgaaacagatctacaatgttcaaaaattaatatatatttttcctcttttttattttttaatatatacaaccatacaaaaaattaccagcgaacacatatttttatctctttccaaaactacccttgttccggtatggaactcaacgtagccgtgaacttgcccatacccctacctccaattttactccttcctttcctcgccacgtcattattaccgaccgtaccttccggcgcaactttccggccaggcttcgtatttacatcgcaggaggagagaaacacaatctgcttccggcgggagccgcatttggcgagcgcggaggtggcgacgacggcgagagcggccatctcctgcggcggtaggtgacgcttgaggcggctcaacgggagcgcgaagtatagttgaccgggcctcaactcctcgtcctcgtgaaccgtcgttacgacgtcgtcgaatcccatctcgatcgagtcgcatatganaacacgccgatagagctgcagcagat

SEQ ID NO: 3930 - DNA, 97 bp, Glycine max
  Clone ID: jC-gmfl02220060f01a1
ccgatcctggttctagctatctcgatcgaactgtccaaggtcctgtcaccgtgcggcgaatataccgtaagcgcgcggaggtagtggggataatagt

SEQ ID NO: 3931 - DNA, 334 bp, Glycine max
  Clone ID: jC-gmfl02220060f09a1
aaaaaagtcagtgatggtcagatatttcgcttccaatttctcactttgggacaggataagatctttcatcagatctcaatccaagttcagtaatattctggcagccaaacctcaatgacagggtgaatcatatggcatcttcaaatataaatcaactttgtatactgtcttctctttcatagtttgtataaagagaaaacaaacacaaatgctttagaatcataggtaaaatcttgtatatataatatacctataattactcaccaagaaagcatgctagtgaacaactattactcaggagatgttttatgttatacatacgagcatttttttt

SEQ ID NO: 3932 - DNA, 334 bp, Glycine max
  Clone ID: jC-gmfl02220060f09d1
aaaaaaaatgctcgtatgtataacataaaacatctcctgagtaatagttgttcactagcatgctttcttggtgagtaattataggtatattatatatacaagattttacctatgattctaaagcatttgtgtttgttttctctttatacaaactatgaaagagaagacagtatacaaagttgatttatatttgaagatgccatatgattcaccctgtcattgaggtttggctgccagaatattactgaacttggattgagatctgatgaaagatcttatcctgtcccaaagtgagaaattggaagcgaaatatctgaccatcactgactttttt

SEQ ID NO: 3933 - DNA, 576 bp, Glycine max
  unsure (1)..(576): unsure at all n locations
  Clone ID: jC-gmfl02220060f10a1
gagaagaacagagagagatccatccatcaattccaatggccgatcagctcaccgacgaacagatctccgagttcaaggaagccttcagcctcttcgacaaggacggggatggttgtattaccaccaaggaacttgggaccgtgatgcggtcacttggccagaacccaactgaggcagagctgcaggacatgataaatgaggttgatgctgatgggaatggtaccattgatttcccagaattcctgaatctcatggctcgcaagatgaaagacactgattcagaggaggagctgaaggaggctttccgcgtgtttgacaaggatcagaatggcttcatctctgcagcggagctccgccatgtgatgaccaatctcggtgagaagctgaccgacgaggaagtcgatgagatgattcgcgaggctgacgttgatggtgatggtcagatcaactatgaggagtttgtcaaagtcatgatggccaagtgaggaccaatcaaccataacaaataaaaattgaaaaacacctgaacagaaaaaagacagggcagataagctttgatgagaattatatnttcat

SEQ ID NO: 3934 - DNA, 589 bp, Glycine max
  unsure (1)..(589): unsure at all n locations
  Clone ID: jC-gmfl02220060f10d1
aaaagcacaaattgcaaccaattgttccaggttcatagtagtaacccaaaaaagatgaaaagtgaagtacaaatgcatggtgagacacatctaatccaagctactaaaacaaggacagagcaaacaagtagaaaatactaatgagcaataccaataaataaaagcaaacaaagccgaccaacaaaaactaatgaccccaaatgaagattgtcctaatgaaaatataattctcatcaaaacttatctgccctgtcttttttctgttcaggtgtttttcaatttttttttgttatggttgattggtcctcacttggccatcatgactttgacaaactcctcatagttgatctgaccatcaccatcaacgtcagcctcgcgaatcatctcatcgacttcctcgtcggtcagcttctcaccgagattggtcatcacatggcggagctccgctgcagagatgaagccattctgatccttgtcaaacacgcggaaagcctncttcagctcctnctctgaatcagtgtctntcatcttgcgagccatgagattcaggaattctgggaaatcaatggtaccattccatcagcatcaa

SEQ ID NO: 3935 - DNA, 590 bp, Glycine max
  Clone ID: jC-gmfl02220060f11a1
cggctgagaaaatagcgacgcggaaacacgcccgtcttcacgatcctgcgatccagcgcggcgtgtccagcgattccgctctccgacgagtctgcgcaggctcaagagtcgcgaggccagccgccggtgaagaatcgcgcgattcgtctggaaatcgcgattcaagcacgattcatccccgataaagatattcaaccacgattcaggaacaaaaacgagacaacctccgattcgtatcggtagcagctggaatcgtatcgaatcgtgcgatacgtatcgtgaatattgaaaatgaagtttcttgattggtacctgaagattggggttgtgtcggctctggttggggcttctatggagttgttcatgatcaaaactggattctatgacaaagtaactgttttggagtcagaaaagcgtgcctgggagaattcgcctgatgctcaggcaattagagaagctctaaacccctggagacagattgacacagaataaacaaagaagtcctgactcaattatgaatcattttcttataatccatgagtggatttaaagaactcaaagtgttatgtgagaatgtgcggggaataact

SEQ ID NO: 3936 - DNA, 396 bp, Glycine max
  Clone ID: jC-gmfl02220060f11d1
aaaaaaaccttgggttttttttttttggggggaaaaaaggggcccccccgggggcttggccaagggggggatttggccccttttccccaaaaaacccggggccctttttcagggggcaaaaaaaaaaaattccaccctcaaggcccgattgcaaaattgggggggggggggccccccccaaaggggcccctgattggggggctcccccccaagggggggccaccagggggggggggggggaaaatccccgaaccctttttataacagaaaagctgggccaaagggttttaggttttttcccccccttttcccaaaacccttgggggtttttaaaaaccccccggggttttaaaaaaagggttcctaatgggggcggggccttttgggtttttcggg

SEQ ID NO: 3937 - DNA, 568 bp, Glycine max
  Clone ID: jC-gmfl02220060f12a1
ctctagagtaattgcggaatcagctagaattttctaataatggccaaagacgttgagcaggttacagagcaaggtgaatactccgcgaaggattaccatgacccacctccggcgccgttgatcgacccagatgagctcactaagtggtccttgtacagagccgccatagctgagttcatagcaacactccttttcctttacatcaccgtgttgaccattattggctacaagagacagagtgacaccaaaatccccggtaacaccgagtgcgacggcgttggcattttgggcatcgcttgggccttcggtggcatgatcttcatccttgtttactgcaccgtcggcatctctgggggacacatcaaccctgcggtgacattcgggttgttcctgggacgcaaggtgtctttggtgagggcgttgttgtacatgatagcacagtgcgccggtgcaatctgcggtgctgggttggccaaagggttccagaaatcgtactacaacaggtacggaggtggagttaacactgttagcgatggctacaacaaaggtacccgttttgggagctgag

SEQ ID NO: 3938 - DNA, 434 bp, Glycine max
  Clone ID: jC-gmfl02220060f12d1
ggctaatgatccaccacattatataaaaagtgaacacatgatgataaatactggaagaaagaaagaaattaaataaaaaaaaaaaacaaaacaaaagggatacaaatacacccttgacataaaagcattcttatctacaaattcaagagccccaaacccacggtatttggcttttgccccaaacccacgggtaagcagaaaagccaaaaaggaaggaactccaagaattgaactgaaacactgttattgttttgggtgacacaggacaaatgatcataatttaggtagtggagattattaattaagggttgctcctgaatgatccaagagctttgattgcagcagctctaagaatgtattgatggtagaatgcagccaccgtagctccaacaaacggtccaacccagtaaatccattggtcgtcccaggctttg

SEQ ID NO: 3939 - DNA, 276 bp, Glycine max
  Clone ID: jC-gmfl02220060g01a1
gcgatgcggttccaaggatgtcgatcgaactgtccaaggtgctgtcaccaaaaaggacgaggacaggggcggagggggagggggaggggagaccgtgtgaggaaggggcgcggttgagtcgaatacacaaaaacaaaaccatacaagtagatgtatatatatccactgtgcaattaaaggaaagcaggcacaacacacactcaagaaaaaaaacacacgtaaattgaattgggtttcaaaccgagtcggggcgtttggtggccgaatttgattggt

SEQ ID NO: 3940 - DNA, 378 bp, Glycine max
  Clone ID: jC-gmfl02220060g09a1
gcttagactgtgaactgttcatagccctgttgcatatgcggtggttacaaagacatagaaggtggaggatactgagattgcaaccccagcatcatcatcctcggccttgactgatgaatatgatgcttgtacgtcttcagccctatgcgatattactgtcttggattgcttgaatgctagcgaaataacattccctattgtgcaggacttggaaaagggtccttacgcggagattgatcgagcagttttatctgaatcagtactgatgtaagtggttgtgtgtgagatgtacgggtgactgaattgaagtcagttatgcttcacttgcatgtgacgagggcacctgttctgacataaggtactaccgtggaaacagtt

SEQ ID NO: 3941 - DNA, 365 bp, Glycine max
  Clone ID: jC-gmfl02220060g09d1
acaagaacttgcattacttgccttggggctcctaaagtaggtcccatctaccatcaggttgttgaagctacctacgtgtccattattggactaggaatcttaggagttgaagctatgttggtcatgcaggtatctaggagcccggcataccgcgttttccctgagtgccatcccggtgggacctatctatctgcagcggtacactacgggtggctccctggcttaacgtcgccactgctttagcggcaaacactttcgttgcatgtgctgtccatgacccatgggcacctagccctagagactttggatgcttaacccgacctaccggagcggacctgcctcgtgattcatgacctagatcatgc

SEQ ID NO: 3942 - DNA, 610 bp, Glycine max
  Clone ID: jC-gmfl02220060g10a1
gaaacttgaaagtaacagtctaacaacagatcgttaaggagaccaaaccaacagaacagagtaacagagagttagcattgcaacaaagagaaagaaaagttgaaacattttcagacagtggcatgtgggaatctattctgttaacggtggctgccaccgctggcaacaacatcggaaagatccttcagaagaagggcactatcattcttccacctctctctttcaaactcaaggtcataaggtcttatgctttaaacaaaacctgggtggtaggttttctaatagatatatttggggcattattgatgttaagggcattgtctctggctccagtctctgtcatccaaccagtttctggctgtggactagcaattctttcaatcttttctcatttttatctcaaggaagtcatgaatgctgttgattgggttggcattacattagcaggttttggcacaataggagttggtgctggaggtgaggagcaagaggtggttgctctatctattcttcacataccagggctggcatttattggtttcatcttgtttatacttcttagtggatggtttcaatatgcaagcgccaacgaagagaacaagagatgatg

SEQ ID NO: 3943 - DNA, 540 bp, Glycine max
  unsure (1)..(540): unsure at all n locations
  Clone ID: jC-gmfl02220060g10d1
gcatacgaataaactgtttaccaatttgtttaagtgcaagtaaaacaaattttgtatgttggtatgctatcatcactgtcatatacaatccttgaaagcaaaaatagtgtaagttcatgaatagtttttacaaggtggcatctgaagttaacaaacatttcatccaaaatgtgtgagccagaagcaatgaatgatcaccaaaatgtcatgccctctgatgaagcgccactataatatacagaattggccttggcagacggattagaaagcaacttaatgcttagaaatcctggggatgaaggaacattatccagctcatgtcaactcaagctttttctttggaagatgatgatagtaaatgatttaatgttgctgcttgaatgacagcacttggacttggttctctcacacgggaagaagtggctcctctaaggccaaaattcttctccacattgcttctttnttgtcgtgaagaacangaaaggaatcttactaaccgtgtagaaccaacatgtaaaatcacaccaaccataataagta

SEQ ID NO: 3944 - DNA, 521 bp, Glycine max
  Clone ID: jC-gmfl02220060g11a1
acaaattacactctttgcctcgcaccttcaacttaaccttttctactcataatcttaacaacttgctagaagaagataaagaaagagaaaaagtgtgtgtgtgtgagagagagcaatggctggctcgtgggcacgccgttctctgattgttctggctatcatttccttcggatgtttatttgcaatttccattgctaaggaggaagccacaaaattggggacggtcatcgggattgatcttggaacgacctattcatgtgttggtgtttacaagaacggccatgttgaaatcatagccaatgatcaaggtaaccgtatcaccccatcgtgggttgctttcaccgacagtgagagactaattggagaggctgccaagaatctggcagctgtcaacccagaaaggaccatctttgatgtcaagagacttattggaagaaagttcgaagataaggaagttcaaagagatatgaagcttgttccttataagatcgtcaacaaggatggaaaaccttacatacaag

SEQ ID NO: 3945 - DNA, 452 bp, Glycine max
  Clone ID: jC-gmfl02220060g11d1
acagctgaagaagtttcgtcgtaaaactaagcaaaaaagtaaagtacaagtaatttcacaaagtatcttatcatcgccaccaaaaaagcaagcgcaggggacttcttaattcccagctatcataaaaatttaacagactccgactaatctagagctcatcgtgagaatcgtcctcgtcttcttcgcctgatgcaccaccaccgcctggggctcctccagatctctgatacacagcactaatgattgggttgcaaacggcttcaacctccttcagcttctcttcataatcttctttctccatactctggttgtcatccagccattccagtgcttctttcacagcagtctcaattttctccttttcatcagactccaacttgtcagcgagcttgtccttgtcactgatctggttcttcatgttgtatacataggtttcaagactgttgcgagca

SEQ ID NO: 3946 - DNA, 573 bp, Glycine max
  Clone ID: jC-gmfl02220060g12a1
attgattcgttgtctgacacgtaattagtgtttagatatactactgatcatgtggttgctgatattgccttacaggcctatgtgcagcagttagaatcaagtcgtttgaagttgatgcagttggagcaagaacttgaacgtgcaagacagcagggaatgtatataggtggtgggttggattctaatcatctgggttttgctggatcagtaaattcaggaattacaacctttgagatggagtatggacactgggtgaatgagcaaaatagacaaatcacagaactgagaaatgctttaaatgctcatattggtgacgtagagctcaggattttagtagatggtatgatgagccactatgccgaaatgtttcgcatgaaatctgctgctgcaaaagcagatgttttctatgttatgtccggtatgtggaaaacaacagctgaaagatctttcctgtggattggaggctttcacccctcggagcttctaaaggttcttggtcccctgattgaacccctgacggagcaacagccgttgaatatctataacctttgacaatcatgtcagcaagcagaa

SEQ ID NO: 3947 - DNA, 408 bp, Glycine max
  Clone ID: jC-gmfl02220060g12d1
ggaataaaaagaattgcatatgaagcttttttttccaaaatttctacaaaacatagtaacgggttacccccataaatgggaaagcccgggattctagttggaaaaggggggctgcctggaaatgtttttagggtcaagcccccaatgggtttcaccaaagatgatgccgggatttaaaaaaattctggccgggctctttttaaccaagttggggggcccaaaatctttgttgaagcccactgactggcttcctgaggggcaaattttgggggggatgccttggactatgctatatcaaaggggggagattctgcccggaatcaagaaatggttatatatccgggtagctccaagggggtcatcaatcccattttctataagggaacaaatcctgctagctggactttt

SEQ ID NO: 3948 - DNA, 545 bp, Glycine max
  Clone ID: jC-gmfl02220060h01a1
atgccgagtcagcgtctagctatctcgatcgaactgtccaaggtcctgtcaccactaaacgaagtctaaaagtgagccgggcggtcggtctgtcggtctaataagcctctgcaccgacaggtgataatcacgagtaaccccgaacacccggcacgtcaccagtttgcacatatcgccaacgttgagcgtgcagtttgcacgtgatagtaaccaaacatcaggtacacaccgtgggccataagggattagcattaacggataggcgaaattacgggttttggatgtttagtggttagcgtgcatgatccatcctagcgagttggtgttgatatgtcgcatgtgtttttatcagtcatcgctattgttgttacctttcccattatgtgtagtactagtatgcaggttagttattggtacgagttgccggcaaggccaacgccagccatgcgtggcagtgggcggggaaaagtgcaaaaagtaacgtacaaacagatgcggtactggtgcccgagtgtagtagggccagcagaaaagaacgcgtgagg

SEQ ID NO: 3949 - DNA, 360 bp, Glycine max
  Clone ID: jC-gmfl02220060h01d1
gtcccgattccgttccaggaaggtttcccgtcatcactgtatgacgtcctccttctttgggggggggggggggcagggcgggcacagaggaaattgagtttagaagggcaatacggctaaaaggatagtattatagtaacaccgattgaaaacatagaattaaagaaaaaaggaggtgtagggggtatataggtaaggaaatagggaatgctaacaaaaggcacaaggcgagtaaagacaatggaggggagtagttaaagcagcaaagatatacaagtgcatacgagtgggtgcttggcagggggtacaggggaaaataaccagtacgtacgttaattattgttaaggtaattaccagtt

SEQ ID NO: 3950 - DNA, 516 bp, Glycine max
  unsure (1)..(516): unsure at all n locations
  Clone ID: jC-gmfl02220060h08a1
aaaaggcccacaatcataacaaccaaaaagcccccttctccttccaacccctccattttcaacaacaattcctctaagcatcgttcagacaagggtacaccacaacagcttttgttagtcctcaccaagcgatgagagttcccgttccctcatccccacaggccaacccaaaacccaccaataacgttgtccgtaccattgcccttcccaacctcaacaatagcaccacgccccccacgggcctgtgctacgagcccacttctgtccttgacctgtgccggagcccgagcccgggcaccgaaaagcccaccaccgatcactccgttctcgtcaccaactcccaagactatctcgacctggaagaccatgcgttgcacaacttggactgggactccatcatgaaggacttgggcttacacgacgactccgncacccccgttttgaaaacttttctccaacccgacgacgacgacgacgacgacaaccacaacaacccatcatgcgacgacttcacac

SEQ ID NO: 3951 - DNA, 399 bp, Glycine max
  Clone ID: jC-gmfl02220060h08d1
ggaacctaaatttactttcgttgcagtttattataattactacattattacataatcccctctgccaataataacactccatgttctaacagcgccatgctgacgtggcaacaatggccctatcatgccagaaaagcaccagttcgttctggcgttttgccacgtgaaatcctctgatttgagacttcgctaacaggcactctgcttgaaaaaccggaaactggcttaactggaccgggcttattccggcgccgtaaaacgccttccttcacgggggaacccggcggcacgcactcttcaccggcggcaaaatcttcggccgcagctgcatcatctcgattctcctcacccactcccctccggcttccaccgtcgacgcgtccagcgactccagcatca

SEQ ID NO: 3952 - DNA, 576 bp, Glycine max
  unsure (1)..(576): unsure at all n locations
  Clone ID: jC-gmfl02220060h09a1
gtgactctttagtgaaaccttcactccatggtttcctcattgccctttgaagcttgaactcggataaagatcgtgactttggctgattctggaaatgggttctcggattcagcttctgcctatttgcttttggctgcacttgacatgcttcagcttcttttttggtagcatagtgagtgtgagaggagatgcaactgtgcaagggagtgttgccattgatggcaaggctgtgattggaaccattgatgaggattttgtgtgtgcaactttggattggtggcctcctgagaaatgtgactatgggagatgcagttggggccttgcttctcttctcaatctggacctcaacaacaagatttttttaaatgctgtgaaagcattttcaccgttgaaacttagattaggtggaagtttgcaagacaagctaatatatggcactgaagataatcaccaaccttgtactcctttngttaagaacccttctgagatgtttagnttcacgccagggtgcctcccaatggatagatgggatgaacttaactacttttttgaaaagcaggggctaagattatcttt

SEQ ID NO: 3953 - DNA, 478 bp, Glycine max
  Clone ID: jC-gmfl02220060h09d1
aaatagaaaaaataatactcctcacacataatttgctcctgatgcacgggaacatgcactagtaaaagcatataataaaaccaccaacatcctagttctcaaactaaataattggcattctcttatggaaactaacacattttattttccatgtaatttgccaaaccacctagtgaaaccaatttttttggtctcccctagtgccacttagtacttagccgcaagctgaaacaacagcatcaggtaaatgagcaaatacaatagagaaaggagcaacccttattggctctgatgaattcacatttataggctccaaaggaggaatatcaccatctgagcttacactcagagggtttccatttagtaccatgatttggctatgtatatccccatcctgtggagttagatggtactcttctcttgctggttcacttgcaagaggtagttccatcacttttgaatgagtagacatctttct

SEQ ID NO: 3954 - DNA, 228 bp, Glycine max
  Clone ID: jC-gmfl02220060h10a1
attacagttcccttgtatgctaatcagtttcagcaagcgaactgtaattacttagtatttagacatgaaaaatagttgttaaaaggatcccagttattgactacctcttgttatttgccccaacccctatatagtcatctcgtttcgctgtttgagcctaattaattaattaattaattatggatttttaatgtacattggtgcctgaatcgagtttatttgttgtct

SEQ ID NO: 3955 - DNA, 305 bp, Glycine max
  Clone ID: jC-gmfl02220060h10d1
catgatcagacatctaaataaccctattaaggcaccaatggacattaaaagtgcgttacttattgattaagtggataggctcgaacagcgaatcgagacgactatattggggttggggcgaatcacaagaggtatgtaacaactgggatccctttaacaaccatatcctaagtgtaactacccataccctacctggatgcttgatgaaactgattagcatccgagggaactggattctcgagccgaatggcgaacgtaatttggcgatgctgccaagccataggtttcttaaagggttgcctaaa

SEQ ID NO: 3956 - DNA, 352 bp, Glycine max
  Clone ID: jC-gmfl02220060h11a1
cttttctcttatcatggcttctcacaacatcaaaatccacgaccacttaagggtttcccctccctcagcaacagaaatatccctctctctcactttcttcgacctgttctggctcaggttccaccccgtggaacgcatcttcttctacaccctccctacaccccattcaaatccatccattttctattccaaacttgttccaaagctcaaaacatctctctctcgcactctccaacacttcccccctctcgccggcaacgtcgtttggcctgataacaccccaaacccaaccgtccaatacacccaaggggactccgtttcacttgtggttgctgaatccgaagctgatttc

SEQ ID NO: 3957 - DNA, 515 bp, Glycine max
  unsure (1)..(515): unsure at all n locations
  Clone ID: jC-gmfl02220060h11d1
cgtcaatatgcatgttccgaatttatgatcaatcatctaacattccttgacgaaacaaagtacaaaagagatccatgacatgtttcttcagcacgagcccaacttgaacaccatcattcccatccttgctctctgcaaacccaatggttaaggctctatccaccgatgctatctccaccttagcaggctttccccaaccaaaatcagttccataaactccaaaccggttagaccctgcaattcccatgatttcaactccgtcttttcccaaagactcatatctagaaaacgcactttccatcccatgaaaaatcccctcatctaatatcatctttattttactatgaatactctttgcaacaatagcaaaagcttcttcctttatgaagtccaatggttcagcatccaccacatgcccccacacacaattgccaaaataattatcatggattggaggctccaacctngccctgcaatccactgtgaacgcaaaagcaaatttctctttctctttt

SEQ ID NO: 3958 - DNA, 536 bp, Glycine max
  unsure (1)..(536): unsure at all n locations
  Clone ID: jC-gmfl02220060h12a1
atttattttatcctggatgggcatggtctttggccacttggattcttggtgtaccttattcccttgttgaagctgttatatggtcttgtgttgtatactacactgttggatttgcccctgctcctggaagatttttccgctacatgcttttgctatttatgcttcaccaaatggcattaggtctcttccggtttatggctgctcttgcacgcgatatggtcattgctaatacatttggaacagctgcattgatgattatcttcttgctgggaggatttattatcccaaaaggtatgattaagccatggtggatttggggttactggttgtcacctcttacctatggtcaaagagcaatttcagtcaatgaatttactgccacaagatggatgcagcattcggcttttgggagcaacacagttggccttaatattctcaagggattcgatataccagctgaggattactggtattgggttggtttgggagntttaacactctacgctcttattttcaactgcttggtcactttgggc

SEQ ID NO: 3959 - DNA, 513 bp, Glycine max
  Clone ID: jC-gmfl02220060h12d1
gacagcaacactgatgacattccattaattttagtgtcatattcaagagtagcagctatgaattctttcacattgcctttaaatccaggtcccacgagcatttcttccacatcaccaagttgagatgtgataataccacgtagtgtccaagaaactgggcagagataatggaaccacatccaccatacaggtatatgagattttggaataagaaatccggatacaagattccatagagagtaaaatgcagaagaaataacagctgcaaagtgttgtgtaggtgtaatgccaacagccatcatgccgtaaaaggtgaagtacataaatgtgaggaacatgaacacaagatagaggaaaaactttccaacatccctttcaaaattgaccatgaaatatgtgattacaccaaatactattgtctgaagagcaacatatgggatctccaccagcccctgagctattgcgtatgagattggagagtacattccagcagccttctctctataaaacact

SEQ ID NO: 3960 - DNA, 471 bp, Glycine max
  Clone ID: jC-gmfl02220061a01a1
gatcagacaacactgagcatcgtctagctatctcgatcgaactgtccaaggtcctgtcactaagaatagactagacacgcacaacgcacaacacaaaaagcctaagtgttagatttacgacataatggggtagacagccacacgccaaacgtttgtggtgtaataagtccgggttcagtagtaattttgtgatgcaacatagtagaccctagaggttacttctgatgaaccaacagcggcattggctcgcccacgtggtgaaaacacttggggtttagaataaacgtaaacaggccgtggtagtgttccgtgtgcggtgcgtgtgtgagtggtcacttagcgtggtaaacagaatacacaaaaaccagcaatgaccaacgtggcaagtaaggcaggcgccaaaattatgagagcaactatgcctacattgccagcagcggaggccaacagggaatgatgagcttcactgct

SEQ ID NO: 3961 - DNA, 463 bp, Glycine max
  unsure (1)..(463): unsure at all n locations
  Clone ID: jC-gmfl02220061a01d1
ggtaccgattccgttccaggaaggtttcccgtcatcactgtatgacgtcctccttctttggggggggggggggggtataaagaaccagaaaagtaatgtactttcgtaggaataaccgttagccaataagggtacgcggagatagagctataggaggggtgtcaaggaacagtagtagtataaaggaacggtttttataatggaggtagcttacaggggacaatactaaggtagagtatactgggcaacgtcatggagattacttttatccggtagtacagagcgatggccgtatggctggtatatggaaagacggtgtcaggttttaggtgttgacggtatcattaaaattatgatcgggaatgttgttttagccantggcaagcaactggccggcactataagggagttagataaggttacttgcaagacttgggcagagctctgtctagtgggtgacagt

SEQ ID NO: 3962 - DNA, 571 bp, Glycine max
  Clone ID: jC-gmfl02220061a02a1
gtctgattttgttatcacttgcttctgcttccttcgccgccaacccaagaacaccaattgatgtgccatttggcagaaactatgtgcctacttgggcctttgatcacatcaaatacctcaatggtggttctgagattcagcttcatcttgataagtacactggtactggcttccaatccaaaggatcctacctgtttggtcacttcagcatgtacataaaattggttcctggtgattcagctggcacagtcactgctttctatttatcatccacaaactcagaacatgatgaaatagactttgagttcttgggaaacagaaccgggcaaccttacattttgcaaactaatgtgttcactggtggcaagggtgacagagaacaaagaatctacctttggtttgaccctacaagagaataccacagatactcagtgctatggaacatgtaccagattggtttctatgtggatgactacccaataagggtattcaagaacagcaatgacttgggagtgaagttccatttaaccaaccaatgaagatatacaacagtttgtggaatgctgatgac

SEQ ID NO: 3963 - DNA, 402 bp, Glycine max
  Clone ID: jC-gmfl02220061a02d1
gattgaattacaaatccaaattaaggcacattgccattttttttggtacatagctcaaacaggtttacatcccatagcttttgcagcagcaataaatgaggatttaaattttcagcaatccaagccataaacccaaattgaattttgtatcaacacttagggggggccttcatgaaatcaaggaaatgggaactttatgggaggggaaataaaaataggatttggaagcttattttaaaatatatttttggggacaaaaaaattccccatgagcaaaattagtggaaaattgccccccccaattttttgatgagcccaattaaatgtcccggcctttggccccctttggaaaaacttgagggtaacgtttgcggcccgagcaatttttgaaaaaggggaatt

SEQ ID NO: 3964 - DNA, 521 bp, Glycine max
  Clone ID: jC-gmfl02220061a03a1
aatatggccaccaccactacccagcctccctctaatatctgttttttccttctgttgttgcttctagcacactttcatttgggcataagccaacttgagctgaattactactctaaaagctgcccaaaagctgaagagatcatcaaggaacaagttacacaactatataacaagcatggaaacactgccgtttcgtgggtcagaaatctcttccacgattgcgtggttaagtcatgcgatgcatcattactgttagcgacggtgagcgatgtagtgtcggagcagacatcggatagaagttttgggatgagaaacttcaagtacgtaaacactatcaaagcagcggctgagaaagaatgccccttcacagggtcatgcgctgacattgatgctctttctgccagagatgccattgctttgttgggaggaccaagcattgaaatgaagacagggagaaaggacagcaaagaaagctatgcaatggacgtggatgacttgattcccaaccacaatgatccatg

SEQ ID NO: 3965 - DNA, 265 bp, Glycine max
  Clone ID: jC-gmfl02220061a03d1
gaaacaaacgatttttttattttgtttctttgtattttttttaataacgtgtttaaataaaatataaaaattcattctacggggggaaaacagagacaagataaaaaaaaccccccataaaaccaacagtacaaaaccgggaaaaaaccagacatgaacaccttcagttagggaaaaaaaaaaaagccaaccccacacaagagacagaaaaacaaagtatatggataaccgaccccaacccaagggaactaagatgaaacaccca

SEQ ID NO: 3966 - DNA, 496 bp, Glycine max
  Clone ID: jC-gmfl02220061a04a1
caaaaaagaaaatgatgctcggagagcaccatcgcgcgaatccaacggttcacgtgccaccgtggccaacccacgacgatccaacggccgagatgtactccgcgtttttaacaaacgacgtcaatgctggtgagtactctccgtactatcttcaagaagcactaacggctctgcagcgttttctgccgtctaacgaaacggacgctgactcggacacggaggctcaacccgacgcggcggtggacgcgtactcgtgcgaccatttccgcatgtacgagttcaaggtccgtcgatgcgcacgtggcaggtcacacgactggacggagtgtccgtacgcgcatcccggcgagaaggctcgacgccgggacccgagaaagttccactactccggcgcggcgtgcccggagtttcgcaagggaaactgcaagaaaggcgacacgtgcgagttcgcgcacggcgttttcgagtgctggctccacccggcgcgctatcggac

SEQ ID NO: 3967 - DNA, 456 bp, Glycine max
  Clone ID: jC-gmfl02220061a04d1
aggataaaaatatacattaacataaataatttgaataacaagattcctcttggatcctacatatttatacatttgtacatcaatgagatgagattagcaagtaagtgaaaataacagacacgatagagttaattaagtaacatagcacatgataataataatagtaattcgtaataacaacaatagtaagctaactgtacaaaaggcttcggatactttcaatttcccaaatcaatagagcgatgttgatgaatttccaagacaaactccccaaaaaagagatccttcacttcttctcttcagtctttacccaaataccataccataacataccacgagatagaataaaaaatatttacacagactcgcatctcccaaaataaatctgcattgctaaatattaataataatatcagttaaccagctccgagacccacccaacatccggagcaccac

SEQ ID NO: 3968 - DNA, 561 bp, Glycine max
  unsure (1)..(561): unsure at all n locations
  Clone ID: jC-gmfl02220061a05a1
ctttcaatctctttcccttcctttccttgtctttttatttttttacatcaaaattaaaataataacacccatcaaacaaaccacacttctccccctccctttgaaaacacctcaatcaatctcgatgatcatggcagcactcaattcaagcacttgtgccaaacctcaattccctcaccctctctcctcctctttctcttcttcttcatcattaacaagagatttgggcttccccacaaggtttcagaagaagcccattagaaaggtggtggattgtgctctacactcccccccagtgatccatttcccaaaccagccctacaacaaacctgaaattaccaaagaacccaccacctccaccgcggaaaggcctcagtggaacccattccaaaaagccgcagcaaaggccctcgacatgttcgagagcgcgttgctctcacgcgagctcaaccaaccctttcccaaaaccactgacccacgcgtncaaattgccggtaacttcgcccccgtccggaacaccccgtcgacaatctctccccgttattggcacaatccccgacg

SEQ ID NO: 3969 - DNA, 446 bp, Glycine max
  Clone ID: jC-gmfl02220061a05d1
gacaagagagtcaggaaggcaagattgaaaattgaagaaccaaaagccaaacagaaagcgaattcttttttaaaacaaaagaaaggaagcaagaaacagaaagcagctgagcttcatccacaaactacaagctgattcgcgaaagcatagataaatatttattattgagaagggtagaaaaggcaacaaaatgtttgttgtctgaaatgtgttttaccgtttaagcgaccaaataaaatagtccaggtggacttcaatgagcctccacaaacgtgccatggaagccatagggcactcttgaaggcagcatgacagtggcctccaacttcaaatcaagtgcattcagaatctgcaactcggactgccacgtcatctcgtcatgcacaaaagccatcacgtacccttcatcctcattcccattccctccacgtgttggcaagaagaat

SEQ ID NO: 3970 - DNA, 590 bp, Glycine max
  unsure (1)..(590): unsure at all n locations
  Clone ID: jC-gmfl02220061a06a1
aattcactctctattttgttgttaatcgaatttctctctcctttctttctctcttctcttgacgttgaaaatattacgagagagaaacgcaaggagagagaggaaaaccaaaaaatggttgtttccaaggtggttgtttttcttggtctgattctcgccgcccttatgtcagtggcttgctcccaatccgctgctccggctcctgctcctgctcccacaagcgatggcacctcaattgaccaagctgtagcgtatgttctaatgttggttgccttggttctaacttacatcatgcattaaggcaactacgagcaatgacacgccctaaattaattgatgagggctatagggcatttttatttcaaggacgtgtcaaaagcacttaggaggaagaaagattttttaattggaccgatgcatttttgtttatcttctcttgctccaaggataatctcattttgattnttcagttgtttatttattgtgcttgtatttctttttagttcgttagttattgactatggaatgaatgcaaagttaattaataaaagacattgaagagtgaagtgtgtgaacttttggctatatca

SEQ ID NO: 3971 - DNA, 414 bp, Glycine max
  Clone ID: jC-gmfl02220061a06d1
tttatttttttttttttttttttttttttttttttttttttttttttttttttttttttttttttttttttttttttttttttatttaatatatattaaaaaaaaaaaaaaaagaaaaaaaaaaaaaaaaagaaaaaaaaaaaaaaagaaagaaaaaaaaagaaagaagaaaaaaaaaaaaaaaaaaaaaaaaaaaaaaaaaaaaaaaaaaaaaaaaaaaaaaaaaaaaaaaaaaaaaaaaaaaaagaagaaaaaaaaaaaaaaaaggggaaaaaaaaaaagaaaaagaaaaaggaaaagaaaaaaaaaaagcacaaaaaagagaaagaggaaaagaaaaaaaaaaagaaacaaggaggaaaaaaaaaaaaaaaaaaaaaatgcgaagacagaaaaaaaagagagcaagaaaaa

SEQ ID NO: 3972 - DNA, 520 bp, Glycine max
  Clone ID: jC-gmfl02220061a07a1
cttgcttttggtcaatctaaagccaagtttcaaatggagcccaatactggagtgacatttgatgatgttgctggagtggatgaagccaagcaggattttatggaggtggtggaatttcttaagaagcctgagaggttcactgctgttggggctcgcataccaaaaggtgttcttcttgttggtcctcctggaactgggaagacacttttagcaaaggctattgcaggtgaagcaggtgtcccatttttctcaatctcaggttctgagtttgtagagatgtttgttggtgttggagcttctcgagtccgcgatttattcaggaaggccaaagagaatgccccatgcattgtttttgttgatgaaattgatgctgttggaaggcaaagaggtactggaattggtggagggaatgatgaaagagaacagaccctcaatcacttttgacagaaatggatgggattgatgggtataccggattcattgtcattgcagctcctaacagggttgacattcttgaatc

SEQ ID NO: 3973 - DNA, 420 bp, Glycine max
  Clone ID: jC-gmfl02220061a07d1
aaagaagcaagctaggatcttttgtcattactaaaattaagagtcaagggtatattacaaatattttacaattttagaaaaattcagtatgtggagagctacactacattgcagtggcatataggctattcaaacaacaactggtgagggagttgaaggagggacccgattttcagcaggaatttcaacaaactcggacaggagagctcggaattcatctccagacattgtctccttctccaatagaactttcacaattttgtcaattgcctcacggttgctccttatttggctcaatgctatttcatatgcttcatctgagagtctcttgacagcagcatcaatgtcttcagcaagcttttctgacattgagtttcttgccatcattctcatgataacatcactttgagctgatgagtc

SEQ ID NO: 3974 - DNA, 329 bp, Glycine max
  Clone ID: jC-gmfl02220061a08a1
caaattcattttaatcctaattctgcacttcttgatcattcgatttttctcctcaagatgcagatattcgtaaaaactttgaccggcaagaccatcacccttgaggtggaatcctccgacaccattgacaacgtaaaagctaagattcaagacaaggaagggatcccacctgaccagcagagacttatctttgcgggtaaacaacttgaggatggtcgcacccttgccgattacaacatccaaaaggaatcaaccctccatcttgtgcttcgcctcaggggtggcatgcaaatctttgtcaagactttgaccgggaagaccattaccct

SEQ ID NO: 3975 - DNA, 421 bp, Glycine max
  Clone ID: jC-gmfl02220061a08d1
aataaaaaactatatatttgaagtaataatacgaaatatgaatttaactatgatacgatattgatatttaattcttttggcgaaacgagctcaatacatcatattaaaacataaaaagcagcacctaaaccagaacagcaaacaagttcaagggagaaattgaacataacagacatgacatacaagaacacttgaaaaaagacacgcttaaaacaagaacacttgaaaaaaaacacgcttaaaaaccaccgcgaaggcgaaggacgagatgcaaggtggattccttctgaatattgtaatctgccaaggtacgaccatcttccagttgcttcccagcaaaaataagcctctgctgatcaggtggaatgccctccttgtcctgaatctttgccttcacattatcaatggtatcagaactttc

SEQ ID NO: 3976 - DNA, 593 bp, Glycine max
  Clone ID: jC-gmfl02220061a09a1
gaggaactttgcaacaagcatggagacagcctcagactatggagcattcacagagaaattcactttaccaccaaattctgcaccagctcttcctctcaaatcactcacctttgcagtgaaagagatgtatgtacttcacttttctttttgtaccacaatattctgattgtcaaaaactctcctttgctgacatcaaagtcgtcaactagtctttgaatccatgcttctgcatcttgaacttgttttggaagtgtttgtgtcaaacagtttcgacacggaaggatacgtgaccggcttcgggaatcctgactgggcaaggactcatccggtggctacctctactgctccaacagctctggctctcctcagagcaggtgccacttgtgttggtaaaactgtcatggatgaaatggcttacagtataaatggagagaatatacattatggcacacctagaaatccttgtgcaccagaccgggttcctggaggatcttctagtggctctgctgttgcagatggtgcacagcttgtggatttctcattaggaactgatactggaggaaagtgtagagtacctgcatcatactgtggga

SEQ ID NO: 3977 - DNA, 546 bp, Glycine max
  Clone ID: jC-gmfl02220061a09d1
agcacaatcaaaatgatatgatttaatgaataattgaactcataatatctgaaagaaacaggatatagatcagcaaaaatttcctttatacaatatcccttctttgatttatgtccataattcgcttctctcccagcttttggcatagtaggcatactcaaagcatatctacatccttgcagtcagattaaagtttgtgctctatgatatgctgctttctatcttcaatgctgtcataaagactctcaacaaggtgaagcaaaaatttatctgcaccatgtctggccaccagagaaattgataggggaaggttattatacatccctagcggtatgcttacctgacaaaatcctgatactccagcaatggacagcaggctaaaagcccttgcacgaaaaatttctaagtcggatgtatttgtttgtagttttgggggaggacctggaactgtggggatcattagaacaccaaagtccccaagatgaagccgaagagcatcgtgtagttcccttttatagactaacagatatcaatgttctcccccgt

SEQ ID NO: 3978 - DNA, 654 bp, Glycine max
  Clone ID: jC-gmfl02220061a10a1
gacagtgtggaacaagaggttggaagtagcactgtgtggaaaatcgaggaatcaaaattagggttcaaaatctcattgaggagaaagaagaagaaggatgtggcacgaggcgagaaggtcggagaagaaggtccacgacatgatggacgcggctcggaagagagcgcaacgacgcgccgtttacctcgccaagagacgcggcgatcctcagcaatccattcagctcgtcggctttcctagccgaacctatcgcgacgacgctctctaccaagcctcacaggatcagcagggcctgataccttggaatgggaaacaggatgtattgatagaccgatttgatgggcgtgctctccttgatttcgttcgcgattctagtcacaggcgcgctccggagaagtctgaagaagaagaagagttagaagagtttgttaattttgagcgttatcgggatttaataaagcatcgccgtagaggattcactgatgaggaggctttggagcatgtaaatcaagagatggaggccaaggctgctgctccatttacatcagacagatctaatttgttgcagcctgctgcaagcaaggatcttactcgcaggtcaggttttctatgatgggaatggaaaagagaactcatattcagatgatgagatat

SEQ ID NO: 3979 - DNA, 434 bp, Glycine max
  Clone ID: jC-gmfl02220061a10d1
accacagtaggtaaaaaaatttctattctaggttaaaaagggtttatcaaacttacatgctatattattttatagttcaataatcatattcttttggcttcaatgaacctacgttattgatttgaattcaataaatctgaaccttggtttcaaaaagattgcatagcgcaactttaacacaacttaaccaaaaccggtttccctcgaaacatttggtaaaaatgaaagcccgatgttaatatccattccattttataaacaaatggcccaaaactttgtcagcctttttacacgtttacagcattccatcagggccttgatcgatttcttatcctgggagatcgagaattaggagacccaaaaccttagccggaaccggggccaaaaggggaaccagaacttgaataatatcttctggaacctctactacttgg

SEQ ID NO: 3980 - DNA, 480 bp, Glycine max
  unsure (1)..(480): unsure at all n locations
  Clone ID: jC-gmfl02220061a11a1
ttttctgctttcagctgctacatacatcacctaccccttctctgttcattgctcaattgtttccctcacaactcataacctctttcccatttaacctttgaaaaaattccatactgtaacaacagatcaccatggctctatcacgtttgtcccaccgcagcatcggatccactctcacaaaacccttctccgccgacgccgcctcctcccgttcgatctccacctcggacacccccttaacaatcgagacctctgtccccttcaccgcgcacaactgcgaccccccgtcacgcgcggtcgcgacctcctcctcggagctcctcaccttcttccgcgacatggccctgatgcggcgcatggagatcgccgctgactccctctacaaggccaagctcatccgcggcttttgccacctctacgacggncaggaggccgtcgccgtcggcatggatgccgtcatcactaaaaaggacttcatca

SEQ ID NO: 3981 - DNA, 420 bp, Glycine max
  Clone ID: jC-gmfl02220061a11d1
aatatatatctatatagatttttgaactgtttgacgtgtctaaaatattctgaactacatatcttcagtagtgcacaatgtattcctcaaatttgcagaacaccccagttgcatcaatcacaatgatgctttggctgttagatccgcaaatattacatgacaaaaaaataacaaaccccgccccattgctaaccaagcatatgaataaattcacactatacacgcgggcagaaactcaacgaataggggagagagatgaccctctgtagaaccttttattcttcactattttgaagagtctgctacgacaaggtggcaagatattcaaaggacaaagttctgaattatggtaaagtagctctcacttctttcctatcagcaccaaatgtctcaactccgtaacctttaacatagacattg

SEQ ID NO: 3982 - DNA, 478 bp, Glycine max
  Clone ID: jC-gmfl02220061a12a1
cgaagtgtgaagacagacacagtgagaatgatgaagcgtcggttccttttggttctcttggttctctatgtcacagtggagttctacgtagaagcagatggtagtggtgggtttgtgagaacaagaggagtgcagcttatgctgaatgggagcccctactatgctaatggctttaatgcctattggctaatgtatcttgcctctgatccttctcagagaaacaaagtctcatcagtgtttcaacaggcttcaaatcatggcctcaacattgccagaacttgggctttcagtgatggtggatatcaaccactacaatactctcctggatcttacaattaccaaatgtttcagggattggattttgcaatagccgaagcatgaaaatatgggatcaagatggtgttgagtttggtgaataactatgagaacatgggtgggaagaagcaatatgtggaatgggcaaagagtcaggggcagt

SEQ ID NO: 3983 - DNA, 455 bp, Glycine max
  Clone ID: jC-gmfl02220061a12d1
gaagcacttcaaattatcgtcagcagtccattttataaacagtttagacaaagtacattcacttgccgacataatagtgtagatgaaatgctagttcgtgcattacaaagtttctctcgaaatatctcaataataaatagttatgtctatcgcatttgtagaacacttcacttggaatactttgacgaaaataacaggcaattcttgccactaagattattgggacacttcattctgaagattaatccacacgcaaataagttatcaattaaagtttctaactcccttcactctctctctctctctctatatatatatatcatggtagttaagacgtatcatattcagtttccacctctaatttgcttagcttcattccacttctcaatgtttctaagtctggcgtacatcttgcgaattcggtttagtttttgagactcttgagcgatcaaatt

SEQ ID NO: 3984 - DNA, 601 bp, Glycine max
  unsure (1)..(601): unsure at all n locations
  Clone ID: jC-gmfl02220061b01a1
gtgcagcctagcactgagcatcgtctagctatctcgatcgaactgtccaaggtcctgtcacaagcccggtggtgggcgccatgggcgcgtgaaggggccatggtatgacgttgtggtgctaggtgcgcttgggttatcaccattacgccagcggttaggtcctacaaatgagtcggtttatggcccgtggggcagtatagtaaagatcggtaagccnaccagagtgcaacaaggctagatggctagtggcgataacggatatgccagatgccgtggttacgttaaacccgtagatggcgggccgtatggtagtagcaatagaaacagccggttgccatcaggtagtgccgtataggtatgcgtgggggagggagtggtgtaaaacgtccacgtatcagcacagacaggggcagcggtggccccaatacaataccataattggataggggctaaataaagcgcggtattccacataaccgcatacacactaaacaagtgggtgtccagggcagttaataaactagattatacagatgtgcgctgcgccaatagcgagtaaaggcgcggttgacccagaatagtttaagacccgcggtaaaaa

SEQ ID NO: 3985 - DNA, 476 bp, Glycine max
  Clone ID: jC-gmfl02220061b01d1
ggcaccattccgttccaaggaaggtttcccgtcatcactgtatgacgtcctccttctttgggggggggggggggaaacgacaaggatataatagagagaaggggaggagacacctgtgctgtgcgaggtaaattgtatgtagtaaggatagtactgtaaataagataagcagaagaaagaagccgaccaagaaacgagagccgaaagcagcaagtaagaagataagaacaaatggagccgactaattagaaatagacgatgatagcgcaagggaaagcgtatccgggtggtgataggtacaccaactgcacccgaatcctggtgcgtacgctacgacggcgacagccacgagggttgcgtctatttattgcagttagtgttaggcacaagtagtaacagtagcagatgcgctggcagtttattattgtggcttggcgcgactatacaatgggctaggtatgcaactggtatattta

SEQ ID NO: 3986 - DNA, 542 bp, Glycine max
  unsure (1)..(542): unsure at all n locations
  Clone ID: jC-gmfl02220061b02a1
aggggcaggaaaaatcaaagccaaaaatcaagccatggattttattcatgaaatgggttggcttcttcacagaagccagttgaaattaaggatggtttctagtgtggatctctttccattgaaacggttcaagtggcttattgagttttccatggatcatgattggtgtgcagcagtgagaaaactgttgaacctactgtttgatggaactgtaaatacaggagatcatccttccttgtatcttgcgctttcagagatgggtctccttcacaaagctgtaaggagaaatagcaagcatttagtggagttgcttttgagatatgttcctgagaatatttctgataaactaggacctgaagagaaggcactggttgatggagagaatcagaccttcttgtttagacctgatgttgatggtactgctggtttgacaccactccatatagcagccgggaaagatggttctgaggatgtacttgatgctttgactaatgatccttgcatggntggaattgaagcgtggaaaaatgctcgtgacagca

SEQ ID NO: 3987 - DNA, 397 bp, Glycine max
  Clone ID: jC-gmfl02220061b02d1
aaaaaaaaagggggaaaaaccccccccaggttacccccaaaaattaaaatccccccccaaaaaaggtggaaaaaaagggggccccaccacccatggcccgggggggccccttaggggaaacaaaacccccaaaaaaagggccccagttcctaaaaacaaaaaaccccccccccgggaaaacaggggttttcagactgtaaacccccccctaacatacccaaccaggtttaagggggtcgcaagtaaagaaccctagcttggtccaaagcccaaaatttccccctgggggggggggaaaaccccataaaccctgggggggcctttaaaaaaaggggcccccaaaaacaaaaaggggcgttatgccccccttgggaagcatggggggggggacccaaaa

SEQ ID NO: 3988 - DNA, 538 bp, Glycine max
  Clone ID: jC-gmfl02220061b03a1
aacaagaatactcataataatatagtggctagcatagagctagtaataatattaatattgttaagctagctctaagccatggctaatgaacgtgatctgttctcggcggagattgtgaaccgtggaattgaatcgtcaggaccaaacgctgggtcgttgacgttttcggtgagggtgagaaggcgcttaccggattttcttcaatcggtgaaccttaagtacgtgaaattgggttaccattatctgataaaccatggcatatacttgttcaccataccggttcttctcgtggtgtttagtgctgaggttggaagcctcagcaaagaggacctatggaagaagctttgggaagacgcgcgttacgaccttgctacggatcttgcttcctttggggtcttcgttttcaccttgtctgtctacttcatgtcgaggccacgttccatttacctcattgattctgcatgttataaacccgatgatgaactcaaggtgtcaagggagcagttgatggatgtagcatgaaaatcaggcaagttcg

SEQ ID NO: 3989 - DNA, 437 bp, Glycine max
  Clone ID: jC-gmfl02220061b03d1
agccatccatgaactttgatatcaatcatcctatgaagaaacagagaaattaaacaaggaggcatccatatgcctaatgaggaattaaaagtatagaatttcaagccaggaataattaaatgagaaagaaacagaaaacagatgtaacatttttgaagaccaaattagtactacccttattgatcctaaccataccctcactgataataagattcataacactagtgccgtcaaattctgcttcagttgttgagaggtgcaggatatctgttgatgcaatcaagccaagggttcctagaaggcttggtgactcggcgcatggcgcgccaaaccacactgttgcacttgaagccagagccaaatgcgagttgccaaacacggtctcctcttctaacactctcttttgcttccatgtaagccaactcataccaaatgct

SEQ ID NO: 3990 - DNA, 483 bp, Glycine max
  Clone ID: jC-gmfl02220061b04d1
aaaatccacggtaacaaaatttatatgattgaaatatgacagaatatttatcaacgcactggcaaactgtcaaaaaagtaaccaccttagctggaggcaccaaatgccgacgaaaattcagaatgagtatttgtgctcaaaacgacaatcatagtactcaaatatctctagcaagagtagaaattaatacataacgaagtaacaaactatcatgggtgtctactgttgcttaacttcaactttcttcttctgccacaagcggtctagagcactgtcagcatcaccctgagcacggatgaatccgcagagggcaaaagtggagaaatggccattgtagacgccattctcatccacatgcccaatgttgatctgaaccgaagcatggtccttagcggtaatcaatctgtttgtggcggagcacttcctaggaatgtaaagctcagtgatctgtcctttcttcgtctgcatctttggttgaacgct

SEQ ID NO: 3991 - DNA, 483 bp, Glycine max
  unsure (1)..(483): unsure at all n locations
  Clone ID: jC-gmfl02220061b05a1
cttcccttcctccccaagcataacatagcttcctcgattcttcgttctagggtttgaaaagatgaacatttgtggttgttgggtttcatcaatgaaattgcccttcctcgggtggcgcttttcaaggccttttacctctctctgttcttcttctttttcgccacgcattatgaccattcaaagttgttcttctccttcttcttcagcctccttatcaacgtcagagtcgaaagagatgaagaaggaagcttcaccttggttaattgttggcctcggcaatccaggcaaaaagtacgctgccacccgccacaatgtgggctttgagatggttgataccatagctgaagctgaagggatatctatgaccactgtttccttcaaatccttatttggaaaaggttttataggtgatgtaccagtcatacttgcaaaaccacagacttatatgaattcaagtggtgaatctatcttngacgacttgga

SEQ ID NO: 3992 - DNA, 489 bp, Glycine max
  Clone ID: jC-gmfl02220061b05d1
gagaatgctaatagcaaattttatagaaagataagtaggtatattatacacaataactttggttaaaaattacagatcgttgagaaaacagccaaaaaactgttatttagtgtacaagaagcctagccgagccaaagaatggggaaaggaaatgtgatggacagattcatgacatcaagccagagcaactcttgtatgaatacatagtgatgaacttctagtacatagtacatggtgataaagaattaaaaaccgtcgttgagtgccgtgtgagctatcaactcacattatataatattataattcaaggtgctggaagtgctcaaaattgatcaaacaccacagtatgtaaacgtacgagtacctgaagattccaggcatcaggttcgaattcattgtgctgaaactgctttctgaaagaatggatgaatacttgctcaaacatagccctatcaaattaaaaaacagagctttggacgagtttactct

SEQ ID NO: 3993 - DNA, 517 bp, Glycine max
  Clone ID: jC-gmfl02220061b06a1
agagaacgagaaaatgacatcgagaaagcaatgctggaggctgagagggaaagggaaagagaaaaggataggatggctgttgatagagcaactttagaggctcgtgatagggcatatgctgaatcttgtgaaagggctgcatttgaaagagcaactgtggaagcacggtacaaggcactggctgaggccagggaaagacttgagaaggcatgtgctgaggccagggataagtcaaacattgatgaagaaactatagaggcaagactgaaagcagaacgcgctgctgtagaaagagcaactgcagaggctcaagaccgagctatggaaaaattaaagaatgaaaggactgcatttgagtccagagaatggttagcgagatctgtatctgacaatttttgcggaagaccagactcttcatcctacgatatgctggatcctgagtttcagaacttaagctctaccacaggttccagacattcatattcactttatggtgctgcctctttttctgagagat

SEQ ID NO: 3994 - DNA, 472 bp, Glycine max
  Clone ID: jC-gmfl02220061b06d1
aacaattaacgatgttgatataagatatataacatgaacagcagcaaatgttgcaccaccaaaacaatgttcaagtagttaatgtatgatctaacatattttcttgctaaacattgactttgacagcacccacctaatttgttcagtttcttggtccttttattcttaaaattgattaaaaagttattgtaacaataattcccaattttgctaacagaaagccagtcttagccccatgctttatatctatttacttttgtatttcttaatttcttgctataccatgggcaaaaaatttcttcataaatacaaacacttatgagactattacaacagaacatagactatgacaaaataattattacggttttggaagtttggactgtgtgtcacttggggaaggaattacccggccaaggtgaagaagcttctttcacacttgcagagacagggagggagaaaaaacagacct

SEQ ID NO: 3995 - DNA, 504 bp, Glycine max
  Clone ID: jC-gmfl02220061b07a1
caaagctgctccatttttatacgaagatcagattcaggtctctatcaccaagatccaacaacttctcaaccacaacgagttgctattcccttcgattcacgaacccagaaaattaaaacattaaaaaagatatcaagtatcaaaatctaaacggcatcagcaaacatgtctcaacaccatggtgatgaaatggagtatgcggcagatgataatgaaatggcagaggtagaagaggatatgtatttccgtggcagggcatttggtgaatcagattcggatgatgacgacgactacgaatatgaccctttggaaaaccgaatatcagataccactgctgctgaagctaggagggggaaggatatccaaggtataccttgggataggttgagcattagtcgtgagaaatatagacaaactagactagagcagtacaaaaattttgaaaacataccacaatcaggggaaatgtcggaggatgaatgcaaagcaacagataaagggggg

SEQ ID NO: 3996 - DNA, 409 bp, Glycine max
  Clone ID: jC-gmfl02220061b07d1
gtacaaacttccttcattttattaccatcggaaagattaaaacagacattgacagtcaatgttatttagcatgaaggtgtacatcaaacaactgtagcatcctcaagccatgctctacaatgtatgatgagacaatctaccggtttttctggttttgctatgatgtaccaccatactcgaatacctaaacaatagacaacacaacatgagctgtaggtacttacaaggtgtaaggttacaaatttacaagcagtcaaggtacatgtaatttctgcgtcgattgaactgtagaaggcttccataggtgcgatcccaaacaccaataaagagtgattctgtgtcagggctgaaggatacaccagagatctccccaaaaaaatcgatctcttgctccttctcaaacccatgc

SEQ ID NO: 3997 - DNA, 589 bp, Glycine max
  Clone ID: jC-gmfl02220061b08a1
ccaaacccttggcggctgcgagacccgttgtgttctctcttctctctcttttttttctctttccctctcttcttcgccgctctttttagggttttctcaactcttcgatttggggcttaaaccctcgcttccgattcagattcggatttagggcttccgtttctcgattctgcctcccaagaaaaaccagatctcgtgattgattattcatcatggccactgttgctagtcccgcggatcaagcaactgatttgctgcagaagctatcgttggaaactcagcccaagcccttggagattcctgagccaaccaagaaggccactgggaatcagtatggatcagttgattcaggaaatgctgcgaatggccagatcccatcgtatgatcggtctgtaaccccagtgttgcaggattttattgatcctactatgtgttacctcccaaatggttacccatccactgcctattattatggtggttatgatggaactggtaacgagtgggatgattattctagatatgtgaattcggaaggagttgagatgacttccggagtttatggggataaagggtctctactttatcacca

SEQ ID NO: 3998 - DNA, 469 bp, Glycine max
  Clone ID: jC-gmfl02220061b08d1
ggtggccgcccttttttttttttttttttttttttttgccagaaaaacacccctattacataacagattgtccacaaatataattctttttccactatgcccaagtcaatcaacagatagaaaataaacagaagactaaattaagacgaaaaactcaaacttaaaatccaactatatttttcagtatttcccaccttgcttctacccctgttgaaagtaacaaagtaaagctgctctgcaacaaagtagatctaaatttacaagacaggaaacgaccaacaaagtgaaataaaagaaagaaaaaagaaaaaaggcaaagagaaggataaacccgaacaaaaaccaaaagatataagcatcttaggcagaaaccctaaaacccaaaaaaccctatgagtaaagcctgttaggagctaaccactggtaacaaaacccaatgagaagggattggtgctagcattctatgaag

SEQ ID NO: 3999 - DNA, 555 bp, Glycine max
  Clone ID: jC-gmfl02220061b09a1
atcgaggctcacgtcatccaaccgtgcctcaccgcacggatacttgctgaaccgcgtcgccgagtacgccaccgccgcggctgctgctaccactcctccctctcctcctcctccggggaagaaggagctcggcggcggcgggaagatcaccgatgaattcaccgggaagggcgcgatcgggcaggtctgccaggtcattggtgccgtcgtcgatgtcagattcgacgagggtttgcctccgatcatgaccgcgctggaggttctggatcactcgtcgaggcttgtgttggaggtggcgcagcatttgggtgaaggcgttgtccgaaccattgctatggatgccaccgaaggtgtcgttagaggctggcgcgttctcaacactggctcccctattaccgttccagttggtagggctacccttggccgtatcataaatgtcattggagagcctattgatgccaaaggagaaatcaatactgagcatcatttgcccattcatagagaagctcctgctttggttgagcaagaaactgcacagcagaatcttgtactgga

SEQ ID NO: 4000 - DNA, 445 bp, Glycine max
  Clone ID: jC-gmfl02220061b09d1
acggccggcacgcacctattttctttttttttcttttctttattttttattctctttttatcttttatgactttttttttgtttctctgtcattaattttcatctcctctcattttcttgcttaacatcaattctgtttttgtgatactactatataatcccaccgaaacccacgcccagaccccaaacaccaccaacacaccgacataccacccaacaaaaaggagaaaaaaaaccaacgcggaggcccgccccgcaaaaacaccgaagaagccaaaaacaagaaggcgccaccccccaacaacaaaagggaaaaaaagccccccccacccgcacgcccccccaaaaaaaaaacaaaaaaccacaaggggggcgggccacacagcaacaaaaaaagagccccacggcccacccggaaagggccaccaaaacagggggggggggc

SEQ ID NO: 4001 - DNA, 573 bp, Glycine max
  Clone ID: jC-gmfl02220061b10a1
cttctttgactgttctcccacaccacacccatgacactcctcctgctccttattctcctctttcacgcggcggaagccaagggacagtggcagctcctccacaaaaacatcggcattgtcgccatgcacatgcagcttctccacaacgaccgcgtcatcatcttcgaccgcaccgacttcggactctccaacctaaccctccccgacggaagatgccgcaacaacccaaacgagttggtcgtcaaacgcgactgcaccgcgcactccatcgaatacgacgtcgcagccaacacattccgcgctctctttgtccaaaccaatgtctggtgctcctccggttcggtctctcccgacggaacattagtccaaaccggtggcttcaacgacggctaccgtgcggtcagaaccttcaccccgtgccgctcgtgcgactgggcagaagttcagcatggactcgcggcgcagagatggtacgccaccaatcacatcttgccagatggacgtcaaataattatcggaagaagaagacaattcaactacgaagtttaccccaagacacaagccaagaatact

SEQ ID NO: 4002 - DNA, 452 bp, Glycine max
  Clone ID: jC-gmfl02220061b10d1
gcaaagaaatatccatgaactataattacaaacttcctagggtattatttacacgccccataggccataaatggctttatttgaattttatcttcccatatcttacagtttaaatactcactcaagaatctgttcactcccagacattcacaacaataaataacttgaataaaaagaacatatacgaacgaagttgtcgagcaggcagagacgagaattcacaatttcacaccatctggacccaaataccgtggcttggaacttcttgatggaccacaaacagcagatagaaacccggtggcgcaagaacagcggaagccggcgcggtaacttaacctcgtgcgttgattctccaaccccactcaaatggtgcggcttcagcaccaacagcctctgattcatggagaacgagtgcgtgttaaatggcggcgccagcatggtaacagacaccg

SEQ ID NO: 4003 - DNA, 419 bp, Glycine max
  Clone ID: jC-gmfl02220061b11a1
ctcttctctcggtttcatcgccatggatgaagaagtgcgcaagatcttcagcaagttcgacaagaacggcgacggcaagatctcgtgcgccgagctgaaggagatgatggtggcgctgggatccaaaacgacgtcggaggaggtgaagcgcatgatggcggagcttgatcggaacggcgacggctacattgacctgaaggagttcggcgagttccattgcggcggcggcgacgggagggagctccgggaggcgttcgagctgtacgatctggacaagaacgggctgatctcggcgaaggagctgcactccgtgatgcggaggttgggggagaagtgctccctcagcgactgccggaagatgatcggaaacgtggatgcccacagagactgcaacgttaattttgaaaagtttacgaaga

SEQ ID NO: 4004 - DNA, 325 bp, Glycine max
  Clone ID: jC-gmfl02220061b11d1
caatagctactacccttacgaaactgtaatcagtttgttcactttcattacacagatcttagaggaatctgatgagcgttttggagatgaaggtgtaactgaaatagtagagctggtgaagaaaacattgccactgcctctcaatatgaagaaggaagaaatcaccaagggtgacgaagaaaccgcaacattactgaaagagagtgctactaccaccaccacctacgagcgagtcatcatcttcttaaactcttcaaaattgacgttgtcgtcaccgtcggcatccacgtttccgatcatcctccggcagtcgctgagggagcac

SEQ ID NO: 4005 - DNA, 505 bp, Glycine max
  Clone ID: jC-gmfl02220061b12a1
aattcggctcgagcacatattacatcaccaacaatcaaagccatcactttagtaatgctattgattctttcttttcacgtgtaaacacacaaaacaaataattttcctttccatcggggtggtaatatttagacttttatcatttacaaacatgttattaatattctattgcattatgttatctattgctgtcctgtcatataatcaatcttattaatcatgtattttcatctgtcagtatttctcttatggcgtttatgggatctcgaagaatcattttccatacaagtgacacgtgaacttacaagagtggctaatcactgagagatctacacctcgtaagtgtgtaacctactaatattatcgtatgagtcatactatatatatctatattgagagagagagagaaagatttcagattcaacttccaacgagactgagtgtggcatccttatagattggctgcaatatacactctctcatttttgaagtatcggttgaaatt

SEQ ID NO: 4006 - DNA, 335 bp, Glycine max
  Clone ID: jC-gmfl02220061b12d1
aaaaaaaaagaagaagtttatataacattctaaataaaaggtacataaagaattacatgttattagtatcaggtacaaacataagattatttcccgatgtagctgctgcaataaccacaattgcgataatcgcatctgcaatcataaccacaattttataaaccttgaccctaagggctttggtgcattgttctaggatatatgcctataaacttttggctttcggataaataatccttaatacttcaatggagccgatgatgaaccaaggaattataagaacaaaacattcgagccaatcaatcagatggtccaggcattttctcaggtaccac

SEQ ID NO: 4007 - DNA, 604 bp, Glycine max
  Clone ID: jC-gmfl02220061c01a1
cgatagagcctagcactgagcatcgtctagctatctcgatcgaactgtccaaggtcctgtcacttctaatacacacgacaaaaccagcctctccggcagtatacaccgcgccgctctccgcctccgctgatgcgctcttctcctccctcatcgcgcccgccgaccacctcctcaatttcagatcaagccgccgtccccgccacacatcaccgccaggtcccgcagacctctacgcttcacacgtgtgcaacgggctgaccgggtagcagtaccggtcccaacagggattcaactcaccaacacagcaccccacaccgatcacagaggctgtgtaaaattgtaccggtagttctgtttataataacaattctgcgtttgatatgtgtgtgcggaagtaggtactgcaggccatggcccacctacggtaaaacaatatacatgaacgtctgctttaaaaggctggtgcttatgtggaaatcttaattataactgtatgcacctgcagtggttgggttatcaaacatgccaccaaacaaccaagacccacgcagcggaaacagtaacctagagcctcagtagctgccatagggactataatcccctg

SEQ ID NO: 4008 - DNA, 497 bp, Glycine max
  Clone ID: jC-gmfl02220061c01d1
gtcacattccgttccaggaaggtttcccgtcatcactgtatgacgtcctccttctttgggggggggggggggggggaaggtggagaatgcagaaggaaactccccatctagtaagataagataagataagagcgaatgagcaatgagtaagagagcagtcggagggagcgtgcgcagatatataaggtacgttagcagaggtggatcgcagggatactaatggtgaatggagggaagatagtagattaatttaatgacgagtaaggggtaggagataagcatatggagtgggaaatgtgcacgtagcgataccacgcgacgtattaccgattagaggtggacgtaagggaggttataatcgcagaacatgtataacgcgtaatattatatagcggtggttttaaggttaggggcaacgacgttaggtgtattttaatgggtgttttacgaaggggggagcacttaagagcccatcttaggggtaatgttagatttta

SEQ ID NO: 4009 - DNA, 230 bp, Glycine max
  Clone ID: jC-gmfl02220061c02a1
cctcacgcattagctcgatttcttgttctgcccttcactctcttgtgtctctttctgcggcgaccatctgagatcccggtcactcctctcgccggcgatcccttagtcctccctcatccgacgagtgctttccgatgcgaatcatgcccagccttgggccagcatgagtcccgtatccgagtatttggccaagcttttgctgattggagattctggtgtacgcaagtcat

SEQ ID NO: 4010 - DNA, 350 bp, Glycine max
  Clone ID: jC-gmfl02220061c02d1
attactgattatttaagcggggcgcattaataccatacattttcatctgtgcaactttgcactacctgtactagcacgttatttatgtctgtgatacacacaattcagtgccatgcatttctgtacgagatttacagcaacttctaacttatttaaaacatcataccaacccaactaggagcaattttcattatacaatgacacttatctttaaactctgaagcatgacaatggcggtggtcaccagggaccatattcttatgcaatctatgccacaactggattagacgcacaagttgcatcaccacacatgttctttcccaatgccattttgaagcacccattttcac

SEQ ID NO: 4011 - DNA, 233 bp, Glycine max
  Clone ID: jC-gmfl02220061c03a1
ctcgagccgctcgagccgtggagatagaagagctatagtcacaaaggattggaatacatcttgggttggcaatttgtacttatcagttgtaatgtcctcccctgaataaccgacataaggttatggttcttgctcaaagcgcattccttcatttttgcccagttatgtttatcagaatttttgttgtaattttatcatatcatgtgaaatgatgcttacaagagaatctgttc

SEQ ID NO: 4012 - DNA, 233 bp, Glycine max
  Clone ID: jC-gmfl02220061c03d1
gaacaaattcttttgtaagcatcatttcacatgatatgataaaattcccccaaaaattctgataaacataactgggcaaaaatgaaggaatgccctttgagcaaaaaccataaccttatgtcggttattcaggggaggacattccaactgataagtccaaattgccaacccaagatgttttccaatcctttgggactatagctcttttatttccacggttcgagcggttcgag

SEQ ID NO: 4013 - DNA, 541 bp, Glycine max
  Clone ID: jC-gmfl02220061c04a1
gaatgatgcttgctaccatcaaatcattagccattggctaaacactcatgcggttgtggagccattcgtcatagcgacaaacaggcatctgagcgtggttcaccctatttacaaacttctgtttcctcactatcgtgacaccatgaacattaattcacttgcccgcaaatccttggtcaatgccgacggtattatagagaaaacattcttgtggggtaggtactctttggaaatgtctgctgttatttacaaggattgggttttcaccgatcaagcattgcctaatgatcttgtcaagagaggagttgctgttaaggatccatctgctccccatggagttcgacttttgatcgaggactatccttatgcttctgatgggctagagatatgggatgctatcaagtcttgggtggaagaatatgtctcattctactacaagtcagatgaagaactttaaaaagaccccgagctccaagcttggtggaaagaacttgcagaggtgggtcatggggattcgaatgataagccatggtggcaaaga

SEQ ID NO: 4014 - DNA, 469 bp, Glycine max
  Clone ID: jC-gmfl02220061c04d1
aaaaagttcaaacctgcatgattgcatttattattttggtttccattacacaaacatggtttattaatgacaaatacaagtacattcagccactccaaatacataacttaaacatacacaactgatgaaggaatcagattccttctatttcacatttatttaaagccagggacagtacttcagcaaccatagagcccttagatagagatactgttgggaattcctctgaaagtcaatccctcctcactagaaggatagagcaaagtgtaaggcattttagccggcccatagcggtttctcaatgtctcattattggtcttctctataagcttcttttcaatctcttcaagattctttccaaacctcttaaaggcctctaatggcccggcatcagaagtccagtagtcaccgccatctctctgcccaggtagaactcatcagatgcgtgccttgataaaatttctataat

SEQ ID NO: 4015 - DNA, 581 bp, Glycine max
  Clone ID: jC-gmfl02220061c05a1
cttcctcttcctcttcctccaattacgatgtgttcctcagcttcagaggtgaagacacacgtcatgcttttactggccatctctacaaagctcttcatgacaagggaatccacactttcattgatgatgagaagcttcaaagaggggagcaaataacacgagcacttatggaggcaattcaagattccagagttgccatcactgtgctttctcaaaactatgcttcttcctcgttttgtttagatgaacttgcaaccatccttcactgtcaccagaggaaacggttgttggttataccggtcttttataaggtggatccttctgatgtgagacaccagaaaggtagttatgcagaagcattggaaaagcttgagacgaggttccagcatgacccggagaagttgcaaaaatggaagatggctctgaagcaagtagctgacttgtctggctatcatttcatagagggagatggatatgaattctaagttattgagaagatcgttgaccggtatttagggagattaatcctcgactttacatgttgccgattaccaggttgactagagtcacgagtgctagat

SEQ ID NO: 4016 - DNA, 433 bp, Glycine max
  Clone ID: jC-gmfl02220061c05d1
acaacaagtaaattacataaatataattcaattgtttatacagtagaacctgtaaggacaaatctaaaactaaacaaaaaagtaagaaatgaatattatattgaggtacttatttatttaacatttatctgtattctgaaatataaggttggcaaaaagggggacaaacacgaaaaattttcacaggctgccgtttcatggataaaccgaatttggcaaaggaatcagcagcataatcgttatcgaagtataagtgatttgtagcagaggttagagctttcaactcatcacacagtgggaaacaatgctccagcgatgtagatgtagggcatccatctaacacaaacccaatagctttctcagagcccgattccactattattttaccaaaatcatgctgccttgcaatcttagcacttattggaatgctatg

SEQ ID NO: 4017 - DNA, 543 bp, Glycine max
  Clone ID: jC-gmfl02220061c06a1
gttggggtgaagtttctcccaacatggccttttattggccgtttgcgtgtatgctttgttgaacctccatattttcaaatgactgtcaaacctatgtttactcatgggcttgatgtgactgaacttccaggcattgctgggtggctagataagctgctgtctattgcttttgaacagacccttgttgagcccaacatgctggttgttgatgttgagaaatttgtttcaccacaacaagagtcttggttcaaagtgaatgagaaggagcctgttgcttatgcaaaagtggaagttattgaagcatctgagatgaagccatctgatctaaatggattagcggatccttatgtgaaaggtcaaatgggtgtatacagattcaggacaaagatacaaaggaaaacacttactccaaaatggcacgaggaatttaaagttcccatcataacatgggagtctgataacgtgctggttattgcagttcgtgacaaggaccatttctatgatgatatccttggggactgtaccgttgacatcaatgaattt

SEQ ID NO: 4018 - DNA, 523 bp, Glycine max
  Clone ID: jC-gmfl02220061c06d1
attccttgtataaagttatttacatgcttacaaactacagcacctgaaacatgaacatgtttatgtaaaacggtctatgacgatcacaggactattactacaatcaaaatctgccaagtactgtagaaacactcacttggaagactgtatataagaacacgggtatgaaatgctggagaaaatatgctatatgctacttgaaactttcttcagtaggacaaaccgatagaatctcttttatctgtgcccccatttcctctttatcatgctccacttcagcagatttaacaacttcttggctagacctgtcaggggagcatgcattttcagggtcatctttttcattcgtgattttagctgtggcttcattgtccaaattagtgtttgatggaactatttgaaccacgttcaccccagaaccaggggaaccattgctacctgagaccacagcatgagaaccaactggagtttctattacatctatgggagattgagctgcaatagattcctcgtcagaagagtc

SEQ ID NO: 4019 - DNA, 589 bp, Glycine max
  Clone ID: jC-gmfl02220061c07a1
cttagcagcagtagcagaaatggctaccacttctgcttcattcgctcgcttctccgtgatatcgcgaccttcttcgtcaaatccccaattcatcctcttcaacgccgctccccgaaccggaacccctcattcccgaaccggttcggcccggttcaggtgcttggccggccagaccgggttcttcacgaaactagggcggttgataaaggagaaggcgaagagcgacgtggagaagctcttctcgggattctccaagacccgcagcaacctcgccgtcatcgacgagcttctcctctattggaacctcgccgacaccgaccgcgtgctcgacgaactcgaagaggctcttttagagtccgattttggaccaagaatcactattaaaatagtggagaatttgcgtgaggatatattttcagggaagcttaaatcagggaatgagataaaggaagcactgaagaggaaccgtttggaattattaacttccaaggggagttaaactgaactttaacttggatacaggaagccagctgtaataatgatagttggtgttaatggcggagggaagactacatctttgggaaaagct

SEQ ID NO: 4020 - DNA, 525 bp, Glycine max
  Clone ID: jC-gmfl02220061c07d1
caaagaaataaaaatttgtcattaatcagaagttgacagacaatggagcaatgtgtttactgtttacattttcctttctaagtatcatctacacgcacaccacaataaaacccttctgttcataaacaggagtgattataaaccccatttctcatttgcatcgcgtcagaatcttccagctacagcatgcaaaatactcagcgttcctcaagcaacagctctgcacctcaaaatcatgtacacttattcgcaatgcttgccccccacccccaaataacggtttccataatcaagtgccatctttcctgtgacctggtgttgctctgaatattccatgtcaagctgtttctgctaataaatgattcaaacccacaatattggtttacataaaaatggcattgacaaaggcttccgcatcaaaaggttgaaggtcttcaacaccttcaccaacacccacatattttacagggattccaagctcatcaaccacgcttaccacacagccacctctagcagaaccatcca

SEQ ID NO: 4021 - DNA, 349 bp, Glycine max
  Clone ID: jC-gmfl02220061c08a1
ctccccactcattttcatctttttcctcttcctccctcctagactgttcattttttctcacttttccccttccttctccccctcacaagacctcccttctcccccttccctcccggcaccggtggccttccccctcccttccgacaccagcaaccttccttcccccttccagcacccgcaacccttcgcctccccctccatctccccctagcgtgacctttcatctccccctcccccctcacgttaccttcttcttcatccggcaccaccagtccacaacctttcccctgccccttgcacaaccttgctccgataaagcaacctctaaaaccaaccatggcagcccagt

SEQ ID NO: 4022 - DNA, 496 bp, Glycine max
  Clone ID: jC-gmfl02220061c08d1
atctcgtgtgtttagtatcataaaaatattggagacctaggcgaattctagcatgcgaaagtgaaacttcttttgcacgtacgaaaataaatattaaccgtttgatactctttaattttcatcgcatgactcaaattttttaacatttttgcttttcttttttctctttttatgcctatttttccttaattacccatttcttctactttccccttctttgttctttccctccagcaccccagatccgtcatcatcctcatcaaggtcgactccccagtcgaccataccatcgtcgccctcttcgaccacctcgaccccgacgactacatcatcgacaacgacaacgagtggtacaagaacatcgagcgccgcatgaaccaacgagggctccctccctctcacgagccaatacacttcttgcgacttcgttctctccctccagcggcccaaatccgtcatcatctcgtcaagaccggctccccagttgaccacacca

SEQ ID NO: 4023 - DNA, 539 bp, Glycine max
  Clone ID: jC-gmfl02220061c09a1
gcaatttggccactatgaacacagggcttgctgcaggtgcagccttgcttgcactcttggctatcaccttctccttgttgagccctcaaaccctgttttctccgcctgagattccgggctcgaaggaccaccttcacgctgctcggttactccatgtcaccggagccgtcgggccggagagtcttgtcttcgacgctgacggcggagggccctacaccggcgtcgccgatggccggattctcaagtgggaaggggaagagcgaggttggactgaatttgctgtcaccagttccaataggtcggactgtgtacgcccatttgcaccagagttggagcacatttgtgggaggccattaggactaagatttgataagaaaagtggagatctgtacattgctgatgcctacctaggcctaaaagtagtggggtctacagggggtttggccaccgaagtggtaacagaagttgaaggtcagcccttgcaattcaccaatgacatggacatcagtgaagatgcagacgtgatatacttcactgat

SEQ ID NO: 4024 - DNA, 434 bp, Glycine max
  Clone ID: jC-gmfl02220061c09d1
aacgtagggttttattaataatgaaccccgtaaaaacttgccttattaaccactcaaagcatttcacaattctacataatctggatacgcaataactaccttttatttggaaaaggggatccaaaacaggcccctttagtcatccatgatacccttttataaaccataaatgccaatgaaagggctcaaccctggtgcaatccaaagcttcccatttttttcttgcactttactggtgaacttcaagggcttcccattacaatttttcaagacttttaaaatccctcctttatcactcaggtttacagcagcagcatgggggttccaccctgcaaatgatgtgtgccgctgcttgaaattaaatcccatcttaagcaatgccttttccacccaagggttggaagaaacccactttgcgaaagggcttttctttg

SEQ ID NO: 4025 - DNA, 574 bp, Glycine max
  Clone ID: jC-gmfl02220061c10a1
caaagcgcacccattttctcattcaaaaactcttattatttttcactccttcctacacaaattcccatggcggccctcggtagatcctccgctgccgccaccacctccctctcctcctcctccgcccgattccgccgctccctccacctaccgccttcccaactctccttcccgcgcgcgcgcttttccgtcaacgccacgtgccccttcttctccgataacaatggcaataagatttcccttccccaagacgtcgtcgcttccaaaccctcccctctcgagttgctcaaaacttccgccgccgacagatatacgaaggaaaagagtagcattatttgcatagggctgaacattcacactgctcccgttgagatgcgtgagaagctttccattccagaatcgcattgggctcaggtcatcaaggacctttgcgctttgaatcacatcgaagaagccgcggttctcagcacgtgcaatcgcatggaaatctatgttgtggctctctctcagcaccgtggtgttaaggaggttactgattggatgtctaaggtgagtgggatttcaatacctgagc

SEQ ID NO: 4026 - DNA, 514 bp, Glycine max
  unsure (1)..(514): unsure at all n locations
  Clone ID: jC-gmfl02220061c10d1
gactcacttatactccactctaacattgatgttattaaaaatacaagaatcatctgttgtcaagaggatcatgaatttacaactgctctatatcaagctcattgagaaaaatataacatgttgaattcaattacttataatgttaaaaataattgaaaaaaattagccttcaaagggcctcaatcaactactgtagtgtacaaaatggcgaggattgcagcccccacagtaatcaaataaaactaaaccaattgaagaagaatctacttctgaacccgttccatcttgactctgatcttttcttcgatcaaggaagtttctgtctcaagatcatacattctgttaagggcgcgcatattctcaagtacttcactcagactactatcatttttcccatcacaccttacgtgctgcatgggaccatgaagtagcttattcacaatacccatactaagggcataaattgcatctttgtgttgctttgagacatcanggcccatctttcgacaacact

SEQ ID NO: 4027 - DNA, 533 bp, Glycine max
  Clone ID: jC-gmfl02220061c11a1
gtcttacagttgagaatgtacacatggttgaggtggttggttctggatctcgtgtgccagctataaacaaaattttgacagagttctttaaaaaggagcctaggcggacaatgaatgctagtgagtgtgttgccaggggctgtgcattgcagtgtgcaattctcagcccaacttttaaagtacgggagtttcaggtcaatgaaagctttcctttctcaatttctctctcgtggaaaggtccaagttctgatgcacaggaaagtggaccaaataatacgcagagaacccttgttttccccaagggaaatcccataccaagtgtcaaggcactaaccatctacaggtcaggaaccttttctattgatgttcaatatgatgatgtgagtgaattgcaaacacctgcaaagatcagcacatatactattggacctttccaatctacaataactgaaaaagcataagttaagtgaaagttcgtttgatcttcatggaattgtatctgtcgaatctgcaactttgctggaagaggaaga

SEQ ID NO: 4028 - DNA, 303 bp, Glycine max
  Clone ID: jC-gmfl02220061c11d1
aaacaagcattgtaattccacttatagaacgtagatttgaccaaaaataatccgaatctcagataattcacccattaccaatttttccagcaaagaatcccagcatcaactctcacccacgacgatttttccaggtacaattcaaattgttatacaaaacgtagagaccagacaaaatcaacaaaaattaagcagagcctgtgttctctggtttgtcagtctccattggttcagcagatgctggtggtggggctggattagcattgtcccctgccttttcattagtactggcattaggattct

SEQ ID NO: 4029 - DNA, 386 bp, Glycine max
  Clone ID: jC-gmfl02220061c12a1
ctggtggattcatatccagagctcagtggatgagggaaggctaattgctccaaccccacctgcttctcctctgactcagtttagtgaagagagttggacttctctttcaacccagaagttctccatggaaattgcttcaccaacagtagaagatcacatccttgactttgctcttctatacagaagaaaccaaaatgatggacaacttatcctgcttagtgaggatgtcacattgaaaatcaaatgcatggcagaggggttgctatgtgaaccagtgcaagagtttcgtgagagtctagtgaatccattctctgagaggttcttgtgggacaaaagcattcctcgaggacagacttggtcttgccaagacgacgtagtcttaaggg

SEQ ID NO: 4030 - DNA, 408 bp, Glycine max
  Clone ID: jC-gmfl02220061c12d1
acactagataaattcatgaaattttattttgatgtagtatagcactattcacaatccctgttgtgaggagggtttttaagacgttgctaccagctggctaaaatctaattgattaatatttataggtaatgtttgcaataaaaaaaagtttaaggcattgcaaccagcaaatgagaatactgtggtcaatcaaaactgttcagctggctcaactgaactgtttttgccactggctcagagtccatattgagagttgtgaagtagaattagcttcaaaccgcttgcaactccctttgatggcttccttaaacgacaaaatttctcccttaagactacgtcgtcttggcaagaccaagtctgtcctcgaggaatgcttttgtcccacaagaccttttagagaatggattc

SEQ ID NO: 4031 - DNA, 350 bp, Glycine max
  Clone ID: jC-gmfl02220061d01a1
gatagagataacactgagcatcgtctagctatctcgatcgaactgtccaaggtcctgtcactattttgctgagcgagcgacttagttacctgcggtgggtatgggagctaacgcgcgtcgataatgccgaggcacggccaggtgccacagccgcagtacttatatgcggtttgagtgagcacccggagctttgtttataggttagttggtcgtggcagtgcctgccgtcgcattgtatacagggtggcaggaaaagtggcatgcacatcgccggaggttggtattattgtacttcagtcccaaaggcgaacccagcgcaaacaaacgtgggtggataggctttggcatga

SEQ ID NO: 4032 - DNA, 414 bp, Glycine max
  unsure (1)..(414): unsure at all n locations
  Clone ID: jC-gmfl02220061d01d1
gtcaacattccgttccaaggaaggtttcccgtcatcactgtatgacgtcctccttctttggggggggggggggggggggggggggccgacggtaatccagcaaccaggagaaggagctagaataacccgataactcgacgggcagaagttactgaatgtagatgtacaacgaattacgtaaaaatggagtaagcgagagcaaaacaatgccattagggaaaaaaaaaaaaaaaattaatgtgttgtatgggtggtaaagaaagcagtatgttaataccacaagaatagcaaaaccagaataaacctgacaagcaaacccggataagtgctaacgtagcgtggttacataaagtagcaccagaccgacgtgggcntggtaagaatttgagtgtgtaaatacggggacaagtatgg

SEQ ID NO: 4033 - DNA, 160 bp, Glycine max
  Clone ID: jC-gmfl02220061d02a1
aaactctgtgcagtgaaggcactttgaatctgaaaaaagactttatgcctaaaaatatatagctcctgttagattggacatagacacagcgcacctcgacatggaagctgaggacagtcatcgcgatctgaatcacgctattttaagagaaaagatctaa

SEQ ID NO: 4034 - DNA, 136 bp, Glycine max
  Clone ID: jC-gmfl02220061d02d1
gagattcaaattgccttaactgcaaaaagtttccatgactaggggccctctgtttatggacaaactgacaggaactttctattattgggcctgaaaacttctttgagatgcatattgccttaactgcacaatgttt

SEQ ID NO: 4035 - DNA, 423 bp, Glycine max
  Clone ID: jC-gmfl02220061d03a1
gattgctagaatggaatttcgatgctcagtcatctcttttaccattctcttctctcttgctcttgcaggagagagccatgtccatgcatcgctacctgaggaagattattgggaagctgtttggccaaacactcccattcccactgcactgcgagagcttctaaagcctctccctgcaggtgttgaaatcgatgaactccctaagcaaattgatgatacacagtacccaaaagcattcttctataaagaagaccttcatccaggcaaaacaatgaaagtacaattcaccaagcgtacctatgcacaaccttatggcgtatatacatggttaacggatattaaagacacctctaaagaaggatatagatgtgaagagatatgcatcaagaaagaagcgtctgatggagaagagaagttttgtgc

SEQ ID NO: 4036 - DNA, 418 bp, Glycine max
  Clone ID: jC-gmfl02220061d03d1
aaaaaagcccactgcatattcatcaaagcatcatcaaagcacactgcatcctaacagcacacgtacgtagaaaggggaagttccaggtcttgcgcaacatacacaacacaccataatttattttatatccaatcttatggcgcccaaaatgcacatgcatggactaattaaacaacaacgttagtctgataggcagtgtccatagataaattgggttcccataaaatggccttgcttccaaggaaatggcacacagggttagttccaggatcaactcccatgagttcatgaagcctgtgatgattcattccagaagtatctgagtggcaaacagcatgtgcctgagacctgggtccatatccagccaccaatggaaccatgaaagctgttgtttcacggactttatggcacgaaaata

SEQ ID NO: 4037 - DNA, 549 bp, Glycine max
  Clone ID: jC-gmfl02220061d04a1
aattcagttaacacaccaaccccacatccaaagcttcagttcaatatggcaaccttgtcaagttttgctcctttggccattctaagtttagttctagtaattagtgccattgtctttgaggctgaagctaggccaaggacattctttgtatttggagattcacttgttgataatggaaacaacaattacttggctaccacggcacgtgccgatgctcccccttatgggattgattaccctccaagtcatagaccaactggtcgtttctccaatggctacaacattcctgatcttatcagtcaacgacttggtgctgaggctacattgccatacttgagtccagaattaagaggaaataagctccttgctggtgcaaattttgcttcagctggaattggaatacttaatgacactggaattcactttataaacgtaatcagaatgtataggcagctacaatattttaaagaagtcccaaaccgagtgagagctataattggagctttacagactaagagcttaatgaatcaagcactagtcctcatcact

SEQ ID NO: 4038 - DNA, 428 bp, Glycine max
  Clone ID: jC-gmfl02220061d04d1
agaaaattaagtaacatttttttaatattgagactcaggaatcacttagtacttcccaccatttatatatatatatatattcttcgttgtaattttatgcaaaaagggaagtttcttcctccctttaactttctaattccccaattagatattgaggaatacgaaattaaatcacaattacaataataaaaaagggacataatgaaactagcatgcgaggtgcatagacttattggtgtcttcatgtggtaatagcatccaaagccaggatggtgctgaggttcattgggttcatgtagattttagaacctgacataatttcttccacaataagcctattggccttttcagatggatggaatgcatcccaaaatgcatattggtctctattggggcaaaggttggagagtggtgtgcatagcccaaga

SEQ ID NO: 4039 - DNA, 530 bp, Glycine max
  Clone ID: jC-gmfl02220061d05a1
gaaaaacacacacacaaacaccctttgagttcattaacctcttcagaaaaaaacaacaacaacaacaaaaaaaaacatcatcatcaaaaaaacttccgagagtttaatggcaacacgcgtgatccctccaagaatcctcaagaagctccgttacaacacaacaaccaagccactcaacgctgcccacccctcaatctctccagtcatcgccccaccgtcactcttcgagaggtcgccgtcccctgtcgcggatgctgtttcaacaacatccacgactatggagacggcgaatctcaacctcgacgacgcggagcggcttttcgcgtcagtatcgacggaaaagctgctccggtcgtccgcggttttgcatgcgacggcggtggggcccatggtagacctgggaatgtggttgatgaagtctccggtgttccagaccgggctgccgaaggatctcatcatggccgccacgaaggagacgttcttctcgcacttctgcgccggcgaggacgccgacggcgccggacggagca

SEQ ID NO: 4040 - DNA, 502 bp, Glycine max
  Clone ID: jC-gmfl02220061d05d1
gctcaacacaaaagatccgttgcatttccaacaaaacctacataacaaagcagaatttcatttgattgaatgcacaatttcttcacattacaaaactctctaatttgtacaaaaagtcaatgaatcctgatttctgacaaatttagaacattgcagcttttaatcttcttcccaactcctttctcatcaattgcctatcaaaacctgatgcagccaaaagccctctattttcttcagcccttctcagaaggtaaggcataaccatatctaccggcccaaatggcatatacttgctaacttgaaaccctgcattgctcaaaccaaaggaaagtgcctctgacattccatacagttgtgcaaattctagcttgtggtttacctttccaacccccaattcatatgcttttgctgcagccaatttccctgattcaatattgtgagttgcaagaacaactgacatcgaaccgggtccattagcaatcttctcaagaagaaatgatga

SEQ ID NO: 4041 - DNA, 498 bp, Glycine max
  Clone ID: jC-gmfl02220061d06a1
accaaatcaaagacacctgagccattcaattcccctcctttattgctttcaagtttcaacactaattttattatctgaaaaaatggctttcaaagtttcgtttttccttgcacttgttctagtttccaatatcctcctccttgatacaacagctgctggacgcagcattggcgaaaactccaacttcagaggaaaagaaagagcctgagttcttgttcaagcttgaaggtggggtgtatattccagggattggacctgttggatttccacataaatttcatctcacaccttaaaatccattacctggtggcaatgaaaatggaggaccggaaccgcaacaggatcaggatcaccaccaggtagcagttatgttcctggtggtgatgacactttttgtcccaaaccctggttatgaggttcccattcccggcagtggtggaagtgttccagcaccagctgcaccatgagttaactcatgcatgaataatgtgatgcatg

SEQ ID NO: 4042 - DNA, 469 bp, Glycine max
  Clone ID: jC-gmfl02220061d06d1
aatataatgtaccatacgtaaaggtgtgcacctattatcattcaaggaacaaacacataaaactgtgcatgaaaagagaatatcaaattggaatcataacagaaattatttttgaggactcattcatcagcaactacttcgaaaaacaaataagcttacgtcacactcaattcatcttaaaacaagactacaagaacaaacagaatgacttggcaatccatggtgttcaccatatacaccaatgtgcacatggagcatacttatttatgataagttattattatggctagaaaacagaaagaaaaagacaaacttaagcataaccaccttattaactaccatgcatcacattaatcatgcatgagttaactcatggtgcagctggtgctggaacactttcaccactgtccggaatgggaacctcataaccagggtttgggacaaaagtgtcatcaccaccaggaacata

SEQ ID NO: 4043 - DNA, 582 bp, Glycine max
  Clone ID: jC-gmfl02220061d07a1
agaacatgtttcagagttagaattgcaagctactgaatctaaagctgaatatgaaaaaagaatagagggacttaagcttcatcttgcagatgcaagaatgcaagtgaaggaactagaggcattttccgaatccagatttttgaaatggaagaataaagaggatacctatcaaactatcgtaaatttccaagttggagctttccaggaactgagagctgccatgaagtctgtcaaagatgatgtgataaaaacaaaaagaaactacttagaggaattcaagtactttggaatcaagttgaaaggtctagctgaggctgctgaaaattatcatgtagttatagctgaaaataggaaattgtataatgaagttcaagatttgaaaggtaatataagggtatattgtcgaattaagccatttcttccagggcaaagtcaaagccatacaacaattgagtttgttggtgatgatggagaactgattgttggcaatcctcttaaacaaggaaaagaaaatcgcatgctttttaaattaataagggtttcggtcaagcaacaagtcatgaagaaatattcaaggacact

SEQ ID NO: 4044 - DNA, 473 bp, Glycine max
  Clone ID: jC-gmfl02220061d07d1
atacaacatcgtagataaacattactgaatggaaagttgtaaatacagcagattcagtaatatggcataaaaggccatgatgcttacatacaaactggttacaagctagagtttgcaaatcgcctcatttaataacagattgaagctgaaatgagctgacccttgagccttgagtacagtgtaatagttagaatgatcacctaacataaatagaaaaaagttcctaacggctatctctataaataagcactctacagcatcaagtggcatcctaactattgccatcgtttagggggcttcaccgaagaagagctactggctgcaggttttctaacacttgacagaaccttcgaggaggttttgttcaatgaaagcctagaaggtcttgactggactttctgtgggacttgagcagctttgggaattttggatggcataataagcttttctgtgctctcagctggaaggttgtc

SEQ ID NO: 4045 - DNA, 528 bp, Glycine max
  Clone ID: jC-gmfl02220061d08a1
gagaaagaacagcaagcaatcgttacccattacctatttcactttccacaccactctcatcctatatctctttcttccttattcctctgtcaagccactcgataatatgcagagtctttcaccacctacttccaacgcgctcaatttgaagcatgtttttcgcccgcgacttggcgcgtcaagccgaatctctgtcaaatgcgcttttgggtttgagccggtgagctacggagtcggctccagccgagccgattggcagagctcctgcgccatcttagccagcaaggtcgtttctcaggaacaaccctccgctgaccagaacagcggcaccaccgaccacatcgccgccgtcaacggtcacaaagccgccgtcagcgacttccaactcgttccaattggaaacctagcagaggccaacaacaagccgctcccgccgaagccgctcacgatctccgacctctcgccggccccgatgcacggctccaagctccgcgtcgcgtaccaaggcgttcccggcgcgtactctga

SEQ ID NO: 4046 - DNA, 555 bp, Glycine max
  Clone ID: jC-gmfl02220061d08d1
gactcgatcttcgtcaaactgatgttgcgaaacgcgaacgcggaaagcactttgaaaagcaccgaagttcctttgtcgtgtgcgaaaacaatgctcgtcttgaaaggacggtccgtgcgcgggatgataggctctctcgcgagcatcacaaaccgcgtgacgttgctcggatcgtcttggattccgtccgccatcacgttcaggccgtagagctccgccgcgcgtgcgctcgcgatggcggcggtgtcgcggagattgttgctggcgacgaactcggcagcgccggcggtgtcgtccacggcctcgcgcgccacgttcaggccgagtttggtgagagtgtgctcgcactgcgcgagtgcctgcggatgcgaaatcacgcgcgtgaggaactcctttcggacgccggggagagcgaggaggcagtgatggaccgggagctggacctcgccaactatgtgaaggcggtggcggatgatgagatcgtagttccggtggatcgaaccgtcgagtgagttttcaaccggtaaaaccgccgatcggcgatccagagcttca

SEQ ID NO: 4047 - DNA, 88 bp, Glycine max
  Clone ID: jC-gmfl02220061d09a1
gaaatatgtaataatctcaaattatagagagtatacaattttactatgtgaattgcagtactttcacggaattcatttgtagtctagg

SEQ ID NO: 4048 - DNA, 93 bp, Glycine max
  Clone ID: jC-gmfl02220061d09d1
cctaaactacaaatgaattccgggaaagtactgcaattcacatagtaaaatgggctactctctataatttgagattattacatatttcctagc

SEQ ID NO: 4049 - DNA, 502 bp, Glycine max
  Clone ID: jC-gmfl02220061d10a1
gtgaagccttaactcttctgcttcttccgtgttcagatctcgttgttgttgcttccgattctttgattcttcgcttttttcttctcacttcacattccgattcgtcgcagattctttcagtttctaaacttgatgatcgccactgcctccacctgtaatcgttagttgaagtcacgtgaggtggtccagagaaatcaaaatctccttcaacttcgtcttccctttaggtgtaaaagtcagctaacgataaagaaatgaaatcgctaactgttaatactgaagattctttttccagtttgctggaacttgcttctaacaatgatattgaaggcttcaaggtgcttttagagaaagattcttcttcgatcaatgaggttgggctctggtatggccggcaaaacggatcgaagcaatttgttcttgagcacagaacccctttgatggttgctgcaacttatggtagcattgatgttatgaagattatactgttgtgccccgaggc

SEQ ID NO: 4050 - DNA, 460 bp, Glycine max
  Clone ID: jC-gmfl02220061d10d1
agaaaagaaaaacattgcatttgatttgaatttgaaacgaaatgatttttaaccagtacaattcaagggaatacagcttaataagaagaacattgtaaacttcactatctcatttatctgctggaaatattcaacagggcagattacctctaattattccctcagaaagaaacaactttttcaaccttaggcaaacagcaaatcattcacttggcttaacttggggaacttcggaaaaatctttagaacaaacgcaggctaataatgggttttgtcgcattataaaccaaactagcttgcttgatagtgaactcagaactctagcttgcttgatagtgaagtgaactcagaactctagtgaaatagcaagggcgaaaaccctgaaacggggcccgtttggaagaaaaatagataacctcgataggatttttcgcctactattaattgatcagccccaggg

SEQ ID NO: 4051 - DNA, 531 bp, Glycine max
  Clone ID: jC-gmfl02220061d11a1
ggaaggggcatctctattaattcacatcacactatttccaaaggaaaaatgtcagcagatttggagaggtcgacttctaggattcctcaacttgatggaccaattccatatgatgatgatgatgtgctctctactccaaatatatacaactatggagaagtgttcagtgaagactacaacatttctaatacaccagctcctcctgaagtaccagcaagcacccctgctctcttggttcagaatgaagtgggtaatgattttgatgatgatgatgatgatgaacctccattaaatgaagaggatgatgatgatttagatgacatggaacaaggagaggatcaaaatacacatcatcttgttttggcccagtttgataaggtgacacgtaccaagagcaggtggaaatgcacattaaaggatggcatcatgcacataaataataaggacattctcttcataaggcgacaggagagtttgaattctgattttggtggggctggcgctttcgtgaaatatgaattcgaggtgtca

SEQ ID NO: 4052 - DNA, 411 bp, Glycine max
  unsure (1)..(411): unsure at all n locations
  Clone ID: jC-gmfl02220061d11d1
atcaaactgtttcttttaatttaataagaaaaaaaaacatcatcctgttttttaatgtcaaaaagttacgcgaggcctaacaagcctatctatcattattatcatacaagggattcttaaattcactaaaatgttcaagtatacagaactaaagaaaccacatacttgacaaatggtgggcttaaaggaaatgcccgagtctctaaccatcagttaaaggcaaaaaattgctcattctctatgtacaagaggccaacatcacaatagtctcgaaagggtaaaaatattcctatcttcatcaatctttcacttaataattataatcaaagaaagggatcatgaaacacacaatgacacctncgaatcatattttacgaaagcgccagtcccaacataaatcgaattcaaact

SEQ ID NO: 4053 - DNA, 490 bp, Glycine max
  Clone ID: jC-gmfl02220061d12a1
ggctcgagattatttactccaaagaacagcactagatgctttgagagtaatagaggttgaactcaacttcatctatcaagctttctacaccaaggcatcagtcataaccaacaaggtagggtttttctttcgattagggtcctttgcttcactcgtggcggccttggtggtttttgtttatgaccaaaagcgtggctccaatccctttgatgttaaagtcacctacacattactatatggtgctgtggccttagatctcgtgtccgcgttcatgctcattttttctgaccactcatttgcattaatttaccctcacatctctaaaaaaattagtgattctgatggtggcaaagaaacatccaaattagcctctattttaagttgtttcctcaagcttaagagaccgaaatggagagaacagaagcttaaggagccaaaatggcttcataataagagctataagatattgcgtaggttcatgttagttcgt

SEQ ID NO: 4054 - DNA, 367 bp, Glycine max
  Clone ID: jC-gmfl02220061d12d1
ttcgccctttttttttttttttttttttttttttttttttttttttttttttttttttttttttttttttttttttttttttttttttttttttttttttttttttttttttttttggggcccccaatttttttctccccctcgcccaaaaaagccccctggaaaaaaaaaaaggggccccaaaacaccggttttggaacccctttggggaaaaacccccaaaacggaaaacctcgggggggggcataaatcccaggggccacaaggaatcccccaggggtcttaaaaaaaccccggggcccaaacacatccccaaaaatttttttaaaagggggtcttttttgtccccaattttcaacattttttt

SEQ ID NO: 4055 - DNA, 92 bp, Glycine max
  Clone ID: jC-gmfl02220061e01a1
gaggctaagactgagcatcgtctagctatctcgatcgaactgtccaaggtcctgtcactcctgctattgtgcgcgactttggacgagagtga

SEQ ID NO: 4056 - DNA, 540 bp, Glycine max
  Clone ID: jC-gmfl02220061e02a1
ttctcatctttctctcttctctctccacccaaaccctaactcccgaccctgttcccctctcgtatccgtcatgaaaggaggaaagtccaagaccgaatctaagagagccgatcccaaacttgctgtgaataagaagggagccgccaccaaggctaggaaacccgccggcaaggggaaggcagcgaaagaccctaacaagccaaagaggcctccaagtgctttcttcgttttcatggaggagttcatgaaggtattcaacagagaacatcctgaaaacaaagcagtgtctgctgtgggcaaagctgctggagcaaatggaagaccatgtctgatgctgaaaaagcaccttatgtggcaaagtctgagaaaaggaaagtggagtacgagaagaacatgagagcctataacaagaaacaggcggaaggtcctactggtggggatgaagaagaatctgagaagtctgtatctgaggtgaatgatgaagatgatgatgaggaaggcagtggccatgaagaggatgacgattagagaatggactga

SEQ ID NO: 4057 - DNA, 316 bp, Glycine max
  Clone ID: jC-gmfl02220061e02d1
ggggccaaacaaaaaaaaaaaccccttttaaccgctaaaagggaatgataaaccaatttttttgatcccaaattaacccgattttaacaagaaaaccttaaatcaaaccaaaaggcctacaagagaaaaaccccccttaactaaacagtggggtcttgaagtcccaaaaaaaaacccccttttttaaaaaattcaccttttggaaaaacaacccatttacggggggggccgggaaaaattttttggaaaccaaaaaattgtgtttcaggaaaagcccagaccccctacaaccgggggccaaaactattggaacccc

SEQ ID NO: 4058 - DNA, 521 bp, Glycine max
  Clone ID: jC-gmfl02220061e03a1
gtggatcttcaagacctcttgcttcggctcacttttgacaacatatgcggcttggctttcggccaagacccgcaaaccctagccgtggggctcccagataacgctttcgctctctccttcgatcgagccaccgaggccactctacaacgctttattttacccgagatcttgtggaagctgaagcgatggctcaggctcggaatggaagtgagcctgagccggagcctgaaacacatcgacaattacctctcccacatcatcaagaaccgcaagctggagcttctgaatggcactgggtcccaccacgacgacctcttatcccgcttcatgaggaagaaagaatcctactctgaagagtttctccaacacgtggcactcaacttcatcctggcagggcgcgacacgtcatcggtcgctctaagttggttcttctggctctgcattaagaacccgcatgtggaggaaaagatccttcacgagcttctgcagtgttctcaagtttacacgtggagatgatatct

SEQ ID NO: 4059 - DNA, 293 bp, Glycine max
  Clone ID: jC-gmfl02220061e03d1
cccgaactgcagcagcattactttttaatcatcaaaaggtttacaaaaacataaatagtattcatcatcagatgagaaacttgggagtaaagggaaatttcatttatacagacaacgtaaattaaactaacacagatgaaatgatccatcattgacaatattctatattaagtaatatataaatttcttataattaatattatttctttatttaaaccgatgatgtatctatcggcttaattaaccaaatcaaaatcacttttgaccaccagtaatagcaccctcgggggggg

SEQ ID NO: 4060 - DNA, 521 bp, Glycine max
  Clone ID: jC-gmfl02220061e04a1
ggtctatgagaatcattgtgctaggaatgaccgtgaggcagatcttccaataacctatttcaaggagcaattgaaccaagctatatcaggccaaatatcaccagaagctgttgtggatctccgtctgcaagcctataatgaaataacaaaaaatcttgttaatgacaacatcttttcacagtatatgtacaaaactctacctagtggcaaccatagttgggctttcaagaagcaattcgccatccagttagccctttcaagtttcatgtccttcatgctacaaattggtgggaggtccccgaataagattttgtttgccaagaacactggaaaaatatttcaaactgattttcaccctgcgtatgatgcaaatggattgattgagtttaatgagcctgtcccatttaggctgacaaggaatatgcaagccttcttctcccatggagtggaaggccttaatcgatcttcaatgtgtgcagctgcacatgctgttgcttcacctaaacaaagccaggacctat

SEQ ID NO: 4061 - DNA, 402 bp, Glycine max
  Clone ID: jC-gmfl02220061e04d1
aaaaaaagggtttccacccaggggttaccgggggccccccggcaaaccgggttaaaaaacccgggggtcacttggacaaaaaaacggccccggtatattaaaagggggcccccccggggcagggtctggggggtaaaaccttccggggaaacgctttatagcccataaaaaaaaaagggacccccatttaagggtttaccaggggggttaaacccaattgggggcggggaaatggccccccctttttgcgggccgggtacaaacttttaaagaatcagaacttaaaacccggggggccccgggggggcccttatgcccaagtttcttgggttcaagggggttttaacccactcaggaacccccctttggacagggtggggggggacccaaaggggttccccc

SEQ ID NO: 4062 - DNA, 469 bp, Glycine max
  Clone ID: jC-gmfl02220061e05a1
gcagtttcttcgattctctctttctctttcttcagaaaaattaaacccattcaaagaaagaaagaaagagcgatcatttccaatcacaatggcagatcaactcaccgatgaacagatctcggagttcaaggaagccttcagtttgttcgataaggatggcgatggttgcatcacaacaaaggagcttgggactgttatgcgttcgttgggtcagaatccaacagaggctgagctccaagacatgatcaatgaagtagatgctgatgggaatggcaccattgacttccctgagttcttgaacctcatggctagaaagatgaaggacactgattctgaggaggagctgaaagaagcgttccgagtgtttgacaaggaccagaatgggttcatttctgctgctgagctccgtcatgtgatgaccaaccttggggagaagctcactgatgaagaggttgatgaaatgattcag

SEQ ID NO: 4063 - DNA, 372 bp, Glycine max
  Clone ID: jC-gmfl02220061e05d1
aataataaaataaaaaaatatatattgggaaaaaaattgacaaaaaaaacataaaaaaaaccaatgaaccaaaaaaaaaaaaaaaaaaaaaagtttcaaaaaaaagggaaaaaaaaggaaataaaaaaaaaaaaaaaaaaaaataaaaaaaaaaaaaaaaagaaaatgtgaaagggaaaaatgaagttaaaacaaaattaaacctgtgaaaattttcccaactagaaaaaaaattggggaaaagggggacccccaaaaatggggccaaagaaccttaaaaaaacccgggaaatttattgggggggcccaaaaaaaaaaagccctataaaaaaactaaacacccttttaaaaaggggggtccccccaaggggg

SEQ ID NO: 4064 - DNA, 452 bp, Glycine max
  Clone ID: jC-gmfl02220061e06a1
cgcttttcttcgtttccaaacccgaaaggcccaaccacagagtctccattgcccctcgctctctctattggttcacgcgcggcaattggagattcacgcgccaccatggcctcaccaccgacactccctatctcctcccaatccagcgcctccggcggctccgcctcgcagtcccagcctccgatcgcaacgccggcgttccgcgccttcatctcccgcatctcctcgtccctccgtcacgcctttgcgcagcgccgcccgtgggcggagctcatcgaccggagctccatgtcccgacctgacaccctcgccgaagcatactctcggatccgcaagaacttcggctacttccgcgtcaattatctaaccctaatcgcgctcgcgctggcggtctcgctcatcacgcatccgttctcgctctttgttctctttggcctcctcgcgtcgtggtc

SEQ ID NO: 4065 - DNA, 471 bp, Glycine max
  Clone ID: jC-gmfl02220061e06d1
cagctgcactagtcggcggccgcccttttttttttttttttttttttttttttttttttttttttttttttttttttttttttttttttttttaaacaattaaatcggccctttacgacaagggaaaaaaaaaaggcccatacaaatttcccgaaaatgccgaacattttcagaggcaaaatcaaggactaaaaggccttcctgggggttaaatagcccaataatttttgggggaaaaacaaaaggttgtaagcagtaccagaactaaaccctaagcaattcgcctgggatctcaaagggcaaaaaatttcgcaccaattttcaatttaccattttccaccaaaaagggccgacccaccctgaaaagaatcccccggacacagggttcgtccaaatcccgccgtttacacccgcgcaacggccggcccggcggttgaagcgggggccccaccggggaacgaggggaatccg

SEQ ID NO: 4066 - DNA, 596 bp, Glycine max
  Clone ID: jC-gmfl02220061e07a1
gtgagcaggctcccggtcctgtccgacaagctctgcggcaagaccaccgccgccagaatccagctcctgggttgctacatgctgtacgaggttgtagggttcacgcaaatctcggggatgcagattttgtacaagacctgtgggggaaccaacgctgctgggagagggtttgaggagaggagggacactgctttctctgtgatggagaatggggtggtcactggccatggattctatgccaccagctaccagtctttgtatgtgatggggcaatgtgagggagatgttggtgattctgattgtggggagtgtgtcaaaagtgctgtccagagggctcatgttgaatgtggaagctccatttcaggccacgtctatttgcacaagtgttgcattagctatagttattaccctaatggggtttcaggaagacactgttcttagcttcatcatcgtgcaattcctattcttcttcttcttcttcttctggtaaatactaatacctagacaccgaatgagataggaatgaatgacattaaatttagtgttgttgaaaagtgttcttgcacaactgagtctctgaacttgatagagaaaga

SEQ ID NO: 4067 - DNA, 416 bp, Glycine max
  Clone ID: jC-gmfl02220061e07d1
ggttgttatattgacacgttcttacgggaaaaaggactccccccatgagaggaaacaaaagcaaccacccgggagggagatgattcttgcccccccgagaaagaaaaaaaaatggctccatgaagaaaaaagagccgatggggcaaaaaaaaaaacgccccaccacacaaaagaacagtggagacccccactttgcccgggaaacgtttttgcccccaaaggaaaaaacagcaactcaaaaaaactgccgactgctgcagaaaaaagaatgactttttgaaaaacaaatcccgccccggaaaaaagaagcccacccaaaaacagcactgggccgggacaaaaataccccgactgttgccaaagacacgaccaaagccaagagctttcagcacaaaaacccccccataggccccccc

SEQ ID NO: 4068 - DNA, 549 bp, Glycine max
  Clone ID: jC-gmfl02220061e08a1
cggaaccgaaacccttcgccgcaaaaaatgcctcccaaatctgccaaatccaaggaagctccagctgagcgacccatcctcggtcgattctcttctcacctcaaaattggcattgttggcttgccaaatgttggaaaatctactctctttaatactctcaccaagttggcaatacctgctgagaacttccccttttgcaccattgagcctaatgaggcgcgggtcaatgtacccgatgaacggtttgagtggctttgccaattattcaagccaaaaagtgaggtctcggctttcttagaaatccatgacatagctggattggtccgaggtgctcatcaggggcaaggattggggaatagttttttatctcacatccgtgctgtggatggcattttccatgttctacgtgcatttgaggatccggacattattcatgttgatgatactgttgatccagtcagggatttagaggtcattactgaagaaatgcggcttgaggatattgaactcatggaaagaaagatagaagatattgagaaaagcatgaag

SEQ ID NO: 4069 - DNA, 449 bp, Glycine max
  Clone ID: jC-gmfl02220061e08d1
gagagggcaaaatccactagagattttaagcctaaataagtaaataatattgaaaatgggcccaaaattacattttcaaacttgtacaaattgtgcaacatggtaggcgcctataataagacacaaaccccatgcaaaaccagctttgctttttgagatgaatctctggttttactttttgcccccaccaaaaacgttgaacttaaagaatataatggctccattttggaccacatatgttttcccttcctggttatactttccagcagccttaacagctgactcactaccaagttcctttagatcctcaaacttaatcaccttagcccaaataaatcctttttcaaaatccgtgtggatagcccctggaacttgaggagcctttgattggacgttaatttgccaacatttaacctcatgaggacctgctgtgaaaaagtaaatgagat

SEQ ID NO: 4070 - DNA, 462 bp, Glycine max
  Clone ID: jC-gmfl02220061e09a1
cttcatccatagacatggccaccgtcacttctgcagccgttgctattccctcattcactggcctcaaggcaagcgcaggcaaagtgagtgccgcagttaaagtctcagctccccaagccacaaggttgggcatcaaggcttcgctgaaagacgttggagtcgctgttgtggccactgccgcgagtgcagtgctggctagcaacgccatggccattgaagtgttgctgggtggtgatgacgggtctctggctttcgttcccaacaatttctccgaggcctctggggagaagatcgtgttcaagaacaacgcatgtttcccccacaacgttgtgttcgacgaggacgagattcctagcggcgtggatgcagggaaaatctccatgagcgatgaagaccttctcaatgcgcctggtgagacttacagcgttactttggatgctaagggaacctacagtttcttct

SEQ ID NO: 4071 - DNA, 455 bp, Glycine max
  Clone ID: jC-gmfl02220061e09d1
ttcgttctttttttttttttttttttttttttttttttttttttttttttttttttttttttttttttttcttttttttgtctcaaaaaacaaaatgaattccagaaaccgattaatacgcttgttttccccctcggccaaacccggaaaattcacgccatttactttagaaaaaacaaaatttgtaaaagaaggacccatgggaaaacttaaccgtagggaacaaccccttggaacagacatcaattcccagggacttgtccccccataccacctccttggggagggaaacgaaaaaaacggggggggcccttaccctccaaggacaccctggaagtcccaccgggcgccttgaaaagggcccaaccgacaagggggagtttccccgagtcccccccgggtgggacatcggccttttccaacccaccctggggggggaaccccgctcagttttt

SEQ ID NO: 4072 - DNA, 584 bp, Glycine max
  Clone ID: jC-gmfl02220061e10a1
aaattttcttttctttcctgcaaccattttttgtcctttctgtttttcatcccattctcatttctctctcatcaatcccacaccagcgacctttattctcattaataatataatctgagttcatgtatttacttttattttattcctgaaacaagtttttggtcactggttatagttgcgcattacatttgtgtccactttggcattttgacctggcctgtgtttggttctttctttggttgtgttgtgagcgtgatcctgctacatgctcacctgctttttattccctgcaactgcaacagaagaaagaagataatggcatggcagtggtgtgccatcaccgggaaccaacgacacactcacatggaatgaattatagaacccagacctaccattcatagatctcaaggatctcacagtctgctttttctcttcatgaagatgtactctatgtggtcttctgagtgctcactcctgttgctaggattcaaattctctattctgccacttggttatgtggtggcaaagtaagaaagacgacaaaaccattttggcatccgggttctgattggcttgatgttcat

SEQ ID NO: 4073 - DNA, 471 bp, Glycine max
  Clone ID: jC-gmfl02220061e10d1
aagtgcaactacatacaattttctaacattgattcaaaaaatttctgaagcaactaaatcaacattccaacaaagaagatacttatacatgactttccttttttttctttttacagatgaatacgagcattacatagctattgacactaatgacactgtcatttttaacatgtaaactacaccttttaaacaaggagctatagtggaaaaccaagatgcttgtcacctagggccagaaagctccatggcttcaactatgagtgaagattcctctattaaatctgaatatctttgaggctcacaagaccgaaaccttggtgtttcaatcctctgtgaggcctcccatctctcagctaagccgtccccttgcaacatctttaatacttctgacatcttggggcggcgtgaaggattgaattgtgtacctagagtgcaacctgaaccatttcttctaattgaatcagatcaaag

SEQ ID NO: 4074 - DNA, 599 bp, Glycine max
  unsure (1)..(599): unsure at all n locations
  Clone ID: jC-gmfl02220061e11a1
ctttgcaagtactagcacaaacagctagctactatttttgaacttgtcataattagtctctaattctaattagccatacattgaacacaccagcacaccttaaacgtaagtggtatttgttccacacaggtacactatgccttcactctcagaagcctaccgagcccaccccgtgcacgttcaacacaagcaccctgacttaaactccctacaagaactccccgagtcttacacttggacacaccatagccatgatgatcatactcctgcagcttccaacgagagtgtccccgttattgatctcaacgacccaaatgcttcaaagttgatacaccatgcatgcataacttggggagcgtaccaagtggtgaaccatgccatacccatgagcctnctccaagacattcaatgggttggggagacactcttctctctcccttgtcaccaaaaacaaaaagcagctcgttcccctgacggtgctgatggctatggacttgctcgcatctcttacttcttcccaaactcatgtggtctgagggattcacatttgtggatcccctcttgagcatttttcgcactttggcccaagattccacaat

SEQ ID NO: 4075 - DNA, 410 bp, Glycine max
  Clone ID: jC-gmfl02220061e11d1
ggaaagaaaatgttttttggcgagtcctgtggtcgaattgaataatcagcttcgacaatttagtgatgtccctttccagacaaagacaaagacaaatgaaacacggatgagactatcttatccccagtattctctctccagtttagagccaaacaaatatatctacatacatatacaccctcttgaacttatttattgttggcatcgatccccaccaagtttccattcatattaagcaaaaaaaagaaaaagaagaggtgtttcattcatgtttggtagaaaatagaccatgcaagagggaaggatcgaagcaattgtgtgaggctggtttacatcaaacgaaccggtaatagctagctaggtgcacaaagccgaacggttgagagtgccttggtgaaatgctttgcttt

SEQ ID NO: 4076 - DNA, 518 bp, Glycine max
  Clone ID: jC-gmfl02220061e12a1
tctcattttctttctgtcgagaaaatttagtgaacccaaaaggagagaactttctttggtttgtgtttcattttgttgtggttttctgtaagattaaatggctgaggttttgaccaaggcgagtttggtttcctcttcttcttcctcatggcatggggttggtcaacggcatcatcgaagggtttcaacggtttccaacacttgtagcttcggttctggcgtgggaaagttctcttctttgaagatgaagtctcaggttctcagatcttggtcctcttcttctgagtttcagggtataaagcttgtctttcatgtaaatagaggattacccaatagggtcaattcgcgcttgagagcttcaactggggctcagatgagctttagactagggaaagttcagaaatggtgggaaaaggggcttcaacccaacatgaaggatgtgacttcggcacaagactttgtggattcactgttaagcgcaggggacaagttggtggtggatgatttcttctctcccg

SEQ ID NO: 4077 - DNA, 496 bp, Glycine max
  Clone ID: jC-gmfl02220061e12d1
gaacaagaaacaaattatccattggtgaataaaatggcattcattttacaacaataggataagaagcgattcctcatacacgcaaaaaagtaactattaactagtaattctacagcttctaatttccctaacctcagcaatgcatggattcaaaaaaacatgcctttgaggaatacacactatcatactatgtgagttaatctgcaatgatatcttcattctcacaagtatattatgtgaagatattacaccaaaccagatctacactgtacaagggatggggtcagaagatgggttttgcttacaaactgaccacatcatctccctgaagtggttaaggttctctttttagagacctcagaattgagaatcattgaaggtgaaggaagagattttgaaccaggagcaggagcaggttcggttcccaactcttcatctgcatgtgcaggttgtaaaggttcctgtgagttggtgaaggacagaatctttgtggcag

SEQ ID NO: 4078 - DNA, 621 bp, Glycine max
  unsure (1)..(621): unsure at all n locations
  Clone ID: jC-gmfl02220061f01a1
catagagataacactgagcatcgtctagctatctcgatcgaactgtccaaggtcctgtcacctaacctaaagtgctaggctcagcgctcttgttcaacgtgtggtcgctgggctcatgggatgcgaatgttgaacggggtcattagtcacgccccgttcaacattcagagggattagtcaaccaacatagtgttacacgttgcaagattgaacactagtacccagttaaggacgagctaatgtaaggcttaccagttaaacggtgtcacggtgtaaagcacgccaaaacggcccaccacnacgaaccaacaaccgatcgaaaggagacctacaaaaacgaaaactgttaggcaaccagataagtaacggattagattaagttggcgtacaaccataggcgtggctgtgttataaaaaacccagtatgcccagcgtgcaacgagtaccgagccaaaccatgtaggtatcgcatgccagcaatgatacaactaccagccataacatggaaaaccccaatgacacaatatacaatacccacaaacgcgaatgcgcaaatgtcacgattgcacggacacaaaaacaggtagcatggcaatgtaaaggacaacagtgcaaaacaga

SEQ ID NO: 4079 - DNA, 543 bp, Glycine max
  unsure (1)..(543): unsure at all n locations
  Clone ID: jC-gmfl02220061f01d1
tcgattccgttccaggaaggtttcccgtcatcactgtatgacgtcctccttctttggggggggggggggggggacatacccaatgacgggtgcaggtgaagaaatagataggagcaccaaatagggggatgagcgtaacaagggaacaaaagaaaatctactaccaaaacccacncgtaaccggtgaagaataaagagaataaacgcagaaatgcagaagatagaaatattgaaatagaggcgcacgtttggggtgatacgcaaatagttgaaacggattgtatttaaaaaaacacaacgaaaagaggtaaaattttatatcataccaaacagatagtttttgtaagacctttgcgtcaataccaaaaaggagtgaaatgggttaccgaaaaaaagaaagtaccaattaatggtagcggcgcgctggcgtgacagctttgtctggagcgggatcgtcgctagccgcaggcaggttagggtcagtaccgggaggtatggggggctgatacaaaatactgcaaaatatgtgactttgaaaagaag

SEQ ID NO: 4080 - DNA, 474 bp, Glycine max
  unsure (1)..(474): unsure at all n locations
  Clone ID: jC-gmfl02220061f02a1
ttcattcctgacaaggagctcggccaaatgatcgagaggattgacgtcaacggcgatggctgcgtcgacatcgacgagttcggggagctctaccagaccatcatggacgagcgcgacgaggaggaggacatgagggaggccttcaacgtcttcgaccagaacgccgacggcttcatcaccgtcgacgagttgaggaccgtcctgtcctccctcggcttgaagcagggcagaaccgtccaagactgcaagaacatgatatccaaggttgatgttgatggagacggcatggtcgatttcaaggagttcaagcaaatgatgaaagggggtggcttcagtgctctcacttaaattcatttctttcacattcattcaatctatctattcccatacatctttgctttggtntgttcttgtatataagtttcaggagaaataattacatgattcgaacaacaaggtaattgcgttttctct

SEQ ID NO: 4081 - DNA, 373 bp, Glycine max
  Clone ID: jC-gmfl02220061f02d1
agagaaaacacaattaccttgttgatcgaatcatgtaattatttctcctgaaacttatatacaagaacaaaacaaagcaaagatgtatgggaatagatagattgaatggatgtgaaagaaatgaatttaagtgagagcactgaagccaccccctttcatcatttgcttgaactccttgaaatcgaccatgccgtctccatcaacatcaaccttggatatcatgttcttgcagtcttggacggttctgccctgcttcaagccgagggaggacaggacggtcctcaactcgtcgacggtgatgaagccgtcggcgttctggtcgaagacgttgaaggcctccctcatgtcctccttctcgtcgcgctcgtccatg

SEQ ID NO: 4082 - DNA, 563 bp, Glycine max
  unsure (1)..(563): unsure at all n locations
  Clone ID: jC-gmfl02220061f03a1
ctctgaatgggggcttctcttctttgttcgattttgacatgaactatgataatgaagcagatggtggctatgatgcttctgctgcttctgagcagtggaacttttctgaaggtgtcaagtcgtcatccttcttgcaagatgatctgcaggaggagcatccagttgagtctcaggatgtgaggagcaaacagagggctcaaatgctagaagacttggaaacagaagccttgatgcgtgaatggggtttgaatgagaaggcttttcatcattctccaccaaaagattttgccggttttggaagtccaattcatttaccacctgaagagcctcccacattgcctccacttgatgatgggttgggcccttttcttcagacaaaagacgggggttttctacgctctatgaatccctcaattttcaagaattctaaaagtggtgggagcttaatcatgcaggtatccaaccctgttgtggtacctgcagaaatgggttcttggataatggacgttttgcagtgtttggcttcagtgggtattgaaaagctctcaatgcangcaaaggag

SEQ ID NO: 4083 - DNA, 371 bp, Glycine max
  Clone ID: jC-gmfl02220061f03d1
gggccgcttaaatttgcccttgcaatataattaatattttctgcaaaaatagtccccctatttggggactggaatataatttaccccatttaacatactaacactggttccagagggcctaaattccacagacccatgcaaaagttacaagggactttaccaaagaaaaatgggcctagagcaaaattcccaaaatccaccatggtctctctggatctgggactttgcaatttttaaagggtccggccaatttcattggtgctttaacaagacccaacaatgcccttacccaagttcctgagtgaccaggagctccaaatcacatgggttgaagaaattaactccaaaagattacaaaaatcttacttggg

SEQ ID NO: 4084 - DNA, 562 bp, Glycine max
  Clone ID: jC-gmfl02220061f04a1
ggctaagtagagaggtagctttccctgtaagactgttacttaagattaccaagaattctagctagctggttagttcttttgtcatttcaaagagaaactgagagagccatagctagggagaataccatggacaaattgtatgggttgagtcatctcttcatgacagtgtttcttcataacttctccatgttcatggtggtaccagccatcaccgatgtcacaatggctgctctttgtcccggacaagatgaatgctcacttgccatctacatcactggttttcaacaagcgatgatagggctgggcacgcttgtgatgatgccactattgggaaatctttcggataagtatgggaggaaggccatcctcacactccctatgatcctcacaatcattcccgtaggcatattagcttacagcaggacgaaaaaattcttctacgtctactatgtgtttaagatactcattttaatggtttgcgaaggaagcgttccttgccttcgcctaacttacgtggcagataacgttccagaaagtggacgaagcactgtatttggaattc

SEQ ID NO: 4085 - DNA, 473 bp, Glycine max
  Clone ID: jC-gmfl02220061f04d1
gtcaaatgtctactaggaatgaacttatacaatatattgtttcctaatcaaaagcacgttaaaggtagagcttgtacatatgaggatcggctaaagcacaataaaagcaccgttgaaggctctaactaatttatattcgcctaattcaaaatgggaggagccactctaagcatcaaactttgaacaaaagatatcatcgaagcaaatccaatgcacattatactgaatccaggaaaatcaaaaggtgccttttcagaaaggaatagagctgttaatggagagaaaaccaagggagaaacaatatgtgcaattgaacatatgcctgaaatgcaaccttgagcctttccctgctcatggggaccagcttctttagatacaatacttcgtatacaagggtgtgagaaaacatataaaattgagaacatggcggaagcataaggaaccaaggaggaccatgccatgctgtaaaggaa

SEQ ID NO: 4086 - DNA, 591 bp, Glycine max
  unsure (1)..(591): unsure at all n locations
  Clone ID: jC-gmfl02220061f05a1
tgccatggcactgcatttcaaaacgtgcattttttctttcaaacctcatcaaattatgacaacaaaggctcagctttctcaaagcttcaatcctgctaaacttgattctcttcacattgccaacaaatggaacattgttcaagaagaaagatctagcgcattattcacaaaaactggagatctcatcagcattaatcactcagacaaactggaggtggtcaagaatgaatttatgaacactgtgggtgaaaattcattaagaggtttgtacatgattgatgccatgcagcgcctaaatattgattaccacttccaagaggaaattgaagaattcctaaggaggcaatatgtgaattctactactattgcgggtggttattatggtgatgatattcatgagattgcacttcgcttcaggctattgagacaacaaggtttctttgtgcccgaagaggtgtttcacaagttcacaaacaaggagggaaagttcaaccaanaacttggtgaaaatataaagggaatggtagagttatatgaagcctcaccgttaggcatagcaggggaagacacacttgcttgaagctgtgaatt

SEQ ID NO: 4087 - DNA, 445 bp, Glycine max
  Clone ID: jC-gmfl02220061f05d1
aataaataaaatatttattaattcattattcagtactcttagtcttagaacacgaatttacaaaatcttgtagttaattaaacttattttctataaaatttagtatgagaaaatagtgaaccattatggaacttccttcaatcagtgaggtcaatttattttaggccaacctagagattaaagaaaatcatcataaagcaatgacttgacttgctcctctagccctggaagggactgtttgtcgtcataactatacatcaatggtaccatccttgcaagattgagtgaggccttagtgaatgtcgaatggaaatggttaccaaacaagcactcttggttgaggctcttccatgcatcggagatcttactcatcaccctttttcttgctgttctcgtcgtgtagtgtgggtgatccatcatgagacaattcacgtacgatccatca

SEQ ID NO: 4088 - DNA, 339 bp, Glycine max
  Clone ID: jC-gmfl02220061f06a1
aaaagatagagcaaggaactcataaaagtgggaggaatgtggggttgaaagcttatgttgtgtgccaagtgcttgagattgttgtcaaaaaggaaataaaacaagctgaaataaaatctacacaagtcaaaatcaggatgttcttccgaccagaagatttatcaaatgagaaggcatattgctctgatatacgagaggtgtattacagtgatgaaacatatataatctctgtagaatccatagaagggaaatgtcaagtcagaaaaaagaatgatattcccgaatgcagtgctcttggtggaatcttccaaaatgtttttttctgcgagctcttggatg

SEQ ID NO: 4089 - DNA, 527 bp, Glycine max
  Clone ID: jC-gmfl02220061f06d1
gcaacaacaaatattcataacaggttaaaaaaaattggtctcaattttcaactacacattgggaggtaatcaattcccaaccatttctttcataaacagccaaaataccatctaatcaagaaaatcctagttgatagaaaatgagcatcatccattcaattccttggttgaggaaagttaaacaaggaattagcctcaacaaatgaccaatggatatcactatatacaagggtttctagtttttggaacccggaatgatgatttgcaatatcttggtgactgttatgaatacaataagcatgacctaatgtagaaggcccatcttctaagtggagctcttactgtccactgcttccttgagctttctccccaatgctgatgctagaggaggaggcacagcattaccaatctgccggtgcttgtgtatgatattgccagcaaattcatagctatctgggaaagcctgagaccgagcacattcacgaacagtaagaatcctatcttggtcacggtggaagcacattcca

SEQ ID NO: 4090 - DNA, 593 bp, Glycine max
  Clone ID: jC-gmfl02220061f07a1
cttttgacagaaattaattattaaaataactaataaatattttatactaaaaaactatacgatagaagaatggcataatctatcaatcaataacaaagtttataatctatcttacagttttcaaatatacattaatattgatagattataactcagcaacacgacgccgttttccgcgaagaagacatggacgacgacgacgacgagtctcaggaggacggagactacgaagaagaagacgacgacgttttggccgacgacgaagaaaacgagccctctccctccacggctcttgccgtcaccgtcgccgtccccggttcctccgtctccaacggcggtgccgctccaatttcgacgcccaccgtcaccaccatcgtcgtcgcagactcctccgatccgaagcggcggcgcctcgagccagtcgaggagaaaaagccgccgtcgacgccggacgactcgcggcggctgtttcagcggctgtggaccgacgaggacgagatcgagctcttgcaaggcttcctagactacaccttgcagcgaggatcctctgaccacaacgacacggctatgttctacgaccaaatcaagtcgaa

SEQ ID NO: 4091 - DNA, 529 bp, Glycine max
  Clone ID: jC-gmfl02220061f07d1
gcacaattaagaactcactactttcgcatcttttacaacatatataatggtacaaagccatcactccgcaccagttacttcaatctgttctgtacatgtatgagaccattgaaatttagaggaacataaaaacggctaaaatgtactaaaaacatttttattttaaaggacaagtgctccaccgaatcagcgaaagctaaaatcgaaaagaaaaacactagttaccacttactagttactactagctaaccactaagctatgagaatgaaccaaccattgatgatgaagaggaagaagaactccaatcactcactacaaaaccaaaaacaaactaaaagatttgatcaacctcctccgtgtgaccgcaactcctccatagcagccttgatctgatcctgaaccagctccaaccgctttgagtacacttccaactccaatatctgttgtttcctccatttctcatccaccatttccccaccggcaaaactccaattcatcaaaggcatagggttcaagttcaacgaaaac

SEQ ID NO: 4092 - DNA, 301 bp, Glycine max
  Clone ID: jC-gmfl02220061f08a1
ctttatacaaaagttctgctcatccttaacccatggatgtatggtgctgatagactataccatagacgactggttgactccatctttcatttccgccttcaagaaattatcttacatgattcccatattcctggacattcgtatgtgcttgcttactaacacattacgcgctttctttggagaacacacggcctacgaccacgacgatcactcatggggacggtgactacgcggacgctgaccacgacggtagacacgtcgactaagaccctgagccctgaaccttcacggatgtcgcacg

SEQ ID NO: 4093 - DNA, 410 bp, Glycine max
  Clone ID: jC-gmfl02220061f08d1
ggacaacaaaaagctttcttcttgcgaatggactacaaaacttttgatggtacagaggcgttattccggtccagttccttaaatgtggtgtgcacatgcatgagaccttggttatccagtggcacttaccctcgggtctactgaactataaacaaccgtatgtaaagggacaagcgctcaagcgagttagcgctggctaacgtaggcatgcttagcaccagcgaccacttaccatgccctactagctaaccactaagctatggctatgatccagccatggacgatgacactgaatacgaacgtgacatgagttcctacaaaagcaacagcagactaaatgctgtgatcaactgtttccgatggaacgctactgctccatagcatgcatgatctggttccgatccagctac

SEQ ID NO: 4094 - DNA, 535 bp, Glycine max
  unsure (1)..(535): unsure at all n locations
  Clone ID: jC-gmfl02220061f09a1
caacttaagagatcaatatggccaccattaccaagcctccttctaatatatgtttcctccttctgttgcttctagcacacttccatttgggccaaagccaagttgagttgaattactactctaaaagctgcccaaaagctgaagagataatcaaggaacaagtcacacaactatacaacaagcatggaaacactgccgtttcgtgggtcagaaatctcttccacgattgcgtggttaagtcatgcgatgcatcactactgttagcgacggtgagcgatgtagtgtcggagcaggcgtcggatagaagttttgggatgagaaacttcaagtacgtaaacaccatcaaagcagcggttgagaaagaatgccccttgacggtttcatgcgctgacattgttgctctttctgctagagatggcattgccttgttgggaggaccaagcattgaaatgaagacagggcgaaaggatagcanagaaagctatgcaacggaggtggaagccttgattccaaaccacaatgattccatgtcctc

SEQ ID NO: 4095 - DNA, 455 bp, Glycine max
  Clone ID: jC-gmfl02220061f09d1
ccataaacctttaagatgttgggctttgttagctgtagtagtaacatatgacatgtctatgaacaaagcaaacagaagggaattacttcccgcaaatagggagcgtgcaggaagtaaaagcccaaacataagcgtatacataaggctaggcccaatggcgtattgcactgaatatggtaacctaggcccagtacgtcccacccgtttattttggcgcactcgtgcattataatctatgctaattatacatattatcatgcacaaagggcaaccttatgctatatatttaattggcattgaggtagcgacaatcctttctgatttcaccttcatctcctgttaaaggattggtctctgacaacaaaagaatggcccttgagaattgttggttgaaataatcattgtcgttggccatcttttggacataaggtgcagttattgggtcagtggcaagc

SEQ ID NO: 4096 - DNA, 597 bp, Glycine max
  unsure (1)..(597): unsure at all n locations
  Clone ID: jC-gmfl02220061f10a1
ggacaccaataagggagttcaagaatttggagacaaaaggggttcctttcccaaagaaccaacccatgagaatatactctagcctttggaacgctgaggattgggccacaaggggtgggcttgtgaaaacggattggagcaaggccccattcacagcctcatacagaaacttcaatgccctaacctcttcctccactggccaatcactggacgccacggggctggccaagatccattgggtgcaaaagaattacatgatttacaactattgcactgatattagacgtttcccacaaggccttcctccagaatgttccattgcttgagaatgttcattattcaattcaatgttgcatattattatatatataaaaaaaatggtccccatatacgtgacacgtgtatgcctattacgttgatttactttcttggataaactaatgttactaaaactatgattatggttggttggtttgtgctttaatttgttgagcactacttcattgtttgtgatcacanaagatgattatagcctgcaaaattatattcatgcccgtgtatatgtgctgaaattggaaagtatcttcattaaataaa

SEQ ID NO: 4097 - DNA, 464 bp, Glycine max
  Clone ID: jC-gmfl02220061f10d1
aactccaacaattttattaatgaagatactttacaatttcagcacatatacacgggcatgaatataattttgcaggctataatcatcttttgtgatcacaaacaatggagtagtgctcaacaaattaaagcacaaaccaaccaacaataatcatagttttagttacattagtttatacaagaaagtaaatcaacgtaataggcatacacgtgtcacgtatatggggaccattttttttatatatataataatatgcaacattgaattgaataatgaacattctcaagcaatggaacattctggagggaggccttgtgggaaacgtctaatatcagtgcaatagttgtaaatcatgtaattcttttgcacccaatggatcttggccagccccgtggcgtccagtgattggccagtggaggaagaagttagggcattgaagtttctgtatgaggctgtgaatgggg

SEQ ID NO: 4098 - DNA, 580 bp, Glycine max
  Clone ID: jC-gmfl02220061f11a1
tataaataaaacggtttctctctttgagactactatcagggtcctcggaggattactttcagctcatcttattgccactgattatgctacgggcatgagagttccgttgtatgataatcagttactaaacttagctgaagatcttgccaggaggttgttacctgcatttgatacccctacaggaattccatttggatctgtaaacttgttacatggagttgataaacatgaaagcaagataacttcaacagctggtggtgggaccttgactcttgaatttggagttctaagccgattgacaaatgatcctatttttgaacaagttaccaagaatgcagtgcgtggactttgggcacggcgttcaaagcttaacctggtcggtgctcatattaatgtttttacaggtgaatggacacaaaaggatgctgggataggaactagtattgactctttttatgagtatctattggaggcttatttattatttggagatgatgagtacttggatatattccaagaaagctatgctgctgccatgcattatccttaccatgacccttggtatgtggaagtgaatatg

SEQ ID NO: 4099 - DNA, 544 bp, Glycine max
  unsure (1)..(544): unsure at all n locations
  Clone ID: jC-gmfl02220061f11d1
atcagcaattcaaattatgatctaaattcaataatctgataatacctatgtcatgtacactgattaaacctctcacaataggtttacaagagccttaggaaaaatgatacaacaaaaataattacattacattcttatacatgtgcccgatgattaggaggcaggatattagtgggtcagttcatccataatttaactctttcagctccatgctctctgtatcaacagttgccgaaattatcaaatgcatactttctcaattagacagactaacaaaacttgaatttaaatttcaggtgggtgagcctgcccgagttttagaagtacaaccctttgaagttgaagagtatattcttccccaccaatcctattgcataactgagatcttataattcctacttcaaggagtatcgcttgattcatttgtctgactatcattatgattactgctattgtcttctggtagcaaattgtcagaactctggtcacggagaaccaatactgaatggcttngcaagtgcacagcagtagttgattctttctg

SEQ ID NO: 4100 - DNA, 564 bp, Glycine max
  Clone ID: jC-gmfl02220061f12a1
gtaacagcagagcagaacaccgataaatcgctatgactgctcagacccaagaggagcttcttgcggccgaccttgagcaacaaaagatccatgatgatgagcctgtagttgaggatgatgatgaggatgacgaagatgacgacgatgaggatgacgacaatgttgaaggtgatgcatctggtaggtccaagcagaccagaagcgaaaagaagagtcgcaaggcaatgctcaaacttggaatgaaacctgtcacaggtgtcagtcgtgtgactgttaagaagagcaaaaatatcctgtttgttatatcaaaaccagatgttttcaagagcccgacttctgacacatacattatattcggcgaagccaagattgaagacttgagctcacagctacaaactcaagcagcagagcaattcaaggctcctaatgtgagcaatgatggatcgaagcctgaaacctctgctgctgctgctcaagacgacgaggatgtcgacgagactggtgtagatcccaaggatatagagctggtgatgactcaagcttgtgtgttgagatcagagctgt

SEQ ID NO: 4101 - DNA, 323 bp, Glycine max
  Clone ID: jC-gmfl02220061f12d1
attattactttttttttttttttttttattgtttaatttaacacatttttttataaccatgtgttcttaaaatctagaaagaaagccaaaataagaaggttatcaggggctacaaaacacacttgtgaaaaaaggacacaccccaatttgtttctaagcaaaacaaacaccccaaaaaaagaacacagcaaaaacccccgtttaaggcccctttagcaacccagggggaaggaaaattccttgtacaaaaaaaaaaacgcccaaaacgaagaatttaaaaattgcccaaaatgcaccctgacccaaaacgaatccccaaaagg

SEQ ID NO: 4102 - DNA, 239 bp, Glycine max
  Clone ID: jC-gmfl02220061g01a1
atagaggtacactgagcatcgtctagctatctcgatcgaactgtccaaggtcctgtcaccgaagcttccataggcaggaaggtgctatgacagtatacgaattagccttaaaagtctatggccaactatttcacaccttatgtaattacatgcataggtacatttgtagtctgtaaggtagacttattggttgatgactaggtctggcctcaaccaagtggttagccgtcgacataagt

SEQ ID NO: 4103 - DNA, 249 bp, Glycine max
  Clone ID: jC-gmfl02220061g01d1
tccgattccgttccaggaaggtttcccgtcatcactgtatgacgtcctccttctttgggggggggggggggcgagctaatgacaagtcagcagtggagggtccccgaacagtacgaaataagagaggagatggaaagcaattgggtaaaatagttagaacaccttagaatctaatctaggaggtggacaggaaaggagtgataagacgctagtaggggggcacacccagcaaacgctaccgcataagtt

SEQ ID NO: 4104 - DNA, 555 bp, Glycine max
  Clone ID: jC-gmfl02220061g02a1
ctgggagaaatttgcaaggtactttgaggtggagctgaaagaggtgaagctgcgtgatggatactatgtaatggaccctgaaaaagcagtggaaatggtggatgagaacaccatttgtgttgctgctatccttggttccactctgaatggagagtttgaagatgtcaaactcttaaatgatctcctggtggaaaagaataaggaaactggatgggacactccaattcatgtggatgctgccagtgggggattcattgcaccttttctttatccagagcttgaatgggactttcggttgccactagtgaagagcatcaatgttagtggacacaaatatggtttagtctatgctggaattggttgggtcatttggagaagcaaggaagaccttcctgaggaactcattttccacattaactatctaggagctgatcaacccaccttcaccctcaacttctccaaggttctagccaagttattgctcagtactaccaactaattcgactgggttatgagggatataaaatggtgatggaaaactgcaatgacaacatg

SEQ ID NO: 4105 - DNA, 316 bp, Glycine max
  Clone ID: jC-gmfl02220061g02d1
caggccaacacaattccatacaaccaacaacattggaatttcagcatatttaaagtcccctttgttattggggaagggaattactttccacacgattttattttaaaataataatagaaattgctctggtctctggtctgcataagtggctcaaaaaatgatccaaaaacaaggttttaacaaacaccatttattttcttcctgtccatcacaaacttcttccaagctttagggattaccctttgggatcctatttcactctttttggaaaacagaacttttccggcatttttttcacctgcttttcctgtaacca

SEQ ID NO: 4106 - DNA, 547 bp, Glycine max
  Clone ID: jC-gmfl02220061g03a1
ccggaatctgtctaaccaccctaaagatccggcggcgagccccaaaaccaaacccttcttaaaggagaatccaaaattcaattccaacacataaaatttcaagtccgaggttgcctataaaaaccactttggacccccttcgctcattgcagcctcaagaatccacacaaactcagggtagggcagagagagagagagagagagagagagagagagagaatgggagggtgggctatcgcggtgcatggtggcgctggtgtcgaccctaatctcccactcgagcgccaagaagaagcgaaacaacttctcacgcgctgtctcaatcttggaatctctgctctaaattctaatcttcccgccatagatgtcgtcgaacttgtggtgagggaattggaaacggatccgctgttcaattcgggccgaggatctgccctgacagaaaaaggaacggtggagatggaggctagcatcatggatggtccaaaaacgacgatgcggcgcccgtttcggtcttaccaccgttaagaacccgatctcgcttgttcgt

SEQ ID NO: 4107 - DNA, 450 bp, Glycine max
  Clone ID: jC-gmfl02220061g03d1
aattaatattcaaagaaactgattaataaaatgctactaattattaacaatttgtacacattaagatccttgcaaataatataagaattgaagaaaaagagaaggaagttaagtaagtgatagtaaaaaggtacacgggtttgttgagggtctaccacaagtctttatttaagagaaagacaacaaagttaccatattattatttcacatttttttctaattcttagaaacaaggttaccattttttatctaaatcgggcaccagcagaaagaccctacactacagtggaacatggtacagaaatccaaaagttgcatcgaaacaaccatgaaggaaaataatgaagctattcccagattccgacctccatgaagccattttcagtggcacagcccctaaacatgccattgcaattgaaaccataagccacttacccagcgttggacaca

SEQ ID NO: 4108 - DNA, 567 bp, Glycine max
  Clone ID: jC-gmfl02220061g04a1
gtgaaggcaaagatccaagacaaggagggtattcctccagaccagcaaaggttgatttttgcgggaaagcagcttgaagatggacgtacgctggcagactacaacattcaaaaggagtctacccttcaccttgtccttcgtctgaggggaggtatgcagatctttgtgaagactttgacagggaaaactatcaccttggaggttgaaagttcagacacaattgataatgtcaaggcaaaaatacaggacaaggaaggtatccccccagaccaacagaggttgatctttgctgggaagcaactggaggatggaaggactcttgctgactacaacattcagaaagagtctactcttcaccttgtcttgcgtcttcgtggtgggttttgagtttgagaatggtctgcaggtcccttgtttggtgtgaactgaagtatgtgaaagtctataatctggtcttttctttttatatgttcctgaactttgtgtatgtgtgcattccgggtccattagcggaccttgaaaagctatgatgtgtccatttgcaatctgtttaatgaattagtcttt

SEQ ID NO: 4109 - DNA, 475 bp, Glycine max
  Clone ID: jC-gmfl02220061g04d1
attgaaagtactaaattcattaaaacatgattgcaaattgtacacattcatagcttttcaaggtccgctaatggacccgggatgcacacatacacaaagttcaggaacatataaaaagaaaagaccagattatagactttcacatacttcagttcacaccaaacaagggacctgcagaccattctcaaactcaaaacccaccacgaagacgcaagacaaggtgaagagtagactctttctgaatgttgtagtcagcaagagtccttccatcctccagttgcttcccagcaaagatcaacctctgttggtctggggggataccttccttgtcctgtatttttgccttgacattatcaattgtgtctgaactttcaacctccaaggtgatagttttccctgtcaaagtcttcacaaagatctgcatacctcccctcagacgaaggacaaggtgaaaggtagactccttttgaaatgt

SEQ ID NO: 4110 - DNA, 601 bp, Glycine max
  Clone ID: jC-gmfl02220061g05a1
cgggcacattaaaaaaggaatggataagttcctaaaaataaagaaaactataacacattataaggaggggtcaaatattaattaagataaaagatatagaatatctatctgtatatatatatatatagatatatattcttgaacctaaagagcgctgtatgcttcttaaatttgtcaccagttgttctcgtgccccattacttgggttcaaatacttgcagccaccttttaccatccacaaggtatgttcttgatcttttatgattgatgggcattcaaaatcatttatactaactcctctatgttcccattttgctttgttcttaaatgattaaagcttggtttgtattttttgttactcaagcagagtacattaaggacaacaatagagttaggaagcaaagcgtcttgaactcttctgatcagttatctaaaataacttgtttccctagatgggatttatgcacgaatcagtttttcattagatgttagtgctttaattgcttgctatgagttgaaagggttgcattagttacagcctttattttgtaccagcctttgtttctaggatttctgctttctctcctccttgcacatcatg

SEQ ID NO: 4111 - DNA, 315 bp, Glycine max
  Clone ID: jC-gmfl02220061g05d1
aacagttctttatgttgttgggggggggaaaagccaaagcgggacacactgggcgccccacggccaatggataccctcccccccccccccgaaccaaccccacaaacaaaccggggggccaaaaggggaccaaaaacaaaccccccccccccgggggaaggggaaaaaggggcacaaagggcccccccccggggggggtcccccccccccctttttgccgaaccccaacccaaaaagggggggtgctttccccccaaaaacaaaaaaagcccccccggagaatgccccaccggggcaaaaccccccccctggggg

SEQ ID NO: 4112 - DNA, 457 bp, Glycine max
  Clone ID: jC-gmfl02220061g06a1
acagaacttggtcaatggtgcggatgcatgtgttcaaatttggacctgtctctgataacataacggctcgtactccacctttgaagtggaacaatgttgggggcatataccctaattactatgtgcaatgcctctagttctggacgacccacaacgctgccctgaccctaaaggtcatagcgctattagcacagcgcgagcacttgggctcatattctggcacataacaattcctatgcactcaagaaaaccgttgatgtttctcgatcgtaggatactacaacgaatcatccctacctagcatcaggtgcgcatgtgggtgtgatgtcactgggtagtgctggtctagggcttctccgtagtctcttacagcacattttcgtcttgagtcgattgctgacaggaacgttcatgcacgtgcatgggccaggatctagcacttgcacggttcgtgcat

SEQ ID NO: 4113 - DNA, 375 bp, Glycine max
  Clone ID: jC-gmfl02220061g06d1
agaaaatgaacctattaattaatcatatggttgaactaggcttgagaaacgattatacatgacctaacatttcatacactatagtaacgttgatcagacatggctgtctaatagtgatacgatctagtcacgtactgaactgattataagttcgacacacaatgttgtatcgatcagatatacactgttatgcacttttacacacataggctgcatccctaatgacatgcatatgtatctgtctgctcaattgggctaagcaccccgttgttgacgagactgatatatataaataacgcagacgcgaagagaagaaaagtttaccctttcaagccagtaactctatgtcttgagtcaagggaggctaatcattta

SEQ ID NO: 4114 - DNA, 293 bp, Glycine max
  Clone ID: jC-gmfl02220061g07a1
gcaacatgtcaatgagtgagcggaagactattgacctagaacagggatgggatttcatgctgaagggcatcaccaagctcaagaacattctcgaaggcttgcccgagcctcaattcagctccgaggactacatgatgctttacacgaccatctacaacatgtgcactcaaaagcctcctcatgactattcccaacaactttacgacaagtataaggagtcttttgaagagtacatcgtatcaacggtattaccttctttgagagagaaacacgatgaatttatgttgagagaa

SEQ ID NO: 4115 - DNA, 373 bp, Glycine max
  Clone ID: jC-gmfl02220061g07d1
atagaaatgtcgttgggaaatattatcgtaggcaaattaatgtcgagccatagcagttgggtttagatttaaaaggcatacccaatcacctgatgatttctaagctgataatcaaaatacaatttccttgaagcgcttacacaattttggggggagggagggaagggaatcatataaccaacgggcattgtgagaaggaattgcagcaatcagaacccaaaaagatggtgaaagtatcagtgagcaggattatggaattttgattacaatttcccaacatgatcacacatttacctggaggcaaaatttacaagcactgacagctcctccctcaaggattttttaaggaaaactcctctctttttttttcaaa

SEQ ID NO: 4116 - DNA, 125 bp, Glycine max
  Clone ID: jC-gmfl02220061g08a1
caagcaggttaagggctcatctgcagactccttaccacgcgcaggtcactcagttatggctatggggatttcactaaccctcaagcagccgcgagggcatggcctgtcgctgatatttacactcc

SEQ ID NO: 4117 - DNA, 490 bp, Glycine max
  Clone ID: jC-gmfl02220061g08d1
aatccaaaccgcaaatgcatatgtaatagatacaacatgttatgctaatccatactacaggcattcagatacgaattaaagtgaaaccggaagtcccaagaacataaacttccttagaactctgactaaaacaaaacatctaagacacctgtaaataaactggggggaagcgtacggaatgggaataactggaaagcagattccagtcaaaagactagaggaatctaagacccaagattgtcattgagagagagtgaagctagatgatcagctgggttagactgctgctgagcaacatttcttaacacattcatggcttcagcaactttagccttcagagcatctggtgactcaatcagatgtaaaacttcaggctggtccatctccagaagcatgccagaaacctttgctgcagcatggagttccagctgatccacaagcgggtataaagctctaccgagcatagtactctgctgttcagggggagcat

SEQ ID NO: 4118 - DNA, 583 bp, Glycine max
  Clone ID: jC-gmfl02220061g09a1
ggaagatgtctagtttggttttgttgtccgtgttatttctccttctccaacgtcctctctcatccttctcagccaactccgaaggtgtgttttttaatgttccacttattgattattttgcttgtggtcctgtcctagctaatttctttcttgttttgtaggaaacgctcttcatgctttgagaagcaggctttctgaccccagcaacgtgcttcagagctgggacccaaatctcgttaatgcttgtacttggtttcatgttacctgcgactccaacaatcacgtcattcgcttagacttgggcaattctaagctctccggaactttgggaccagaacttgcccagctaccccaccttcaatacctgtttgtatctgtctcttttgttgctcccaacccaacaatccatcatggtctcacttattctttgttgagagtgcatggagctctacaggaataacataagtggcaacattcctcgggaactttctaaattgaagaaccttattagtatggatttgtatgacaaaccatttcattgcataatccccaagttttttgcacttgactcactttaattcta

SEQ ID NO: 4119 - DNA, 391 bp, Glycine max
  Clone ID: jC-gmfl02220061g09d1
ccaacccaaaagtggggaattacccaaaattttttgggaccccccaaagttttggaaatttggggcccctttaaaaaaaattccccgggggaaaaaagggccctaaaaaaaaaaaaggaagggttctttttttggccaaactaaaaaacctaaaaaggggttcccttgggcccaagtaaacaggggggggtgggaaaaaaacttttagggcctgggcctaaattcggggaacccaaaccggcggggttttaaacccaaacgggaacggggggtttttttaaactgggcatttccccaaaaaaaacctgggttttgcggtttgcaccccgggggagacaaaaaaacccttttttatttaaaaatttgggccccccaaatgggggccccccct

SEQ ID NO: 4120 - DNA, 392 bp, Glycine max
  unsure (1)..(392): unsure at all n locations
  Clone ID: jC-gmfl02220061g10a1
accaaggagagaacaagcacagcctcttagaaaagcttcaccgatctgacagcagctctagctcttcaagtgaggaggaaggagaagatggagagaaaaggaagaagaagaagaaggaaaagaaagggctgaaagagaagatcgaggagaaaatagagggtgatcatcatcatcacaaggatgaggacacaagtgtccctgttgagaaagttggagttgttggaacagcacatgctgaggaaaagaaagggttcctcgacaagattaaagagaagctaccaaggcacaagaagacagaagaggccacagctactacttctnctccaccaccacctgttgcatcattggagcatggtgaaggtgctcattatgaaagagaggcccaaggagag

SEQ ID NO: 4121 - DNA, 495 bp, Glycine max
  Clone ID: jC-gmfl02220061g10d1
aaaacacaaataaaacacactattattccattttcagtacatatttaatttctttttacttcaaagaaggaaacctacacaaacttttttttttgtaaatggaagagataaatacacaataataaagtaaattaagtatgcatcaagaaacaccaaagaaacccacaaggctgtcatatgatgaaatgaaaacaaagcacaccacaatcatgcatctccaaccaacaaaaaagccttgtctcaatcttaaatatcaatgagcaccactctccttttccttttccttttcctcctctgtcttggagtgataaccaggaagcttctcttttatcttttctaatatacctttcttctccttggcctctccttcatgatgagcaccttcaccatgctccaatgatgcaacaggtggtggtggaagaagagtagtagctgtggcctactctgtcttcttgtgccctggtagcttctacttaatcttgtcgaggaacccct

SEQ ID NO: 4122 - DNA, 563 bp, Glycine max
  Clone ID: jC-gmfl02220061g11a1
ggcgcaagtgaggaacaagcaagtgcttctaaaggactatgttaccggttttcccaaagaatccgacatgaatattgtcgaaagtaccataacattgaagcttccacaaggttccaatgatgtcttgctcaaaaatttgtacttgtcttgtgatccgtatatgaggaatctcatgaacaagcccgaaggccctcccaatagtcgtgcttacactcctggctctccattaataggatatggtgtgtctaaagtcctggaatctgggcacccagattataaggaaggtgatttagtgtggggctttaccaaatgggaagagtatagcttgttaccctcagctcaaatactcttcaaaattgagcacactgatgttccacttacctactacactggaattcttggtatgccaggagtgactgcatatgcaggtctatttgaagtaggatctcttcagaaaggagaaaatgtttttgtttcggctgccttttgcgcagttggtcaacttgttgggcaatttgctaaactgaatggatgttatgtagttggaagtgctggatctaaag

SEQ ID NO: 4123 - DNA, 513 bp, Glycine max
  Clone ID: jC-gmfl02220061g11d1
atagaaaaagcaaatgcttttattcaagagaaacaactgtgcattacatttgatactgctctcaggactatcaagaacaaagagcatcatcatacagttgacgaaggtgactgcaaaggtgatgtcaagacagccaatttttcagcaaaaaaaccagaaataaaactgataacttcccattgaacacaagaaacaaatgctttttactcatgagaaacaacgagcacttgttttccaacattgcgaccgctaaaaaggccaaccaatgctgaaggtccattctcaagcccctcagctatgtcttccacatacacaaccttcccctctctgatatttggcaggagaaactccaagaacttgggatataggtgaacgaaatccatgaagttaaagccttgcaaacgaatccgcttatatatgatctgtgccaaatttgttacaccttcatgttgagtaagattatactgtgagatcattccacagacgggtatgcgaccacggactctcatgttc

SEQ ID NO: 4124 - DNA, 531 bp, Glycine max
  Clone ID: jC-gmfl02220061g12a1
cggaattaggagtgaggaagagagggttctctgagactgaaactgatgaaacagccaccgttgatttgatgcttaacctctcacccaaggaagctgctgctgctgatggtgcagatccacgtgagaagccaaagacttcgccgaaggagaagacccttctgcttcccgatcccgccaagcctcctgccaaggcgcaagtggtgggatggccacccgtgaggtctttccggaagaacatgttcgcagcccaaaagagcagcggcggagaggaaagcgaaaagagcagccctaatgcaagctttgtcaaagttagcatggatggagcaccttaccttcgcaaagttgacttgaagatgtacaagagttacccagagctctctgatgccttgggcaaaatgtttagctccttcaccattggaaattgtgaatcccaaggcttcaaggatttcatgaatgagagcaagttgatggatcttttgaacagctccgactatgtcccgacctatgaagacagggatggcgactggatgc

SEQ ID NO: 4125 - DNA, 506 bp, Glycine max
  Clone ID: jC-gmfl02220061g12d1
agcaaattaataaacttattattatgcaagcacacaagtaaagaaataagaaagtcttgcaacataatttagagtcattatcgtttgtgttcataatttatacttacgacatctcacaactttgtttgaaatatatattatataacaaaccataatgatacacagatttacttaactatattttttaacaccctgctctctccctctgtgtctgctgcagcttaaccttgcttcagttactaagtcaactaggcaccgctaatgatgatggagcagattttggactggtaactactagtctagctcctgttcttgcatttctccacggctcttggtgccagtccaatagcttcctttcctttcatgatacgtaaacgcttgcatgattcaacaaacatctcccatggcacatcaccgacaagcatccagtcgccatccctgtcttcataggtcgggacatagtcggagctgttcaaaagatccatcaacttgctctcattcatgaa

SEQ ID NO: 4126 - DNA, 452 bp, Glycine max
  Clone ID: jC-gmfl02220061h01a1
gatgagataacactgagcatcgtctagctatctcgatcgaactgtccaaggtcctgtcactgtgaggtggtggtggttgtagatgggatcggttgtaggggggtttaactgtgttcgcaccgtgtggtgatttgaaagttcaatttcaaggtccgggtaagtgtacacacacacacacacacccacacacacaaatatgcattgagtgtctacaagtcataattatggtgtatgtggtaagtctaatgcacgtgggcagcccgttcacgaggtattattacatttaatatgtttgaaattagcctccccgtgcgccagcctaacatcccagagtgggatggggccaagttgcacatgaagcgtatttacgagcacaccgttagttgtacgtgtactggtttacgtaacggggtggtacgctttactgtggtgcgttaccggtaataagtagt

SEQ ID NO: 4127 - DNA, 511 bp, Glycine max
  Clone ID: jC-gmfl02220061h01d1
gctagcgatatccgttccaaggaaggatttcccgatcatcagctgtatgacagtccatcctgtcgtttggggggaggggtggggggacagacgtagcacagaacgggatgggggggcgaggcagagccccaataaaccaatgttcgtgttagagaaacagtcactggggattaaaaagaataaataaaagtttataagaggtgggatggatgaccggtagtgagcgttagggttacctggtgataaacttttgtaaaagagatagggcttagcaaggttatgattagagttgaatgcgtgtcgcggtaaagaataagttttggttataggagcgaacaacattaaaataattggccatagagggagagcgaaagccgtgtaccagacgttaaaagttgaaggcatagggatcccagtagtggcattaagtaggttggtggttgctccaagtagtttggttgttatggtgttaggcgaacagcaagcacagttactagagtggttagtattt

SEQ ID NO: 4128 - DNA, 532 bp, Glycine max
  Clone ID: jC-gmfl02220061h02a1
ctagcactcaatattgctgagaaaggctttcccatttctgtttataaccgaaccacttccaaggttgatgagactgtagaacgagcaaaacaagaaggaaatcttccagtttatggctaccatgaccccgaagcttttgttcattccattcaaaagcctagggtgataataatgcttgttaaggctggggcacctgttgaccagaccattaagaccctatctgcatacatggaaaaaggtgactgcataattgatggtggtaacgaatggtacgagaacaccgaaagacgagagaaatcggtggctgaattgggtctgctctaccttgggatgggagtttctggtggtgaggaaggtgctcgtaatggtccctctttgatgcctggtggttcgtttgaggctttcaaatacatagaagatattcttctcaaggtggcagctcaagtccctgacagtggtccttgcgtgacttatattggtaaaggtggctctggtaattttgtgaagatgatccacattggcatcgaatatt

SEQ ID NO: 4129 - DNA, 517 bp, Glycine max
  Clone ID: jC-gmfl02220061h02d1
aataaacaaagatatttatggagataacctaatactgatatttatactaatacttaggtcgagcactagtactagtagtacaagcccaagcccaccaataacaagaccaaaacctaaataactcaagaaagatattcttaatattctccaacaatatcaaacttattcactgttgacagtagatcaacattaaactcaacaagttaacaataaatgtaaaaatttcaactcctggtgtaacataacatgtatccatgacgctgaaggaaatcttatcaaaatgtgaaaattaaaaaggcaccatgagctgggacaattttgtatcaagcacaaagcatgatcagcaaagatacaacatagttggaaaacaaactatcaagcaattcagttggaaataatataaataaaacttcaccacgttgtggctatgtaaactcaactcagcatacagtctgagcagaaaacattacatttattaggaaaatcctgattgttcaaatacagtaatctaaattct

SEQ ID NO: 4130 - DNA, 466 bp, Glycine max
  Clone ID: jC-gmfl02220061h03a1
gtcatcacaaggatgaaggactgggaagatgattctacacaccacaacatggatgtagctggcaatctgcttgaaacatatggacgttctctgtatcagtatacaaaaactactgtacgtatggttaacatggtgcagatactgatgcgagggaaacatgtctaagacttgactccgagacataacactatgatggagaatgcatactacctttacacgccaccagatggatctgcacgagtacctgaaggtgatgcttcattgcatcaccatcataggaagatacttgcctctgatcttgaggaggataccatggctcatgctctgtagcaccttcagaaggaacctagtaatgaacgtgaaccatatcttttgaaatgcttcatgaatggctacagaggaaaatgtgcgtagatccacctgactgatctctggctgctggataagtcgctatcatgatgagtat

SEQ ID NO: 4131 - DNA, 372 bp, Glycine max
  Clone ID: jC-gmfl02220061h03d1
attgaaagttctatatttattaaaacatgattgcaaattgtacacattcataaatttttaaggacctttactgggcccgacatgcgcacatacacaaagtttatgaacatataaacagaaaggaccaaaatataggctcttacatacttcagttcacaccaaacaagggacctgcagaccattgtcaaactcaaaacctaccacgaagacgcacgacatggcgcagaggttactctggctgaatgatgtagtcacaaagagtccttacattcttcaggcgctttccagcatagatcaatcttttgcgagctggggggataccttgctctgcctgaacaaatgcctggacattatcaacagtgtctgaacttt

SEQ ID NO: 4132 - DNA, 589 bp, Glycine max
  unsure (1)..(589): unsure at all n locations
  Clone ID: jC-gmfl02220061h04a1
agagtctctcaccattcaaggaagtatgatgacagggaacacgaccaacagtatggaagaaatcactatggcagaagcagtgactctcttagacattctgatagacagtcattcaaaagttcctttggtcactctcggtatgacaagtatgcaaatgaagatagatatcgggagaggctgttgtctcgttctggacatgagtcaagggatgatcatgtgagagaagagagtgatagcaggccaaaaaactaccagtgcagtgtggacaagtattcacatgacaaatatgacaggtctgatcatagaagcaaagaaaaacgtagagatacatactcggagcatcagaaatataaagatatggattcttcatatgaaaaatctgcatctagcaagaggcatgcactgtatgatgaagtggagagggaggggcattcaagggactgggatggtcaaaatgaaagaagagatttccgccgaagttcaggggactacagaagtgaccaaagagatgagtcaggtccacaaagagacagtggntaatntagtttaaaagaagcttattagagtgaacagaatgagtcaaatgatc

SEQ ID NO: 4133 - DNA, 541 bp, Glycine max
  unsure (1)..(541): unsure at all n locations
  Clone ID: jC-gmfl02220061h04d1
agatacaatcacgataagaaattccatagaaataacacgccctgtcaaaatcaggaactccaaacagatgccaagtggtgatgtccctaacataagattcataaactcccaagcatgtccacagcaaacaagcaaaaagctcctccctaaacatggggtgataattaacacataaatgtcaaaggatgtaaattttccggagaatggttaaagccctaagccaactgtacggccatctcttcgtcgaaggcctgcagtgtattgtttctctagatccatctgaagttccttctgcttctcagcacggagaatttcgttactgctttggttgttggaattctgctccacctttgcttcgcctctcatacccatgagtttgctgaatttctcttgcctctcacgatcagaaaacatcccggtatcccatcgatggccagactcttcagtaggtatactctntntgccaccccacaacagtttcttctttggtcagtagtcaagcattcaggcccaactaagttcctattacccaatcagcagc

SEQ ID NO: 4134 - DNA, 542 bp, Glycine max
  Clone ID: jC-gmfl02220061h05a1
ggcactctcggtggctataatctttctgtggtgagttgtcaagatgtacacatcaaggaagaaaatccacaaggataaggatgctgagccaactgaatttgaggaatcagtcggacaggcattgtttgatctggaaaataccaacaatgagctgaaaagtgatctgaaagatttatacataaactcagctgtccaaattgatgtttctgggaaccgcaaggctgtggttatccatgtcccctacagattaaggaaaggattccggaagattcatgtcaggcttgtgagagaacttgagaaaaagtttagtggaaaggatgtaatcctgattgccacccggaggatattgaggccaccaaagaaaggttctgctgttcagcgtccccgcacccgaacactcactgctgtacacgaggcaatgctggaagatattgtattgcctgctgagattgttggaaagcgtgttaggtataaaattgatggttccaagattatgaacgtctttttggacccaaggagcgaaacacaccgagtcaaattga

SEQ ID NO: 4135 - DNA, 522 bp, Glycine max
  Clone ID: jC-gmfl02220061h05d1
ccaaaacaaaacactgacataaatagtagaaatacgggcatcatttgttataagaaaatatatcaaattctacattgataaaccaggagacagtattttctataagtaccacccctaaagaaaatccagaattaaagccaacttaacaaaaccagcatccaccatatataattcagaaacaaatgcaaagctaacaaatagaacctaagcctcggtggtaggatactcaaacacaatatctttgcccgaaagtttcctgtatactgcagcaaaagtctccaatttgtactcggtgttgtttcgctccttggggtccaaaaagaccttcataatcttggaaccatcaattttatacctaacacgctttccaacaatctcagcaggcaatacaatatcttccagcattgcctcgtgtacagcagtgagtgttcgggtgcggggacgctgaacagcagaacctttctttggtggcctcaatatccctccggtgggcatccaggatacattcctttcactaaactt

SEQ ID NO: 4136 - DNA, 352 bp, Glycine max
  Clone ID: jC-gmfl02220061h06a1
ggcctaaaaggcctcggtctaatgcagttccttcatccccagattcttctgttcttactcgagaagcatcatctaaagtgagcatagacccttcaccggcaaatggctttccaagggtcttgcaaggtcaagaattctcgaccttgagaggcaattttgctgaaagtaatgagtctgatactgctgagaagtctgttgtttggccacctgctgcagtagatgatgaaaagatggatgtttctacttcaaggaggtatggttcagagagctggatgtcaatggggaggaatgagcctacatattcggatcttccttcaagcttttggggccatggggatccttctcattatcc

SEQ ID NO: 4137 - DNA, 465 bp, Glycine max
  Clone ID: jC-gmfl02220061h06d1
acacttaaaacaaaatttaattatacagcatgcagaatggaatctcgataatttccatctcacaaattatgactaataagaatcaaaattaaaatcaaataaactggataccaaccacaaggcctccctggtatactatcaattttcattacattaacggtttgttgttcagagggtagatgagaaacaactatgtacagctacaaggtgggattgtttggaaaagaaaagcaaggttgatatcaccctatatcacctcactcaaaaacacaattgattacatactagggattgtatatagctgagcattatactactaattccgggatttccaaaattgaacggatactctttcgtgccatcttatatattgattcgaagcagtcactgataagcagcagtcagcctcgatttcgtcttcaagttagttttccaactggatggcttcatggcagttccctactt

SEQ ID NO: 4138 - DNA, 547 bp, Glycine max
  Clone ID: jC-gmfl02220061h07a1
ggtagtggctgtagaggaaacactcctgttttgtgcgcatattgatattggaatagtctttctctgaaccccatttttgcaaaaaggaagaaagagaaagagagagagagagagagagaagagatatacactgccaagaagaagaacatgaaaattcagtgcgatgtgtgtgagaaagccccggcaaccgtgatttgctgcgcagatgaggcagctttgtgtgccaaatgtgacgttgaagttcatgctgcaaacaagcttgcaagcaagcaccagaggcttctccttcaatctttatctaacaagcttcccagatgtgacatatgtcaagataagccagctttcatattttgtgttgaggacagagcactcttctgtaaagactgtgatgaacctattcatttagccagtagcctttctgcaaaccaccagcgcttacttgctactggtatccgggtggctttgggttctaattgcaccaaaggcaatgaaaaaggtcacgtggaaccatctaaaccaaaagcacaagaagttcctgcgaaaattc

SEQ ID NO: 4139 - DNA, 406 bp, Glycine max
  Clone ID: jC-gmfl02220061h07d1
gatcttcaacacaagcatacataattaaccattcaagttcacgtggattgttgtgtggtgtgagcacctataggatgtaaacagtgatgatcacaaagagcaaggaaaatttaatcccctaaggtttaatttatgctatattctaaaaatcaaaccattcatagctcctaaaatgagatatttatcaactccacaagctagttaacatacttcattacttactgtcctaagagaagtatgcatatacagctcatcaatctacagattcatgcaatagtcctcatggtcctgagcttcagctagaccaggcacattgaagagttcattaacatctgcacctagtatgcatatacaactcgtcaacctactgcctactgattcaggcaattgtttacatgaccatgtg

SEQ ID NO: 4140 - DNA, 575 bp, Glycine max
  Clone ID: jC-gmfl02220061h08a1
ctagatcacagagaggttaagtccttcataagcagcatcccttgtgtttcaagcaagcttagaaaatcaaatgaggaagcttattcaccaaagtttgtcagcattggacccttatacagaggaacaagtagccaccttctggccatggaagagcacaaatggcgttacatgctggctctccttcatagaactcaaaatccagtttcaaccttggatgaatgtggcactgtcattctaggcttggacgatgcagttcgtgcaagctatggaggtaacatcaaatatgaagctcatgagctagccaaaataatgttacttgatggctccttcttgctagaacttcttcttagatgcgcaccaccaaacatggttcctcaaattccaaaagaagataaccataataatggttcttcttcagatccaatactaggacacaaagaggtgtttttatctattctcaccgatttcactctactagagaaccaaatgcccttttttgttctcaagacattggctaggatgctttttcccaatgtcttcacaagtgaagctgatcaccttggtgctgatctcac

SEQ ID NO: 4141 - DNA, 573 bp, Glycine max
  unsure (1)..(573): unsure at all n locations
  Clone ID: jC-gmfl02220061h08d1
actactatataaataaaagaaaatatttattgcgtcctttcactttttttgcattagtacaatatttctggtctatcatgaatcatggatttcatggttacagttacacttacaaaatttacttagccacgggctgaatagtaggtttgcataatggtaagagcaagcagagcagcagctaccacaatccctatcaatttccacacatttgggatatgatctctaatcaagattttatagctgtgtttgcaagagtatctgatgcattctacacaaaggttgcaacaatgcaacatcagtatagggaacttcctcaaggggttcactgctgagtaagcattcaagtcctcacaaagtttgctgtaactattgtccatttggtccactccctttgtgattgtgccaaacaaagtgagcaaatctctgttgctgatcttagtacctttcaccaaaacaccattttccacaagcagctcaatatcttgcacagaacacatcatgcctctaagaaacaaagcattagaagtgaattgccctgtgatgccaattctacttngcttcccatgcatgaag

SEQ ID NO: 4142 - DNA, 559 bp, Glycine max
  Clone ID: jC-gmfl02220061h09a1
cgtcaagctaccaaagacgctggtgtcattgctggtctaaatgtgatgcgaattatcaatgagcctactgcagctgccattgcatatggtcttgataagaaggccacgagtgttggtgagaagaatgtgttgatttttgaccttggtggtgggacatttgatgtgtctttactcaccattgaggagggtatctttgaggtgaaagccactgctggttgacaccccatcttggaaggtgaaagatttttgataccaggatggtgaaccactttgttcaagagttcaagagaaagaacaagaaggacattagtggataccccagagcacttagaaggttgaggactgcttgtgagagggccaagagaacactttcatcgactgctcagaccaccattgaaattgattctctatacgagggaattgatttctactgcactgatactcgtgccagatttgaggagcttaacatggatctcttcaggaaatgtatggagcccgtggagaaatgtttgatggatgctaagatggacacaagacgtgttgatgatgttgtccttgt

SEQ ID NO: 4143 - DNA, 451 bp, Glycine max
  Clone ID: jC-gmfl02220061h09d1
atcagaagggaaaaatagtttgaatcccatccaacaaaaatcatgcgattaaaatccaattaaaaaagcataaagtaaaataagtttttaaaacaggtatctggaggaaagcaactacatttagtccacttcctcaatcttggggccagcaccacttccaccagaaggaggagcagcatactcatcctctgctgcaccagcaccacccacgtctggaccagcaccaccttggtacatcttggcaatgattggattgcagatgctttccaattccttcattttgtcctcaaactcatctgcttctgcaagctggttgctgtctaaccactggattgcttgctcaattgcatcctcaatcttcttcttgtcagccgggtcaagtttctcaccaatcttgtcatccttcacggtgttcctcatgttgtatgcataagttttccaaagcgttttt

SEQ ID NO: 4144 - DNA, 513 bp, Glycine max
  Clone ID: jC-gmfl02220061h10a1
gatgaatgaagcggctattcttgcagccaggcgtgacctcaaggaaataagtaaagatgagatatctgatgcgcttgaaaggatcatagctggacctgagaagaaaaatgctgttgtctcagatgagaagaagaaattagtagcctatcatgaggctggccatgctctagtgggtgctttaatgccagaatatgaccctgtagccaagatatcaattattcctcgtggccaagctggtggtctcacattttttgctcccagcgaagagaggctcgagtctggattgtacagtagaagttaccttgaaaatcagatggctgttgccctgggtggaagggttgccgaagaggttatttttggccaggaaaatgtcaccaccggagcatcaaacgacttcatgcaagtttcacgagtggcaaggcagatggttgagagatttggattcagcaaaaaaattggacaagttgccattggtggacctggtggaaatccattcttggtcaacagatgtca

SEQ ID NO: 4145 - DNA, 394 bp, Glycine max
  Clone ID: jC-gmfl02220061h10d1
gtgctaattgttttttctccttgaatttgataaaataattattgattcttacagtgtacaagtcagagcgtattttatagtacaaacataattctgtgacttgcgtgtatgattatgcaacatataattcggcttttccatcaatgaatagactcatgaactcttcaccatccacagtttctttttctatgagaagttgagcaagcttgtgaaggatatcaatgtgagttgagataatatgtgttgccctagaatatgctctctctaccagttccctcactttcgcattcactacatccgcagttgccatggagtaatccttttgcgatgacatctgttgacccaagaatggatttccaccaggtccaccaatggcaacttgtccaattttttt

SEQ ID NO: 4146 - DNA, 507 bp, Glycine max
  Clone ID: jC-gmfl02220061h11a1
tgcatcatagagtatggccagccacgatcttcgattcttcgagttgaacacaggcgctaagataccttccgttggtttgggaacgtggctcgctgaacctggcgttgttgctcgcgccttggccactgcaataaacgttggatatcggcatatagattgtgcgcaaatttatggcaatgaaaaggagattggtgctgccttgaagaagttatttgctgatggtgtagttaagcgtgaagatatgtttatcacctccaagctatggtgtaatgatcacttgccggaaaatgtcccagaggcatttgataaaactttacaagatttgcaactggactatttggatctctaccttatccattggccagtcagtgcgaaaaacgggaagcttaccaaacctgacatacctagcacatggagagcaatggaagcactctacaattctggcaaggctcaagctataggggtcagcaatttctctgtaaagaagcttcaggatttgatggatgt

SEQ ID NO: 4147 - DNA, 545 bp, Glycine max
  Clone ID: jC-gmfl02220061h11d1
aataactaacattttccgatctaaacgatattagacttctaacaatagttttgtcaaacacacaataaggtcaagactcaaacaactgaattccaaaatgacacgttattaatgtaaactcgaaatctcccttgacacatctcaagtccaaaattataaacacatcgtagattattacaataatcataaagataggctcatttttgcattaagcaagagggggggatgtggccaatatggaaactgtccattactcatcccagagttcttcaattgttttgtacccgggagatgtcttgctaaaaaaaccatctccagtaactattctctcctgcttaatgtcagagaagttggcaagcaaatctgcaggtatggaccaatcaaagagatcaaagttttccttgagccttgcatcatttgtgctcttgggaagcacactgtggcccatttgtagtccccatctaagagctatttgtgctgcagtcttccctaacttctctgcagttgtgtgcagaaatggatttttaagaatattactttcactg

SEQ ID NO: 4148 - DNA, 521 bp, Glycine max
  Clone ID: jC-gmfl02220061h12a1
acttttgttcgtactgtccagcatttaccataatgctataattttaagaattttgataattctaattctatgatggtatgatatgattactgtcttgtcgggtccgataggaactttagccaatcagttttttgaatccaggaagctttcacaaccaaccttttccgatctttctctcaaaccggctcgcatttccagaaaaaccctgagcttgaagatggcccaagttgctcaaaacccttctcagcagcagaaagtcataataactaacaagtatggcaataaactagtgggcattttgcatgaatctggaaccaaagagattgttatcctatgccatggtcttcgatccactaaggaagacgatatcataaaaaatcttgctgctgctctagaaaatgcaggagtcagttcttttcgctttgacttcactggaaatggggaaagtgaaggttcatttgagtttggtcactattggagggaggttgatgatcttgcatgatgtggttcaacactttcat

SEQ ID NO: 4149 - DNA, 520 bp, Glycine max
  unsure (1)..(520): unsure at all n locations
  Clone ID: jC-gmfl02220061h12d1
agaaatcaatcttacaaatattttcatcatttttaagatgttcatcaaacaggtgacgactaaacagtctttaccataaggtttccttacacttattctataatactgaggtgtccccagacccttaaaatgtgggaataaccccccactatggctaccatatgctaccatgagataactgtttacatattgcatttgtcataattgataatttaaaaatgacattgtatactcccagatatttctctcgccattattttcatcatgatgcaagattcaccaattttataagcaaaaactagaagagctcaaacatgctgcagaacatcataggcatgttcatccacaactgaaattttgtcacctgttgcaatttcaattggctcgtaactgcaaggtctaccacaattacacatcattagaaaaatggaccaaggcttcctttatgcggttcacaacaacagaggctaattcatcttgatgatagtgtatgaatgatcagctncctctatgataatta

SEQ ID NO: 4150 - DNA, 501 bp, Glycine max
  Clone ID: jC-gmfl02220062a01a1
tgacctgcactgagcatcgtctagctatctcgatcgaagctgtccaaggtcgctgtcagctttgtaggcaggggacgggacctaacgcatgaaagaggggcggggtgaaggggccgggatgggggaatagcgccgcgaccccatggtggtaccgcgagccgccaaagtgaccagccacgtgggaggcaacaccgttgaggataacgtgttgatgccaccgtttgatggactaaataataaccggtggtacaagagaaccacccaaagccaatggattaaagacgggccgaagtggccaatgccatacccatggcaaagccggctgcttgggcaaaaacgtggttcgtaacaaaaggttaggaaaaagcgctgtttacaactgtttcccgacgtgatgctgcgagacgtagtgagcgataacgtgcacaaacaatggccggccaactaaaagatccgagacaccaaagcggtatccagggagccaaggccataagtaaaaag

SEQ ID NO: 4151 - DNA, 494 bp, Glycine max
  Clone ID: jC-gmfl02220062a02a1
gatatttcccttttgaggtttgattagtgtggcctagttaatttgttttctcgatgagaatgagaaagcaatccactatgcaatgcgcactttttcgcttctgggttcccttgttactacttgccagcttcagttatgctccttctgttttggccacaactgaaatttcagggaatcaagtgaacatggatgggaaggttgtaaatgaagagttaggaaaacctaatctaaaaggacaagatgaagaagaaaaattcaaaggactttttccaaaaccaattccaattgttaaaccttttccaaagctcattcctataattaaacctattccaaagccaattccggttgttaaaccaattcctattccactttataagccttttccaaaatcaattcctattgttaagcctattccaaagccaatcccaaatggtaagccaattccaactgaagaagcaaaattcaaaggtttttttccaaaacctattcccata

SEQ ID NO: 4152 - DNA, 500 bp, Glycine max
  Clone ID: jC-gmfl02220062a02d1
acttataatataatcaatcttataaaaactaatattgaaatcttcattaaggagaacacattaactacatatattccaatccagtacacaagaggggtacagaaggattattatctaaatcatgattgaggttgaggtgtgggaaaactacatataataaggtattagaaatggaaggaatgactttattgcttgtagacctagagtgttatcattttatggagttggaattgccttgtgaattggaaatggtggtagaagtggtttcttaaatttgggattaagaggaaattttggaagaggctttttgaagaaaggctttggttttaaaaatttctctggctcaacagcagggatgggtttttgcactataaatggttttgatataggcttaacaatggaaattggctttggaattggctctaaaatgggaattggctttggtataggcttaacagtgggaaatgattctgaataggcttatatactgtgatagggat

SEQ ID NO: 4153 - DNA, 499 bp, Glycine max
  Clone ID: jC-gmfl02220062a03a1
ggacttcaagaactatgagctcaaggaggggctgcttcgtgctgtcgctggcaccggcatgtgggagtgtgtggacttcttccctgtgtccaaggagaatgagaatggattggatacttctattaatggggctgaggtgaagcatgtgatgaaggtgagcctggatgatgatagacatgattactattcaattgggacttatgatgagaagaatgttctgttcacaccagatgatgctaagaatgatgttggcgttggattgaggtatgactatgggatattctatgcatccaagacgttttatgatcagaataaggagaggagagttttgtggggttggattggggagtctgacagtgaatatgctgatgtggccaaaggttgggcttcagttcagagtattcctagaactgtggagcttgataggaagactggcagccacttacttcagtggcctgttgctgagatcgagagtttgagattgagaagtgatgaaatt

SEQ ID NO: 4154 - DNA, 506 bp, Glycine max
  Clone ID: jC-gmfl02220062a03d1
ccatatgtaaatatttttagcatagaattggataacattaacatcatatttctttgaacagattctcttgtaagcatcatttcacatgatatgataaaattacaacaaaaattctgataaacataactgggcaaaaatgaaggaatgcgctttgagcaagaaccataaccttatgtcggttattcaggggaggacattacaactgataagtacaaattgccaacccaagatgtattccaatcctttgtgactatagctcttctatctccaattcaaatttttaactcttctgatcagggtggaatgggcgtataaatgcagaattcatttgccaaacttttagtgaggctgtcacagtggcctcggtagcattgttgaacaagaacaacctagcagctccatagattgcctttgttggataaacccgagatgtcacaaccgtccttccaccttgagcaaagctttcaacaatagaatggtccaccagtattccgcaggaaaacttt

SEQ ID NO: 4155 - DNA, 489 bp, Glycine max
  Clone ID: jC-gmfl02220062a04a1
agataatggagtcgtgtccgagaactgatatagagaaccttgaagacttgctcgaggaggagaatctctatttgaatatagaggaaggagagcaaggacggttgcctttgttgattttgaagttgaaggaaagcgataagcagagaaaaaggcctgcagttgtttttcttcacagtacgaacaaatacaaagaagtcctacgtccattgcttaaggcgtatgcttcgcgaggatatatagcaatttctgatgattctcgttaccatggagaacgtgctaccagcgcaaccacctatcgcgatgcacttatttctgcatggaaaactggtgagacgatgccattcatatttgacacggtctgggacttgattagattggcagattatctaacacagagagaggatatagacccttctaggataggaatcactggaatatcacttggaggaatgcatgcatggtttgctgcagttgctgatacttgctatg

SEQ ID NO: 4156 - DNA, 84 bp, Glycine max
  Clone ID: jC-gmfl02220062a04d1
acgacctttttttttttttttttttttttttttttttttttttttttttttttttttttttttttttttttatttttataatat

SEQ ID NO: 4157 - DNA, 584 bp, Glycine max
  unsure (1)..(584): unsure at all n locations
  Clone ID: jC-gmfl02220062a05a1
tttaccttctattgctgaaaatggtgaatctcggcatcccagactagacattccagcacctgattacatgcaatccaatcacaaggatggtggggtttctgtaagttcaactacatcaaaacttgccaatcccaatactcgattaccaggaacaagttcagcaaattccagtgcttcttcagctgcacttggtcaaaagaaattgtatgcagaatcccagacaggaaagtccacttttcaaaagcttttggagccaatgcttcctcaacttcctggaattgctccttatagaattgtcctggggaatgttaaggataagcttgagaaaagtcgtagacggttagaaattcttcttgaggatgttgcatgtgactatgatcctttggattactatgaaacatctgatcagcttttggaacctctgctcctctgttatgaatctctgcaatcgtgtggatctggggtgctagctgatggtcgacttgctgatctgattcgtagagttgctacctttggaatgngtgtaatgaagcttgacttgcgtcaggaatcttggagacatgcagaagcacttgatgcaataa

SEQ ID NO: 4158 - DNA, 606 bp, Glycine max
  unsure (1)..(606): unsure at all n locations
  Clone ID: jC-gmfl02220062a06a1
ctcggctacttggacttgagtgacaatgccttgagtggtgaaatcccaagtgagctatgttacttgcccaaactcgaggaactccatctcaactccaacgacctcgtggggtccattccagttgcaattgggaacctcacgaagttgcagaagcttatcctctacgacaatcaactcggcggcaaaattcccggcaccatcgggaaccttaagagccttcaagtgataagagcaggtggaaacaagaacctggaaggccttttaccacaagaaattggcaattgttccagtttggtcatgttgggtcttgctgaaactagcctttcaggttctctacctncaactcttggccttttgaagaaccttgaaaccattgccatttacacttccctactctcaggtgaaataccacctgaacttgggtactgcacagggctccaaaacatatatctttacgagaactccctcactggatccataccaagcaagttgggaaaccttaagaacctcgaaaaccttctcctgtggcagaacaacctagttggcaccatcccttcagagattggatactgcgagatgttgtcagtgattgacgtgtcaatgaac

SEQ ID NO: 4159 - DNA, 584 bp, Glycine max
  unsure (1)..(584): unsure at all n locations
  Clone ID: jC-gmfl02220062a07a1
aacactcactcattgaggctcacacataatggaagaagcctggttcataatcctagtctctctctgtgtctgcgttctcataagagtcatattattattcttccttcacaaaaaaaccctagccaccccaccaggccctcctcacatcccaatcatcacaagctttctatggctcaaaaaatccttcatagaactcgagccattcctccgaaccctcgccgccaaacacggtcctatcttcactctccgcataggatcacgccccgtcatattcatcgccaacagagccctggcccaccaagccctaatccaaaacggttccattttctccgatcgccccaaggccctccccgccgccaaaatcgtcagcagcaaccaacacaacatcaactccgtcccctacggcgccacctggcgcgccctacgccgcaacctcgccttcgagatgctccacccctcacgcgtcatgtccttctccggtacccgcaagtgggtcctacacaccctcctcacgcgcctcanatcagattcacaatccaacgattcaatataagtcattaaccacttccaatactccatgttct

SEQ ID NO: 4160 - DNA, 557 bp, Glycine max
  unsure (1)..(557): unsure at all n locations
  Clone ID: jC-gmfl02220062a08a1
ctctgttctcttcaccattctctttcttctttgtttcaagtttcaacaacccagattcactctctctctcgtaattttctctcttattgaggctagaaaaagagagcaaaaaaactaaaaaatgcctgcggtcggaggtataaacaccggagggggcaaggagtaccctggaagcctcactctatttgtgacggtaacatgtatagttgcagccatgggtggtttaatcttcggttacgatatcggaatttcaggtggagtgacgtccatggatccgtttctgctcaagttntttccgtcagtgttccggaagaaaaactccgacaaaacggtgaaccagtactgccaatacgacagccagacactgacgatgttcacgtcgtccttgtacctcgccgctttgctgtcgtcgttggttgccgccaccgtcacgcgtaaattcggccggaaactctccatgcttttcggaggcttgcttttcctcgtcggtgccctcataaacggtttcgcccaacacgtttggatgntaatcgtgggtcggatctttgctcggttcg

SEQ ID NO: 4161 - DNA, 287 bp, Glycine max
  Clone ID: jC-gmfl02220062a09a1
accagtggaggaagattaatttggcgtacatgggaaagccaggcatttgttcatcaccctctcatcaacttgttctttaattttaatttctataatagtaataatatttatttgtgttgcaagttgcaattgatgatgatcacttatattttcactctcgttatatttttgtcggttcagtaagtcttagagatagttacagctagaagacatttgtaaacggttttaggacatcatggtcgtcaaattaaaaacagtgaaataaaatttgtggctggttttccaaa

SEQ ID NO: 4162 - DNA, 545 bp, Glycine max
  unsure (1)..(545): unsure at all n locations
  Clone ID: jC-gmfl02220062a10a1
cttcaaccaaagccaaagtctcaatttgtttaagcactactgctaccaaaccaaaagggtttcgttccttagggcggttttccgatttctcggaaaccgctctatataccctgcactgcaaccacattcgttatagtgttcctaatttgaaagaaagagagaaagaaaaaattaatgtccttggatttgtagaaattaataaataattttggacgccctctcccctcactcgcgactatgggtgcaaaacggcaacaacccagtgaatgggtgaaaggtaaacttgtagggtgtggatcttttggcaatgtccatttggcaatgaacaaaaccaccggtgggctttttgttgtgaaatcaccacattccagggctgaacgccatgctttggataaagaggtgaaaatcctaaacactttaaattcatcaccatacattgtccaatgtttggggaccgaggaggaggaagaagaccaaggcaagctcaatgtttttatggagtacatggccggnggtaatttggcagacatggtgcacaagtttgg

SEQ ID NO: 4163 - DNA, 567 bp, Glycine max
  Clone ID: jC-gmfl02220062a11a1
ttggaatggagatcccagtagaaaagattttcctggcacagaagatgatgatatacaagtgtaatcttgttgggaagccagtggtgactgctacccaaatgcttgaatcaatgataaagtctcccaggccaacccgagctgaagcaactgatgtagctaatgcagttcttgatggaacagattgtgtgatgcttagtggtgaaagtgctgctggggcatacccagaacttgctgtgaaaatcatggctcgcatttgcattgaagcagaatcatcccttgactatggtgccatcttcaaagagatgataaggtctaccccattgcctatgagtccattggagagccttgcatcatctgctgtccgcacagcaaacaaggccaaagcaaaactcattgttgtgctgacacgtggcgggtctacagccaagttagttgccaagtataggccagcggttccaatattgtcggtggtggtttcagtgttgagcacggactcatttgattggacctgcagtgatgagacgccagcaaggcacagcctgatatacaggggcttgattcctatac

SEQ ID NO: 4164 - DNA, 526 bp, Glycine max
  Clone ID: jC-gmfl02220062a12a1
caataatgaagatactcctgtcaaggatgaatttatacgtcttccagctgaaataaaaaatattgaaaaggattcttttgtctttcattttgctagtggaaatgtagattatggtatcaaagaagataaaattcccaacatcaaagtagcagccctagcagcacaaggaatctccgagcttatgcctcctgatgttgctaatgcattttggagttctgacaaagtctcttctaaggtctccaaaagcatgcgtgatattgtcagagttgctatgagtcaagcacagaaaagaacaagattatctggggatacaaattttagccggattatctgttcaagaggggattctgatccttttgatggactctatgttggtgcatttggtccttatggcatggaaatagtgcatttgaggcgaaaatttggacattggaatgaagtgaacaatgaaaacaacacttcagatgttggattctttgaatatgtagaggctgtgaagttaactggggatcttaatgttccagct

SEQ ID NO: 4165 - DNA, 412 bp, Glycine max
  Clone ID: jC-gmfl02220062b01a1
gacctgcaatgagcatcgtctagctatctcgatcgaactgtccaagttcctgtcacccacacacaaacacacccacgaacgcccgaaaccaatcaaaatgaacagataaattgaatatagtatacagttggcaacatcatcatcctaaagccgttcgggtcactgtgtatacgtcgggtattgggcacgcttctgttcagtttcagggtgtgttttttttcttcgttggtcataattgttctcttcaaatggttctgttgttgtacgagttcgcatcctcgggtatcctagtgttgtttgtagttgttctggtttgtttaatggttactcgttcgtgacgtattaactctcttctaatgctctaatagtccgctctaagcgtgtttggtcgccgtaataatagcataatgtg

SEQ ID NO: 4166 - DNA, 544 bp, Glycine max
  Clone ID: jC-gmfl02220062b02a1
ctcgagccgaatcggctcgaggccaaggagaaaagaaaaaaaaaaagaactggactccttcaattagtgcattgtttcttttcttcaaatggtagcaagaagacattgttaatttgagagatggcgagttacgaggctattaagaactttgatgatgatgatgatgatgatgatgatgtggagatggcactcccccatagccagatctctgaatcaagatctgccactgtttcttcccccattggccaaactaccccgcttcacattcacaacattattgaggaacaacgcattatctccaggcaccaacctcaacccaaatctccgcgtctggtttctcttgatgtttttcgtggtctcaccgtcgcgctgatgatacttgttgatgatgctggcggactcattcctgcgctcaaccattccccatggaatggtttaacactagctgattatgtcatgccatttttcctatttattggtggtgtttcgcttgcactctcatacaagaaactgtccttgtggagttgatgcatctagaaaagca

SEQ ID NO: 4167 - DNA, 530 bp, Glycine max
  Clone ID: jC-gmfl02220062b02d1
aaatataaaactaaattttacattaatatcgtatcgtgtccaatgatgcttactctcttgaaatctatcatttcaaggatataaagtaaaagtacaaattatatcgcagtggtgctattataaacaaacgctgctccatatatagaaaaggtaatgccatcaagagatgtagtgaactctaaactatatccatcatccatgcaggtgacgtcatcaagagattagaagaatatgctacacccgttcttgttcttgatcaaaagattagctccaaaaactcgggtagccatttcttttacagtaaaacatgttcacagtcttactgcatataatcttttatccaatagcatgtttatgtgcctttcttcaagtgccaactccaattaacttgagaatgttattgtgaggacttccccaataaaatccttgaaggaaaattgggaaaacattgcaagcagcaaggatataaatcattaatgcatgcatgcccatccattccataaccaaagtcatgcgacgacatccacaga

SEQ ID NO: 4168 - DNA, 519 bp, Glycine max
  Clone ID: jC-gmfl02220062b03a1
aaaaccaagcgcacgcttccgccactcactctcacccctcctatcccccactttcaagccatattcttcttcagcttcggccttagttcccgaacttgatattcaacccgacactccccagaaccctaatctctcccccgaagaaacaaccttagccgacaagttccacgccgcaattaaagagcaccaccgcagaaaccccacacccaaccctaacgcccctcccccaactcccaacctcaccatccccgacctctccctcgccttttccgctatctccgccgcccacccaatctccccctccgtcgcccaccgcgtcatcgagaaatgcggcggcgtccgccacggcatccccttcctccaatcccttgccttcttcaactggtcctcctctctcgacggcttccccgcctcgccggagccctacaacgagatgctcgacctcgccggaaaggtgagacaattcgacctagcctggcacgtcatcgatctcatgaagtctcgcggcgtcgaaatcac

SEQ ID NO: 4169 - DNA, 448 bp, Glycine max
  Clone ID: jC-gmfl02220062b03d1
accatacagaataacagaattcttaggagtgctgatttatgaacacttaaacaatccaaatatataattgacccgcttcatttctccctatttttctcttcattacatcacatcactaatcatatcaacacctgtctctcttctctagtttcttgatgtctgtatagatattcctattcacgggcagtacaaaaaatgctgttgatgcaagtctcgagagagaggtatccatagaccgcctcccacttgtaagagcatctcagtctcttttgaacatgccgtaagttgttagcaacttcacgaacaacaggaacacatttgcctagcatacagcatttcattctgccaaaccagtccatggcttataaagcataatttagcatttcataaaaaataaatggcaaccgtagttagatgtaaataatatgaacagaaacaaatttgaaac

SEQ ID NO: 4170 - DNA, 436 bp, Glycine max
  Clone ID: jC-gmfl02220062b04a1
gcaaattaatgagattgtacatttgcaacatcattttgctgacaaattaagaaattgttttattgaacaacctctatgcaggattcctaggacagaagtgtttcactatggcttctctagctaggtaccatcttgagcctgttaaattgaacaggtgtttttgttgcagtattagatgatatctgctgagtaaatatcttggtgtacaggtgtgtgtatatatatatatatatatatatgtacacatttgtatgtgtgagacgagaaaaattaggagagaaaggagaaaggaaaggagattcttagactaaaatccaatgggtttagaataagcttggaagtctttattggaattctgtagttattttttgatttaagatttttttactttaatcatgttaattctcaagaaataaaaatataaaaaaaatgctgt

SEQ ID NO: 4171 - DNA, 409 bp, Glycine max
  Clone ID: jC-gmfl02220062b04d1
cttgagaattaacatgattaaagtaaaaaaatcttaaaacaaaaaataacaacagaattccaataaagacttccaagcttattctaaaccattggattttagtctaagaatctcctttcctttctcctttctctcctaatttttctcgtctcacacatacaaatgtgtacatatatatatatatatatatatacacacacctgtacaccaagatatttactcagcagatatcatctaatactgcaacaaaaacacctgttcaatttaacaggctcaagatggtacctagctagagaagccatagtgaaacacttctgtcctaggaatcctgcatagaggttgttcaataaaacaatttcttaatttgtcagcaaaatgatgttgcacttgtacaatctcattaatttgc

SEQ ID NO: 4172 - DNA, 547 bp, Glycine max
  unsure (1)..(547): unsure at all n locations
  Clone ID: jC-gmfl02220062b05a1
cttttccagaacagtaaaattcaagtaaaccaaaagccataaatagtagtattaatttataatttattactatttattattattgtcattttctgttctatatttttttaaataccctgaaaccgcgaaaccctagctgaaccctgtttcccttctccggccaccgtaatggatttcactccgccgccgatcgaggacggtttcaccgccgagaaactcttcacgcagggcttctcctacacatacgatgacgtcatctttctcccccactacatcgacttcgctgccgacgtcgtggacctctccacgcgcctcacgcgccgncttccccttgccgtgccgtttgttgcctctccgatggacaccgtgtcggagtccgccatggcctncgccatggcctccctcggcggcatcgccgtcgtccacttcaacgtcctcgccgtcgtccaggcggccatccttcgcaaagcgaagtcccgccgcgtccccatcctctccgaccccgncttcggcgcaccttccgncgtcgtggagcacgatgacgcct

SEQ ID NO: 4173 - DNA, 626 bp, Glycine max
  unsure (1)..(626): unsure at all n locations
  Clone ID: jC-gmfl02220062b06a1
atcaaaactcaaaacttctcttttctttcattctctctcttttattcttatcatcacaatgccttcaattcccgaagagcccctcctggctccgaacccggatcgcttctgcatgttcccaatccaatacccgcaaatctgggaaatgtacaagaaagccgaagcctcgttctggacggcggaggaggtggacctctcccaggacctccgccactgggactccctcaccgacggcgagcgccacttcgtcacccacgtcctcgccttcttcgccgcctccgatggcatcgtcctcgagaacctcgccgggcgcttcacaaaggagatccagctccccgaggcccgggccttctacggcttccagatcgccatcgagaacatccactccgagatgtacagcctnctcctcgaaacctacatcaaggactccgaccagaagaaccacctcttccgtgccatcgacaccatcccctgcgtcgctaagaaagcccagtgggcccttcgctggatcgattcctncgacttcttcgncgagcgtctcgttgccttcgcatgtgttgaaggtattttcttctctgtaagcttctgcgctatcttctggctcaaaaacgaggactcatgccggg

SEQ ID NO: 4174 - DNA, 526 bp, Glycine max
  Clone ID: jC-gmfl02220062b09a1
ctctgaccatgatgctacattgatgcattcaatctctgagatatctgggggtacgttttctttcattgaagctgaggatgtcattcaggatgcatttgcacagtgtattgggggactcttgagtgtggtggtgcaagaattacaagtagaagttaggtgtgttcaccctcaattgcaacttagttcagtaaaagcaggaagttaccaaacaagcttgatggcgaatgcaagactggctactatcagtgtaggagatttgtatgctgaagaggaaagagattttttggtgacagttaatgttccagttgataagtcaagtgataagacatcgttgttgatcgtgaaaggtctttaccgagatcccataacaaaagaaatggtggctttggaagaaaacagtgaagttagaattctgagatctgatgtcggtggaagagaactggttgtgtcaatacaggtagatagacagcgaaacaagctgacagcagctgatgcaatggctgatgctagagttgcagccgaacgc

SEQ ID NO: 4175 - DNA, 497 bp, Glycine max
  unsure (1)..(497): unsure at all n locations
  Clone ID: jC-gmfl02220062b11a1
ctcttcgtgcagattacatgatctttattgtaaatcatgcttgataatttgttgtttctctttaggtgacaaaatggctctcgcggacataatcccaaattccaccttggccttaaacacgaccctatgggtttgcgagcacacaactaagtttcaacgtaattcaaagggaatattctacaacggcaaccctttaaactacacattatctgtggtctctctgcaggcctccttagtttgtttgtccactacatggttgcaatcctttcttatcccatttggggagaccaccttcattccacaagtgctgggagggttgctgacggtgccatcaatactgggacaaattaaaaatcttgacaagttgctcttcgctccaaaacctttctacgtgtgtgaggcaatctctctttacgggaccttgntgntcctgttcttgatgggagtcaaaatagacatatctgtgctaatgagactgggaaaaaagaattgggcca

SEQ ID NO: 4176 - DNA, 568 bp, Glycine max
  Clone ID: jC-gmfl02220062b12a1
ctcgagccgcttttctctgtttctccctttctctctgtctctctctcgctcttcttctcatccagcaccgagtcacagactcaccgatcttccgattccctttcgtcttggtttatgagctcgaaggagagacccactcttggtggcacgcggattaagacccgcaaacggaatattgctgcgccgctggaccctgcagcattctcggatgcagtggtccagatttatttggataatgctggtgatctggaacttattgctaagagcattgaatcttcagaccttaacttttcaagatacggcgataccttttttgaggttgttttcactgggggtcgtacacaacctggaactaccaagcctgatgagggggaccgtcatccatactctataatagagtgtgagcctaagcgggaagtcattttaccatctgtaatctacatacaaaagattttgcggcgaaggccatttcttatcaagaatcttgaaaatgtcatgcggaaattccttcagtccttggagcctttcgaggaaaatgagaggaaaaagttggcaatcttcacagcac

SEQ ID NO: 4177 - DNA, 206 bp, Glycine max
  Clone ID: jC-gmfl02220062c01a1
tgagattagcactgagcatcgtctagctatctcgatcgaactgtccaaggtcctgtcactcgtggtgcccgaattatcctgttatgtcaataacgctcctaaggtttaatctggtgtggtgacccccacggtcaagttgcgcacgtgggtaagagcatcgtcggtggcaagttgcacaagctgtgcaaaacccatccaaccaagga

SEQ ID NO: 4178 - DNA, 475 bp, Glycine max
  Clone ID: jC-gmfl02220062c01d1
atcattccgttccaggaaggtttcccgtcatcactgtatgacgtcctccttctttgggggggggggggggggggggacacctacgtaaaaacgggtcgacaaaagaaacgagatccgggatttggtaggggtgatcaaccctgtaataggagtaaaaaagacaaaaaggcggtccaacgatgtcgtgaagtcaaatggtcaagattagagctaagttatgtaagtagaaagacaaaaggggcgccatacatgttttaagttaagacaccatggtcgaacgaggaaaaccagaagaaagggaacaatgtccgataaacacaatgtttaaaaacgtgttcgtaagaaagtacgttataaaagcggtaatccgtaggttccaacagcattaacgcaacagcattggcaattgttattacaattaaagcgtccggtgttcagtagtatggtcttattgcgtattagtgccttcgtgctg

SEQ ID NO: 4179 - DNA, 529 bp, Glycine max
  unsure (1)..(529): unsure at all n locations
  Clone ID: jC-gmfl02220062c02a1
tttcagtgagtgatcggtgttcacttgatccttcataagtcgtcatcatcatcatcatcatcaccgttgattgaagaagatgccgatcagaaacatcgccatcggaaggcctgaagaggctactcaccccgacacgttgaaggcggggttggctgagttcatctccaccttgatcttcgtgttcgccggttcaggttccggcatcgcctacaacaagctcaccgacaacggcgccgccactcccgccggcctcatctccgcttccatcgcccatgctttcgccctcttcgtcgccgtctccgtcggcgccaacatctccggcggccacgtcaaccccgccgtcaccttcggcgccttcgtgggcggcaacatcaccttactccgcggcatcgtctacgtcatcgcccagctcctcggctccatcgtggcctncctcctnctcgccttcgtcactgcctcccctgttccagcattcgggctttacgctggagtcggagttggcaacgctttggtgttggagatcgtgatg

SEQ ID NO: 4180 - DNA, 442 bp, Glycine max
  Clone ID: jC-gmfl02220062c02d1
aagaagtactagtgaaatggtacaaccaaccagacccgaataatgatacatacattcaattcaattgtggaccaggtgagagcgagagcatgcacaaaatgataattaaattaacttaaaagaaaacttcaggatcatcaaccatccaaccaaagatcaacggccaccgattcaacaggaaagaaaacacaaaggaaggaaaaccatacacagaagaagattccggagaaattcaataatacacattttttttttttattatttcatttttcccctctagtagtcagtgctgggaagctgctcgtgggtgtggctgatgaagacaacctcgtagataagcccagcaattccaccttcgatgagagggccggcccagtagatccagtggttggtccaggtccagctcacgacagcaggcccaaatgtcacagcagggttcatg

SEQ ID NO: 4181 - DNA, 418 bp, Glycine max
  Clone ID: jC-gmfl02220062c03a1
aaccaaaagatgaaaagatagaaaataatgtcaatggaaatgatggcaaccgaacgtgtttgttatgtcactgaattttcgccacactattgggagtgttccatacagcaatttgctaaccatagtgacggctagatgtggacattgtgccaatcttgctatcagttaacatgggagcgtcacttcaagcattttccccctcaagaccctcagtcacagaaacagcttctaagctttgaagaaccaagcagctgcaaggaactgggatcatcatcttcaaaatgtaacaaaatagcgccatttcacgaggcagtagagcatgaataacctaggattccctccattcgtcctacagagaagagacatcgggttccttctgcttataatcgcttcattaaagaggaaattcaaaggatta

SEQ ID NO: 4182 - DNA, 368 bp, Glycine max
  Clone ID: jC-gmfl02220062c03d1
aaaaatatgcatactccaataatattatagattatgatcatattataaagggacattattatgatatatagaggaacgtgttgtttacttaagtgctcaaattcaacacaataaatgcaatcacaagaatagcaatcatttcataacaacgatttatagaaaagggcaatacatatatatgtagtactattaaacattggtgtgagaggctgaggttaacttgcaggagtctcccatccagttgtacgatatattgggaagaaatttgatcaacctgatatttttcactgatttaggtcaagcataacaaaaacaagctcatactcacaggcttccatttatatcatcagtagaatccattagacttt

SEQ ID NO: 4183 - DNA, 529 bp, Glycine max
  Clone ID: jC-gmfl02220062c04a1
gattcacacaattcatacttaaaaaatcatgccatggagcacttattagtttataccccttctggtcatttaatccaatataaactactaccaccattggcggcagagtcaagtgaaactgtttcaagaacagccctagttccttcagcacagatacaagaagaagatttgcgtgtgaaggttgaacctgttcaatggtgggatgtctgtaggagatatgattggccagaaaaagaagtgtgcatattggggaatactgttggtggactggaagctgcagaaatgatcttggatagttcagattatgaagataataatagcgtcaggaacaataattctataaaacttaataagcaatgtcacttctcaaatacagaggtacatataagctctgggcggataccaatttggcaagaatctgaggtgtctttctttgtgattagtccttagggaagctggagagctgaatttatgtgaacttaattccagtggagaaattgaaatgggaatattcccggtatgagattga

SEQ ID NO: 4184 - DNA, 367 bp, Glycine max
  Clone ID: jC-gmfl02220062c04d1
cctgctcagtggtcggcggccgccctttttttttttttttttttcaaatggtcaaatgaatctcttgaattcagcaagagtgtcacgagaaatataaataatcctgcatgaatgagaacaaaagagagcagagtaaaacaaacaagctatctatctgccccctcccccttttctctttcagctgttccctttgcctccaaagcaatgaactatgaagaaaaaaatataatacacatataaagaacccacacccagaacccacacaaataattggtagttatgaatttcaatatacatcatttacatggaaattagaaggtcagaagaatcattggactgggaaggaatttcgagagtgaagaacatt

SEQ ID NO: 4185 - DNA, 645 bp, Glycine max
  Clone ID: jC-gmfl02220062c05a1
aagcattccatagcctcccataaaaatgaagaatactatcttctctgctctctttctactttgtgccttcaccacctcatacctaccttcaaccaccgcggtggtcgataccgacggtgatattcttcagaatcctggcacatactttatcttgtccgtttttcgacccggcggcggagtagaattcgccgccactggaaacgaaacttgccctctcactgtcgtgcagactctcttcgggaggggctttccagcaatattatcgtcccggttacgaatccctttcatcggcgaaggacaactcttcagcatcctgttccgtattgtgccatggtgcgccaccactccttctaagtggaccattgtggagggtttaccagaatcacccgcggttaaactcactgggtacgacaacacagtgcctggtgagtttaaaattgagaaagctaaccctttccataacgactatacccttttggtctgtccagctggcgaagaaagcatatgtgggcatattgggaatcatttcgatgatgatggaaacaggcgtttggtggtgtctgaggagaatatattaagggttcagtttcaggaaattcgatcatcagcaccggatgaggcatcactggcccttaaaaacatcat

SEQ ID NO: 4186 - DNA, 506 bp, Glycine max
  Clone ID: jC-gmfl02220062c06a1
ctcttcaagagcgtattacaacaaccaagaagggctcaattacctctgtccaagctatctatgtgcctgctgatgacttgacagatcctgctcctgctaccacttttgctcacttggatgccacaacagtgttatcacgacagatctccgagcttggtatctatcctgctgttgaccccttggattctacatctcgtatgctttccccccttattttgggtgcggatcactatgaaactgctcgtggtgtacagaaagtacttcagaactacaagaatcttcaagatatcattgctattttgggaatggatgagctcagtgaagatgataaattgactgttgcccgtgcccgtaagattcagcgattcttaagccagcctttccatgttgcagaagtcttcactggtgccccaggaaaatatgttgagttgaaggagaacatcaccagtttccagggtgtgttggatggcaaatacgatgaccttccagagcagtcgttttacatg

SEQ ID NO: 4187 - DNA, 602 bp, Glycine max
  Clone ID: jC-gmfl02220062c08a1
ctttgtttgcttctcaagtctctcgaagcctctttctctctcttctagaagctatctgtgtttggtgttactaagtctccaacaagcaaagtacatggttgatttggaaatccaggtccccaccccattcgacccgtttgccgaggcgagagaatcggatgcccccggagcaaaggagtatgtgcatattcgaattcagcagaggaatgggaagaagagtctgaccacagtgcaagggctgaagaaggagttcagctacgagaagatcctcaaggacctcaagaaggagttctgctgcaacggaaccgtggtgcaggacaaggagcttggcaagatcatccaactccaaggcgaccagcgtaagaacgtctcccacttcctcgttcaggctggccttgtcaggaaggaccagatcaagattcatggtttttgaccaattggtcttgtttttggtagtagtaatttcaagttgttcttgagtttgtgagttttgaaagtttggattgtttttctgtttgatgagtggtgttggaataagtttggtttggtttggtttggtttggtttccaattttaatgattggatttcatggatgttgttag

SEQ ID NO: 4188 - DNA, 557 bp, Glycine max
  Clone ID: jC-gmfl02220062c09a1
cgtatttgtttttccaagcatggacctttccatcaacacacgcaccccttacacgctgcatcatcatcgctccgccggttgagatgttcccgccgccgccgcagacgaccctcccctccctgccggatctactcctcacggccctctccgtctgcttcctagtttcgtcctcgaagccccacatcggcggctccacccgctgccccttcccgcgtcgcttcctcaaaatccccgccatgtccctcacaaacacaacaacgtcgaaatcctcgaaaaacaacaatctcaacaacaccctcctccctccgcgccgccacagcttcgcgtccccgcagtcgctctcggagtggctgaagccgcggctcccttccgagtcgttcgcctcgtggggcgtgaagccgggcaccaagaacgtgcacaacctctggctcgagctctcccagggggaaaccttcctcgctgactccacccctccggtacgaaccgttcacgtcgtcctcgttcgcgtcaccggaaaacacggcatgatccttgtagaatcgcaccaggagttgtcg

SEQ ID NO: 4189 - DNA, 627 bp, Glycine max
  Clone ID: jC-gmfl02220062c10a1
ctctttgggggatgccttaagtgaagcctcaacggtggtgtttagtctcacattgtctagagatatagcttaaatagaacttataaagcttggacattcctcttcttataagtcagttttgtggggttgaagtaggtcctaagcccaacttctaacacttattataattctatacgtaaataccttgtaacgatcacaagacaacggaattgtgtgaccaactaattttttatcttgccacaactgattcattctgttgtttggtagttgttatcacaggcaaaccagccataattgattaatttcacattatttgaaattttccagtgttatttatttgtatttcaggttgtgtttttgtccatagaaaacatcatgaattttgcagcatcattgtgcagaagattgaatatcaaggaactcgcgacaaatgttcctgtgtataaaagcaccagtgatgtttctggagaaggtttgagtttcacgttcaggcgttgggcttccaaaaagactgctggttccacaaagaatggacgggattcaaaacccaagaaccttggagtgaagaaatttggtgcgagaaggtgatacctggaaatatcattgttcgacagcgtggcactcgtt

SEQ ID NO: 4190 - DNA, 525 bp, Glycine max
  Clone ID: jC-gmfl02220062c11a1
ctcgagccgctcgagccgattcggctcgaggttggaaagttctattcaaacccctggttccagtactttaaccgaaacccctagttctattcacgcgattccgcagaaccagagcgtcttctccagagaattgaacttttctgagtatggtttcgacccaaagactgggaacaatcagaatcaccattctctgaagccggaatccggcgagattctcagcttcggcgagagcaagagaacctcctacggcggcgtcaatgggaattccaattccaattcccattttttctccggtcagtcgccgtttgttgctgctgcggatgagaacaccaacaaaaataacatcaacaacaatgggaagacaaagtcaccgaattcgcgcggtagcaacgacgacggaatgctttccttcaccttcggcgtgattcttccggcctcgaatttgaagtccggtggcggcggcgattccgaccactcggatctggaggcttcggtggtgaaggacccggtggtggagccggagaa

SEQ ID NO: 4191 - DNA, 584 bp, Glycine max
  Clone ID: jC-gmfl02220062d01a1
tgaggctgcactgagcatcagtctaggctatgctgcgatgcgaacgtgatcccaagcgtccatggtcacaaccgcggccagacaccataacagctgcgtatcccaatagtagcttaaagattaccatcgatggcgtatccgattggcgaaaccgtactacagttgaaaaggctatacctaaacataggttaacacatggcgtataccatacgcatgaccaagggcgttcgcgaataaccccaagacaccgcttagaattgggttgtaacccgtggccgtatgcgaggcacgtaagtattacttaggaaccaagcgctaaatgggggtgagcaccccgccaggccagttggttcgacgcgtatggatggcgacgggcgaaaccaaccagcgtgtaccattcgtgacatgagcgagcgttaaacgtcatggagcagccgtttgcatccggctaagacacattggccattctgcaaaagagtaagaatttgctgaggatgctgtggaatagtcaaagactcggctggacttaaaggctaggtcaacttagagctaaagaggtgaaggaacataagggagcgagagat

SEQ ID NO: 4192 - DNA, 503 bp, Glycine max
  unsure (1)..(503): unsure at all n locations
  Clone ID: jC-gmfl02220062d02a1
aaacacaacaagaagaaagaagagggtatttctgcagcaccaccaccatcaactaccgaatgtgctctttctcctttctcctttcaacaaacaacaaccaccaccaccctctgtcgccacatatttaacaacaattactacaacttgactaaacaaaactgtttttctttttttcttttttttttaccatggaactggctttgagtttgggagacacgtccaagtcttttacctttctcgacaaggccgcggtgaatttacccaccaacaaggacccacctgggttgttcagcttggcgccgagtttcgccgccaccgccgtcgccgccgataaaagaagcgatgctgctgagaggaggggtttttcttcagatccaccggttcagctcgaccttcttcctttctctccggttctcagaccccaacaacaacctncctctcaacttcggatcccttggctcaccgaagcatgcggngcngccagggtgctagacgtgaaccta

SEQ ID NO: 4193 - DNA, 347 bp, Glycine max
  Clone ID: jC-gmfl02220062d02d1
acaagaaaagtctaaattatatacaaacgatataaataggggaaccggaattcctttgtctttatcctctatgatataactataatataaggttacattatatcatatgtaattaaaaaaccagccaaaaaaaatgtcttctgatgacaaatcatgaagaagctatttgatgagcttgggcctgtccattggggaagggcaatattctgggcttgctgaaagacaattccactgggatttgagaagcattgttgttaacggtggtagtttggttagttgtggtggaatttgtggcaaccctttcacaagagggacacatggtgagtgtggtggctggaagttgcatg

SEQ ID NO: 4194 - DNA, 194 bp, Glycine max
  unsure (1)..(194): unsure at all n locations
  Clone ID: jC-gmfl02220062d03d1
tcacactattacattgttgtcatcttntatatttaaatagtcttatctatactgactatataatctgtaatgctattcagttaacttattgattcattataatttcattaatactatcatttactatttatatctacttttgttatttatggttgtattcttaccaattactgaataattccaggatctaacta

SEQ ID NO: 4195 - DNA, 527 bp, Glycine max
  Clone ID: jC-gmfl02220062d04a1
cttctatcaccaccacgaagattaacaatgtctcacaccagaaagcactctccttttctgttcccaaatgttgattccactgttgtccctgacccctccaatttcttctccccaaaccttctctcaaatccactccccacaaactccttcttccaaaactttgtcctaaaaaacggtgaccaacctgaatacattcacccttacctcatcaaatcctcaaacttttctctctccctctcatacccatctcgcttcttcaactcctccttcatctaccaagtcttcaaccctgatctcaccatctcttcctctcaaaaatcccacctttcccatttgaaccacaccatctcttcccacaatgatctcagtgttacattggatatcccttcttccaatttgagggttttccttgttaggggaagcccctttttgaccctctctgtgactcaaccaacccctctttccatcaccacaatccatgcaattctctctttttccttcagcgagtcactcaccaaacacacttt

SEQ ID NO: 4196 - DNA, 609 bp, Glycine max
  Clone ID: jC-gmfl02220062d05a1
cactctcatcttcttattcttctgctttcactctctgactcaatcgttctaatccacaaaaaatgaccttaaattacaacattgccctcgccttctctgcggtgctcacgctgctcctctttcccctactgaccgtaggggagctcgtggaggagcagccactagtcctcaagtaccacaacggccagctcctgaagggccgcatcaccgtcaatctcatctggtacggcaccttcaccccgatccaacggtccataatcgtggacttcataaactcgttaagcagcgcgccaaacgcgcctctcccctcgaccgccacgtggtggaaaaccacggagaagtacaaggtgggaggaggatcccctgcgctcgtcgtagggatgcagttcctacacccggcttacacgctagggaaaaatctcaaaggaagagatctcctcgcactcgcgtcaaagttcaacgagattaactcgataacggtggttgtaacggcgaaggacgttgccgttgagggcttctgcatgagccgctgtggcacccacggctctacccggaacgttaaaaagtatgcccgaaccgcatatatctgggttggaaacttcgaaacac

SEQ ID NO: 4197 - DNA, 585 bp, Glycine max
  unsure (1)..(585): unsure at all n locations
  Clone ID: jC-gmfl02220062d06a1
ggcctcttcatggatgaaagaagagcttgttttcctcatctagatggtggtacgtggtctgtctctgctgaaagcggcaaatggtccttcacatccggccctcttgagaagaacgtgtatgaacccctatatgaagaagcaggatggggtcctactggattctctgttgatcttatagcagcacaagcagttagatcactccatattgcaaaggaggcggatgaagcaaggattatcttctaaaggaatgctgaatgaagtcttgtttgtgtcttttctggtcactggagatgaagtcttaatcttctgttatcttactggaggttgtcttctgcatattacttctatataatatgcttgtcagctacgttctgcttcagttgtgactgaagaactttttgctgtgtcatcatattttcttctgattttcattaactgcatgcaaggctgctaattttctattggagtgacttttcatactctgattggtatggagatntatacttttttgagttgattacacataatataaatgctcgagtggaactcaatgactcataatttatatatacttgcattgtgccc

SEQ ID NO: 4198 - DNA, 585 bp, Glycine max
  Clone ID: jC-gmfl02220062d07a1
ctcttcttcaattcatatcatatcaattagatttagagctaaacataaaattgttttcacataccatggacaacaactatgacttttggaaattcagtgaccagttgaggcttgaatctggtttggccaatctgtctctgaatgattattccatttggagcaacagctacagcttcaagaggcctgatcagaggaggaactttgatgtcaagggcagtgatttcaacaacaacaacaactcatcaaaggcttttgatgatgatatcaatgatgggtggaagatcaccaattccaatggaccccttttctctatgcctcacatcaacaacaacaacacttttgaagttggaggcttcaacaagggaggatgaatctatttcaacaccaacaccaccatttccttctaccattctaataaccttaacaacaacgcttttggaggcttcaacaagggaatctattccaacaccacatcctaaccctatcttaacaacaaccaccaacatctcgacgacaacaacaaccttaacagaaataatcttaagggctacaagacatatttaagggtgaagatcagtttacaca

SEQ ID NO: 4199 - DNA, 628 bp, Glycine max
  Clone ID: jC-gmfl02220062d09a1
gagaaacacgcgaacaatgtggtgagtgcatcatgcaagcctctgcaattgtctctgtttctgtctctttcttccctttttcggaagtcagcgtcaccgcttcatcatcggtgaaatacccaaaaccagacaccgcgatcaactgattacaacagtttcttcatagcgagttctgtcttcaaaatcattgctttatgttggtgtctttctgggttggttgcttcttccacaatggtagagagagagagagagagagaaagaaaggaaagaaagagtttggaggaagatagagcgacatactgagaagggggtcctactgcttaattttttaggggcatcaacagtctctgtccatgatttttacttgggttgggtggtgctgctgtgtcctcaaattgacccatccaatcaccatcactggattcagcatcacactcctttctatctcaccattttgatcaataaaccaaagcttctctctctctctttggtcctttttccatcactaggaggatttcaaattggtcattgagggtggctcaaaagctctgcttttggtcatacggacatagtgatctcactcatatgaagagactttcaacttggtggatgggttttggtcttgcat

SEQ ID NO: 4200 - DNA, 557 bp, Glycine max
  Clone ID: jC-gmfl02220062d10a1
gagaaacacgcgaacaatgtggtgagtgcatcatgcaagcctctgcaattgtctctgtttctgtctctttcttccctttttcggaagtcagcgtcaccgcttcatcatcggtgaaatacccaaaaccagacaccgcgatcaactgattacaacagtttcttcatagcgagttctgtcttcaaaatcattgctttatgttggtgtctttctgggttggttgcttcttccacaatggtagagagagagagagagagagaaagaaaggaaagaaagagtttggaggaagatagagcgacatactgagaagggggtcctactgcttaattttttaggggcatcaacagtctctgtccatgattgttacttgggttgggtggtgctgctgtgtcctcaaattgacccatccaatcaccatcactgtattcagcatcacactcctttctatctcaccattttgatcaatagaccaaaagctttctctctctctttggtcccttttccatcactaagaaggatttcacaattggtcattgagggtggctcaaaagctctgcttc

SEQ ID NO: 4201 - DNA, 524 bp, Glycine max
  Clone ID: jC-gmfl02220062d11a1
ggaggtatgttagttcgggctaaagcttgcagactgcctttgttaaagaatttcgagttgttgtcgtgcaatatgattggcaaatcaattataaactaatctgttattacgttattctgatacttttccctagaaatgaattattttgatgtatcaattaccaaaatggtttttttgtgcccccgtttctgtatttttctctgatgtgttagataaatgtgagtgcccctgactggagtttctgtgaacaggtgcccctgccatgacttctaggggtttggttgaaaaagactttgagcagattggtgagttccttcaccgtgctgtgactctcacactggagatccagaaggagcatggcaaacttctcaaggatttcaacaagggtctcgtcaacaacaaggctattgaagatctcacagctgatgttgagaagttctctgccttgattgacatgcctggcttacttgtatctgaaatgaagacaaggattatgttcaaccataccactttctactaaattg

SEQ ID NO: 4202 - DNA, 603 bp, Glycine max
  unsure (1)..(603): unsure at all n locations
  Clone ID: jC-gmfl02220062d12a1
gtgagtccgtgacacacttatccacctactttcatttgagccactcttctcagtccaaaacagtttctcgttttctcatctgaaaaatgaggagcatctttgtccttctccttgttctgggtttgtttaagtatgcatttgctgaagaagggttttgctctgctccttcggaatcgaaatcaaagcctctttattggaaagtggataaccccactctctcacctatccaccttcaagatttgcctggattcacacgcagtgtttataagagtaatcatgctttggtatcaccagaaagtcatgtatatggcccattgcctgattggatcgacacgtcaggcgcatatttaatttcaccagaaatgggttcacactttgtaatgtacctagctaagttgaaagaaaaatcaaaatcaggactacccctgcctggtgtggagagatttatctntgtgctccaaggtgctgtcaccctcactaatgctgctggtgttagccaactactgaaggttgattcttatgcttatnttcctccaaattttgaacattcaattgaatgtgatacacctgctactattgtggtattngaaccgagattttctc

SEQ ID NO: 4203 - DNA, 420 bp, Glycine max
  Clone ID: jC-gmfl02220062e01a1
tagactacactgagcatcgtctagctatctcgatcgaactgtccaaggtcctgtcactgaggttgtattataaggggaggttggttgtggtgtggtggtctgtatgagagaaggtaggtagtgtgtgtggggtgtggggtactgatgggacttcctgaggtaccaagtaccatgacccggggcctgtacgtgaggaagcgtttcgcgtgaggcctgcactagacctagccgtactaaaaccaagtaccaaaaggaaaaacagtcattaaaagcagcacacatgggatcaataaagccaggaacaagcgtaccgggtgtaccctggtcgatgggtaagttggcccagatgagcggcacaattgccaagacaggggtaggtgaaccgagttagcgtaatggtggtatctcacgtacactgat

SEQ ID NO: 4204 - DNA, 476 bp, Glycine max
  unsure (1)..(476): unsure at all n locations
  Clone ID: jC-gmfl02220062e01d1
tcgattccgttccaggaaggtttcccgtcatcactgtatgacgtcctccttctttgggggggggggggggaagtgcttgcattgttggcgtaacggtgtggatggtggtaccgaatgcgctagcggcaacttccatgtcggaattactggtagtaagtaaagtgagactgggcgtccctaaaaagtcagtatgcgagagatgccgatcatagtgcgctactactgataacacttgtagtatgagacgtccaatggcgccgcaagggtagagtctgtgtgacagtttggtacgagggngagcctgggtagtgatcgggccatgtgcatatgggaatgccatgccaagatcgtgtgttaacantaccagtgggggtaagggcatggttgagatgtcgtgaacgggcgccatgttaagatatgcgacggtattgtgcgtaacactgcctgggacgagcggactactagtaaggcttttg

SEQ ID NO: 4205 - DNA, 352 bp, Glycine max
  Clone ID: jC-gmfl02220062e02a1
cttttaccgacggaatgcaattcccttacggttctcacttttggggactacaatttctgcgatggcgcccgatcctactcgcgccgtgcctagcgccagcgtcaacgacgtcagagacgactccggggtcaaaatgaaggtggacaacgaagatctgctcaatgaggatttggtgctgaaacagaaataggagcagtacgtggatcggggacaggatcctgtcctgggatcgcagatggatgaactctggagcgtgaggcaggactttctagcttccacgagctgtatgacttgtggtactcagccgtagaagttccttcgtcgtcattacggcactcttaaatcgtattat

SEQ ID NO: 4206 - DNA, 307 bp, Glycine max
  Clone ID: jC-gmfl02220062e02d1
gcgattcaagccatgttccctggctgattactgtagctggacttggctcacggatccacagaaattaaaaaccgtcatgagctagacgactcacttaggatctcactatccaaacgaataaagggtcaaaaataagtgccttctacattggggcaccatttgaaatgcattatcacgaactactgttcatacacttggaacagactaaaaaagcatcaccagtgtggtatccctgactcttccgtgatatcagtattctggatacatattaccaaacctggaagaattggagagcgggcaatgtact

SEQ ID NO: 4207 - DNA, 535 bp, Glycine max
  Clone ID: jC-gmfl02220062e03a1
agcaagaatagtggttctgctacctgcaagcgtgggtttgttcagttctgttatgagcccatcaagcagattattaacacttgtatgaatgatcagaaggataagctgtggcctatgctgcaaaagcttggggtcaccatgaaatctgaggagaaggacctcatgggtaaagcattgatgaagcgtgtcatgcaaacctggcttccagcaagtagtgctctattggaaatgatgatatttcatctaccctctccatcaacagcccagaagtatcgtgtggagaacttgtatgagggtcctcttgatgatcaatatgcttctgctatcagaaattgtgatcctgaaggtcctctgatgctctatgtctccaagatgattccagcatctgataaggggagattttttgcctttggccgtgtattctctggcagggtttcaactggtttgaaggtgaagattatgggacctaattatgtccctggggagaaaaaggatttgtatggtttaaagtgtgcaacgaactgtcatttggatg

SEQ ID NO: 4208 - DNA, 447 bp, Glycine max
  Clone ID: jC-gmfl02220062e03d1
cgcaaaataataatttgaaccaacaccgatgcaaaatcctattagagcaaaaatacatcgatgcaaggaccaaataacagcattacaacattcacgggcaaaaccacaaacaaaactaacagaaattaaatctaaggtagcattgttcacaagagaaaataaattcgactaagttcaaagtaaaataattcatgaaacaaatttaaagcttgtcttcaaactcggagagaggagtcatctgttccttcaagcccttcctcttgcgaatgtcagtgacaagctgtgcagcttgtgatccagcctccaatgggtcagaagacatcatgtcccagtgatcaaacacacattgtgggaaggcctggcctgatgttgcagccctcaatgtgctcgagaaaccaaaggactcgatgacagggaggtatgccttgatgttgtatagtggggtac

SEQ ID NO: 4209 - DNA, 522 bp, Glycine max
  Clone ID: jC-gmfl02220062e04a1
gtaggtttctgaacactggcctcctccttgtggccacaatccttgtggtcaagctcatctcagccttcatagtgcccaaatccagaaagagggtacccccaattgtgaaggggtggcccttaattggaggactcatccgtttcctcaaaggtccaatctttatgctccgtgacgagtaccctaagcttggaagtgtcttcactctcaaactcttccacaagaacatcaccttcctcattggccctgaggtttctgcacacttcttcaaggcctcagagactgatctcagccagcaagaggtgtatcagttcaatgtgccaacttttggacctggggtggtctttgatgttgattactctgtgaggcaagaacagttcaggttcttcactgaggctcttaaggccaacaagctcaagggttatgtcaatcagatggttgcagaagctgatgactatttctcatagtggggaccaagtggtgaggttgatttgaagtatgagcttgagcatctgatcatcttga

SEQ ID NO: 4210 - DNA, 454 bp, Glycine max
  Clone ID: jC-gmfl02220062e05a1
gctactatctctcacatccacatgcaaatgcaagaggtggatcccttaatgatccattgcttctgttaaagaatcctttggttactctctctaccgacattatctccctttatatcagttgtcctaagcagagtttctaaagcaaaagaaaggaagacgaaagcaaagggtaggcattgaccccttagcacaaaggaaaagaggggtggcgttgtgttaaaaaaatactgaacttggttggttctaagtagaaacaaaaattggcattttcccatttctgcattttcggttcgggagaggagaaaccaagaattaagaaatgggatgctccctaagagtttgttgaggcttacttttggtgtaggaggcggcatgagatagaggggacgacccttatagatactacacttggaatgtcacatatggagacatttatccacttggtggtaaacaa

SEQ ID NO: 4211 - DNA, 655 bp, Glycine max
  Clone ID: jC-gmfl02220062e06a1
tttgctcaaagccaaaccaaattttctctctttcacttatttattgactccccaaaagcttttcaaatatctctgttcctctctcacgtaccttctccctatctttcactccacttcttaacaccacaaaacagaacaacggccgagcaaacaacaagaaaaatggtgttgttgtccaaagcaacaacagaacaatactcctacattaagaactgcatgccaaccaaattttcctcaacaattcccatagtgaacctctccaaacctgatgcaaagacccttatagtgaaggcttgtgaggagtttggattcttcaaagtcatcaatcatggtgtctccatggaagctatatccgaattggaatatgaagccttcaaattcttctctatgtcactcaatgaaaaggaaaaagtaggacctcccaatccatttgggtatggtagcaagaaaattggacacaatgtggacgttggttggattgagtaccttcttctcaacaccaatcaagaacacaacttctctgtttatggcaaaaactctgagaaattaagtgtctgttgacagtacatgtcttctgtaggaagatgcatgtgagatcttgagttgatgcagatgggttgagattcacacaggatgtgttagcagcttctatgat

SEQ ID NO: 4212 - DNA, 616 bp, Glycine max
  unsure (1)..(616): unsure at all n locations
  Clone ID: jC-gmfl02220062e07a1
aaaccactccagaaaaaatggcggtgcctcttctctcgaagaagatcgtgaagaagaggctgaagaagttcaagaggcctcaaagtgacaggaagatttctgtgaagacaaactggcgcagaccaaagggtatcgattcccgtgttaggagaaagttcaagggatgcactttgatgccgaacattggttatgcttcagacaagaagacccgccactatctcccgaatggtttcaagaaatttgttgttcacaatgtgaaggatttggaactgctcatgatgcacaacaggacttactgtgctgagattgcccacaatatatccacaagaaagagaaaagatatagtcgagagagccgcgcagcttgaatgttgtgtgacatataaaacggccagattacgtagccaggaggatgaatagtctaaatgactganaattacttatttgtagtgaacctggtgacactagttgtgacaattgattttgatcatcttttattctcgataaattgtaggactgaaatttacttgtttgtagtgaacctggtgacactagtgtgacattgtatttgatcatcttttatcctcgattaatcgataaaaaaattgcttttgatc

SEQ ID NO: 4213 - DNA, 623 bp, Glycine max
  unsure (1)..(623): unsure at all n locations
  Clone ID: jC-gmfl02220062e08a1
ttcgtgattattattatttggatcatgctcttcgcttcaattttccttttcaaatccccctgaattttttttctttctgaatcacatcagattcaattgaattataccccctcaatgcaatggtggtctgcaaatgtcgcaaggctactaagttatattgcttcgtgcacaaagttcctgtctgtggggaatgtatctgcttcccggagcaccaaatctgcgtggtccggacttattccgaatgggttatagatggggagtatgattggcctccgaaatgctgccaatgccagtctgttttagaagagggggatggatctccaacaactcgactgggttgtttgcatgttatccacacaaagtgcttggtctcgcatatcaagagttttcctccacatactgccccagcaggatatgtgtgtccttcatgttctactacgatatggcctcctaaaagtgtgaaagattcaagatcacgtcttcattccaagntgaaggaagctatcatgcaatctggtatggagaagaatgtttttggaatcatcctgattagtgacagaattacgaagtccttcacctgcttttgcttagacccattgatattagggaaaatcatgaaactc

SEQ ID NO: 4214 - DNA, 542 bp, Glycine max
  unsure (1)..(542): unsure at all n locations
  Clone ID: jC-gmfl02220062e09a1
cagaattctctaaaagagatctttttctgctctttgaagaaagaagggtctttgcttgattgtggagatgtctctgctctcagatctcatcaaccttaacctctccgataccaccgagaaggtgatcgcagagtacatatggatcggtggatcaggaatggacctgaggagcaaagcaaggactctcccaggaccagttagcgacccttcagagcttcccaagtggaactatgatggttccagcacaggtcaagctcctggtgaagacagtgaagtgattctatacccacaagccattgtcagggatccattcagaaggggtaacaatatcttggttatctgtgatgcctacactcctgctggagaacctattcccactaacaagaggcacgctgctgccaaggttatcagccatcctgatgttgttgctgaagtgccatggtacggtattgaacaagaatacaccttgttgcagaaagatatccaatggcctcttgggtggcctgttggtggtttccctggacctcanggtccatactact

SEQ ID NO: 4215 - DNA, 571 bp, Glycine max
  Clone ID: jC-gmfl02220062e10a1
cacaattccctctaatactcctcttacttcttctacattctaacatgcctacatcgtgtctgctactgaatggaaactaagttgtgaaatcatgggcatattcagatgtgggaccttgtttttccatgtgctccttttgtttagaacctgtctggccaaagatcaacatgttagtcagatatatcctggcttcagtgcatctcagccagattggagcgaccataatggttttttcttgctatccaacagctcagctttcgcttttggattcttcactactcttgatgtttcatcgtttgttttagttgtcatgcacttaagcagctacaaagtggtttggactgccaacagaggcttactcgttgggacttctgataaatttgtgcttgaccatgatgggaatgcatatttggaaggtgggaatggtgtagtttgggcaacaaatacaagaggacaaaaaataagatccatggaattgcttaactcagggatattggtgttgcttgtggaaaatgggacaactattttgcaaagttttagccatcccactgatactcttttgcccgacaag

SEQ ID NO: 4216 - DNA, 144 bp, Glycine max
  Clone ID: jC-gmfl02220062e11a1
ggattatggtcgctaccgggaatactatgagcaggacgttgggtctagagactcagaacttagggtcagagctgagggcttgaggattacgcacaacacagtagatgatgatccgtgccagagaacgatggatgaggaatatcc

SEQ ID NO: 4217 - DNA, 416 bp, Glycine max
  Clone ID: jC-gmfl02220062f01a1
tgagagtagcactgagcatcgtctagctatctcgatcgaactgtccaaggtcctgtcaccgggagggcataaagccggtctggtccggttcctggttatgtaattaaattccggtgatcgttatgttgtgattgtttatctcttagcactaatcgttctaaccattgtagttatccaggtttgtacaaaattagtggtcatgtctgtaatcacaataattgtgttggtccgagtgatgattacaatagttttgttatatgtggtggtaacacttgctgtaaaggaaagaatcttgcaacggttagcatgatgttggcaacggtaccaaatatgttcacaaacccaagtcattcaaggatcccgccgccactacaccgatggtcagcgtcaccgggggttcatcaatcagcagtagt

SEQ ID NO: 4218 - DNA, 489 bp, Glycine max
  Clone ID: jC-gmfl02220062f01d1
ctacattccgttccaaggaaggtttcccgtcatcactgtatgacgtcctccttctttggggggggggggggggtagaaaacgataatatacgatatcgaagatagggcaggggcgagtaccaacgtaaagagggaccaaagataagaaagagggagacaacgggtatgggggcaacaagaagggattacaaagaaaaggaggggagggtgccgaaaaggtggggtaagggaacaataagtagttatgaaaaggcggtagcggcaatcaaaggaagtaaggagtgcatgaaggcggtggtaatggaaaagatggggatgaacaatatggcgagggggggttgaaataggagacgcaagagcgtgatagagagattagagggatccccgagacgcgcaaacaagtacgaacaggtgataacgggcgccggagtgttagtactcatgtgctggcgcacccaaccgttgtaggcgcataagcctgcaggtagg

SEQ ID NO: 4219 - DNA, 506 bp, Glycine max
  Clone ID: jC-gmfl02220062f02a1
cttctgcttcgccctcctctgcttcgcgtcatgtcctttcgcttcatcacctccttttccttccactcgcgcctttcttcattcccttcttctactctctccaaaaccaggacgagttttcctctgagaaaattttgggctccctgttcggttccaaatgcggtcactccaagggcgtttatgtcttctatctcgaccaccgaagcttttcacaatagtgaaagtcccacagcttatagttctgatcaaattcaggtgcttgaaggcttggaccctgtgaggaaaaggcccgggatgtatattggaagcaccggcccacgagggttgcaccatttggtgtatgaaattttggataatgctgctgatgaagctcaagctgggtttgcttgcaagattgatgtatgtttacttgcggatgattctgtgagcatcacagacaatggtcgcgggattcctactgactagcatccagttacaaataaatctgccttggagacagtgttgac

SEQ ID NO: 4220 - DNA, 523 bp, Glycine max
  Clone ID: jC-gmfl02220062f02d1
gatcacagtacactttaaccttgcattttaatggtaacctgtgaagggtaacatctgaagtacttgaatatgattacacgtgcagttacaaaatttgggaccatacataggtgggggcaaaaaaacatatgcacttgacaaattttttaaaataaaattagaacctccaacatgcctcccaaatatttcccatcaactaaaagtgcaactccattttgtgctagtaaacccttcctctaaatcatcaaatggcaccaatgaaaaaacaggagccttgctttcattcaagacctctccacattccccagcatatagaaatttttttgtgcttgactgtattgtagtgtatggttaatatggaaggcattccacttgtccacatctagctgcaccatcaaatatctagctgatcaagatcaatcatgcttgcagagtttcgtataagttccttccgaaaatccacccgagtacccataagagaggaaaaaacaatatttgcttctgctgcatcctcaacttttaa

SEQ ID NO: 4221 - DNA, 499 bp, Glycine max
  Clone ID: jC-gmfl02220062f03a1
ggcgatcatttctagagaagaagggccttacgaaggaggagattgatgaagcctttcagcgtgttccagattcagctccaactgtgcagacaggtggtgtaaatcaagatgggcaattgaaatcatcatcaaacattcagcaacaagcccaacaacaaactttgcagccgggtttacctgcttctactggtgttaatacttcatcgggaaccttatcacgctccagatttcactggtcccatgcccttattgcagttggattactggctgcttcaggtgctggaacagctataataattaagaattctgttctccctcggttaaaatcttggatacgtaaggttgtcttagacagtgatgatgaacaattaaagaaaactgacaacaaaccaacaccgatggaagaagctgtgcaagctgcaaaatcagctgcagctgcagctgcagatgtggcaaaagcgagccaagaaatgctggcttcaaaaggcgaagagaggag

SEQ ID NO: 4222 - DNA, 516 bp, Glycine max
  unsure (1)..(516): unsure at all n locations
  Clone ID: jC-gmfl02220062f03d1
acattagtaaacaaatttattgcatagaaagatacgtgcgtttgcatattgtattgatgtccagttcaaagtacaactaatatgattatgaaacagattgtgtgacaagcttattccaaatcatgtttttcatgatagatcatgcatgattcaccttcatttctcatcatatttgacttcatgctcctcttgtatctcactagaagtgggaaccgagctgacactgcttccctcaactgcaccttcagattccaatagttttgggtccatatgtacatcatcggaaccgtctaaagaatgagctactgactgattatcagacatctgttccttttgggccgctggctttggccgcctgattgcttctgcagcctccggcatagctatggngggaggttgaggaggaacccatacgcgttgaactggctgttggattggctgctgactggatgcagcaccattgggtactccattagactcattttcattatcaatctctctaattctgacattttt

SEQ ID NO: 4223 - DNA, 557 bp, Glycine max
  Clone ID: jC-gmfl02220062f04a1
ggcaacagaaacaaaagtggcagtattaggtggcatcaccgaagtgcagggagctgccaacagcgtcgagatcaacaatctcgctcgctttgctgtagaggaacaaaacaaaagagagaattcagttctggagtttgtgagggtgattagtgcaaagcagcaagtggttgctggagtgaattactacataacattggaagcaaaagatggtgagattaaaaatgagtataaagcgaaggtttgggagagggaatcccaagagttgctagaattcaagccaacattaggtgcaggaggcatcatcgatgtgcctggagctgccaacagcatcgagatcgaccatctcgctcgctttgctgtagaggaacaaaacaaaagagagaattcggttctggagttggtgagggtgattagtgcaaagaaacaagtggttgctggaatgaattactacataacattggaagcaaagatggtgtgattaaaaggagtatgaagcgaagatttgggtgaggtgatggttgaactccaaagagtgctagaattcagccagtcaatgt

SEQ ID NO: 4224 - DNA, 594 bp, Glycine max
  Clone ID: jC-gmfl02220062f05a1
ccggtgtgctgctagagaatctggtgaaggatgtcaattgttccaatcaaccaaggtcactcccaggactcttgggatcaattcatcgattttcctctccctccttccatctccagcttcttccccggcttcgaattcggattcggctcatcggtggttaacacacgtgtggactggagggagactcccagagcccacgtgtggaaggtcgagcttcctggcttcacaaacgaggacgtgctggttgagctacaagaccagagggtgctccaggtcagcgtggagagtggtaacttcctgacgaggtttaagatccccgacaacggtaacctcgaacaactcaaaaccaacatgcgtcacgggattctccttgtcactgttcccagtttcatcaacccacttctaataggaatgtcagggtcgttgagattgaaggcaccgactgaacccagttagcatactctgtctcttccaagttgttcactctaaaccaaacaaaagacgctgtcgtgtctatgtatgtgtccgatggaactgtgttctagtattatattatggtatgtgtgccatggaactgtggtctagcattatata

SEQ ID NO: 4225 - DNA, 550 bp, Glycine max
  Clone ID: jC-gmfl02220062f06a1
attcgccgagcagttcctttggcacttggtctactctgtatatcaaatccaaaggtcaatgttatggataccttaagcagacttagccatgatactgattcagaagtagctatggcagctgttatctccttgggtctgataggtgctggaacgaacaatgctcgaattgctggcatgcttcgcaatctttcaagttattactacaaggataccagccttctattctgagtgcggattgcccaaggtcttgtacatttgggaaagggcttattaacacttaatccatatcattctgatcgcttcttactgtcaccgacagcacttgctggattaattaccatgttgcacgcatgcctagacatgatagctattgtgttgggaaaatatcactatgttctctacttcctcgttttggcaatgcagccaaagatgttgttgactgtggatgagaacttgaagcctctatcagtgcctgttcgtgtaggacaagccgtagatgttgttggacaagcaggtcggtcgaaaacaatcactggctttcagacccact

SEQ ID NO: 4226 - DNA, 543 bp, Glycine max
  unsure (1)..(543): unsure at all n locations
  Clone ID: jC-gmfl02220062f07a1
ttcgtgattattattatttggatcatgctcttcgcttcaattttccttttcaaatccccctgaattttttttctttctgaatcacatcagattcaattgaattataccccctcaatgcaatggtggtctgcaaatgtcgcaaggctactaagttatattgcttcgtgcacaaagttcctgtctgtggggaatgtatctgctttccggagcaccaaatctgcgtggtccggacttattccgaatgggttatagatggggagtatgattggcctccgaaatgctgccaatgccagtctgttttagaagagggggatggatctcaaacaactcgactgggttgattgcatgttatccacacaaattgcttggactcgcatatcaagagttntcctccacatactgccccagcaggatatgtgtgtccttcatgttctactacgatatggcctcctaaaagtgtgaaagattcaggatcacgtattcattccaagttgaaggaagctatcatgcaatcttttatggagaagaatgtttctggaatca

SEQ ID NO: 4227 - DNA, 604 bp, Glycine max
  unsure (1)..(604): unsure at all n locations
  Clone ID: jC-gmfl02220062f09a1
gtagtgtgtggttgaaagttaagaagtagcaaagatgtttccattcgggcacaagggtcaaaagataaaggggactatggtggttatgcagaagaatgtgttggatatcaacagcatcaccagtgttgacgggatcgtcggcaccggcttagacttcttaggcagtgcactcgatacagttacttttttagcctcctccatctccatccaacttattagtgctaccaaggctgatggtgggaaaggaaaagttggaaaggctacaaatttgagaggaaagataacattaccaaccataggagctaaggaagaagcatacgatgctcaatttgattgggacagtgacttcggaattcccggtgcattttatattaagaacttcatgcaaaacgagttctacctcaagtctttaattctcgaagacattccaaaccatggaaccattcacttcatatgtaactcctgggtttacaattcanaacactacaagactgatcgcattttctttgccaacaatacatatctttcaagcgagacaccggctccacttgtcaagtacagagaagaagaattgaagaatgtaagaggggatggaactggtgag

SEQ ID NO: 4228 - DNA, 565 bp, Glycine max
  unsure (1)..(565): unsure at all n locations
  Clone ID: jC-gmfl02220062f10a1
gtgacgtgtgcacttgaactgttctttcttctgtttctatggcttccaaagttagttagcaacacgcatttcgatgacggtggtcggactcttcctcactgccacgaagctcgccggagctctattcactctcaccgtcgccgccaacgccttctcctactcccgctttcgcaagaagaaccttcgcggtttccgctctcccatcgatgaatcccaagacactctcgcacactttaacgtcgctgaaggggaagatgggtttttctttggtttggcgacagcgccagcacatgttgaggacaggcttgatgatgcttggatccagtttgctgagaaaaagagtggtgaaggtggtggtgactctgaggggaagcagagagtggatgctgtgattggttctgcttctggcgatggtggttcccagccggccataacatctncgaggagcaggaagcctctcaaggtggcgatggaggccatgatcaggggaattgagaagtatatggaagtggaagggaaagaaagagaagaagaagcccgtcctaatgtaactgcttggcataat

SEQ ID NO: 4229 - DNA, 584 bp, Glycine max
  Clone ID: jC-gmfl02220062f11a1
gtggtgtggaatatgaacatgaacacccacatctatccggaattcgttgttagcttcaaagtctcatctgatgctgaaggtcatttttgtggaagtgagggtaagaatgtttctggggttaattcagcctgtcagggtcctcatggcttgttacattcagaatcttctacagtagataatggaaaagctcctagtatggttgctagcaccccaaaagttccaaaatccccttggatgccttttcctttgcttcttgatgctatcagaaatcaggttcctcccaagggtatggatgtaatcaaaatatattatgaacaattcaggtcaaagcatatatcgcgggatgattttgtgaagatgctgaggttaatagttggagatggtctgttgagaactacaataacaaatcttcagttcaagataccttccggtggtgaattgaaaggctcaatcaagaaagaagtctgaggctgtatttctgtgaggtggagatctttctccttggagtcaattaatgtcaactttttgctggataaatcaaaatgaagttgtgatattggtatctctttaggcaactatctttt

SEQ ID NO: 4230 - DNA, 591 bp, Glycine max
  Clone ID: jC-gmfl02220062f12a1
gataattagccatacaaagatgaatctcaatagcacagaagcacttcttgtgctttttgcatttgtcttcttggcatggggcaatgcacaaaatacccttgtgccagcaatcataacatttggtgactcggctgtggatgttgggaacaatgattatctgcctacccttttcaaggctaactaccctccttatggaagggactttatcaaccatcaacccactgggaggttctgcaatgggaaactagctactgatattactgctgaaacactgggttttaagagttatgcacctgcgtaccttagccctcaggcatcagggaagaatcttcttattggagcaaactttgcttcagctgcctctggttatgatgaaaaggctgctattctgaatcatgcgattccattgtcccaacagttaaaatattacaaggaataccgaggcaagctggccaaggtagttggcagtaaaaaagcagcattgattattaagaatgcactctacatattgagtgctggcagcagtgactttgtgctaaactattacgttcatcctttgatcaacaaagcctttactcctgatcagtactc

SEQ ID NO: 4231 - DNA, 453 bp, Glycine max
  unsure (1)..(453): unsure at all n locations
  Clone ID: jC-gmfl02220062g01a1
taggtctgcactgagcatcgtctagctatctcgatcgaactgtccaaggtcctgtcacccccatgggtaaaacaacaacgacaacaagataaaaacgttgggtgctttgggttggagggggtgtgtgtgtcgaagcctcacggtggtaacaataaaagtgacgccattancgtgctcggtggtggtgtgtgtataggtgaatactggtgcggtcgaggtaatagtaaatctattggggtatgtattggtcgtacgtggtggtaatgtctatcgcatggtttctgttatggttttcatatcgcgccaattgaggttgcgtttcgttcttgtttgcataggtccgttccggtctttgcgattgcgttagtgttttcaatctcagttatcgtagtntcaccaactattactagtattcttatcggatcgtgtacaacaaaatcgcgtagcgcggtg

SEQ ID NO: 4232 - DNA, 446 bp, Glycine max
  unsure (1)..(446): unsure at all n locations
  Clone ID: jC-gmfl02220062g01d1
tcgattccgttccaggaaggtttcccgtcatcactgtatgacgtcctccttctttggggggggggggggggcgttaaaaaaagcgtgttggttagactaaagcggagcgataagaattaaggtgttacgttacacgttacttgtggaaagtgatcttaataaaagtggttaaaggtggcctcattaagtcacacaagttcgtattcctctccacaactcaacgggttcctcaggtaaaattgcgaacacacacaccccgaaataaagaagaataaggtagacagtgtaggtggtggtggtagtggggcatagcaggcaaacatcatgtccgtgtccggtcaatgtccagtggtgttagcggcacgtcatcaaccatcaagtagcgtancgcccatgtcgggtatttatgtcttggtcatcttattcaggtgtatactcacggtggt

SEQ ID NO: 4233 - DNA, 535 bp, Glycine max
  Clone ID: jC-gmfl02220062g02a1
cactggttgtcaatgcagggttcccgattataaaagggaaatttcaactatccccagaaatgccaattatggacacagctgacattccatggtgcagcttaggtgacccaaccatgcacaaggttatatataatcatgcgtcaaagattatacgatattcacatttaacagattggtggcttggaaacaccacaagtgaccttgaacctggtgctatatctttgtctccaaagatcctaccaattggtccactcatagggagtggtaatgacattagatcattggggcaattctgggaagaagacgtctcttgcttgacctggcttgatcaacaaccaccttgttctgtcatatacgttgcctttggtagctctactatttttgaccctcatcaactcaaggaactagctcttggacttgacctcacaaacaggccttttctgtgggttgttcgtgaggatgccagtggaagcaccaaaatcacatacccagatgaattccaaggcacttgtggtaaaattggtaaatgggcacc

SEQ ID NO: 4234 - DNA, 508 bp, Glycine max
  unsure (1)..(508): unsure at all n locations
  Clone ID: jC-gmfl02220062g02d1
aacatgaattctaatttattgcctatatcaggtagctaaatttaaatgttcaatatttttcaggaacatcataaacattgttcacaacatcagagcatcaacaaatacatttttattccttgagccactccacaaacttgttaaaattctcataggattgtcccccttctgcaatgttacttagaaccatttccttcagtttttgagaccttccccttatgttctcatctccaaggatttggtctactttcttctttatctcccaacgtgatatcagccctttgtcatccaaatcgaatcccaaacccaccttccacatatcacaaatgtaagccttgtcaactaattggtcagtataatatggccaacacaagaaaggtaccccattggacacaccttccaaggtagaattccaaccacagtgactaataaaacaaggtattgcagggtggcttaacaccttttgttgaggtgcccatttaacaattntaccacatgtgccttggaa

SEQ ID NO: 4235 - DNA, 509 bp, Glycine max
  Clone ID: jC-gmfl02220062g03a1
acttgggaggttaaagagacggcaacgttgtgctgtccgccttgaccgagccagagcttcgtcttggccctcgattttgccctgtaaaactaatcccagtcacaacagaaataatcaatggcaccgaaacagaccaaggctgagaagaagatcgcttacgatgcgaagctgtgcgacctaatggaggagtacggccaaatcctcgttgtaaactccgacaacgtgggatcgaaccagctccagaacattcgcaagggtctccgcggcgactctgttgtcctcatggggaagaacaccatgatgaagcgctctgtcaggatgcacgctgagaaaaccggaaacaatgcctatctcaaccttatccccctccttgtcggcaatgtgggattgattttcaccaagggtgacctgaaggaggtcagtgaggatgttgctaagtacaaggttggagctcctgctcgtgttggtttggatgctccaagtgatgtcgttgctcctcctggcacaca

SEQ ID NO: 4236 - DNA, 524 bp, Glycine max
  unsure (1)..(524): unsure at all n locations
  Clone ID: jC-gmfl02220062g03d1
aattaactatgggatttaaaaactagttgcaatgtaacatgaattgaaaagacagcaaactaaaatagcacctaaaatgaaagacaaacaacttcatcaattctaacaaagcaaactcaacaaaagtattacttaatttagtcaaacagactgaaacccatgtcatcgtcagactcttcagctggttcttccttcttttcctcctccttggctgcagccgctggagcaccagatgcagcagcaggagcagcaacggcggcaacggcaaatttacttgggtccttcagatactccttgaccttgtctgcctccgggaaagaataatctgtctcaaccgcaacagcaagaacattcttgtaggcattgacaaacatgtgtggtgctgcagcaagtgttggatatgaaatagccaatgaaagtgaagtaaccattgagacaccagcagcaaacttccaatgaggtcatcctcagntagatcaagaacctcagggctgaacactgaaccattatcataaacagagaga

SEQ ID NO: 4237 - DNA, 627 bp, Glycine max
  Clone ID: jC-gmfl02220062g04a1
aaagacggaaaatataacagaacttgacttgagcgaatgtcccataacaaaactcccaccttcatttcgaaatcttactcggcttcaagagttggagttggatcatggacccgaaagtgctgatcagttaatggactttgatgctgccaccctcatttcgaacatctgcatgatgccagaactatatgatattagtgctcgccgtttgcaatggaggctattgccagacgatgctttgaaattgacctcagtcgtgtgttcaagcgttcattctctcactttggaactgtcagatgagcttcttccgctatttctctcatggtttgtaaatgtggagaatttacggctagaagggagtaaatgcacagtcattcccgaatgcatcaaagaatgccgctttttatctatccttattttgagtggttgcgatcgtcttcaagaaattagagggattccttcaaacttggaaagattcgccgcaacagaatccccagactttgacttctcaagcataagcatgttgctgaatcatgaactgcatgaggctggacacactgactttagtttgccaatattaaagattccagaatgggttgagtgccagagtccgggaccatcaattttttc

SEQ ID NO: 4238 - DNA, 574 bp, Glycine max
  unsure (1)..(574): unsure at all n locations
  Clone ID: jC-gmfl02220062g05a1
aaaaattggttgagtggctggttgcagcattattgttcattgccttgttgagtggtagtgcacatgctgttgcaatatgtaacattgactcaagtcaactgaacttgtgtcgtgctgcagttactggtcaaaaccctccaccacctgatgagaaatgctgtgcagttattcgccaggccaatttgcgttgcctctgcagttacaagtctatcctaccttcatttggaattaaccccaaaaatgctttggccttgcctgctaaatgtggtctacaattgcctcctaattgttgagtgctgtgaagcagttaacgaaggtcaagttcattacaagcaccttaattagtagtcttcaattgctttcaggtgttttactaacactgaagataaattttaagacaggatttgatgcccctcaaataacggtgcagttggttttaatcagtgtcttgtgtccaaaagtttgtgagtagatgtgtagagtattagtgtttgatgtacaggaatacttntgatctgaactttntttccttcatgtctatgtctacattataatatgtttaataaagtttctg

SEQ ID NO: 4239 - DNA, 54 bp, Glycine max
  Clone ID: jC-gmfl02220062g06a1
attgttgtgtgcatattttgatatagtttgatacctccctatatctaagtagct

SEQ ID NO: 4240 - DNA, 571 bp, Glycine max
  Clone ID: jC-gmfl02220062g07a1
caccaaatgaaaaatattgggttgttttttcttgtggtggtggctacttttgtggtggcagccacagctggtagcttttaccaagactttgaaataacgtggggtggtgagcgtgccaaaatctatgagaatggaaaccttctcacactctcccttgacagagcctctggctctggctttcgttccaaaaaagagtacttgttcggaaaaattgacatgcagctcaagcttgtgcctggtaactctgctggaacagtaactgcctattatttatcttctctggggcctactcatgacgaaatagactttgagtttttgggtaacttgagtggtgatccttacactctccacacgaacgtattcagccaagggaaagggaacagagaacaacagttccatctatggttcgaccccaccaaggacttccacacatactccgtccaatggaatcctgcaagcatcatattctctgtggacgggaccccaatagggagttcaagaatttggagacaaaaggggttccattcccaaagagccaacccatgagaatatactctagtctttggaacgc

SEQ ID NO: 4241 - DNA, 331 bp, Glycine max
  Clone ID: jC-gmfl02220062g08a1
gacttagtggtggcagtgaagcaccaccgtcacatgggaggaggtacaggtggagttaatctctcatttggaagcaactacccgtacttaaagatgtcggagtgcactgagcgggcgaagacatgtcatcacacatcactgagatcgctacatatgcatagagcgattggatgtgacgagagaatcaagttctattgctagagacgtcccaatgagatgctagtcgggcgtgatacgcaaaacatatcactatcaataaccggctattgtaacacatgtctgaggcctacggatgaccaaatgacaccattgctcactcagggctaggatg

SEQ ID NO: 4242 - DNA, 608 bp, Glycine max
  Clone ID: jC-gmfl02220062g09a1
ggaggatgggtttagaggagagtttaatgcctttgttgggaacatacctcaccaagtgttgctgctttcgagtctgagggttttgtgggcgccaagggccaaccttggtggacggttgcctagtggctggtcggatttgtgctctctgagggtgctcaatttggcgcagaattatgttgccggtgttgttccagagagtttggggatgtgtaggaatttaagtttcttggacttgagttctaacattttggtggggtatctgccttcattgcagcttcgggttccttgtatgatgtacttcaatatcagcaggaataatatatctggcactcttcaagggtttaggaatgaaagctgtggtgcaagtgcactggatgcttcattcctagagttgaatggttttaatgtctggaggtttcaaaagaatgctctcattggatctggttttgaagagaccaacactgttgttgttagccatgatttcagttggaacagtttcagtggatccttacctttgttttctcttggagataatctgcctggtgcatatcgtaatgtctcctacactctgtctctcaataataacaagttcaatggaactctactga

SEQ ID NO: 4243 - DNA, 556 bp, Glycine max
  Clone ID: jC-gmfl02220062g10a1
caattctcagatttgtgacctgctctcagaaaaaaaaaaaatcaaaaaacaaaactctaagtgggtcggtttttctgcttaaaatttctgttttggtctgaaatttctttgcttttggtcgtgccagtgctctatgagatagaatctgcgcgagaaagcgacaccaatccttgcaatagagatggtgggtaccagaaatattgtgtagttactgctatctattacttttgttgctccaattgagctctacactgatcgttttggcaccttcaagtacccctttgctgagcaagagtttattgatgctgtaactgcttttgcgagtgcagctgactctggccatctgaatctcctgccgcaggatacttctacggtctttaaggaaccaattgggcttgaatatacggaggacgctgcagacacaaagaatttgcttcatggcttgcactttgccaaaccaggggagcatgtatctgccagggtattgtcagctacgaaggacgaaggtcaaaccaaaggggagaaccccatcaaactggtgacagatggatttaat

SEQ ID NO: 4244 - DNA, 568 bp, Glycine max
  Clone ID: jC-gmfl02220062g11a1
gcgaagagaatggctcccaagggtttaatctttttggctgtgttatgcttctcagcactgtcactgagtcgttgtcttgcggaggataatggacttgttatgaacttctacaaggaatcatgccctcaggctgaagacatcatcaaagaacaagtcaagcttctctacaagcgccacaagaacactgctttctcctggctcagaaacatcttccatgactgtgctgttcagagttgtgatgcttcactgttgctggactccacaagaaggagcttgtctgagaaggaaacagatagaagctatgggttgagaaatttcaggtacattgagaccatcaaagaagctttggaaagggaatgcccaggagttgtttcctgtgctgatatcctcgttctctctgccagagatggcattgtttcgctaggaggtccccatatccctcttaaaacaggaagaagggatggtagaaggagcagagccgatgtggtagagcagttcctcccagaccacaatgaatccatttctgcagttcttgacaagtttggtgccctggaattgacacccccgg

SEQ ID NO: 4245 - DNA, 624 bp, Glycine max
  Clone ID: jC-gmfl02220062g12a1
aacgaccctgcaaaaccacctgcaaaggcacaagtggtgggttggccaccagttaggtcatttagaaagaacatagttcaaaggaacaagaatgaagaggaagcagctttcgtgaaggtgagcatggatggtgcaccgtatctacgaaaggtggacataaagttgtacaagagctaccaggagctgtcagatgcgctggctaagatgttcagttccttcacgattgaaaaatgtgggtcccaagggatgaaggactttatgaatgagaccaaattgatagaccttttgaacggctctgattatgtacccacttatcaagacaaggacggagactggatgctcgtcggtgacgtgccctgggaaatgttcgttgaatcatgccagcgccttcgcataatgaaaggttctgaggctatcggccttgcaccaagagccgtggaaaagtgcaagaacagaagctgaagtgattttagggttcggccacaacaatcggcttggttgttcatctgtgtcacaaggaagcaaatgtactcgagcaagatcgagtctcttttaggaataagagtttaattttaataataatattatgcgtctttgaaatttcttatatgtgattatacgaat

SEQ ID NO: 4246 - DNA, 525 bp, Glycine max
  Clone ID: jC-gmfl02220062h01a1
aggttgcactgagcatcgtctagctatctcgatcgaactgtccaaggtcctgtcaccgctatgcaagagaagcacatgaggaacgataagccgagttttgaagtaagggtagggagggagggagcgggggggcgaggcgtggtgcggtgtgtggggagtggatgaggcaaccggttgccgcgtaagccgtagtaaaccagggcagagccgagtaaacgggcgtaatatgtgcaccatgggaaaatagcgagcgcgatttgaagggaaagagcggggtgcgcaaacagaaacaatatgttgtagataggatggggtgtaagggcgaggaacaagagattgtgcgagacgggatgatgagaagggacaaggttgatgcggagcaagcggggaacgcgaccacggagccatatggaaagagggagccggaaggggcgtagtcagggtaaagtaagaccgacaaggaggagtaaggcgtactgataaagggtggcgagggggaacaaatagtaggcaaagggcagcggg

SEQ ID NO: 4247 - DNA, 483 bp, Glycine max
  Clone ID: jC-gmfl02220062h01d1
tcgattcggttccaggaaggtttcccgtcatcactgtatgacgtcctccttctttggggggggggggggggggccaaaccaaccaacaaaagaggcaaaggaaacgggtataggagaaaccgcatctaacggttacagacccaaaggaaacggggtataagaagtggtaacgccggaataatagggcagaccataagcgaaataggtgaggaaagacagggatagccattgggtacagcttaaagtaacaagtggatccaacaaggcagcaccagataatccgccgcgtgtgatgacgcttgcagcaagtacaatacgccaaccgcgtaggttacctatacgagggattgtgagaagtaaaattgtgttatgcgtaatagggataaacgtagtaacgtcgcaaaagttggttaaggcaacacgcgggctaagtacggtaagacgtgcgggatagtgtggaaactaggtgtatgtagaaggcat

SEQ ID NO: 4248 - DNA, 265 bp, Glycine max
  Clone ID: jC-gmfl02220062h02a1
gcagattctgccatgaatggtgcatagatataggagcctctgctgtataaattggatccactgcaaagattgctgctgatggaaaagctgcaaccaaccttcaatttgaaggatttgttgtctgaaacattcacctgttaattcaaattagtacgccccaatttgtacctagtgaaattgaaactgggttgtgcatttcaacattttgcagctcagattccatgtcatggttaaattatctatacaccatcagcatgtgccatag

SEQ ID NO: 4249 - DNA, 264 bp, Glycine max
  Clone ID: jC-gmfl02220062h02d1
ctatggcacatgctgatggtgtatagataatttaaccatgacatggaatctgagctgcaaaatgttgaaatgcacaacccagtttcaatttcactagtacaaattggggcgtactaatttgaattaacaggtgaatgtttcagacaacaaatccttcaaattgaaggttggttgcagcttttccatcagcagcaatctttgcaggggatccaatttatacagcagaggctcctatatctatgcaccattcatggcagaatctgc

SEQ ID NO: 4250 - DNA, 520 bp, Glycine max
  Clone ID: jC-gmfl02220062h03a1
gggatggcgggcatgtctggatgtagttgccgttggcagtgggcggaggcgaaatccatgggagtgggctgttggttcccttcctcaactaccaaaaggagtttccggcctgtgattgtttctgtttctgctatctccgataataactctcactcttacactagcagcggaagaaagctagaagaagaaggcatcaaagggtcaggaactaccgtcagagatcgcaggttgcttagaattcgccaagagaaacgacagcgggaatacgacctccttaacaactaccctgcttgggcaaaagtcctggaaaacgcttgcaaagacgatgctgaactccgtgccgttctcggagatagcattggcaaccccgaactcatgaggaaacgagtcgaagatagggtgagaaagaagggtagagactttcaaaagtctaaaacaggatccgtccttgctatcaagtcaccttcagagacttcaatccacttgattcatatatctggtttgaattgttggatcacca

SEQ ID NO: 4251 - DNA, 513 bp, Glycine max
  Clone ID: jC-gmfl02220062h03d1
ataaatagggaactgcaaagccatttatttatttttgaaatacttgtacaaatctttgtaacaccacgcacgtcgcaatacaagttaatgaagaatatgcatgttttcaaccacagtcaagtcctttatattcttgccatttacttttgatttcgatttataggtttctgttctatttatgcaatttttattccttcctacattttttttctccaagtgacaacaatacgaaataaaaggaatggccatcgcccaaaaagtttaccttttcgtatgcacaaatgcactatacaaccctttttgaacaaaatggaaagtacaatgcatagctgcaacaagtcccagtttaaatcttgaagtatttgtaaccatactcagggcttgtcatcccctcttcccaatcacccatgcggcgaccaccaaaaacaatttgttggattccatgatattccgagctcaggacagttaggcagttgaggagcacatcaattgcaaaataatcagatgtaccca

SEQ ID NO: 4252 - DNA, 536 bp, Glycine max
  Clone ID: jC-gmfl02220062h04a1
ctccaaagaaagaacacatcacaatggagtacggaaggttaggaccctctgatcctggtggctcctcgcgcctcaaccctccgagatcttccgggaggaaaaacattgtgtttctgtcactctttgctgtcttattaatagccgcgtccgctgttactgcagttgccgtccgctctcgcaccaaaaataccggaggggacggaactagtctcggcaagttcacacaggccatttcacgcacgtgcagcaagacacgctttaagatgttgtgcatgaaatcattactggacttcccgggatctcaaggagcatccgagaaggacctcgtccacatttccttcaacgtcacgctgcagcacttctccaaggcgctctactcttccgccaccatctcctacaccgccatggatccccgcgtccgcgccgtctaccacgactgcctcgagctcctcgacgacttcgtcgacgcgctcgcccgctccctcaacacagtcttcgtcggcgccgtctgctccgccaacgacgacgtgctgacg

SEQ ID NO: 4253 - DNA, 577 bp, Glycine max
  unsure (1)..(577): unsure at all n locations
  Clone ID: jC-gmfl02220062h05a1
acagtcagactgcatatatcgatatagccaccaccactacccagcctccctctaatatctgttttttccttctgttgttgcttctagcacactttcatttgggcataagccaacttgagctgaattactactctaaaagctgcccaaaagctgaagagatcatcaaggaacaagtcacacaactatataacaagcatggaaacactgccgtttcgtgggtcagaaatctcttacacgattgcgtggttaaggtgccagatttcttgtttcaaattcatatataaaccaagatatatgcatcataattagttaacaacaatgcatgaaacagttaaaataattgatttgatgattctcatgcagtcatgcgatgcatcattactgttagcgacggtgagcgatgtagtgtcggagcagacatcggatagaagttttgggatgagaaacttcaagtacgtaaacactatncaagcagcggttgagaaagaatgccccttcacagtgtcatgcgctgacattgttgctctttctgccagagatgccattgctttggtgggaggaccaagcattgaaatga

SEQ ID NO: 4254 - DNA, 593 bp, Glycine max
  Clone ID: jC-gmfl02220062h06a1
agttaatgaggaatattgcaagcacctaagaggagtggtagacaaattgttcaaaagtatgtcggtagggttggggcttgaagagaatgagctaaaggagggtgcaaatgaagatgacatgcattatcttttaaaaatcaattattacccaccttgtccatgtcctgatctggtcttgggtgtgccaccacacacagacatgtcctacctcacaattctggtgcctaacgaggtgcagggccttcaagcatgtagggatggccattggtacgatgttaagtatgtccccaatgccctcgttattcacattggcgaccaaatggaggtacatatcttgcttagatgctatagttatatttggataaatttaaattgataaaagtatgaattaaaatcagctctcacattaagagagtttctataatttaacttatgtataaattaatttaaatttatgggagaaatctatttttggaaaaaacatatttttttagtttttggttatcaaatgtaattaacgtctctgtatttctatgttgatgaacttgatttataaacttttggcccttttctcttagattcatgatgtattt

SEQ ID NO: 4255 - DNA, 403 bp, Glycine max
  Clone ID: jC-gmfl02220062h07a1
gccaagcttgtcttcagtttctctttgtcgctagtaacagaatattacaaagtaacggctttctgagtggagcgcttgatttcgtttggtgggtcaacttcaagtttcgattttgttcatttttctctcgtcgattgagaaggctcagttgcagagacagtgggggtgggacggttatggctttttgcccaattttttgttgcggaaatggttcggatcgcaaaggacgagggaagaaacaaccttcatggcgggtgtttcctttgaaggaattacactccgctactaataatttcaactatgataacatacttggcaaagggggattccgcagtgtttacttggggccagctctgggatgggatccaaattgcatctaatagattgaagtttttagcaacat

SEQ ID NO: 4256 - DNA, 506 bp, Glycine max
  Clone ID: jC-gmfl02220062h08a1
tcgttttattatcataattattgttcttgttgtttttgaatcattcccatttcccagtctttctttatggaagaagttcccgacacggcggcgaaccggtccgatccggggttcagggcggagatcgacacttcggcgccgttcgaatcggtgagggaagccgtcacgcgattcggcggcgttgggtattggaaacccattctgaacggtcttagtaacaagcattttgctgctcctgagccgcatcacgcagaagagcttgaccctgaaaaactggaggagcaagctgctgtattggagaaagacctgatcctgaaagaaagggaaacacttgatgtcttaaaagagttggaaagtaccaaaaggcttgtggagaatttgaaatcaaaggtacaaaaagaagaatctgaagcatatttgaattttcagacgagtgtgtgcgaaaatatatcgtctgttaaggaggatgagagagaagataaggaaaaccgagtgagtaatgttgt

SEQ ID NO: 4257 - DNA, 475 bp, Glycine max
  unsure (1)..(475): unsure at all n locations
  Clone ID: jC-gmfl02220062h09a1
tattgaatgattttcctatagatctagagcagtatgatagaagagaacagctgaaaaagagtggtctgggaaaggtcattatgtttttatcaaagtctgatgaagaaatcagtgcaaataggaaactagccaaggagctggttgataagtggagccggcctatatttaataagagtacccggtttgaagacatgagaaatgtggaggatgatagggttccttatcggaggccatcagttaaaaagccggcaaataaatctgcaggaatggaatctagggacagtgatcttgatttggaactttcacagcctaggtctggacagtcctcttctaggcagcatgcatcaaggccggaagcaacacctttggatnttgtggtccgtcctcagtctaaaattgatccagaagaaattagagcacgagcaaaacaagctgcacaagatcagcagcgtatgaagatgaataagaaattgca

SEQ ID NO: 4258 - DNA, 576 bp, Glycine max
  unsure (1)..(576): unsure at all n locations
  Clone ID: jC-gmfl02220062h10a1
gcaaacagctgttagacttgaaagaggatcaccaaaacataaaggaagaaagttgcaaaacctttgaagagaaaaattccttgatgaaaagattttgggacctgggtgaagagaaaagtaaattggaagaagaaatctgcattatgattcacgataccatagcacaatccaatctttctctgctttaccagaacattgtccttgaaaaactccaggcacttaaagagctaagcaaagatcttgatagactttgttcagtaaatactgaccttgaggagaaactaaaaataatgatgggcaaattggaagatgtacaaatggaaaactcagatcttaaagagtccttgatagtgtcaagcaatgaactaaaattagttcaatccgttaatgatcaattaaattgtcagattaggaatggaaaggaattgttgtctcaaaaggaaaatgagattttggaagcagcanagatgtttagcactttacatgatgagaaaacagaattgcaaagattggtggaagatctgaagagcaagtatgatggagccagggtgatactttgagaccaagctagtcaaa

SEQ ID NO: 4259 - DNA, 573 bp, Glycine max
  unsure (1)..(573): unsure at all n locations
  Clone ID: jC-gmfl02220062h12a1
ctcgtgagtttagcagagtgcactcacctcacctagggttttgcatcagttttcaaccactatagcagaatggaacaaaatgcgtgcgaggaattgtcgaaaattgcttcggatttcaagtgcgagaagaaggttctcgaaacagttgatgaatcaatcgtatgccccactccacagaagaacgaggaacccttaatcgttaaattcagagagggacaaaccaaccttcctgaaaaatactctgcacttgtagatttgtttggtcacacaagctgttcactcaggttgctgcgtctgtgtaaaaagtctccaacttttcaaaatgtttgccgacaggttgaagttctttcgaagagggaattctcccatgcccatcttgcgcagatgaagtatatactccctaaaagtgtgtgtatagataaggtgcttgttcatgataagaaaagcttgtgtatggtgcctgatatgaagatcacgttgagatttgaggttgtgaaagattgctctggcgaatctgatgatctggctcttcgacgatattttaaatctaagctgaatgatntctttgatatg

SEQ ID NO: 4260 - DNA, 480 bp, Glycine max
  Clone ID: jC-gmfl02220063a01a1
gaggtagcactgagcatcttctagctatctcgatcgaactgtccaaggtcctgtcaccaccaatggtcaacctactagtacctacaatggctgtcgtacaaaaagcaacaaatgctaacatcatggctgccgccgccaaagcacataccacataattcggttgtggcaccatagtgctacaatgccgccgttgataacgaatagataagcgaagttggtattttggtttacaagagaagccagcaaaggtactagacgatgtaccaaccaggccaacgtacgggtgtggcattgagaaagccacgtagccgattggggtagcgccatgggtaggtcaatcggggttacttcgtacgatattaatctcaagcgtgagagtacaaggagggggaagcggttccgcattttgggtactttgtagcaggtaaatgtaagcaacggttaaccagtgagagagggcaaccaacgtggtaggttctg

SEQ ID NO: 4261 - DNA, 476 bp, Glycine max
  Clone ID: jC-gmfl02220063a01d1
aagaaacaaaattaagaagtcattaaatgagtaaagcacgtaaattttttaaggccatacattggatgcaagaattgctatcaagtggctgaactataatataaaaagaaaaaccctaccttacaatcatgagactactcctacaaacgcaaaagctgctaccgcaggcaacaacatacatagagtaactgaactaaaccataaaccagttaagaaaaagagcaaaaatctatcttaacttgggccgctttgtcatgctactacttagaccggctcctcttgacttaccaaagctttttgcctttcttcttttcctatcttcttcactgtcagactcattccctttctcccgatctgcattgcttgcttccctctccagttcttcccatgtctttcccttctcttcctctgaatcctcctcggaatctttctcgccatcatcctctgactcaacaagtgattcactatcagaagct

SEQ ID NO: 4262 - DNA, 531 bp, Glycine max
  Clone ID: jC-gmfl02220063a02a1
ccacagtctgctgcgcgtgagtaagggcgagaggggttttgggcgcaaaccgactcaagggactgaccatacgcgggagcggggctcgcgggctaataggctcgtatagctggtacatgcatctggacgtgacctcggactatgtcctcgtatttaaaccgaccagcgacgagaacacactccaacactaaccgtacgatgtccactgcgtcgcgcgcatcaccttataccgtctatacatgtgactcgactatgtcctagaaggcctcatcaagatggcagatctcactattaatctggctgccatttgcactcccgcggattacaacacccgccctatcggcaccatttacagcaattgcatcgacgcgctcccagtggtgaaatactgttccgagaacaacaagcgccttatccatttctctacttgcgaagtgtacggaaagacgattggagcctttctccctagagatagtcctcttcgcaaggaaccggcatactatgttcttaacgaagacgagtcttcttgca

SEQ ID NO: 4263 - DNA, 500 bp, Glycine max
  unsure (1)..(500): unsure at all n locations
  Clone ID: jC-gmfl02220063a03a1
caaacactccacttccccaaaaagtaccaaccaacctccacaaccacaaccacaacaacaacaaccactccagcaagagaaaccaaaccagtaatcgcttctccctccgaaacaaaacacccattacctcaaagttggaactttctccagaaagcagcggcttcagccttagacatggtcgaaactgccttagtctcccacgaacgcaaacacccactccccaaaaccgccgacccacgtgtccaaatcgctggcaacttcgcccccgtgccggagcacccggcgcagcactcccttccggtggccggaaaaatccccaaatgcattgagggcgtctacgtccgcaacggcgcgaacccgctctacgagcccgtcgctgggcaccacttcttcgacggagacggcatggtccacgccgtcaaattccactccggcgccgncagctacgcctgccgcttcaccgaaacccagcgcttagcccaagaaaaaaccctcgggcg

SEQ ID NO: 4264 - DNA, 516 bp, Glycine max
  Clone ID: jC-gmfl02220063a03d1
acatgcacatcaagcgaaagaaaaacagagaccagctgagcttcattgctaactacaccccaaaagctacaagctggtccccaaaacctctcactcccaaagtgaaaaaaatgaagaaaagtaaaaatctgcaacagaaactgaagaggagtagattccgggggcgtatctgcaagcatcccacagttaaacctctcctcagaaagtgaaaaactcacttatttaccgtcaccaattcaagcttgtttcctcaaatcatttgaatgaataaaagtgccgtgaaacccataaggaactctagaaggaagcttaacggaagcctcaagcttcaaagttttggcattcacaatctgcagctccgatttccattccttctcatcatgcacgaatgcgagaatatagccatcatcttcatcaccgtcaacaccatttggaagaaacagaggctccccaccgaacctctcttccccatacatgtacttgttcacttccccactgaacaaatcaactttagcg

SEQ ID NO: 4265 - DNA, 513 bp, Glycine max
  Clone ID: jC-gmfl02220063a04a1
ctttcttcttagttttcccctcggtgttgagctacttttcacagccatgttgccaagaagtagaacccttcctagcagaatccaccaaggaattatagaagagaggcataatgtcaggcactacttacaagttgaagtgcgacccaataatacccaaacggagaccgaagcgatgaatatccagtctaactattccaagtgcttcgatgatgatggtcgcttgaagagaacaggaacattttggatggcaactgctcatatcatcactgctgtgataggctcaggagtcctttcactagcatgggcggttgctcagcttggttgggttgctggacctattgtcatgtttctctttgccgtcgtcaatctctacactttcaacctattaacacagtgttacaggaccggtgactccgttactggacacagaaattacacctacatggaggcagtcaactccatcttgggaggaaaaaaggtcaagttatgtggcctcatccaatatatcaatct

SEQ ID NO: 4266 - DNA, 470 bp, Glycine max
  Clone ID: jC-gmfl02220063a04d1
gactaaagaaataacacgttcaaagacttttattccttgtaaaataacacacatatcacagactgtatacgtccaaatctgaggtatattatgtccaattgtcacttttttcctcagatcaagttgctctaacagcagcaggcatggaacgtatatactttaatttcacaaactaacttatcattaggtttgtataaaaatatcatatgtgcaaacacttctagctatttcttacggccttgatttaataactaggtttaaatggcttgtaagtcttgaggtccaaaaccacccctgccatggaaccaactgcagttaacaatgaaatgatgaggcaactggcactaagtaactgaagtccaagccagcgactggtccatcgtccaatcttcttttgcgaaatatacatgtcaatagggaaataaactgtcaagggccagaacccaaaagcgccaagtattccaaccaca

SEQ ID NO: 4267 - DNA, 613 bp, Glycine max
  Clone ID: jC-gmfl02220063a05a1
caagtactacaagggaagaagaacttagctacaagctaaggaaggatcaaagagaatggctcaagcaatggcatcaatgactagcttacgtggttcctctcaggctgtgttggaaggtagccttggctccacacgcttgaatgtggggagtggaagcagggtggcctcagtcacacgtgcagggttcacagttagagcacagcaacaacaagtgaatggtggtgaggtacaaagtagccgtagggcagtgctttcacttgttgctgctggtttgaccactggctcttttgttcaagctgtgcttgctgatgccaaacctatcaaagttggaccacctcccccaccttctggcggattacctggaacattgaactcagatgaaccaagagaccttaagctgccattgaaagataggttcttccttcaaccattgtctccaactgatgctgcacaaagggcaaaggaatcagccaaggaaattgttggcgttaagaagttgattgacaagaatgctcggccatatgttcagaatgatctgcgtctcaaggccgagtatctgcgctatgatctcacactgtcattgctgcaaagcctaggatgagaagaatcactc

SEQ ID NO: 4268 - DNA, 292 bp, Glycine max
  Clone ID: jC-gmfl02220063a05d1
gttattaatgttactaaattaagtgtttcgattttatgtgcgttacttgtttatcgtgactgctagaaaataaccccctaaaccaagggggccaaagacagcgagcaaaaaaggggccgtagaaacacagcactaaagcggaaccggaaagcaaggagacccagctgcacaaccaaggtggggaggggcaagacgaaaaagacgaagcgcccctgaggcggacttttgatcaccccgggggggcgcaaaatgggcggggatggccccaaggggcatatgccgggacatggca

SEQ ID NO: 4269 - DNA, 505 bp, Glycine max
  Clone ID: jC-gmfl02220063a06a1
ctcgagccgaatcggctcgagtctcaatcgcaaattttctcccccaaatcgtagatctacggttaaattggtgtagtgtggtaagatgggaggaggatttagagcgcttcacttagttaggccatttctctcgtttcttcctgaagttcaaactgctgacaggaaagtgccatttagagagaaggtcatatacactgtgatctctcttttcattttcctggtttgtagtcagctccctctatatgggatacactcaacaacaggtgctgatccattctattggatgcgtgttattctcgcttcaaaccgtggaactgtcatggaacttggaatcactccgattgtgacttctgggctagtaatgcaacttctggctgggtcaaagatcattgaagtggacaacaatgtacgagaggatcgagccctgttaaacggagcacagaagctacttggtattttgatagctgctggtgaggcagttgcctatgttccttcggggatgtat

SEQ ID NO: 4270 - DNA, 551 bp, Glycine max
  Clone ID: jC-gmfl02220063a06d1
agattcaatccaatgataaactcaagtatattttgaggaaacccaaaaatgttaacgatgtactacatacttcctcagttgaaaggggaaaaagaagtaaaaaaaatgacaacaaactagactatgtcctcccttacgatgttaaacgacctacaagtataacgatccctcaaacaaggggtgtgggagagctcattggcagaacttagaaaccaaagaagccaagctcgctagctctctccttctcaaatgtctcaaagtactgatagatgatggttactgcaagcaatattcctgttcctgaaccgatggcccccatgaaatctgccaacactgtcagggcaccaatacagatgcctccaaatgctgcggcagtgggaatgtatcgattcagctctttctgcaagtttgactcacggtgtccgggcattaccatttgttgatccttcagctgcttggcaacatctctagcagatgaaccagagacttcaatccatgtctttgagaacaaggcacatgctgaaagcatatacacaagatagaacagtgca

SEQ ID NO: 4271 - DNA, 393 bp, Glycine max
  Clone ID: jC-gmfl02220063a07a1
tagcaatcactaagatcagtggccgaggaggcttgaaatggatcataactggtttgtccataacaacacttcctaacactttgattcttggaatccctctcgtgaaggctatgtataagagtgaagcagttgttctcctggcacagattattttcttgcagagcatgatttggtacaatttgttgttgctcctttatgaacttgatgctgtcaagaccaggcctactgcagctgcatcatcatcacaaggatcaggagaaacagacacaggtcgtgaagtacaatcaaaaggagaagaagacgcagaacctagaataaaaaggaagaggaaggtcttgctcattcttgtcacagcgagaaagacgctaattataaaatcctatacatatgcaa

SEQ ID NO: 4272 - DNA, 560 bp, Glycine max
  unsure (1)..(560): unsure at all n locations
  Clone ID: jC-gmfl02220063a07d1
atagacaaattaattaagtagtattaattagttgagtgatcacatgttttctaattacaatgaatcaataatgcagtaaatttacaactatttataaattgttattttacggcaatgtaatgctgttattctcgatgtccctagctagcatatatttaacatttgctcttcaaattgctaataggaagtagaaggccaattccaccggcaaggcaatgagcattcctaacaagatcgcagtgcttaaaacggctggatggacattatactctttggcaaaaacaaaaggaacaattccttggggtagagctgcctgaacaattgccactttaaacaatgtgtctcttaatccaatcacaaaggaagccacagccatcagggtaggtccaagcacaactttcagtcctattgccaccattgccatccttggcccacatgctatgatgcttgactgtgatgccataaacagacctaagctgaacatggccatgcctagacctncattggacaatatttcgattgactgactaacaacttcaggcatatgtaatccccaccta

SEQ ID NO: 4273 - DNA, 487 bp, Glycine max
  Clone ID: jC-gmfl02220063a08a1
ccgaccccgtgagcgtgcgtgactgtggcagtttctaatccgttctctctctctctctgctacctcttacctagctcgctacctcacgtaatcgttcaccgttcacctttttcttctccaatcgcaaccaaacttctctctctccctctctccctctctctctctcatgttcttgtagcggaaccgttcttgcttctcggagaacatggcctccatctcctccgccgaactcaattacctcgtttatcgctaccttcaagaatcaggtttcacgcatgctgcttttacttttggttatgaagctggtattaacaaatgctccattgatggaaatttggtgccgtcaggtgctcttgctacatttattcagaagggtctacagtactttgagatggaagccaacttgagtaattgtgatgcagacctggaagatgatttttcattcttacaacctttggatcttatcacgaaagatgtgcatgaactt

SEQ ID NO: 4274 - DNA, 501 bp, Glycine max
  Clone ID: jC-gmfl02220063a08d1
attaagaatgcactcctacaaactactttttactaatgttatagcaaattacaacgggatccacgaacaatgagttatacctacaactatggttaaaatgggtaacctaccacccacccaaaatacacttccaccgatctcatctcaaggggtgaaaagaaagaatttaatgtactagtgtggagaaattggtgctacacagatattacattctaaaatccaaaacgcaaactgtattattagcaaaacatgcagcaatcttgtcaccctccttattccagcagacctcaaaaatgcccccattgcctgtgtatgttttgacaatcttgccgtccctcaatgaccatatgtgcatggatctgtcaagagacccactaactagataatcgccgttgggactgaaagcaacagaatatacgggatgcctgtgtccatccaagctgtacatgagtttcccaagttccacatcccatagctttacagttgagtcaaatgaagcac

SEQ ID NO: 4275 - DNA, 514 bp, Glycine max
  Clone ID: jC-gmfl02220063a09a1
cttgctgtaaatgataatgacatccacaacattgttctgtcatatcttatacataattgctacaaagaatcggtagaatcattcattgcttgcacgggagcaaagcagccgacagattatttggaggacatggataaaaggaaaagaatttttcactttgcactagagggaaatgcactcaaggctattgagcttactgaacagctggcaaaggatattctagagaacaataaggatttgcagtttgatctactaagccttcattttgttgagcttgtctgctcaaggaaatgcacagaagctttggagtttgctcagaccaaattgggccctttcggaaaggagcccaaatatatggaaaagcttgaagactttatggcccttcttgcttataaggagccagagaaatccccaatgtttcatcttcttagcttagagtatcggcaacagggtgcagattgtttgaatcgagccattcttgacacttgaatcttccaagttcacagcaatggag

SEQ ID NO: 4276 - DNA, 405 bp, Glycine max
  Clone ID: jC-gmfl02220063a09d1
gtacacccccaacgtttggattggtaacttgaaacttactgacaaaagaaattggaggcttaaatcttcctttcatttccccatacatgtaaccaaaagattttaccttaaatttttaaacaatataatatatatccttaattttggcagtttaacctcaatggattgaaaatcatttaaattaagggaaattatgggactaaattttggctggccaacctttcaatgggttgaaaataccttaaattggtacaaattttgggaggggaaattgggtcccagatgagggcaactgccttggacaggggggtctttttaatcttgcatttttggccctgatcactcatagattactcaggccttgcaaaagtgcacggagacccaaaagaacaagatagcttggaa

SEQ ID NO: 4277 - DNA, 444 bp, Glycine max
  Clone ID: jC-gmfl02220063a10a1
gagtctgaaaatgaaaatctagagtttgtgaggaaggaagatgagtttgagggcatcagagatagcgaagaagttgaatctgcaacctcacccagagggtgggttttacgtggagacattccgagaccattccgtccagctttcgacctctcagcttccccccgaatacaaagtggatcgccctgtatcgaccttcatctattttctcgatccttctgggagtgtgtctcgcctgcatcgcataccctgcgccgaaacctggcatcattacatcggcgaccctctcaccgtagtggaattgcatgagaaagatgggagcgtatttcacttgccttggatcagatctgactcagaatcacgtgccgcagtgcactgtgcctcccaacgtctggtttggctcttttgctaccaaggactttacctactctgcggtcggcgtattcg

SEQ ID NO: 4278 - DNA, 532 bp, Glycine max
  Clone ID: jC-gmfl02220063a10d1
gacaagtaaaacatttcaacgctctaaagaggcagggaccaatacctaaaatcaaaactagtaataagataagttttccgtcgaaaagaacaacaacaacaacaacaacaacaacatagtaatgtttatttctcgcgttgaaagaggcattaattagaaatagaaggaaggcgtctatatgattattagaaagccgaaaagcagaacagatagatagtgtgagtcactcggggaatgtgagagcagtgacgagagggtggaattggggaaaacgagcgaggagataagaaggcttagcgagctcgaagtcctggtactgaaacgcaggggcacaagtgcatcctacaagagtgtagttcctctcactatctctagcttcagcttcagcttcagctttagcacttccgaataccccgttcgcagagtaggtaaagtccttggtaggaaaagagccaaaccagacgttgggaggcaccgtgtactgcggcacctgattctgagtcagatctgattcaacgcaagtgaaatacgc

SEQ ID NO: 4279 - DNA, 580 bp, Glycine max
  unsure (1)..(580): unsure at all n locations
  Clone ID: jC-gmfl02220063a11a1
gttggaatttgcccatctaaaacctcaatcttttactgaaaagtctcaactttgaactcactcgaagtgatgatggagtcacacgtggatctaggttttctccttcaagctctcactccatcttggaactccgttcctttgcttgtggggttcttcacttacttggccgttgctggatccattctccctggaaaacttgttcctggcgttgcactactcgatggaactcgtctacactattgctgcaatggtctgctctcgcttcttctgttggttgcacttctcgggatcggtgccaagatgggttttgtgtctcccactgccatatcagacagaggacttgagctgctgtccacatactttgccttcagttntcttgtaaccctgatatcgcatttttccggttgcaagtcacatagtaaaggttcatcactaaagcctcatctcagtggaaacctgatacacgattggtggttggtatacaactaaatccacagttcatgggtatcgacctcaaatttttctttgttagagctggaatgattggattgctacttatcaattnatctattcctatgaa

SEQ ID NO: 4280 - DNA, 361 bp, Glycine max
  Clone ID: jC-gmfl02220063a11d1
ggaaaaaagaaggcccggggggggcagaaaaagggaccccaaaattaggggggaaaaaaaaccccccaaaaaacttttcgggggccacaggggtaaaaaaaaaaaaaccccaaatggaacccccaaaaacaagaaccaatttacatggaaggggtaaaaaaccccggcaaaaaaaaaaattcggggggaaccccttttttttttcaccccaaaaaacgggggggaaatttccccagggaacaagtttacaaaactgggcccaaatttcttaaaacttttgggggcaaaggggttaaacccttttttttttccaaattacccgattaagaaaaaaaatgggaaaaaaaattggaatggggga

SEQ ID NO: 4281 - DNA, 455 bp, Glycine max
  Clone ID: jC-gmfl02220063a12a1
cagaagaggaaatagtagacctgactgagcctaggtttgaatcattttgcatcacaaatggcaatgtcccatgaaaacataagaccaggcacgggcagatgtgcagatggcagaaatctgaggagtttatgttgtgtgaactggtgatacacctctgttgcttgttctaccaccggttactgtacatggctgcattgagatatcataagagatgctgcaattattttgttttaagattatcttggtctacatgttttctttttccttgttttgaaagcaaaagcacataggtgttgttagatgagcactgaaaagtattcgtttgtttcttgtacagaaaagcataggatgatataggagattctggttcttctttatttggagaggaactggatgacatacacattaaattaaaggttttggtcacagaaataattgtcttacaattatgtttg

SEQ ID NO: 4282 - DNA, 367 bp, Glycine max
  Clone ID: jC-gmfl02220063a12d1
aaaaacaaaatgggaaaaaaattttttgggggaccaaaacctttaattaaaggggaaggccacccatttccttcccaaaaaaagaacacccaaaatcccctaaaccacccaaggctttttggaccaaaaaacaacccaatcctttacagggctcattaaacaaccccttggggctttggctttaaaaccggggaaaaaaaaaccatgtaccccaaaatatttttaaaacaaaagaatggccccttttctaaggaattctaaaggcggcctggtccagaacccgggggtaaaacaggccccaggggggtttccccggttcacacaccataaacccctcaaatttcggccattggagcatttgcccggg

SEQ ID NO: 4283 - DNA, 611 bp, Glycine max
  unsure (1)..(611): unsure at all n locations
  Clone ID: jC-gmfl02220063b01a1
atgagtatgcgtctagctatcttagctatctcgatcgaactgtccaaggtcctgtcaccaagaaggcgcacctcacccgaaccgtctcggcacggcatcgtcgcgtcgctctgcggttgtgcgggtgtcggggcgcggacattcaatttgactgtttagttaattaggtattaatccccaaactgacttggcaacaatttcgtcagacaacagatatacagcaccctgaataggaacaaaccaaacaaacttgaacagcaacttactctataaaccaactggccacgggcctgtacaacccaacaaagaacctgtggagtagcagcgagctaggtagagcactttgcgagatcgctgattacagaatggtgtggaggaggcaccgttgatgggaggctgaagcgcgatgcaatgcaacgagcgtcgcagcgaacgtgctaagaacggaaggcgtgcgagtgggaggcgagttttggagccncggtgcagaaggatagttgggaagacgcggcgccaggcctagacatgcggtaacgaaagagcctagcctgctcaaagggaataaaaaaatgaggggggtagggtggttgggtgggaagttgtaggggtgt

SEQ ID NO: 4284 - DNA, 215 bp, Glycine max
  Clone ID: jC-gmfl02220063b01d1
aaaaaattcccaggccctgcccttttttacttgaacaagtttttgccaaatccccaacccttctaaaggggggtaatttttaaaaccccctggggggggtcccaaaaagctcccgacaattaactttttggggcttacattccgacataccccagttcagcccccctttgccataaagggggccccaattattagagaagttttcaggggggcac

SEQ ID NO: 4285 - DNA, 332 bp, Glycine max
  Clone ID: jC-gmfl02220063b02a1
ggcaaggtcagtggtggggtccttacccctttttttctcgcccatacaataacaatgtactattcacacccctccacttgtccttctccgcccgccacgtcacctcctccgccgtaaccatgccctccttcgaagtcctcggcggcgcacgtgaccgttttctccctgttctcccccacttgtctcgcccctatcatgcttttcctcttctcgccgccaaccgccacatcgaaaccatcttcgcctgctttcttcgctcagtccccgacgtcaggctccggcgcgagtgcctcaggacccaggacggcggcaccgtcgccctcgactgggtc

SEQ ID NO: 4286 - DNA, 519 bp, Glycine max
  Clone ID: jC-gmfl02220063b02d1
aaaattaaaaaataaattatgaataatatgaaagttaaaacaattacagtacttgtccaatttgatagttgtttatttttgctttctacaagacatatcaaagataattttgaacattattgacattggccaccgagctacggcatccaccttgtcctgctggacttcttgcacaaacaatagtgtagttgcttccacacattagcatttccagggattatgaattggctaaagaatgttgcaggatatatagatatctttttttggccagcttccaggatgcatttgatgtatgaaaaatatcaagcagattgccacattatacttcaagatggtacaaggtctctttactaccaggattactattagtttctggagtcttaactgcttcactctccaaatattgaataaagtccattaccaaaggatcagtccaaggagctcccagtggagcttcatcaccagcaacccaccctagatggccacctttgggtgtcactattaacaagcagtttggat

SEQ ID NO: 4287 - DNA, 590 bp, Glycine max
  unsure (1)..(590): unsure at all n locations
  Clone ID: jC-gmfl02220063b03a1
cccaaaggggaccttagagagcaatcttctaccttctctctcctctctctctctctctctcttttgcttttattattctctttcaatggcttcatcctcttccagaacaaagtctagtggacccgttctacgctccctctcaccctccaccagattctgctcatacaccacttccaaaactcctttctcttctccttcatcggccttcgcttcctccacaagctctggcttttcgtcttcatccttcttcaaccagccacgtcagcatcacgctcacagccatcaccgtgcggcatcgcccacccgtgtcaatctatgcagccccgcccctctctcctctgccgtccggttctcaatcgatccacggtccatatctccgaaccggtccatctcgaaccagatcatcacgacgaagaacaaccgtccgatctctggccagaagaagacgtgtatgtgctcccctacgacgcaccctgtgtcctttcgatgcagcctccacangaacataggaagcagcaaccacaacgccgattcgtanccttcgaccggctaacatgcgtagatccgctatgaagaaactcgctgtgaga

SEQ ID NO: 4288 - DNA, 425 bp, Glycine max
  Clone ID: jC-gmfl02220063b03d1
aaaaaaaaagggggccaaactctgcttccatagcaaaatttatgtacaaaatgcaattttggggagggccattggcaaagatctatgcgaatttcaccattggggtccagacgacgaaatcaaaacttgccggagaggactcgccactggctcccagccgcttcgccggaatccaactttggggggagataagggccccagggggggtctggaatttaaaccagtaaaatcaaaaacaacctgtatgctgggaatcgaaaaaaacattttgttttctttaaaaatcataaatcctgggcctttgacatgaccgaaagaccactgggcctgggcttgaaccccggtttcctcctgtgatgatgcgaactgggaccaatgaatgctgtcagggcccgtttcacccaatcgcccttcaggccttcgat

SEQ ID NO: 4289 - DNA, 598 bp, Glycine max
  Clone ID: jC-gmfl02220063b04a1
attctctttccctaaacctctcagactcatgtctcagcctttgaccaccaactctgctgatggtgattcctccgtcgccgcacctcccatcctcttcgattatcatcttatcgaccaaaaacttctccaaaacatagtctacgatgctcttgtctggagcaccctcaactgcctccttgttggtgacaaatcagttcagagatcaggaacagttcctggtgttggcctggtgcatctcccgctttctttattacctgggccatttcctgaaaatcattggaagcaagcgtgcgaattagctcctatatttaatgaacttgttgatcgggtgagtttggatgggaaatttctccaggaatctctctccagaactaagaatgcggacgaatttacctcaagacttttagatattcattctaagatgctacagattaacaaaaaagaggacatacgcatgggaatagttcgttcagattatatgattgatgagaagactaaatcacttttgcaaatagagatgaacacgatttccactttatctggcttgattgctgccttatgactggacttcataagagcttactttctcaatatggga

SEQ ID NO: 4290 - DNA, 524 bp, Glycine max
  Clone ID: jC-gmfl02220063b04d1
agaagaacagttcatcaatttttattggttagaatcaaacaggtcgttgagtacagacaccatcccataggagcaattaaaagaaacaacaatgcctcttttcttctttcactgttttcggagatatacaaacaaaatcaggagtcaggagacttgagtggtaatatataaaccatacataatgttttgaattgctttgataacttgggggttggctccatcaagttaggtatacagtatctaccactccaaaaccaggcaaaactccaccttcataagatgatgatatttttgtacgcaccatatagccactttcgttattaatgataaccttatccttattccttaaataagtaccaaatactccagcttctgaaatgacatgacccttatcccaattaccatcacgcaccaaaattgctggagaagtggctggaaatatcctctgcataaggatgtatgctgcatcttcttcagaacctgcttcctgtaatttaaagagggttccctcaactcatcaccat

SEQ ID NO: 4291 - DNA, 372 bp, Glycine max
  Clone ID: jC-gmfl02220063b05a1
gcaactgcgattttggatcggaacctcttctgcggcgtagcaatgggacactccaacgtttggaattctcacccaaaaaactacggtcctggttctcgcacttgccgagtgtgtgggaatccacatggattgatcaggaagtatggccttatgtgctgcaggcagtgcttccgtagcaatgccaaggaaattggcttcatcaagtatcgctaaaagagctgttgtcacctacggaccaatattatgttctggcactaggatgttttgaagatgttatgtttgaagaaacttgagacttgtttttttcatctattttattatcagacataatgtgtggaacgaagaatacttttatataaattgttttgcact

SEQ ID NO: 4292 - DNA, 372 bp, Glycine max
  Clone ID: jC-gmfl02220063b05d1
agtgcaaaacaatttatataaaagtattcttcgttccacacattatgtctgataataaaatagatgaaaaaaacaagtctcaagtttcttcaaacataacatcttcaaaacatcctagtgccagaacataatattggtccgtaggtgacaacagctcttttagcgatacttgatgaagccaatttccttggcattgctacggaagcactgcctgcagcacataaggccatacttcctgatcaatccatgtggattcccacacactcggcaagtgcgagaaccaggaccgtagttttttgggtgagaattccaaacgttggagtgtcccattgctacgccgcagaagaggttccgatccaaaatcgcagttgc

SEQ ID NO: 4293 - DNA, 52 bp, Glycine max
  Clone ID: jC-gmfl02220063b06a1
ggattactaaaatattgggtgatcctctattgcttcttagcaatggaacact

SEQ ID NO: 4294 - DNA, 533 bp, Glycine max
  Clone ID: jC-gmfl02220063b06d1
aaaaagggtaaaaagattccaagttcaatatactcaggaatttaattacatcaaactgcagacgccagctttacaaaagcaaattttccaaataaactgtgtcttgactctatatctgaggcacccatttatttctatccaattcaatatatacattctatgcttgcacatgcaaaaccatgacacagccacattgcaccctatcgcattgtgactccatcatgtggccaagggaacaaacaaaaccttttgtaccttcatgctttttggaccctgcaatgccaaaaaattaaggattgcttcaactgcgcacaattgcctagccagaagaagacgccgttctgggagaaacaagaactggttcattgcttgcagctttcatggctgcaatctcttctaagcgcttccatgtagcctctcgcttcaacttcaaagctttctcttgtgcttcatcttccttgaacttgcgcaggcactcctccaagagttcaggatcggtatcagcaaagatcttgcgtacatttattgtcaaa

SEQ ID NO: 4295 - DNA, 351 bp, Glycine max
  Clone ID: jC-gmfl02220063b07a1
ttcggctcgagcttcttctatgggttggcttagtcggttcataactgccgtggctttcttagccatcggagtgatattctcaccggagacactggggtcaaaatcaaccacactttccacctacctcaaactcgctcaccttctctgcttctccaccgacttcggcgccgctctgtgggtaacattcatcggcggcatcatcatgtttaaaaatctgccgcggcatcagcttgggaacctgcaaagcaagatgtttccggcgtatctctcgatgcggggtgtctgctgcgccgtatcggcggcgttctttggctaccttcacccgtggaaaactttctcaccactgagaga

SEQ ID NO: 4296 - DNA, 411 bp, Glycine max
  Clone ID: jC-gmfl02220063b07d1
cgccctggccgccctttttttttttttttttttttttttttttttttttttttttttttttttttttttttttttttttttttttttttgttgtttatttttgttttttattttattttttattgttgggaaaccccctaaaagaaaccgcccattgtgctacggggggggggggggactgccggacttctccaggggcccccaaaaaaattggtggaccaaaaaaaagggggagaagcaaaaaagggcccctagaaaaatgggcccaacatttaaaacctttttaggcgggggaaaaagacgcaaagggggaaagaaaaaaaacccgggggcgccacattaaacctgatgatggaaaaaagtctcttgactaccaaaaaaacggggagcaaatcgggacaaaaaagaaat

SEQ ID NO: 4297 - DNA, 554 bp, Glycine max
  unsure (1)..(554): unsure at all n locations
  Clone ID: jC-gmfl02220063b08a1
gtacaattgtggggtcacattctcaaggacgcgctttgcatgctgtgcacattttggtgaaggaagttagatctgtgggagaatgtcgtcgtcggaggcgcagggagcggcgcagaggcgatatttgacagtggggtggtgccgtcgtctctcgtcgagattgcacccattcttcgcgttgctaatgaggttgagaagactcatcctagagttgcttatctctgccggtgttatgcgttcgagaaagctcatagactggatcctacttcaagtggtcgtgatgttcggcaattcaaaactgcccttcttcaacgtttggaaagagaaaacgatccaacattgaaaggaagagtaaagaaaagtgatgctcatgagatgcagagtttttatcagcattactacaaanaatatatccaagctttacaaaatgctgctgataaagctgatcgtgcgcagcttaccaaggcatatcanactgccaatgttctttctgaggttttttgacgctgttaacatgacgcattctatggaagtggatcgtgagatttggagac

SEQ ID NO: 4298 - DNA, 502 bp, Glycine max
  unsure (1)..(502): unsure at all n locations
  Clone ID: jC-gmfl02220063b08d1
gcatcagaccccacctccatttaccaagcaatgctatgttgaaattggtgatatccttaatgtccagacctccattttctttaggtgatgtcaccgtgtcccacctaatccatgcgatcttattttggtcaagccctgctccccaaagaaaccttcgctgcagtctcaccaatttgtccaccactaatttaggtgccgttagatttgtcaaaatttagctgctcaactggcaggcaaaagaaatcagcatcagcacgcatcggccagccaagctgaaaacaatcagctgaccagaaatattcatttaaatcatcatagttcctccattgtgaatgctttgacctaccctttttgctccgtgcagcttccttaagaaagcctcatcttcacctacataggctggcttgacattctctcctgtcattggactaacattgccagcaagcataccgtacaactcaaaggcatatggtgatagatatagcanaggcattctggaatg

SEQ ID NO: 4299 - DNA, 578 bp, Glycine max
  unsure (1)..(578): unsure at all n locations
  Clone ID: jC-gmfl02220063b09a1
gcgtttcttggtgcttggtataaagcgcaagcgtttttgggttcgggaaaagaaggaatgaagagaagggtctagaacaacacaacactacggattgaatattgaattaaacgacgctcatggctacggtgccggagaagaaagcgaaggaagcattcttcgacgacgaattcgctctggccgttgatctctactctgaagccatacgattggatcccaacgacgcaaatctcttcgcggacagagcccaagcccatatcaaactcaacgctttcactgaagccgtttccgatgccaacaaagccatccaattaaacccttccttgtccaaggcctatcttcgtaaaggcaccgcttgtatcaaactcgaagaatatcacaccgtcaaggtagcgcttcaaaacggtgctgcttttgcccaagatgattcacgattcgccaacttgattcaacaatgtgatcgcttcattgaagcagaggaatcaagtggccttactagcancctatcatcanatggggtccatacatctgtaccgtctggtaatggttcccatttcagcaatagaaatgatgggatg

SEQ ID NO: 4300 - DNA, 491 bp, Glycine max
  unsure (1)..(491): unsure at all n locations
  Clone ID: jC-gmfl02220063b09d1
aagctgatcttcatacttaatatttccaatatgtgattcacaaaaaataaaaacccgattttcctcatgtttagcattatcaacatacaccaacaaaataaaatccacttccacagcaaaagcaaattaggtcattctcccagctaattactttctccaacacaaaataataacgagtttacagaatttctttttctttttgcatttatttgttggcaggagttgggaggagacgaacttgaactctcacaagcataagcttaaatgcatatttaagtaccgaatcaatactcccattttttcaactccataccttctggagcactgccttccaccttctttgatcccacttctttccaatcagttgatagcactgttccatttgactccaagaaagacttgctcattgctctcctcatgtcctcatctgcattttggtaaatatcacggaacaatttactcaaagcagcatcaccatcaagctnttcttc

SEQ ID NO: 4301 - DNA, 173 bp, Glycine max
  Clone ID: jC-gmfl02220063b11a1
gttacgtgctttgctataatatctttggatttaagtaaggaggaaaattgttattatttgtgccatatttgttggctgaccaagttgaagtgcttgtgtattaacggtttgctcatgggcaatatgacctgtaaaagatgcatactcgaagtaaaaactattgctgtaatctt

SEQ ID NO: 4302 - DNA, 176 bp, Glycine max
  Clone ID: jC-gmfl02220063b11d1
aagattacagcaatagtttttacttcgagtatgcattttttacaggtcatattgcccatgagcaaaccgttaatacacaagcacttcaacttggtcagccaacaaatatggcacaaataataacaattttcctccttacttaaatccaaagatattatagcaaagcacgtaacctt

SEQ ID NO: 4303 - DNA, 489 bp, Glycine max
  Clone ID: jC-gmfl02220063b12a1
gagagatgcttgctggtgttaatccatgcctaattgagtgccttcaagtgttccctccaaagagcaagctagatcccacagtgtatggtgatcaaactagtacaataaccaaagaacacttagagatcaaccttggtggactctctgtggaacaggcactgagtggtaacagattgttcatattagatcaccatgatgcattcatcgcatatctgaggaagatcaatgacctttccactgcaaagtcttatgccacaaggaccatccttttcttgaaagatgatggcaccttaaagccattggccatcgaattaagtttgccacatcctatgggagatgagtttggtgccgttagtagagtcgtcttgcccgcagaccaaggtgctgaaagtacaatttggctaattgccaaggcatatgttgttgtcaatgactcctgctatcatcaactcatgagccactggttaaatactcatgctgtgattgaac

SEQ ID NO: 4304 - DNA, 425 bp, Glycine max
  Clone ID: jC-gmfl02220063b12d1
gacatagagaaatttgatttgacattcatagatcagaatatcagacttacatacgggtgaacatgatacgggtgaacatgataggagcacaatactatacataaaaactgacacaacaccctattagatatgaaaaactagatagcatccaattacaaaacttaagcatacataagaaaattatgcacacataagtttgcacgtttatttgtcaatgagaggtacgttggaaggaaagaaaaccacacaccacacaccacacactctcattagatagagatgctgttgggaattcctctgaaagtaaggccttccccactggtaggaagaagcacagtgtagggcatctgcgccggtccattacggttcctaaggcttgaattcttgttcctccctgagattttgtcctcaatttccttcagctt

SEQ ID NO: 4305 - DNA, 444 bp, Glycine max
  Clone ID: jC-gmfl02220063c01a1
aaaaaagacaacccagagagcgcgtcttaataaacgctcttctctgaaaacccccatttcttttcttctttcttcttctctttcgcttcttcgatcttcgatcttcgtcgctgaaaatgagagagtgcatttcaatccacatcggccaggccgggattcaggttggaaacgcctgctgggagctttactgcctcgaacacggcattcagcctgatgggcagatgccaagtgacaagaccgttggtggaggtgatgatgctttcaacaccttcttcagtgaaactggggcaggaaagcacgtgccccgtgcgatttttgtagatcttgagcccactgtgattgatgaggttaggactgggacataccggcaactattccatcctgagcagctcattagtggaaaggaggatgcagcaaacaaccttgcccgtggccactatacca

SEQ ID NO: 4306 - DNA, 402 bp, Glycine max
  Clone ID: jC-gmfl02220063c01d1
gttcccaaagtttaattcttttaaaactttaaattaaaccaagcaattttaaaaaaatgtttttaccccacttaacataaagttccaaaagtcccggaacttggcaagttccccggaaagtccaacgatacggaaagctccaaaagaaaaacaacacaaaaaggaacctaatagggcaaacttctaatcataatcctttccttgatcaccattttaagttgcctctgcaccaacttcctcataatccttttccagggcaccaagatcttcaagggccttaaaaaactcccccttttttatacccttaccaacataccaatgaacgaacgcccttttggcatacatgagggcaaaattgcggtctttgcaaaaaaagacctaaacaacactggtggaattgga

SEQ ID NO: 4307 - DNA, 430 bp, Glycine max
  Clone ID: jC-gmfl02220063c02a1
ggctcgagtatagcccaagccctatacaaccaaaccctaacacacacccatttgattcagtttccatggctagcctcaaggttgcatttttggctgcagtgctctgcatggttgtggtgagtgcacccatggcacatgcagctatcacgtgcgggcaggtgacgaatagcctgatcaattgcatcggttaccttcagaacggaggaacgccgccgtcgggatgctgcaacggagtgaagagcctcaatgccgacgtcaagaccaccgtcgaccgacagacggcgtgcaactgcctcaagtcggccgtcagccaaatctgctgtttcaaagtcaacaacagcgtctcgctccccggcaaatgcggagtctccatcccctacatgatcagcaccctcaccaactgcgctaccatcaaggtttgaagagaaag

SEQ ID NO: 4308 - DNA, 469 bp, Glycine max
  Clone ID: jC-gmfl02220063c02d1
agggagaacccaatattaaagtagatataactatgtgtaactcatacagagaaataacaacgcaacacaatttaaagctatccaatacaaatctctcatacaagaggagaggggcatataagtggagccctcatcaccctcgatcttattcttaatattaataatgctactcatatactagtgagtagtttccggtttcctgcgtccatgactttctcttcaaaccttgatggtagcgcagttggtggaggtgctgatcttgtaggggatggagactccgcatttgccggggagcgaggcggcgttgttggctttgaagccggagatttggctggcggccgacttgaggcagttgcacgccgtctggcggtcggcggtggtcttggcggcggcattgaggctcttcactccgatgcagcatcccgacggcggcgttcctccgttctggaggtaaccgatgcaaatgatc

SEQ ID NO: 4309 - DNA, 536 bp, Glycine max
  Clone ID: jC-gmfl02220063c03a1
gaagaagaagggtgagctaaagtcaattttccttcctttcctttccactagtcacataatcccgctagtggacatggccagactcttcgccttgcacgacgtcgacgtcaccatcatcaccaccgcacataacgccaccgttttccaaaagtccatcgatttagatgcgagtcgcggtcgccccatcagaacgcacgttgtcaacttccccgccgcacaagtgggtctccccgttgggatcgaagccttcaacgtcgatacgcctcgggaaatgacccccagaatctacatgggcctatcccttctccaacaagtcttcgaaaaactcttccatgacttgcaaccggatttcatcgtcaccgacatgttccacccttggagtgtcgatgctgctgctaaactcggcattccgaggatcatgttccacggcgcaagttatctcgctcgctccgctgcgcactccgttgaacagtacgcaccccacttggcagcaaaattcgacaccgacaagttcgtgttacctgggttacccgata

SEQ ID NO: 4310 - DNA, 438 bp, Glycine max
  Clone ID: jC-gmfl02220063c03d1
ggcaggaaatcgttaagttgtcaacacgatcggaaattcgtagtacatactcacgaaaatgatgatggacatcctgagtactagaagttacaaaaacaatgaaactaagaaaaagaaaatgatggatttccctgggatactgatactggtaagactaataagagggtcccaaaatacattactcttgttcaaaagatggaaaagcagaaccagtcttaaggattgggtgcgggctcttgagcctccttggaaagcttgatctccttgagctcccgaatcaattccttcatgttggtgtgcgaagatccaccaacctttatagcactcttcgccgcaacgcttagctccttgggtttattgctcattcctccatcttcttcttcctcactcatcaacgaagcaatcgcgtttacaatctgctcccgtttaccaccttaa

SEQ ID NO: 4311 - DNA, 466 bp, Glycine max
  Clone ID: jC-gmfl02220063c04a1
attcatttcattttctctttggaataacctgcagggttgcttccatttcaacatgtagagcgcgctctttgttgttttcatttctgacaagttctttttttttgttgcgttgcaaaatccttctcctcgaggcggcggcatggaaagcattgccgcgcagctgaagcgcggcatctcgcggcagttctcgtcggggtcgctgcggaggaacctctcgtggcagttcacgcgccaggcctcgctggatcctcgccggaacaaccagcgcttcagcttcggccgccagtcctcgctcgatccgattcgccgcagcccctgctccggcaacgccgagctcaccgtgccggagaacctggactccaccatgcagctcctcttcatggcctgccgcggcgacgtcaagggagttgaggatttgctcaacgaaggcatcgacgtcaacagcatcgacctcgacggccgcacc

SEQ ID NO: 4312 - DNA, 546 bp, Glycine max
  Clone ID: jC-gmfl02220063c04d1
ataagaaaatttctgagatgttatatctcctttatggtacattgtacagagaggagctgttccagccctctagtagacaggaacataggacgaaccatgcaaattcattttcacgctcaaattaatccaagctcaagttaatattattcgaattccaaaattattaattgcaagggctattaacagtacaccaccatgaagctgacaaattggttttgaggatgcaaccctgaacttgatgtcttccttgccacgtagtatgtactttgttatttatttccaagggagtttaaaagtatctttccaccatccttgttttgagcaatttgcaacgattttgtccaaccgtgcaatgacctgagaaaatgttggcctcacaacaggtgttggatcccaacattcctcgatcaactctttcaactctggaggataatgttttggtttgatcttgaatgctggtcttttcccttccaagcacatcagtctaactgcctcctccgaggacttgggatggaagggatgtgtaccctctatcatctcatatat

SEQ ID NO: 4313 - DNA, 572 bp, Glycine max
  Clone ID: jC-gmfl02220063c05a1
ttctttcttccttcttcactcttagtctcactcactcaccattcaccattgtcctttgcatcgctctaagcaacacgtccttttcttcacatattccagtgtgctgttctgagattcggagagatgggtttggaagaagcttccagaaactgtatataagtcatcatgctgttgtgacagttaaaggtagcgtggtgtggggaaggagcctagtgattagttgtttgagaccactaaggaagtgaacaagaggatgtcaaacagtaggaacactcattggtgttatagttgcaggaggccagtttggctgggacggcgagatgcggtttgtcctagctgtaacgagggatttgttcatgaacttaatgatatggtgcatgttaatccttttgacttatttgaaatggacaacaatgaagaacgagatcaaaggcttggactcatggaaacattctctgcctttatgacgcatcaaatggcagataggggcagaagccttgacatcagggcgcacatcagatcaaatcctgaaccagtgcagggtttgctccttgtgatctttgtggccaata

SEQ ID NO: 4314 - DNA, 474 bp, Glycine max
  Clone ID: jC-gmfl02220063c05d1
agattcaaacaattatgcataaataaccatttatacaaaatagttcacaactttagaaagcaaatccagactggtcgactcaggtctaaaaccgttttcaccccaagctagcagcatcagtccataagatttttcaatcaacaggagcagatttaataaacacaagacaatgttctactcacactaagtcattcaaatggccacccagaataccctgcatgatgatgatggctgttctcagggatagttggtgtcggtgagctgcttactgttgcttcatcattactgcttgaatgagaagaacgaaaaggccactacatggaaaatggatttctccttccatggctctgcctaccactactacttaaacttgcacttctacttctaccatttgtgctgtggttactactactcaatccttgtggcagcagttgctgacgacaaactgggcaggagttatgctggaccaaccat

SEQ ID NO: 4315 - DNA, 473 bp, Glycine max
  Clone ID: jC-gmfl02220063c06a1
agaaaaaagaggcgcaagatgagtggtagggtttctgggaaggtgaagtggttcaacgatcagaaggggtttggattcataacccctgacgatggcagcgaggaactcttcgttcaccaatctcagatcaaatctgacggtttccgaagcctagctgaaggagagtccgttgagttcgctattgaatctgaatctgacggacgcgccaaggctgttgatgtcactggccccgacggcgccagcgtccagggaaccagacgcggcggtgatggtggccgaagctatggcgggggacgaggaggtggtggaggtggatatggcggtggcggcggctacggtggtggcggtggatatggtggaggcggtggctactgtggtggcgggcgatgcggtggtggcggtgcttgctacaactgctgtgaatcgggacatctggctagggactgcagccaatgaggctgtggaaacaggta

SEQ ID NO: 4316 - DNA, 535 bp, Glycine max
  unsure (1)..(535): unsure at all n locations
  Clone ID: jC-gmfl02220063c06d1
accacagaaaccgataacaatcatccaattcattatagcaaaatgtaggtccaaacagattttgtttgcagattgtaacgataacacagaaactttcatttaaataaccaaaaaaaagaaaaatctcacgcatctacttataagaagccacagctttgacagaaaccattaaaatccctacaacatgttaaagtaaaaacttaaaacaatccgcataacataaaccaccataacagtaatttcaacgagcacttgatgggcaatctctggcgaaatgcccagactctccacagctgtagcagcttcctccgccgccaccaccttctccaccaccaccgtacctcccgccaccgccgcctccatacctgccaccaccaccaccgccttcgccgtacctgtctccaccgcctccttggctgcagtccctagccagatgtcccgattcaccgcagttgtagcaagccccgccaccaccgtctcgcccaccaccaccgtagccaccggctccaccatatccaccgncaccaccgtagcc

SEQ ID NO: 4317 - DNA, 420 bp, Glycine max
  Clone ID: jC-gmfl02220063c07a1
gctcggaattcggctcgagcctgagtgtcgtccccaatccatagcttggaattccagaaaggcttcagcttcagcttgctgctcccttctcaacttcaacaatttcgataacacttaatgtcctgctattgtagggacatcagtattgctaatcatgatatggtcaaggctcagtaggagaactcatctcttgccataccttagggctttgcaaacagactcaattgaatccaggtgcctatctatcattcctaaaggatcaagttacaagttcattaatcctaataccagcttccaacacaatttctcttgtaatatacggctatcaaagtttaagcaagaattgagtacaaaaccattccatctgtgttaccgctcttcagcttttgcttcacagtatgctcgaaagtcatgttccat

SEQ ID NO: 4318 - DNA, 380 bp, Glycine max
  Clone ID: jC-gmfl02220063c07d1
gccccgttaaactattaccaatattcataccatgctagtttcccctgattgtaaacgtcattgtcacttaccattttgggaatatatctcaaccttttacagttcttaaataagttttactatcaataaattttaaaagcaaaattattcattcatctaaatggctaatttgaagaggttctccaaatccctgcttgcattaacttaggggccccataaaattagcataattccaaatgtcatgggatgggaccttgaaccttcaaaagttgatcacatgggttttctagtagttttgctgaagctgaaaatattcaagaacttggcaagcgtaccgaagaggcaagcttttttatacgtgggaaaccaatatgaaaatg

SEQ ID NO: 4319 - DNA, 518 bp, Glycine max
  Clone ID: jC-gmfl02220063c08a1
gcattgtgaatgcagtgcgtgatggtttgaatttggttccatacaggtacactgtgtgtaggcagggaagttctaaactagacgaagctttagaaattgcttctgacttcccgcgtgtaagtgcacttgtcgtttctgagtttataggttgctcaccatctcttagtggggcaataagggtaaacccatgggatattgatgcagtagctgaagcacttaatttggcaatcacaatgcctgatggagagaagcagcttcgacatgaaaagcactatcgatatgttagttctcatgatgtggcatactgggctcgaagctttgagcaagatctagtgttctcgtgcaaggatcactatagtaaccgatgctggggcattggctttggcctgaatttcagaattttgtccctctctcctagtttcaggaggctatccatagaccacattgtccctgcatatgagaggtgcagttgcagggcaatatttttggattatgatggtacagttgtacctgaagct

SEQ ID NO: 4320 - DNA, 468 bp, Glycine max
  Clone ID: jC-gmfl02220063c08d1
gagattctgaatgacattcatgtataaaaacccaacgagtccaaatatacaaccaaccaatgaattctcacccgggaagaatgcctagattctgtattctattaacatattgagtatcctttaaaagctacagctaaagccaacagatgcatccaatttcccccaccaaccaataaaaaccaatcactctaatcccctgtgctccgtttctgagacctaaagctgctaccaatattctttacaatcaaaagtcagacttaaagctatttccttaaatccttcttttatgcatcttttcaaaaacaaccatcaaaattgtgcctttatcccatgctggtgcctatagtgtactttttaaacatcattctcaaaacatacttctcttttctcaaaaggggtttctgtagagcatcttgatttatgccctgaagccgcaccaagaccctaaagtatgtcatcacatccaca

SEQ ID NO: 4321 - DNA, 564 bp, Glycine max
  Clone ID: jC-gmfl02220063c09a1
cccttcctcaatgggcaactgttgctctcaaggcaacgttgccgacggcccggctgacgactctgccgccgccaatgacaagggagaagctaaccaacaaggtagtaataaccatgcaaacgacaacaatgataattccacaaaccctaccactgccccaacgacgacatcaaagccaccacccacggtcaccccacccacttcaaaaccctcgaaaccggctgcaatgggcccggtcctcggccggccgatggaggacgtgagagccacgtatacaataggtaaagagctagggagaggccaatttggtgtcacacatttgtgcacaaacaaagccacggggcaacaatttgcatgcaaaacaattgcaaagaggaagcttgtgaacaaggaggacatagaggacgtgagaagagaggttcaaatcatgcaccatctctcgggtcaacctaacattgtggaacttaagggtgcatatgaggacaaacaatcggtgcatttggtcatggaaacttgtgcgggtggtgagctttttgatcgtataattgctaagggacattacac

SEQ ID NO: 4322 - DNA, 519 bp, Glycine max
  Clone ID: jC-gmfl02220063c09d1
caagagagcatgatcatcatatatataagtcagtaaaatatatgaaacctagcacaaacttttttttatggtaaacctagcacaaactattaaggcctagtatttaaaaggaaataatacataaacaaataccctttttttaattcctaattatgtgagccgcaatatcaatacatgtcatgttgcaacgttttcacatataaggaaaaagcaaaagcaaaaaaatgttaatcaaccaaaccacctagtgtatcttaacatttctcaaggatttgtttatgttcttcttaccccccctccccctttccctcttttcttggtttttgattccacctttctcccgttcctaatctgtatcccctcgcaaccaacaaagctatgatgaaatgcagcccatgatcattctttcattcacccataagcttctccacctaagaaaaccattgtactgatgaaaccattttaagttccttcccttagagtccctccattatggcaatggcaaatggcatgaatcac

SEQ ID NO: 4323 - DNA, 505 bp, Glycine max
  Clone ID: jC-gmfl02220063c10a1
cagtgagtgatcggtgttcacttgatccttcataagtcgtcatcatcatcatcatcatcaccgttgattgaagaagatgccgatcagaaacatcgccatcggaaggcctgaagaggctactcaccccgacacgttgaaggcggggttggctgagttcatctccaccttgatcttcgtgttcgccggttcaggttccggcatcgcctacaacaagctcaccgacaacggcgccgccactcccgccggcctcatctccgcttccatcgcccatgctttcgccctcttcgtcgccgtctccgtcggcgccaacatctccggcggccacgtcaaccccgccgtcaccttcggcgccttcgtgggcggcaacatcaccttactccgcggcatcgtctacgtcatcgcccagctcctcggctccatcgtggcctccctcctcctcgccttcgtcactgccttccctgttccagcattcgggctttccgctggagtcggagttggcaacgct

SEQ ID NO: 4324 - DNA, 524 bp, Glycine max
  Clone ID: jC-gmfl02220063c10d1
gttaccggaaaaagtaagaagtactagtgaaatggtacaaccaaccagacccgaataatgatacatacattcaattcaattgtggaccaggtgagagcgagagcatgcacaaaatgataattaaattaacttaaaagaaaacttcaggatcatcaaccatccaaccaaagatcaacggccaccgattcaacaggaaagaaaacacaaaggaaggaaaaccatacacagaagaagattccggagaaattcaataatacacattttttttttttattatttcatttttcccctctagtagtcagtgctgggaagctgctcgtgggtgtggctgatgaagacaacctcgtagataagcccagcaattccacctccgatgagagggccggcccagtagatccagtggttggtccaggtccagctcacgacagcaggcccaaatgtcacagcagggttcatggctgctccggagaaggccccacccaacaaatgttagcgccaacaatgaaaccaatggcgatgggagc

SEQ ID NO: 4325 - DNA, 439 bp, Glycine max
  unsure (1)..(439): unsure at all n locations
  Clone ID: jC-gmfl02220063c11a1
cctctcttcactttcactctctctctctctctcagccatcatcatgggagcagtgattctcccagatctcggcaccgagattttgattccggtctgcgccatcattggaatagggttcgccctcttccagtgggtcctcgtctccaaggttaagctctccgctgccagagacgcttcccctaacgccgccggcaaaaatggctacaacgattacctcatcgaagaagaggaaggcctcaacgatcacaacgttgtcctcaaatgcgccgaaatccaaaacgccatttncgaaggagcaacctctttccttttcactgaatacaagtatgtgggaatcttcatggtggctnttgccattttgatattcctattccttggctctgtggaaggattcagcacgagctaccagccttgcacctatgatcatactaaaatgtgt

SEQ ID NO: 4326 - DNA, 310 bp, Glycine max
  Clone ID: jC-gmfl02220063c11d1
gggacaaagaaaggtgaaccatgcggaaaggaatatatttggaaaatcgaccacgcggaatagatgggaaacatactggacattatgctaggtaaattttgataaccgacttaacctaatcaagatgtcttaaacctccttgagacaatatatactttgatcaaaggctgggccagaaacggctataaacccaatgggatatgagatgacagctggagtaagagactatcactaaccctaggatgcatcctgaagggcctgatgctacttgggaaggctgattcaaatgatgaccgccaatactatgttt

SEQ ID NO: 4327 - DNA, 470 bp, Glycine max
  Clone ID: jC-gmfl02220063c12a1
gcgagcctcaccgccgcgagaaattgacaaagaaatcgtcgtccttctacggtcactcatcgccgccttccatgtccggcgaaccgatccggcggccgaagacggtgccggatcttttgtcggagaggcaccgcgcggctttagcgacgccggcgacggatgttgtgccaaaacagccgccaaagttgttgttgaaggttactcccatgggaagcttgggaccggtgcaggttgtgatgacgccggaatcgacggtcggagatttagtggcggtgacggtgaggcaatacgtgaaggaaggtcgccggccaattttaccgtcgaacgacccttcgcacttcgacctccattattctcagttcagcctacaaagttcggatagggaggagaagctgatggatattggatcgagacacttttttctgtgtccgaggaagtgtggtggtaatggggacgcaggtagtggaacg

SEQ ID NO: 4328 - DNA, 462 bp, Glycine max
  Clone ID: jC-gmfl02220063c12d1
cccgacatctaaatgtcaaacatcagtgacttttattacgcaagagtctagacattatacccgtgtcaaacatcacagacgtatttttttacaagcaacagcaggccattcactcactgatgcattctaaaattaaaattaaaaataataaaaaaatatctccaaataacatgtggctggcatgggcaaacactagtagcctccaataataataataatttttaccgagagaaatccatgaaccttaaccaaccaaacgcgccacccttgttcgttttgtcagcctctcttgaacacgaaccaaacggcgtcgttccactaccctcgtccccattaccaccacacttcctcggacacagaaaaaagtttctcgatccaatatccatcagcttctcctccctatccaaactttgtaggctgaactgagaataatggaggtcgaaatgcgaagggtcgttcgac

SEQ ID NO: 4329 - DNA, 420 bp, Glycine max
  Clone ID: jC-gmfl02220063d01a1
tccacttttcttcaaagtcttcatctcatatcctctttgttgtgtcctcacacgagtgtaggaacggcattattgtgatggagagccaggatctttcttcgccaccccacgtggacgcatctcgaccgtcccttgggttccccttgggcactgcccttctcttgatcatcatcttcaccttgagtggcgtcctctcttgctgctaccattgggatagggtgtgttccctccgtcaatctttctctgattccgaaccccaaatgccttcctcacccaccaaatctaagcactccaaggaattgaagcaaaacaggggacaaagcttgccagtgttgatgccaggggatgatgtgccaaagttcatagccatgccgtgtccgtgccagcctttaagaccagacagcatcgttgtcaccgtcg

SEQ ID NO: 4330 - DNA, 466 bp, Glycine max
  Clone ID: jC-gmfl02220063d01d1
gaaaggaaacttctggattatccatatcctcttcaagttggttacaacttttataacgtgaggacccacgcttaacagtaaatggttagctgctgttgctaagctctaactatatgaacaacacgtaactaccttccctgcctacgatctacccacagcttttaccccattccccaagcccttctatcctaattggtagatatcacaatgcttgggtagctgcttcgtcctagctgaatgcctctggtgcatagcttcatcttcaacgtgcgtctcagatgcaatatccaccatctagaaactgcttaatagtttagatactacacaaggatggattgaatcaaatgaaattgatctcaaaatctacgaattgacctgcaaccctacctatcccttattattttattttttttgcattttatttcttacactctaatttgggtgaacaaaatgaatatcattagta

SEQ ID NO: 4331 - DNA, 452 bp, Glycine max
  unsure (1)..(452): unsure at all n locations
  Clone ID: jC-gmfl02220063d02a1
gtttgttcagacaagacctccatgattcaattgctgctggtaactatcctgagtggaaactgtttgttcagacaatagatcctgagcacgaagacaaatttgactttgaccctcttgatgttactaagacttggcctgaggacattatacccttgcagcctgttggtcgcttggtcctgaataagaacatagataatttctttgctgagaatgaacaacttgcattttgccctgccattgtggttcctggtgtatactactcagatgataagatgcttcaaaccaggatattctcttatgctgattcacaaaggcacagacttggaccaaactatctgcaacttcctgctaatgctcccaagtgtgctcaccacaacaatcatcatgaaggtttcatgaatttcattcacagggatgaggaggttaattactntccttcaggtatgatcctg

SEQ ID NO: 4332 - DNA, 550 bp, Glycine max
  unsure (1)..(550): unsure at all n locations
  Clone ID: jC-gmfl02220063d02d1
aaatataaatactaacacatacaaacggcatttattgagatagctcaacgagttgcatgcatggagttatgggtacacaactaaaattgcaagaaatggataagttctttcaaattgatcgaaaatcacatccttatcgtactctttgcacgtctgcaactctaacaatcattctggggttggcaacaacattaaatatttggcctcatgctcagacgagatgctatcttttggcctagagaacggtcagcctgagaccagtaagatatccagacactgcggatttcatgggtgacccgtgggtcagataaagcatcaacccatcggcgattaaatctatcttgcctgtcaggtgcccaagatcggtatctctctccgggctgcttaaagttgttctccttctcaattccacacttttcacgccttccactgcagatagcaggaggtatggggaacgtttctgcatgacgaacaggatcataccttgaagggaagtaattaacctnctcatccctgtgaatgaaattcatgaaaccttcatgatgattgt

SEQ ID NO: 4333 - DNA, 416 bp, Glycine max
  Clone ID: jC-gmfl02220063d03a1
ctcgagaccagtactacccctctccccattctctctttctttgttgggacttccaccatgagtgacgccggcctctgccttccgccgcagttcctcgccggagacacccacagaaccctttcgaactccgatttcagcttcccttcggagttcccttacgagttccgagtgtcttctccgccctccacggagaccgagagcagcgacggcgaagaggacttgctcgccggcctcactcgccgactcagtcagacctcgcttcacgaagctcgcaagcagttctctactggttcggagattccaaggaagacccgtcagggtttggtcggttcccctcagtcgacgctcgccggaatcggcagctggtccggtctgagcaccatttcggcgaaggaagccccaacgggtacacgcgt

SEQ ID NO: 4334 - DNA, 393 bp, Glycine max
  Clone ID: jC-gmfl02220063d03d1
ggggaaaaaagccaattttattcccaaggaaggttaaaccttttaccaactttttccccaaaaattggggggggattttaaaagggggaaaccccccattttaaacccccggcttgaaacttggggaaaggtgaccccccccataccttgggctaaaacccccattagttttttccccctaacccttacccaaaaaaaaacccccccccttatcccaatttattccctttaaaaaaaaaagggggaaaaaaaaaaaaaggggaaaaaaaaaccttgccaaaaaaggggatcctttaaaaatttccttccggtaaaaacccggtcccaaaagctggaagggaacccctttttttctaaacttgccaaaaccatttttccaaattatttttttgg

SEQ ID NO: 4335 - DNA, 617 bp, Glycine max
  Clone ID: jC-gmfl02220063d04a1
gttatactttatgatctgtttgcagattctcgagcaccaatatctgcaccgcttcctttgctattaaggggtttccccagatccagcactttatctcaatctagtggtagagaaagtgagagcacagacggtaatgttttgagcaatcatgaagcagttacatatgccaatacatggacttttctagtgcctgacctcgtatgtgacgtggccaataagttattgtggaagttctatttagacttagaggcaatttctgctagtagctcagaggtcccatcagtattagagttcctgcagcggcggaagttggaagctaacaaggctaaacaattgtgcttgggtatagcacgtgcacttattctagagcataggcctgtgcctgtggttgccaaggctgtaaatgtactagtcacctcatactcccattcaattaaaactggtagcttatttaagggactgaaaccagagaagtcatcaacttctgttgtacaaaatactggtgctgaggtatctgctatcgaaacagatgtaattggcaaatcaatcattcatgaatctacgagaagagtagacagtggatctcttaatatagcgtcaactgtttcaagtttgga

SEQ ID NO: 4336 - DNA, 561 bp, Glycine max
  unsure (1)..(561): unsure at all n locations
  Clone ID: jC-gmfl02220063d04d1
aaacaaagtaaatttcaatgtaaagaatttcatttagatgacagtatctaaaactaatctaactaggaggacgtttatttaacctacaacatgaaactattaccaaatctattatgtatctaatagaaaccggatgtcataatgaggtaatcgacacggttgaacaagaatacccaatgataatgacctaaaatttctcccattttttacttctcaaacagtcgtggatgagttcatttcattcagtatgcagcagtatctattatggtctgaggtgtttttgaagccaggaaggaaatctgtaaagaatcttagaaccgcagcaagatgttgggagtcattggaaacaaatgctgcttctaagaacaatgatggccggatcgtatccaccctgtacttccgtgcatatcgtaaggcttcaaggtagtatccatcctgcacaagcagtaaaacataatcatgatgtaaaccaagttgtcttagcatatccagaccaagcttcctagnttgggcattctggcggccagactctagtaagtgtagtgcaactttttagaggac

SEQ ID NO: 4337 - DNA, 510 bp, Glycine max
  Clone ID: jC-gmfl02220063d05a1
tgcagtatttgtttgaatcaagaaacgatgtcactgttatgccatgtggacatacgatccataagagctgcctgaatgaaatgagagaacatttccagtatgcatgccctctctgctcaaagtcagtctgtgacatgtcaaaggtttgggagaaatttgaccttgagattgctgctacacgaatgcctgagcaatatcaaaataaaatggtttggatcctgtgcaatgactgtggtaaaacttctcacgttcagttccattttgtggctcaaaagtgtccgaactgcaaatcctacaacacacgacaaacatgaagcggagcacgtggccacgattattcattggcttcatcaaaagccttcactcgagagctctcttgatgttgcgtgactcgtgaaggcagtgaaaatagatgtgcatccattgggtacgtggatgtgcacgtgtgggaatttggagtgcatgatgagccacattcagagggataaaaataatggttcctacatgtga

SEQ ID NO: 4338 - DNA, 526 bp, Glycine max
  Clone ID: jC-gmfl02220063d05d1
atctataatacttatttattgggcttattcaaatataatacatgaactctaacactctggactattccaactactaggggagccccaacaaattaaaccaccccactccaaatcaacataagaaccattattttatccctctgaatgtggctcatcatgcactccaaattcccacacgtgcacatgcacgtacccaatggatgcacatctattttcactgccttcacaagtcacgacaacatcaagagagctctcgagtgaaggcttttgatgaagccaatgaataatcgtgggcacctgctccgcctgatgtatgtcgagtgttgtaggatttgcagttcggacacttttgagccacaaaatggaactgaacgtgagaagttttaccacagtcattgcacaggatccaaaccattttattttgatattgctcacgcattcgtgtagcagcaatctcaaggccaaatttctcccaaaccttgacatgtcacagactgactttgaacagatagggcatgcatacctg

SEQ ID NO: 4339 - DNA, 251 bp, Glycine max
  Clone ID: jC-gmfl02220063d06a1
atgcaatgcttcaaggaagtttgctagtcaattggttgaggaattctcaattctacatggtctctgtgattttctaatgcatgccaacttgatagtgtttttatgtctcaactgaatttgtctccagcttgtggctattttatgttattgcattcgggaatgtatatattctaggagtttgtctgagatctatgatgatgtgtttgttacaataatattaataataattggtacatcattgtgaataatat

SEQ ID NO: 4340 - DNA, 251 bp, Glycine max
  Clone ID: jC-gmfl02220063d06d1
atattattcacaatgatgtaccaattattattaatattattgtaacaaacacatcatcatagatctcagacaaactcctagaatatatacattcccgaatgcaataacataaaatagccacaagctggagacaaattcagttgagacataaaaacactatcaagttggcatgcattagaaaatcacagagaccatgtagaattgagaattcctcaaccaattgactagcaaacttccttgaagcattgcat

SEQ ID NO: 4341 - DNA, 539 bp, Glycine max
  Clone ID: jC-gmfl02220063d07a1
ctcggaattcggctcgagagagaatcgaagtggcacctgctgtatggatctggaaaatttgaaacaacagttctgcatgtaggaaatcgcatgcacaacctggaactttgagcaagttgaagctgaatcttttgaagaggcatagcttgcatgtagaagttcaaaaatacttctacaaggttgttctgaccatgaaatattctataacatttataacagagaaacttgactacctctagcatacaattaagaagctgcttaagatgaaggacacattactaacattacggacatgtattgtatacaacttgttaaagccactgaaatttctggtgtcttggagtattttgtgatttgtgatttgtcatttttattttattctctatgcagtagttattgtgttttcagtctaaagtgcaatgagttaagctttgtaattaagttgcgcgggtggctcattaagatgttacgtagaagtaacttacgctctgtttggaagccatattgtatcagaacaaatgcattctgctgtatgactg

SEQ ID NO: 4342 - DNA, 421 bp, Glycine max
  Clone ID: jC-gmfl02220063d07d1
cattcatacagtaaaatgcatatgtttatgatacaatttggcttacaaaacagagcgtaagttacttctacgtaacatcttaatgagccacccgcccaacttaattacaaagcttaactcattgcactttagactgaaaacacaataactactgcataaagaataaaataaaaatgacaaatcacaaatcacaaaatactccaagacaccagaaatttcagtggctttaacaagttgtatacaatacatgtacgtaatgttagtaatgagtccttgatcttaagcaggttcttaattgtctgctacaggtagtcaagtttctctgttataaatgttatagaatatttcatggtcagaacaaccttgtagaagtatttttgaacttctacatgcaagctatgcctattcaaagattcggctt

SEQ ID NO: 4343 - DNA, 560 bp, Glycine max
  Clone ID: jC-gmfl02220063d08a1
caaccaagcttctctgttagaacaaaaaaaataagaaaaattggcgtcataagggccaaaggtgggaaagttgaagttttttgttgaggtgaaagtgaaatggttggcaaggatagtctgagggctgaggacttgaacttgtgctttgagaaacttatgatggtggctgggagtgggaacggtgagaaaggggtgaactcgaaggttggggtgatcaccgagtggaaggacattcctgtggagcttttgatgcagattctgtcccttgtggatgatcagacggtgatcacagcttctggagtttgtcgtggatggagagatgctatttactttggacttgctcgtttatcactctcatggtgtagcaagagcatgaataacttggtcctatctcttgttccgaaattcgtaaaactgcaaactctaatccttcgtcaagacaagcctcaactagaggataatgctgtccagactattgcaaaatgctgtcatgaactgcagattctggatctcagcaaaagtttacgcctactgatcattactctatgaacctgccttgt

SEQ ID NO: 4344 - DNA, 320 bp, Glycine max
  Clone ID: jC-gmfl02220063d08d1
gttaacactttcgtttattttttgtacaaaactacgaaatatgatgatggacacttctgaggcctataagtcacaaaaccgaggaaactaggaaaaggaaaaaggaggaataccctgggaaacagaaactggaaagactaaaaagaggggcccaaaatacaataccatagggcaaaagagggaaaagcaaaaccaggatgaaggatagggtgcggactcttgagccccccgggaaagcttgacctccaagagctcccgaataaaatcctgccatgatgaagcgcaaagaaccaccaacctttgaagcactcatcgccgga

SEQ ID NO: 4345 - DNA, 602 bp, Glycine max
  unsure (1)..(602): unsure at all n locations
  Clone ID: jC-gmfl02220063d09a1
ctcggaattcggctcgagcaaacactttgccatctctgcaaaaataccagaattcacaaacaagaacagaacattggtccttcagtattctgtaaaatttgagcaagagattgaatgtggtggagggtacatcaagcttctctctggatttgttaatcaaaagaagtttggtggggatacaccatatattttaatgtttggaccagatttatgtggcacggatacaaagaagctccatgtgatactctcctaccacggtcaaaattaccccataaagaaggacctgcaatgtgaaactgacaggttaactcatttctacacattcattctcaggccagatgccacatacagtgtcctggttgataatagagagagagattctggaagcatgtatacagattgggatattcttcctccacgaaaaatcaaagatgtcaaggccaaaaagcctgcagactgggaggaaagagaatacattgaagaccctgatgatgtcaaacctgagggatatgattcaatcccaagagaaattcctgacccanatgctaaagagcctgaaaactgngatgaagaggaagatgggaaatggaaaccaccaaaga

SEQ ID NO: 4346 - DNA, 363 bp, Glycine max
  Clone ID: jC-gmfl02220063d09d1
ccatggccctttgtatgctggatttggtatcttggggggtttccatttcccatcttccttttcatcccagttttaaggctttttaccatttgggtaaggaatttatttggggattgaatcatatccctcaggtttgacatcatcagggtcttaaatgtattctctttcctcccagactgcaggctttttggccttgacatttttgatttttcggggaggaaaaatttcccaatctggatacatgcttccaaaatctttatccatattatcaaccaggacactgtttgtggcatctggcctgaaaatgaatgtgtcaaaatgagttaacctgtcagtttcacattgcaggtccttctttatggg

SEQ ID NO: 4347 - DNA, 561 bp, Glycine max
  Clone ID: jC-gmfl02220063d10a1
gtttccttcccttccctaacgatctgaggaagacaccaagcttctctccacgcccttcttgggtaatctgaagtgcagcgatggcggatggattgcactcgcggcatccatcagtagttcagaagttatctggacagtcttatttgttgtctaggcttgcccctactcactcaagaaactattccacaactggtagttacttcaatggaggcttgcagtcttcgggtttggttccagtcatggcacatgcaccggctgagaaaggagtgtctggatttttgttggatttcatgatgggaggagtgtcggctgctgtgtccaagacggctgcggctccaatcgagcgagttaagttgctcatccaaaaccaggatgaaatgatcaagagtggtcggttgtctgaaccatacaagggaatcggcgattgtttcagtcgaaccatgaaggatgaaggggtgattgctctctggagaggaaacactgctaatggtatcagatactttcctactcaggctcttaactctgctttttaggattatttcaagaggcttttcaatttca

SEQ ID NO: 4348 - DNA, 382 bp, Glycine max
  Clone ID: jC-gmfl02220063d10d1
ggggggggggacaaaaaattaaaaaaaaaagggaaaaaaaaaaccaaaaaaaaaaaaaaaaaaaaaaaaaaaaagataaaaaaacaaaaaaaaaggggaaaaaaaaaacacaaaaaaaaaaaaaaaaaaaagaaaaaccaaaaaaaaaaaaaaggttgaaaaaaaaaggggagaaaaaaaaaaacccccaaaaggggggaaaaccaaaaaaccccttttttaaaccaaaattaaaaaaaaaaagggggaaaaaaaatatgggccaaaaaaaggggggcaaaaaaaaatggggaaaaaaaccccccccgcaaaaaccctttttttttcaaaaaaaaaaagggggagcttaaaaaaaaccgggaggcccctaaaccccggaaaa

SEQ ID NO: 4349 - DNA, 151 bp, Glycine max
  Clone ID: jC-gmfl02220063d11a1
caactttggtttagaaaaaacaaaaaagactatcctttgttacatctggatcagtctttctggaacagaaacctttgacctttatagtaaggagccaggatatgagaaaactttatccccgtggggatgcatataggcatttcttctttat

SEQ ID NO: 4350 - DNA, 151 bp, Glycine max
  Clone ID: jC-gmfl02220063d11d1
ataaagaagaaatgcctatatgcatccccacggggataaagttttctcatatcctggctccttactataaaggtcaaaggtttctgttccagaaagactgatccagatgtaacaaaggatagtcttttttgttttttctaaaccaaagttg

SEQ ID NO: 4351 - DNA, 137 bp, Glycine max
  Clone ID: jC-gmfl02220063d12d1
gtacaaacagcaacgtacatcggtgacgagagcaaatgaaaggcatctagcatcacagctttcatgtagcacgagaatattgtccacctaaattacaacagaatacacttcatcctattcttcgggggggggggggg

SEQ ID NO: 4352 - DNA, 517 bp, Glycine max
  Clone ID: jC-gmfl02220063e01a1
ctcaaatggaagaactgagcatgagattgaactctctgaacgaaatgataagtttgattaactccaccaccaccaccaacaactgcttgatgttcgatgaggcacaggagactacgactcagttgttcaatgattgtggcttcatggatgcttggaattacggaataccactcaatcaacaaatcatggcttacgctgacaatgacatgttgatgatgtattgattggtgaaattaattttgagttggagtttttgtgaatcctggtgctaatcctttgtaacacaactacaacacgtgtttgttgtctcttgttttaatttgtttttttgtttttgtttttcttgtaataagtaatgtctattggtttcagtttatgttatgtttagggtttgctttgtgtattttaagaggggttattctttcttctcgaaaatgtaaaaaatcgagcttttattttcatgtagtagtatatgtgatttcgtgatttccactctataattaaatctcagctatgc

SEQ ID NO: 4353 - DNA, 419 bp, Glycine max
  Clone ID: jC-gmfl02220063e01d1
gcataagctggagatttaattgatatgagtggaaattcacgaaaatcacatatactactacatggaaaataaaagctcgattttttacattttcgagaagaaaaaataacccctcttaaaatacacaaagacaaccctaaacataacataaactgaaaacaatagacattacttattacaagaaaaacaaaaacaaaaaaacaaattaaaacaagagacaacaaacacgtgttgtagttgtgttacaaaggattagcaccaggattcacaaaaactccaactcaaaattaatttcaccaatcaatacatcatcaacatgtcattgtcagcgtaagccatgatttgttgattgagtggtattccgtaattccaagcatccatgaagccacaatcattgaacaactgagtcgtagtctcct

SEQ ID NO: 4354 - DNA, 363 bp, Glycine max
  Clone ID: jC-gmfl02220063e02a1
ctccaatggaagaactgagcatgagattgaactctatgaactaaatgataagtttgattaactccaccactatcaccaacaactgcttgatgctcgatgaggcacaggagactacgactcagatgttcaatgattgtggcttcatggatgcttggaattacggaataccactcaatcaacaaatcatgggttacgctgacaatgacctgttgatgatgtactgattggagatatttattgtgagttggagctgatgtgaatcctggtgctaatcctttgtgacacaactacaacacgtgttagttgactcttgttctaatgagcttgtctgtgcttgatcatcttgtgaaaggtatgtctatt

SEQ ID NO: 4355 - DNA, 523 bp, Glycine max
  Clone ID: jC-gmfl02220063e02d1
gcatatgctggagatttaattgatatgagtggaaattcacgaaaatcacatatactactacatggaaaataaaagctcgattttttacattttcgagaagaaaaaataacccctcttaaaatacacaaagacaaccctaaacataacataaactgaaaacaatagacattacttattacaagaaaaacaaaaacaaaaaaacaaattaaaacaagagacaacaaacacgtgttgtagttgtgttacaaaggattagcaccaggattcacaaaaactccaactcaaaattaatttcaccaatcaatacatcatcaacatgtcattgtcagcgtaagccatgatttgttgattgagtggtattccgtaattccaagcatccatgaagccacaatcattgaacaactgagtcgtagtctcctgtgcctcatcgaacatcaagcagttgttggtggtggtggtggagttaatcaaacttatcatttcgttcagagagttcaatctcttgctcagatcttccatttga

SEQ ID NO: 4356 - DNA, 467 bp, Glycine max
  Clone ID: jC-gmfl02220063e03a1
gagttgatgacatcacatactggcattagtagaggttttgagaattctctagtaggaggttggagagagtcaattgcatctaatagataaggtccaccataccagttttttaaacgggcatcagaaggggatgccaccaaattttgattttccatagcaccttttctgttcaaagtgtggaggagatcatgaaaattgtgggagaggcaagggaccctcctccagtatctaggcttgtcaaaggttttggctgggagggcaaagaagatgaaggggaagaagacgtggaggaagaggaggatgaagaagacgagtatgacaagagggtcaaagaggttcatgcaagtggagaatttcaaatcagttaagcagtataataattcttgtgtacttggttaaagtattattattctttatgctagaagtcatctatttatgtgtactataatttataataactactataa

SEQ ID NO: 4357 - DNA, 399 bp, Glycine max
  Clone ID: jC-gmfl02220063e03d1
catctactatattactattaaaaagcattttaagctttaactatgcgggttacaacaggcatgagtaattttgaagtaatcagataactactgttctcatacacggcttccatggtgatacaggtaatactaatacattacatggaaagtgccataagttagactgcctcgatggtttatagtagttattataaattatagtacacataaatagatgacttctagcataaaaaataataatactttaaccaagtacacaagaattattatactgcttaactgatttgaaattctccacttgcatgaacctctttgaccttttgtcatactcgtcttcttatcctctttttctccacgtttttttcccttcatctctttgccttccagccaaaacttttg

SEQ ID NO: 4358 - DNA, 563 bp, Glycine max
  Clone ID: jC-gmfl02220063e04a1
cctcactctgccaactaaagagagtagaacactttgagcgaatggctacgttttcaattgggacacacacttgtccatgttccagcatttgcataattctagacttccacttcatggcttctgcaccgttgaatcatcacccttctttggctcctcttcctgcagaatctgtttcacaggtaccctccccacgttgctccgtcacaatgtattggcacgtgccgaagataaggccagagaccctacaccttcttcctttcagcctcaacaaagctcacagcaacagtttcagaacttgacaccagaatctgggagttgtgatcccctatgttcactcgatgaaactagctcacaagagtttgaagacagctaccagcccaagactgatttcctcaaagctgttgcaatattagcagcagctgcaactggagcactgacaattaaccattcatgggtggccactaatcaggatcttgctatggcattgctatttgtaataggatatgcaagcatcatatttgaagaatctccagccttcataaaaagtgagtgggactgttgat

SEQ ID NO: 4359 - DNA, 359 bp, Glycine max
  Clone ID: jC-gmfl02220063e04d1
ttgtcgtccttttttttttttttttttttttttttttttttttttattttttttagtgatgtatggattattttttctttttttactttggtttagaaaagcttcccggagaaatgaacaacaacgacaaccacagcgacagcaaaacaaccaaaaaaaccaagagagaaagaggcaaaaaaaaaaaaaaaaaagaaggcgacaaaaagaaaaaaaaaaagccaaaaagcaaaacaaaaagacagagagagacacccagagaaagggaaagcagggaccagagggaggaaaaggggaaaacgagcgaggagacaagaaggcgaagcgagcacgaaaccccgggacggaaacgcaggggc

SEQ ID NO: 4360 - DNA, 505 bp, Glycine max
  Clone ID: jC-gmfl02220063e05a1
ttgatgtttcggtggcgatgcttgctcgccctggtgcaaacatcttgcttccaaggccaggcttcccaatctatgaactttgtgctgcatttagaggggttgaagtgaggcattatgatctgcttccagagaaaggttgggaggttgatctagatgctgttgaagctcttgctgatcagaacacagtggcgttggcgatcataaaccctgggaatccttgtgggaatgtgtacagttaccaccatttggagaagattgctgaaactgcaaaacgggttggaacaattgtgatctctgatgaagtttatggtcaccttgcatttgggagcaagccttttgtaccgatgggagtttttggctctactgttcctgctctcactcttggctcactttctaagagatggatagttcctgggtggaggcttggttggtttgtgacacatgatccatctggcacttttagagaaccaaaggtagtcgagcgtatcaaaaagtattctgatct

SEQ ID NO: 4361 - DNA, 542 bp, Glycine max
  Clone ID: jC-gmfl02220063e05d1
cttgtgtagtatactagtagtaaagggccatttatttagtaattttacttataagtgaattcactatagctttacaattttcttgcatgcctttgatagaaagattttatccttctcataccctctccaagagcagatggatcagcagcgaaagtaatacgaagccaatcttttaggcctactgcagttcctggaagaatgatcacagattcctcctttgcaagtttgaaacagaagtcaatatcatcactaatatcttccagaagtgaaaggtttaatttcaccatcatagccatggatccttctggtttgtaagggcaaaaaatgcagggaatatcctctatctctttacaacatatatctgctgtatgcctcaaattatcaatggttttctcgaagaaaatttcttcggtatttgcaattatctgaggtacagcagcctgcaagaaggttgctggacctcctagaagatcaaaatactttttgatacgctcgactacctttggttctctaaaagtgccagatggatccattgtcacaaa

SEQ ID NO: 4362 - DNA, 585 bp, Glycine max
  unsure (1)..(585): unsure at all n locations
  Clone ID: jC-gmfl02220063e06a1
gagaaaaggaggagcaggaggcatcaccgttaccaaacatggtgaaagggcgccaaggagagcgtgttagactttacgtcaggggttcaatacttggatacaagaggtccaagtcaaatcaatacccaaacacctcattaatccagattgagaatgtaaacactaaggaagaagttgcgtggtactgtgggaagcgtatggcttacatttacaaagccaaggtaaagaaggacggaagccactatcgctgcatttggggtaaggtcaccaggcctcatggtaacagtggtatagttcgtgctaagttcaagtccaatctgccgcccagatcaatgggagcaagggttagagtcttcatgtatccaagcaatatatgaggttctcaggactcgtgagtcgtggagcttgttttgtcagggtatttgataggaatttatattatggtcttcttttctggtagctctcgagcagggtagtatccttgtttaggatgaagagaatgtaccgcatgttttttctttattctcactgccatggttattanggagggatatgagtctcaattcattaacggatttttttcct

SEQ ID NO: 4363 - DNA, 463 bp, Glycine max
  Clone ID: jC-gmfl02220063e06d1
aaggaaaaaaaatccgttaatgaaattgaaactcataatcctccctaataaccatggcagggagaataaagaaaaaacatgcgggacattcttttcatcctaaacaagggtactaccctggttgagagctaccaaaaaagaaaaacataatttaaattcctattaaataccctgacaaaacaagctccacgacttacgagtcctgaaaacctcatattttgcctggattcatgaagactttaacccttgctcccattgatctgggcggcagattggacttgaacttagcacgaactataccactggtaccatgaggcctggggaccttaccccaaatgcagcgataggggcttccgtccttttttaccttggctttggaaatggaagccatacgctttccacagtaccacgcaacttgttccttaggggttacattctcaatctggattaatgaggcgtttgg

SEQ ID NO: 4364 - DNA, 480 bp, Glycine max
  unsure (1)..(480): unsure at all n locations
  Clone ID: jC-gmfl02220063e07a1
cccctctcctctttctctctctttctaaaaaccagaaacaacaaacacaaaccgaaaaggcgaaaggggttttccgagtgagatctagggtttccatcgattcggagagaggatattgatagaacgacctcaacgagcaaggtcaggaggtggagtactagaacatggattcggtgccttcgaattcgcatggaaacctcgatgagcagatttctcagctcatgcagtgcaaacccttgtccgagcaagaggtaagggtcttgtgtgataaggcaaaagaaattttgatggaagagagcaatgtccagcctgtgaaaagtcctgttacaatttgcggtgatattcatgggcaattccatgatcttgcagagctttttccattggagggaagtgtccagatacaaattactcgtttatgggagactatgttgatcgtggctattattctgctgaaactgttancgctttggttgcccttaa

SEQ ID NO: 4365 - DNA, 506 bp, Glycine max
  Clone ID: jC-gmfl02220063e07d1
aaaaacaagactacctatattagaatataattctcacaagacgagtaaaaaatcataaattaaaagatatgttcaaagcattatcaatctacagaaacccacccccttaacaataatcctaagttgagaaaagaaaagtcaagagagttgcaaataaatagaaaaggaaaaaaaaggggaaaaaacattaaaactgatacattgcaagctggaatgatacacatgcccacaatagcatcgcctgctgctcagcttccacttggaaagattcagttataattcaagtaaacaacacatccaccgaagcctaacttcgaaaatataagtatcaatatgattcatggctctgatttggacaaggagatgagcttgcacattactgcagggcattagttgctgtgctggtaacagcaactcaaccaaaatagtatcataggaagtaatcaggtgttctcctggttacatctggctctcccctccttggagcttgctcaaactgaatgaat

SEQ ID NO: 4366 - DNA, 270 bp, Glycine max
  Clone ID: jC-gmfl02220063e08a1
cacaacggatcgtgatggatcatcttcaagaccaatggcggacaagaaaaagggcaggtgggaggaaggctaactctgaagcaaatgatgtaaagccatgtgctatggatgtggacaaggcaatggtatcttatctgacgtctggtacaaagtcaactgaaaaagatgattcagaggagactcccaagacaaaagtgccaaggagactcaattcacgaactgaagctgagtctaatgcgaaggaatatggacgaaaccttgctggcttac

SEQ ID NO: 4367 - DNA, 364 bp, Glycine max
  Clone ID: jC-gmfl02220063e08d1
aagccctaagcaatctaaaaacgttaattgggtggatagacactagtaagtagacattagtcaacctgtcagcatcagggagtgccaaagcattcgctaaattaagaaagctagcacaatattttcaggtgtataccttaaaatagcattcatctagtctactaaagaagatggaagagtaactagagatactaacccatactacaactaaactagcctaactgataactggagaaaataatgctagcaacatgaagatgattaccacaaacgactcagctacttgatacacggactaaatgcattcgaacactctggcctaaggaagaaaaaagttaatgctgtaagcacaagacaggcaccc

SEQ ID NO: 4368 - DNA, 487 bp, Glycine max
  unsure (1)..(487): unsure at all n locations
  Clone ID: jC-gmfl02220063e09a1
gaagccagcgagtgagtgagcgagccaggtagggttttcggtgttcccctctttgtgttcgttcgcgacgatggggtccatccccgatccaggcgagttgagcgagttgactcagccgagcttcgacgagttccagcgccaaacctctctcatgaccagctgcaccctcctctggaaggagctctccgaccacttctcctgcctcgagcaagacctcaaccacaaatccgaagccctcaagcgcaagattcacaccctcgacaactccacctcggactccctccgcctcctcgaccaccgcgaaacctctctcgacgccactctccagatcgccctccgcacgctcgacacgcgccgcaccgctgctctctccgccctcctccacgacgctgacgacacctnccccgacggcgaggtcgatgacaccgacggcctcgtcctcaagctcaagtccttctgcctacgcatggacgcgttcggcttcttc

SEQ ID NO: 4369 - DNA, 466 bp, Glycine max
  Clone ID: jC-gmfl02220063e09d1
ccttcaattcgatcccaagataagcatataatgtaaacacagtaagtctttctacaactaaaccgaacagtggtagttgagtttctgatgtttcttggccgtcctagttactttccacaatcacctagtactatgggatcaacattagaaatacaacttctccccatgccgagcaggaagtgggacagtagttataattaacacacagaactgctaccgttaaacggttagtaattacaaacaacattgcaaaagtaaattggatcaaggtcgtcatatcagtggttaccatcttcaaaggttgtcatttctatcggtagtaagcctgctgataagtgggagccaaaacatttccatagccgccatatgcatgaggatagttcatgggagctgccgggtaagaccctgcaatagctggtgccggctcgggtgaataagcagcataaggatttgctgggggacttct

SEQ ID NO: 4370 - DNA, 494 bp, Glycine max
  Clone ID: jC-gmfl02220063e10a1
attaattgcaagaatggcacttcgttgcttggtgatgtccctttctgttctcttcactcttggtcttgcgagagaaagccatgccagagacgaagatttttggcatgctgtttggccaaacactcccattccaagttcattgcgagatcttctaaagcctggccctgcaagtgttgaaatcgatgatcaccctatgcaaattgaagaaacacagtacccgaaaaccttcttctataaagaagaccttcatccaggcaaaacaatgaaagtacaattcagcaagcctccctttcaacaaccatggggtgttggtacatggttaaaggaaattaaagacactactaaagaaggatatagttttgaagagctatgcatcaagaaagaagccattgagggagacgagaagttttgtgcaaaatccttgggaacagtaattggttttgccatttcaaagctgggaaagaacattcaagtactttcaagttccttggtca

SEQ ID NO: 4371 - DNA, 517 bp, Glycine max
  Clone ID: jC-gmfl02220063e10d1
cacgagataaccactttttaccatatatatatagagagagagaatacgaagcacactgatcacaggatgatgctctctttaagtagggaagcagatcttatcagtacacataggtaggttgaaattctagctctagcaatctagctagagaaggtagtacttgcacaacacacagcacatgataatttattttatacacaatctcattctcatggtgctcaagatgcatggactaattaagcaacaatgttggtctgataggcagtgtccacagataaattgggtacccataaaatggccttgcttccaaggaaatggcaaacagggttagttccaggatcaactcccataagttgatgaagcatttgatgattcattccagaagtatttgagtggcaaatagcaagtgcctgagttttggttccatcaccagccaccaatggaaccatgaaagctgttgtttcacggacttcatggcagtaaaatactgcagttctgaaaattagcctatgacaca

SEQ ID NO: 4372 - DNA, 510 bp, Glycine max
  unsure (1)..(510): unsure at all n locations
  Clone ID: jC-gmfl02220063e11a1
ttgagcttttctttctttctctgctctcttttcttttaggtttccactctcacacactctccctcttctctttctctgcaataatctctcttctcttcttcactctctcaactcctgccaaacccccatttccgcagttcttaaatttggagtctgatgtctccgccattgctggttaccgaagatgaagggcagtgccatgcctcgatggtagcatctgcatcttcaccatccctgaactgtttctccctaaatgaggccggatttaaagaatgcaattacctgggattgtcagattgctcttcggtggacagttctactgtcccgaatttgtctgatgagaaaaaggagaatctgaatttgaaggctactgagttgaggcttggccttccgggatcccagtcacctgaaagggagacagaactnttctcgttgagctcaacanaacttgatgagaaaccactgttccctttgcttcctacaaaggatggaatctgctcatnggctcaa

SEQ ID NO: 4373 - DNA, 521 bp, Glycine max
  Clone ID: jC-gmfl02220063e11d1
gattgcaacatacattcaacttatccaaacaaacatgttcctataaagattacaagctccacaattactaatattcaaggtagcttcataaggtattatagtagaaacaaatgtaacacaaacaaaagaccaagacactattatgatacttgtaaccatagacaacatcttgaatagcagttaaccatcaaaacccggcattcagtcatttatatcataagttctctttccacactcttcatgttccaataccaactagcacctgctcctggatttttccatggccctgggagctaagccaatggcatcagaacccttcatgattttcagtcttttgcatgtgtcaatgaacatatcccatggtacatctccgacaagcatccagtcaccatctttatcttcataagtgagtacatattctgaaccatgcaggaggtccttcagcttgctctcactcaacatttctcttcctggagctccatgggaaccacattgacctagagtgaaacagctgaacattt

SEQ ID NO: 4374 - DNA, 465 bp, Glycine max
  unsure (1)..(465): unsure at all n locations
  Clone ID: jC-gmfl02220063e12a1
ttcttttttctctttagcgtttggtaagggtgcctatatttattctgcattcgtcctcgatccttaggcggagatttcaaacacaacttcgcttattaaatctcttcttccaattccttctttcattcattcccaggctgagatggcagcggcaccagcagctaccttcactattggaaccaccggttccctaggccaaagaggaaactcgcttcctcaattaaagtcttctgggttgaaattcaactcccagaatcatttgaagagcttctgcggcctcaaggccatgtcatccgtgagatgtgagtcagattcgtctttcttggttacataactggtgctgctctgcgggcgtctnttgcatccaaggctcanaaggacaacgaccaaaacttcaactacaactcgcagcctcaggcttcgtacaaagttgcaagtcttggtgcttgctgagggataggtcag

SEQ ID NO: 4375 - DNA, 449 bp, Glycine max
  Clone ID: jC-gmfl02220063e12d1
caaaaacaacttttacgttttccaattctacattataatggtgacatctttgaagattttcgaccaaaacctaagctctgtatagagaacagaaatggaagctccgtcccgttctactaacaaaactggaagtagaattgatagttgatcctatagaaagtttgaatcctaagttctggaagcagtaaagatgctacaacaaatccgcaacctaagttctctaagtagtatttgggctaaaaataaatccataacccaagaaaccacccgttgaaaaaaaattaagcagcaacagcttgcttctgagcaaaagcaatccccttctctatgctggccatgagttctggcttaagtgattccaaagccttctgctcatagtcagtcaacccttggaggtcagatggaattaatgcctaaactcctttcctaccaagcttcacccttgaagc

SEQ ID NO: 4376 - DNA, 318 bp, Glycine max
  Clone ID: jC-gmfl02220063f01a1
cgccttggctgtagtatgattttgaaacccccacccgttcttatggtccatggttcctccagcgttctatgattgcgagtcccatttcattaggggatgatgatgatgcccatgaacgccataactgtcacgctactcttggaaagagtccagagccatcactgtcgtggagtggctctatagctcgttatacctttcgcatacaccagcttcaactatgctattcaaaccacagatgttatcttgtggccgctcttatgtgggtcaattgcttgaaccctgccacttccgtaccttggcaattgcagccctccagtt

SEQ ID NO: 4377 - DNA, 385 bp, Glycine max
  Clone ID: jC-gmfl02220063f01d1
gcaaaaactggttatgctacaccaatctctatctattatgaagtatatctacatgcagaatatgaaggcggacttaacatactttcaatattcaatctttactgtatgggctatgatagatggacccgtacactatggcacatgttacattcatcataccggaatgcatcaatgatcacatactactaaaatttgcggatgacttgaaaaggctacttatagggatataaagatctcgacttgcttgtacgcttgcaatgaactgaacgtgaccatagatctcgagatcaaccaatgtccgtggggattgcactgccttggctgtgggctggacatcagctatatttgacggagcattgttatccacgaaagccatacacagaag

SEQ ID NO: 4378 - DNA, 513 bp, Glycine max
  Clone ID: jC-gmfl02220063f02a1
cacatacaccaaaaccaccaaaggttgagcctactcattcaccaaaaccaccgaagaaaccaccatgcccaccaaaggttaagcctccacatgcaccaaaaccaccaaaggttgagcctcctcatccaccaaaaccaccgaagaaaccaccaagcccaccaaaggttgtgcctcctcttgcaccaaaaccaccaaaggttaagcctccttattcaccacatacaccaaagaaaccaccaagcccaccaaagggtaagcctccaccaaaaccaccagttaagccaccatgcccaccaaaggttgagcctactcattcaccaaaaccaccaatccctaagatgccaccacttgctccagttgcaatctacaagaagccacttacaccttcttgctacactccctaagttgccaccacttgatgcagttgcaatctacaagaagccacttccacctgttcctgcactccctaagtttccaccacttcatccagttccaattacaagaaccactttc

SEQ ID NO: 4379 - DNA, 482 bp, Glycine max
  Clone ID: jC-gmfl02220063f02d1
gttgctattaaatgagcataaatgaactcttattctttgaagagatattagaaaacttaactatccaatcacaatgcatttgtatacacatgaaattaattaaaaataaatacaatgatctgggttgtctaacttgccccgatgatgatcttcattcgagaacaacaatattgatcacactcatacttaacatcactttaaacttcttaatcatattgctctattatagtttaaattgtatttatattctcaccctaggctcatcacatgccctatccttccaaggctttattagcaacaaatagacttcctcaatatacttgatcatacggaaagcacaaaaaagaagacagaaaaaatgcatgcatattttgcagacccaacaagagttatgatttacctctgcaatattaatatataaagcctaaggatgagaggaagaaggtggtactgggaaccatttggggtgatggaaaaagtgc

SEQ ID NO: 4380 - DNA, 419 bp, Glycine max
  Clone ID: jC-gmfl02220063f03a1
tggctttcccctccaaggcgatgactagcaggttctggtgcagcgtaaatcgaatgcgagagttttgacactaaacaggactaaacagttgaatgccctctctttttatatggtttctcggctacttgaaattttttctgaagatgagaaagattctgatattaaattggttgtcgtgaagggaaatggaagggctttttgtgctggtggtgatgttgcagctgttgctcgtgatggaagtaaaggtgactggaggtttggtgcaaatttttttcaaagtgaatttaaattgaattacttgatggcaacatatagtaagccccaggtttcaattcttaatggaattgtcatgggaggtggtgctggtgtttctgtacatggaagatttcgtgttgttactgagaatacggtctttgcat

SEQ ID NO: 4381 - DNA, 516 bp, Glycine max
  Clone ID: jC-gmfl02220063f03d1
acctggaaactacatttattagagtatcatactctgattctcaacggtagacttcactagttttaaaatcttatcaattgtaacggtagcaattcataaactgccatacattgaaacatccaagaatcaattgaatggagcaatacgtgtcttccatactttgggcttgaaaatatgagaatgatgatgctttacagctttgaaatagcatatgtaggcagattattaaaccttttaggaagctccaaatctttccatcctttatcatcaagtttagagaagtaacgattaacatcgctatcactaagaagctccaatttggaaggttcccactttgggtttctgtctttatctatcagtatagccctacaaccctcgaagaaatccttgctgtagtgtccttttagaatatgacaaacaactctataatcagaaacaaggcattgtccaacaccttggagccttccttgtctaatcgatctaagaaagattttaaggcttgttggagatgctttc

SEQ ID NO: 4382 - DNA, 571 bp, Glycine max
  Clone ID: jC-gmfl02220063f04a1
tgagaatgaaactagcaagacccctgtggtttattcagaacaatgctctattggtagggatattaattctactcgagttgccatcttgagagatagggaaaaggatcgcagtgatccagattatgatcgtaactatgaaaggtatgctaggagtattccaacttcttctgttaacttgatgccttttaatttgcaacaagttcgacatccatttgtgcagtatgataatgcttttaatcagttgagtcagatgtcacaaaatcaagcttcacttggctatggacctcaaccaagccctatgatgaatccttttggtgtcacagggttgaatcaggtgcctagggatgctgcttatgtacagtggccaagtgctgcagtaatgtatgcacattcatatgaccaatttagacaagctgttttccaggctccatttggtcaacgcccattgagtttcgattattcgcagaattactagatgacgtttgggaagcagttttccatttggctgcataagttattttagctattaaggatttcagagttagatatacattttctggactggtataga

SEQ ID NO: 4383 - DNA, 588 bp, Glycine max
  unsure (1)..(588): unsure at all n locations
  Clone ID: jC-gmfl02220063f04d1
cacatataactcttcatatacttcaaatccaagtactttcactacagtcctgtataaaaatgtcgccaggaaataccaaaaacgccaaatacttgctaccaccatcaaaacttaaaaaccagaataggaaacaaggatctataacagtacagaaaaattatatctaactctgaaatccttaatagctaaaataacttatgcagccaaatggaaaactgcttcccaaacgtcatctagtaattctgcgaataatcgaaactcaatgggcgttgaccaaatggagcctggaaaacagcttgtctaaattggtcatatgaatgtgcatacattactgcagcacttggccactgtacataagcagcatccctaggcacctgattcaaccctgtgacaccaaaaggattcatcatagggcttggttgaggtccatagccaagtgaagcttgattttgtgacatctgactcaactgattaaaagcattatcatactgcacaaatggatgtcgaacttgttgcagattaaaaggcatcnaagtaacagaagaagttggaaatactctagcatcccttcatagtacgatcataatc

SEQ ID NO: 4384 - DNA, 476 bp, Glycine max
  Clone ID: jC-gmfl02220063f05a1
cgtggtggtatcagcaaggcttcccgtgttatcaacattagtgaagatatctattcaggattcaattcaaccttacgtcaaggaaatattacacatcatgaatatattcaggttggtaagggaagagatgttgggctcaatcagattgcactatttgaaggaaaagtttctggtggtaacggtgaacaagttctcagccgtgatgtatacagacttggacagctttttgatttcttccggatgctgtctttctattttacaacagttggatactacttttgtaccatgctaacagtgttaactgtatatgcctttctttatgggaaagcgtatttggcactatctggtgttggtgaaaccattgaagaaagggctaggataactaagaacactgcactgagtgctgctttgaatacacaatttctctttcaaattggtatcctcactgctgtgccatgatcctgggctcattcttg

SEQ ID NO: 4385 - DNA, 534 bp, Glycine max
  Clone ID: jC-gmfl02220063f05d1
aaattcaaaactgatagtgcattgcattaaacccaatactacatgacgatttaaatgacatacactagaaaattgatgatacaactattcacaatgctgacgatttttacagaaatctaggcttcctacaagaagatttaccgactcacccccgcaaaatttaaaagacaccatagattgtatctcgtttaggaacaaggcctgagccaaatacaactatatcccagtattgggattgttcccagctagaataagagaaatttctaaccctcggctaaaagcctggttaaacattaggcgagtttggaatgttgatacaaatgggaaccacgaaaagaaggcaatgggtacaaagatgagcattcccataccagcatcatagaggcgagcaattgatcgaacggatttccatagtccgagcctcttcatcaccggcttccaggcagcagcaattgacagaattccccaaccagtaggaatgaaagccaacatagaagccaatatgtcccgtaaagacagttggtcaaatatact

SEQ ID NO: 4386 - DNA, 554 bp, Glycine max
  Clone ID: jC-gmfl02220063f07a1
cgcttgaggctaggctacctctgggacatttgtgctgctagttcatatatttgcggctgacaccgagaaggaaagcaggaaaacaacaaaaaggagcagatgggtagctcaggtttctcatggaaattggcggatcatccaaagcttccaaagggtaagactgtggctgttgaggtattggatggttggggagaggccacacccaatgagtacaactgcatccacaaggctgaaacaccctgcatggattcacttaaaaagggctgctcctgaacggtggagattggtcagggctcatggtactgctgtaggacttccaacagaagatgacatgggcaatagtgaagttggtcacaatgcccctggagctggtcgcatatttgctcagggtgctaagcttgtcgaccctgctctagcctctggaaaaatctttgatggagaatgtttcaagtacatacaggaatgttttgaaaatggcacattgcatctcattgggctactgactgatggtggagtccactccgacttgatcagtgcagttgttgcttaaggag

SEQ ID NO: 4387 - DNA, 286 bp, Glycine max
  Clone ID: jC-gmfl02220063f07d1
ccaggaaaaagcgccgaaatacccagaaaggggtacaccaggtctggaaaagaaaaacgagaaatgctgaagatactagaacaaaaacccccccgattgggcaggcggcaaacacttgagtgctttagggggacacaaaggttcaccccatttttgccaaccttaaaaaaaaaaaaaacctacttcgggttacaagccatgaaaaactctggccctacaagcaccgaataaactggggcaatcaacacgatcaaaggtctagcccaggaaacaccacagggcaaat

SEQ ID NO: 4388 - DNA, 485 bp, Glycine max
  Clone ID: jC-gmfl02220063f08a1
ctcggaatacagctcgagctgtgtcgttcacttgtttggtctctttctttcaaccttaacccttccaaaccaacacatataaaaatcaaccctctcttcttcttctctctccgcgggttgagttgaacttcaagaacctcataaaaccctttctctctctctctctctagatctgttcaaatccgaaaccatttccgctctaatttccaagagcaaaccctaatccgctctctctgtatgatactagatttcccctcctcaaaggcgtcgctttgtgtcgatttgtaaattcattcggtagtttaggttagaatttttgcgtcaagtctttagggttctgaatcggtgagatgaatcacaacaacagcaacaacaatagagcgaggtaccctaccgggatgggacttgagcgcggtggtttcaatccgaacctgagccagaacccgaaccagaaccagaacccgagcctgaaccaagatcatcac

SEQ ID NO: 4389 - DNA, 291 bp, Glycine max
  Clone ID: jC-gmfl02220063f08d1
aatcttccttaaaccattcaattttaaaactccattcttaaaaacttgtattgacggattaattctgcaattgtaaaacggaaccccaaactgaccccattacctattggcctaataaagcgccattttaacctttttaaaggcttaaacagggttaagggtctccaaaacccagattatatgtgagcgctctcatatgggggatacccccattttgacagagcatactctcatgcccggttgcaataatacacaatttgccactagcttcttagcagatcttatcaccct

SEQ ID NO: 4390 - DNA, 563 bp, Glycine max
  unsure (1)..(563): unsure at all n locations
  Clone ID: jC-gmfl02220063f09a1
gttcctgaaaacattttatccgctagacgtcgtagagaattgagaattctaatttgtttaaatccaaataatataaatagtatgcatagaaacacaatattttataatccaaataaagtccaaaatggttttccacttttgactaaaaaaagaaaatattttgagaaagataaaaaaaaaactaatgaatttcaaaatttttctttggccaaaatatcgattagaagatttagcttgtataaatcgatattggtttaatacccataatggaagccgtttcagtatagtaaggatacatatgtatccgcgaatgaaaattcgttaatccaaatttgtcttctatttaccatatttatatggtaaatagaagacaaattaatatctatatctatctatatagatagatatagatacataacataaataaagacacgcattatggtatggcattgatactaattcactgatatataccttagataaaaaaagaatccacaaaattatgttttttttaagtataccattttttatggtgaatctattaaaaaaagctnctttatatc

SEQ ID NO: 4391 - DNA, 591 bp, Glycine max
  unsure (1)..(591): unsure at all n locations
  Clone ID: jC-gmfl02220063f09d1
ctgtgtaaataacccaatataggttcacaatcaataacatcctcaccgtctagagtaacaataagtctaagaacaccatgcattgatgggtggtgaggccccatattgactatcatgaagtcctttcttgtagttgagatattcataggtttttcctcgatttatttttttatgaatcgcttaaaaaaaaaagttcatcaaaattcaagatctaataaatcgaataattgagaattactcttcaatttaacgaatttgtgactctcgaatatcaaactgatttattaattttttataccgtattctatctttctttgacaaataagacagcaatctttgtcgttttcccaaaattttacgtaaacctctttgagataaatagtcttttcggtgcaattcaaaatgtgaagtaagtcttcgtattctatcggtaaatttgaatatttgaaattcaaccgatcctgggtttttttcttttttttcttgtgaaataacaggtataattgaattttttaccataaaaaaattaaagtntttcccttctcttcgcttttacttttgatagatattttgattgatcagaatagtaat

SEQ ID NO: 4392 - DNA, 560 bp, Glycine max
  unsure (1)..(560): unsure at all n locations
  Clone ID: jC-gmfl02220063f10a1
atttctcagtcatggattctctgtctcttcttctctccccttatccactctccaccaaaacccacaaattcagcaccttgaaacccttctctcatttctcaaaccctaaaataccaccttctcaaccccattcaccctctctttctgcactccaaacaccttctcttaactccctccaaaacccattaacaaaacctttcttatcatttaccatgctcaacctcttcactccacttccctgcctcgctgacgtagcctccgacgacgccggaaaaataaacctggaatcggtgctggtttccatcgacaacttcttcaatcggtacccgtttttcgtcgccggttgcacctttatttggctggtggtgattcctctggcggaagagtacttgaagaagtgcaagttcgtgtcggcgattgacgcgttcaggaagctccgcgatgacccgaatgcgcagctgctggacataagggacgagaagaacgtgaggtttctggagtcttcgaaattgaaatgttcgagaaggaagtgcgcanngtcgagtcgctgaggatgggaa

SEQ ID NO: 4393 - DNA, 503 bp, Glycine max
  unsure (1)..(503): unsure at all n locations
  Clone ID: jC-gmfl02220063f10d1
aagagtatatatactaaatatctagattgattctgtttgtacagtgtttatggattgcatgctttacactctataaaactcaacaaaaaggttgaaaaagaataattgtaagtttagaaataaacgatttcacagtcaccaaattgtatttctgtctttacagaaatcatttctgccaaacagatgtcagccgagcatggtataacaaacagaactattgtggctttgacggagttggagatgatggtggcttcaaatccgggtaattgggataaggagaggaggatgctacagaaccagttttcacttctgaaataaactctacagagcttttcacatgaccatcgtctgttgtttggttttcaacagaagatctatcttgggttaaggaactattattgttactatcattttgctggatggctccatttncatttgnatngagtttctttgaagcttttacccctttncttatatgcacagaagggggcaaaagggaatcc

SEQ ID NO: 4394 - DNA, 542 bp, Glycine max
  Clone ID: jC-gmfl02220063f11a1
atcccttctcaagccaccgaagcctcactttttgaaattacttgcatagatagataatcatggctatgatgaaacgtgctgcttcctctgcgcttcgctctcttattgcctcatcctccaccttcaccagaaaccttcatgcctcaggtgaaaagaagaagattgtgggggtgttctacaaagggaatgaatatgctaaattgaatccaaattttgttggatgtgttgaaggtgcattgggaatacgtgagtggctggaatcacagggtcatcagtacattgtcactgatgacaaagaaggacctgattctgaacttgagaaacacattccagatgcacatgtcatcatatctactccattccaccccgcctatgtcaccgcagaaagaattaagaaagccaaaaatttggagctgcttttgactgctggcattggttctgatcatgttgatctcaaagctgcagctgctgcctgtttaactgtggcagaggtcacaggaagcaacgttgtgtccgttgcggaggacgaactcatgagaatc

SEQ ID NO: 4395 - DNA, 512 bp, Glycine max
  unsure (1)..(512): unsure at all n locations
  Clone ID: jC-gmfl02220063f11d1
ggagtgttccttaaacttttatttctgagatcaattaaacgagttcaaattcaacaaagcaagtgcattacataattagagtgccttctagatctttatttgctcatattcattggccttaaaattggaagattcaaaggccacattgacacacaccacttcatcggtattggctagcaagttgaccctccttcacaatgtagttttgttctggaaagtcttcacccttgaagtgcctatcaagcatgtctttgacaccagcagcataacgtaactgtgcatcaatggtggtaccagaaatatgaggagtcatggcatggtttggcatgtagcgccatggatgatcctttggagctggttgtgggaaccaaacatcaccactataacctgcaacgtggccactggagcaagcatcagcaattgcttgagtgtccgcaattgcccctcgagcattgntaacaatcaagacacctttcttgcacttagcaattctatttttgtcaaacaatccc

SEQ ID NO: 4396 - DNA, 364 bp, Glycine max
  Clone ID: jC-gmfl02220063f12a1
ttttggacttatccaaagacctacagtccatgacccattttgtcaagtaatgcttcgtgttggtgatttagagcgctcaattaagttttatgaaaaggctttgggcatgaaggtggtgaggaaggttgataagcctgagtacaagtacactatagctatgctcgggtatggagaggagcacgagacaactgtgttggagttgacatataactatggtgcgactgaatactctaaaggaaatgcttatgcacagattgccattggtactgatgatgtatatcagagtgctgaggtaagtaaccaagtcatacaggaggtggagggaagattactcggcaaccacggccaattcctgtcctaatac

SEQ ID NO: 4397 - DNA, 506 bp, Glycine max
  Clone ID: jC-gmfl02220063f12d1
gataaactagtagattaatcataggtagcatgcagaatgaggtttcaattgcggttttaagtcaacaaaagaacccataaaagcaagaaaacaagttgatgactggtactgatacaaaacgcacaatgataaaatgcgagacaacttattcatacaaaagcagcaggactacttatttcatataaagcttgctcttcacttcagttcttccaaaaaatcaacgttgtcaaccaagacagttttccatccatctggatctaaaaacgaagtggtttttgtattaaggccaggaattggccctggttgccgagtaatcttccctccaacctcttttatgacttggttaactacctcagcactcttatatacatcatcagtaccaatggcaatctgtgcataagcatttcccttagagtattcagtcacaccatagttatatgtcaactccaacacagttgtctcgtgctcctctccatacccgagcatagctatagtgtacttgtact

SEQ ID NO: 4398 - DNA, 474 bp, Glycine max
  Clone ID: jC-gmfl02220063g01a1
gagagtgtgggagattgcgatgcccatcgttttcaacatatggtgtcagttcggtgtcaactccgtcaccagcatgttcgttggacacctcggcgacattcagctctctgctatctctctcattaactccgtcattggcacttttgcctttggtttcatgcttgggatggggagtgcaactgagacactctgtggacaagctttcggagctgggcaggttaatatgcttggtgtttatatgcaacgctcatgggtgatattatcggtgaccagtatcttgctcttgcctatatacatttttgccgctccaattttgaagcttcttggtcaacaggaagatatagctgatcttgcagggagtttctccattttagtaattccacaatttctttcacttcccttcaattttccaacgcaaaagttccttcaagctcagagcaaggttaaggttattgcatggattgggttggtggc

SEQ ID NO: 4399 - DNA, 457 bp, Glycine max
  Clone ID: jC-gmfl02220063g01d1
gaaaaaaagactttgagaacttgactcgagtggaggtggaagatatacaagattatgcagaagccactatcttatcaactccaatgtcttgtccactccatatccgcatgcgttcagctgtttgttccacctctttcttccaattggttttgtaaagtatcaacaagagcagcaaggtctggagaacaattccacatatcataccaccccaaagtccctcaacccccaaatttgctgtataaccaagaacgaaccccagtggaagcccaaataagtaataacaacctatgttgatgtaggccaccagggcttgccacccaccttcaatagcaacacctgaaaccactggttgaacactgtttagaaccattgtcacagaaaggaggtatcctagtttcgcaacggccttatgcaaaacctcactggttggaaaaataatggcataataatctctagt

SEQ ID NO: 4400 - DNA, 547 bp, Glycine max
  Clone ID: jC-gmfl02220063g02a1
ttccatttatagttgcagagcaagaagtttgttcggagatctgcaagctggaaaatgtgattgaggaagctgaaaccactgatgatatccagataaaaaaccaacatatggaagaaaagactcaagctttggatttcttgcaagaaatgggttggcttcttcatagaagtcatgtgaaatttaagctaggttccatggctcctttccatgatctcttccaattcaatcggttcgcttggcttgttgacttctccatggaccatggttggtgtgctgtgatgaagaaactcttggacattatatttgagggtggtgttgatgcaggagagcatgcctccattgagcttgcattgttgaacatgggtcttctacacagagctgtaaagagaaactgtaggcctatggtagaactactgttaagatttgttccagttaaaacctcagatggtgcagacagtgaaatgaagcacgttgccgaagcccctgacagattcttatttagacctgatactgtcgggccagctgggttgactactcttcatgttgc

SEQ ID NO: 4401 - DNA, 499 bp, Glycine max
  Clone ID: jC-gmfl02220063g02d1
ctaaaataatatattaagaaaaggtggaagcttacagcagaaaacacctgatatacaacattacattgccccatactctaatgattcccagttgaagggctggaagacataataaactctaggtgagcttttgaagagcaaagctacacagacacacacaactgctatggtcaccatggagagcatgactggcctataaaccattgctgttttcatgccaccataagccaccttctgctggcatgccctacattgacggggcattgctgtggtttcaatcttctcagtctttaagcttggaactctacatgtcctatttccatctgattgcttctgcgttgtgttactatctacaacagttccagggatatcaaccaaatgttgtctttcaccttttttgatggtcttgttctggactagttgaatgtaagagtaatagcccctaaggcaagcatggtcgttaggggtcaaacctgtactgtcccgggcacttttccat

SEQ ID NO: 4402 - DNA, 452 bp, Glycine max
  Clone ID: jC-gmfl02220063g03a1
aaaaaaaaaaaaaaaaaaaaaaaaataaaaaaaaaaaaaaaaaaagaaaaaaagaaacgaaaggggaataaaaaaacccgaaaaaaaattcaattccgagtctgggcggcccgctacttggggtctttttaccccgggatttaattctggcccggtccttgctgggggcctcctttcccctatggggcgttgctttatggttggcgggccccctggcattcgttgtctcctgggggaaattttttcccgctgccatttccccccaacttcctatccgtgagtctcattgttcaacccgggggcgcttcatgcgggggctccccttcttacttgctttgccctcactgccccctttccaggggggtacccttttgtgcccctcggttttattgattggtcccctccgcggggggaggccttttgttttttggccccccgggaggttttccttt

SEQ ID NO: 4403 - DNA, 451 bp, Glycine max
  Clone ID: jC-gmfl02220063g03d1
agcattatcaacatacaccaacaaaataaaatgcacttgcacagcaaaagcatattaggtcattctcccagctaattactttgtgcaacacaaaataatagcgagtttacagaaaaactttgtctttttgcatttatttgttggcaggagtcgggaggagacgaactggagctctaaaagcataagcctaaatgcatatttaagtaccgaaacaatactcccattgtgggaactcggtaccttctggagcactgccttacaccttggttgatcccacttctttccaatcagttgatagcactgttccatttgactccaagaaagacttgctcattgctctcctcatgtcctcatctgcattctggtacatatcacggaacgatttaactcgaggagcatcaccatggagctgttcattttgtccgcttttttcacttgagctaccaactta

SEQ ID NO: 4404 - DNA, 580 bp, Glycine max
  Clone ID: jC-gmfl02220063g04a1
ttctgaatttgaatggaaacacgtgctagtggtgatatgaagatggccatagatgatgctttgaatggcttctctcctgtctccacccctaggattttctggaaatcacgaaggagatcagctagcgggaggaatttagaggtatcagaagatactgctaataaaccacccagcaagcaggaagatactcctccaccttctagtgaggaggtgcagaacacgactccgatttctgagcgccgaaaggctctgtttgaacctttagaacctataatgaatattaatggccgacgaccctcggccgagtctttacttcctcctcctgactttgagtctgcaaactatccgaagggctggctgattggcaagaagagaaaactcgttaatgtcgatgttgttgaaagcatgagaaggattgccatccaagaaatgaacagaaaggacagggaaattgatgggctgaatgaacagctggaggaggattcacggtgtctagagcacttgcaactccagcttgtggatgaaaaaagcaaacgcgctcgagtgcaaagagaaaatgcaatgctgcaagaacaagtga

SEQ ID NO: 4405 - DNA, 524 bp, Glycine max
  Clone ID: jC-gmfl02220063g04d1
gatataaacgaatagtttgctcattgcggtttgatctatttccccacaaatattaatatatgcactctatttttataactgcagagacatccgacatgcgcagccaactagacatgacgaacaaaacctacaaaaagaatttaatacacacaagcaaacacacacacacacacacacggtataataataaactttaaggttcatctgggccttcatctcccatttgttctgcttcttgcaacatgttcataagcatgttcacttgttcttgcagcattgcattttctctttccactcgagcgcgtttgcttttttcatccacaagctggagttgcaagtgctctagacaccgtgaatcctcctccagctgttcattcagcccatcaatttccctgtcctttctggacatttcttggatggcaatccttctcatgctttcaacaacatcgacattaacgagttttctcttcttgccaatcagccagcccttcggatagttggcagactcaaagtcaggaggagga

SEQ ID NO: 4406 - DNA, 494 bp, Glycine max
  unsure (1)..(494): unsure at all n locations
  Clone ID: jC-gmfl02220063g05a1
atcatcacacacacatactaagaagcaacaattcttctacaatggatctcctccttctggaaaagaccctcataggtctcttcctcgctgcggtggtcgccatcgccgtctccaccctccgcggccggaaattcaagctcccaccgggcccactccccgtcccaatcttcggcaactggctccaagtcggcgacgacctcaaccaccgcaacctcaccgatttggccaaaaaattcggtgacatcttcctcctccgcatggggcagcgcaacctcgtcgtggtttcttcccctgagctcgccaaagaggctctccacacgcagggcgtggagttcggctcccgcacccgcaacgtcgtcttcgacatcttcaccggaaagggccaagacatggtcttcaccgtctacggcgagcactggcgcataatgcgccgcatcatgaccgtnccctcttcacccacagggtgtgcaacaataccgccatggatgggaatc

SEQ ID NO: 4407 - DNA, 218 bp, Glycine max
  Clone ID: jC-gmfl02220063g05d1
catatgtgtttttttttttgttttttttttttttgtaggaacaaaaggggggggtcatttaaaaacccctcccaaaaccgggcctaattttgaggccaaaggttgaacaaccccatttgcgggcccttattcattcccaatttgggagacaccccatttttaaggatgtgggccatgcgcttgaacaaaagggggaaatcaacgtggggaaacctaag

SEQ ID NO: 4408 - DNA, 523 bp, Glycine max
  unsure (1)..(523): unsure at all n locations
  Clone ID: jC-gmfl02220063g06a1
gaaaaatgagggtgctgttgctttcttgatttgtttgtgtgcagttggtaatttttggattggtttatcttgtggatcaccttagctttttgcttccacagatgaggattggactcaggatacttgaagactaaccctgttcttcttaggacagtgtatgggttggaataaatgaagccgcagctcaaaattgctcttgctttagttgttagcttgctttggattcagcaatcattttgtgatgaaacttctgatacatctagcttaaacaagtggaggtgtagatgttctttccaagggaaccaaagctattctcttgctaattgttcaaaatcatgtgattgcttctcagattctgaagagagtgcatctgtatggacatgcgtatgtgattccaatggatttccccaagtggcagcagatggtcatagctcccaatgctttaatgcttgcaactgcacttggngaaccttcagcaggccgggaggttcaaagagcatgttccagcaagatgggtgagtta

SEQ ID NO: 4409 - DNA, 552 bp, Glycine max
  Clone ID: jC-gmfl02220063g06d1
gtgaccaaaacctttaatttaatgtgtatgtcatccggttcctctccaaataaagaagaaccagaatttcctatcatcctatgattttctgtacaagaaacaaacgaatacttttcagtgctcatcaaacaacacctgtgagcttttcctttcaaaacatgaaaaaaacatgtagaccaagataattaaaacagaataattgcagcatctcttatgatatctcatagagccatgcacagtgacgggtggtagaacaagcaacagaggtgtaccaccagttcacacaacataaactcctcaggcttctgccatctgcatctctctgcccgtgccgggtgtatatttttcatggggcattgccatttgtgatgcaaaatgattcaaacctaggctcagtcaggtctactatttcctcttctgatgcacgagaaccgtcagatttcgaagtcaagaggatcaaactctccatattctcagctgaaactgcatcttctgctttggttttgttctcaacagaaaagatgtgatcattatatattgggcaatgaacta

SEQ ID NO: 4410 - DNA, 447 bp, Glycine max
  Clone ID: jC-gmfl02220063g07a1
cttcacttgcttgaagcaatggcctaagccttggcatcagtgctgctgtttctcctcgtagctgtgagtaatgtgtttgctgtagagcttgaacttgaaactcttccaccctcttaccctcaccctcaccctgttcactcccccacaccagcacctcttcacccaccagcaaatgctcctcacccacaccaccaccaccaccaccaccaccctccagcaccagcaccagcaccagcacctgttccttcaccttctcaccacaattaccctcctacccctgcccctgctaagcctcctactcaccaccatcaccatcaccctcctgctcctgttaatccacctcctgttccggttcatcctccagttaaacctcctgttccggttcaccctccagttaaacctcctgttccggttcaccctccagttaaacctcctgttccggctcac

SEQ ID NO: 4411 - DNA, 376 bp, Glycine max
  unsure (1)..(376): unsure at all n locations
  Clone ID: jC-gmfl02220063g07d1
catactagaactatccatttcatacgtactgtcactcattattgtgtatgatcaattcaagcccagagcctacaaacgcaaaaccacaaataaaaatgaagacaaacaaaacaaggccagaaagaaggcaaattagagacaacacagctctatcatataacttaaaataacttgaaatatgatatatccataatttcttgcatttaatggcaattgggctcaaatgcaagaggcccaacagtgtagagcacaaaaggaagcctcttagacaagaaaggcttctcgggcctgagaagagcaccagtgacaccaccatggagatttgaggccttaagcccataaggtgcactaaccaaacncacgttacacttgtggg

SEQ ID NO: 4412 - DNA, 468 bp, Glycine max
  Clone ID: jC-gmfl02220063g08a1
aatggcttctatacaatggccatatgagcatcttaaaacagctttctctgtttctacttttcatcaataccttttcctctttcttcttgttattgttgtgttaaagctaacaagaagacccaaaatcaaacccagtttcaatctgcctccctccccaagaaagctaccaatcattggcaatcttcatcaactaagcaaattgccataccattctcttagaaccctctcacaaaagcatggttctctgatgttgttgcagttggggcagactcgagccttggtggtttcatctccagacgcggtcagggaaatcatgaaaactcacgacataactttctcaaaccgacccaaaaccacagcagcaaaaaccttgctgtatggatgtaatgacattggttttgcatcctatggagaaagctggaaacacaaaagaaaaatatgtgtccttgaagctctgagccccaaagg

SEQ ID NO: 4413 - DNA, 362 bp, Glycine max
  Clone ID: jC-gmfl02220063g08d1
agtctataatttcttttatattttagccacactgatatttattgtttggatccggccctccttataacatagatcactttaaagtaaattaaaccatggatttaaaggaaaaaggggattggcttaagatgaagtgcctctttcttgtaggtaactaggccatatgtttcactcatgtctatgtcttgtccagatgtgtgagttgcaggcagcttccaattgaaccaataaagaaggttggccagaatatactcaacagaagcaagcccaaacgtcattccggggcatgcccttctccaaaaccaaatgtaataaattgcaagtcttggccattaaaatgaacccggctgttatcatgtctc

SEQ ID NO: 4414 - DNA, 195 bp, Glycine max
  Clone ID: jC-gmfl02220063g09a1
agcagaagttgctgtgccagctcctaaacagttgggatttcttctggagcagttgctgtaggacctaattcatctcccttaaatatgtttgcacaggagacgatttctagcactggggctggacttggatcgctagacttccttagaaataacccccagtttcaagctcaagctgccaaccacaggacatctagc

SEQ ID NO: 4415 - DNA, 274 bp, Glycine max
  Clone ID: jC-gmfl02220063g09d1
aaaaaccaaaccctccccctttttttttccaacaaggcccattaaagtttaaaaaaattaggggaaaaggggcccaacaaaactttgaatcaaggggaggaatggaagttaaaaaccctttttttggcccctaaaaatgaaaaaaaacctaggccggggcagcaaagttccccccaatgggatttgcaagcaaatagggggggggggggggtcttttactcaaagagagagggcccctaactccaagctttggcaggaaaacaaaagttttttc

SEQ ID NO: 4416 - DNA, 410 bp, Glycine max
  Clone ID: jC-gmfl02220063g10a1
cttttctctaatcttctaatctcttattttttttccccctctgttactccccgcttctctgaatccctttctgttaatcatctgtctttcaactcgtgattttttgggtttgcctcaccaaaaagattcaaactttgaaaatttttctcgaaagccaggtgttttcagaatcgagatccagctttttttttgtttggttttaaaaaattattattttctttcattcaaccgcgagggttgtttttgatccctcaaaagctctccttctttttttctttcttggatttaaggggttgtctattttaaacctctcccatccttttttgttgtaatatttaaaaaccacaggttgatggttttaatctaagatctgcgtgtgtagctggaaaattgaatttttatatggcagc

SEQ ID NO: 4417 - DNA, 435 bp, Glycine max
  Clone ID: jC-gmfl02220063g10d1
ggccaagcaagaaaaaaaaaaccagctgaccaagggagagagatttacatcatattgaccatcgaatagccaataagcaaatttaaaaaaaaaaaaagaaaaagaaaaaagactaacataatccaaatcctacaagtagcactgcaatcttcaaaaactcaattgcagcagccacaagagcaatcctaattataactaaattattaattacccacaagactagacataaaaataaaaaaacaaagagtcttcagagagaatcccaatcgatctcataagaaggaaacttttgcaaattaaaatgtgctgaagcatcctcccattgcggctcggttacatcaaaggtaagatcagacaaagcagaagaatccgcagaaccctcactttcaggagacagagcagcagcaccggaacccgaagcttcaggttcgggct

SEQ ID NO: 4418 - DNA, 490 bp, Glycine max
  unsure (1)..(490): unsure at all n locations
  Clone ID: jC-gmfl02220063g11a1
ttcatattcatttcaatggcaacttaaggttttgtcattacctgcaaagctgcggtggcctgggaacccaacaagcccttaaccgtccaagacgttcaggttgctccgcctcaggccggcgaggtccgtgtccaaatcctcttcaccgctctctgccacaccgatgcttacacttggggcggcaaggatcccgaaggtctcttcccctgtattctcggccacgaagctgcagggattgtggagagtgttggagaaggtgttactaatgttcagcctggggatcatgtcattccctgttaccaggctgagtgtggggagtgcaagacttgcaaatcggggaagacaaacctctgtggcaaggttcgctccgccactggagttggggtcatgctcaatgatggaaagagcccgttctccattaatgggaagcccatttatcatttcatgggaacatccacttttagtcaatacactggtgntcatgacgtta

SEQ ID NO: 4419 - DNA, 378 bp, Glycine max
  Clone ID: jC-gmfl02220063g11d1
aacccaaaagggatgcttttaagtattcattctttctgatcacaagtttgccaaaagattcgaaagataacatccatattatagaccaaaatgatcttacttacaaactataaccactcgagatttatttcaagttcaaactacaaccactaaaagaggggaaaagcaacccaacacatccattcctcacgaaagtagccaggctagcatagataacctcattcttgtgttgaaagcacacaacgaagacatcccccttcatgcaaaagatcaaaagccttgtgtgatctccgaaagggtcaaagtatgggtaatatactcatcaaccttgatttccttcttcaagtacttgtctacaagccaaggcacctgtgacct

SEQ ID NO: 4420 - DNA, 483 bp, Glycine max
  Clone ID: jC-gmfl02220063g12a1
cgaactgatctggatgacaaagacttagagtctagtcgcgacagggagtatagagatatagagagaagccgggataaggattacaaagacagaggaagggtgagggaatcaagggaacgggatagacaagacaggtttcaacttaatgcaattaggtccctcactctctcgtactgccatcaatccaagttggtgatgctgtttcaatataagattgtgattaatttatagaaggcacaaaatcttgtgttaatagcaattgggtgagattcattccctttaattaccatttccgtcaatccacgggtttgattctttgcctatgtcaggtggaattgggctttatacatgtaaagacaatttgctgccatgttgcgtatttaaggaacatgaacattgtgggttgggaaaatatggctgatgcaaaatggtattgatattttcaaatctgaactgctataaagaggttgcatgtataacaac

SEQ ID NO: 4421 - DNA, 474 bp, Glycine max
  Clone ID: jC-gmfl02220063g12d1
acatcaaaactttgtgattgctatccgccaaagttgaattacatcgatgtttctagcatcacaacccttgttccaatcaataaaactgccaagccacaacagtaataggacgcttatatcaaaccaaaatccccgaaaaaattattcaagtagtaactgcagcttttacacataagcacctttaacttatccaagacaaatgtgcatagctaaatctttttcaaaggaagccgttatataattctaaggatgattatttctgccacgagactcctcatcacacaacaaccgtgaatttatctgctgtctgggaatttatcctcgtatgactgaggcaccatgaagcttgcagtgatcatcttcccagcaaaccatcttccgtgcaaggactgctgtgcacttattgcagattgggtatcttcaaatcgtaaatagacaaaaccagcactcttcttatcaacatatatgtgtttt

SEQ ID NO: 4422 - DNA, 220 bp, Glycine max
  Clone ID: jC-gmfl02220063h01a1
tgcatatttttactaatcataatttgtgtataaaaacagactgatgaaatgatcagaaaaataaattttatgtgaatatgtgattccagttactcaaaaaaaaaaaaaaaaaaaaaaaaaaaaaaaaaaaaaaaaaaaaaaaaaaaaaaaaaaaaaaaaaaaaaaaaaaaaaaaaaaaaaagggcggcccccaactaagagagctttcaacccgggaata

SEQ ID NO: 4423 - DNA, 350 bp, Glycine max
  Clone ID: jC-gmfl02220063h01d1
cgggaaaccggaaaccccattccccaaaaaatttaattttccgaacatttaaacagcctggtttttaccccaaattttgattagaaaaaaaatccccccgcccccaattcccaacttacccccccccaccttccaacgtataaccccttcacaggggcccccaaatgcaaaacccggggccgcttttaaaaacccccctaccgggaaaaccctggggttccccaattttaagcccttgaaaaaaaacccccttttgccccctgggggaattccaaaaagggccccccccactggcctttccaaaaaaggcccatcccaaaagggaaatggcaccccccctgtacgggggc

SEQ ID NO: 4424 - DNA, 470 bp, Glycine max
  Clone ID: jC-gmfl02220063h02a1
aagtatttaaaactagctgctacttttgctttgagttaccgagatagagaaaatatgcttaagaggcttgttcacactaaaacaaactaaagcataacatatgaagtagagggaagtgctatttttcaaaagaggagggaggtcagtgtaaattaagcatttttttggagaaggtgaatgtaatttgccctatttattgttctgttcttttaatgaggagttatataatgtgtgattaaatgttttcttatttatacaggctttggacgtttaaacaattccgatcaagatccaattttgccttcccattttctcgtcgtttttttgtaacggtctttccatggcatatcccttctctgatttcaagtactcagatggcctcagtgtagtgggtatctccttctgcacagctattgtctgtgaggctatctcatgggttcttatctatccgaccaattcttacataaacc

SEQ ID NO: 4425 - DNA, 481 bp, Glycine max
  Clone ID: jC-gmfl02220063h02d1
agacgatgagtctttattgcacttaaatcaaaacttaacaagaaaatcaccatcgtaaaactggagttgactgttttcagtatcagttgtaccaattaaaatcattctggactccctaagagaaccaaatcaaaaatataaatgactgaagttttgcagttccatatcatcttcaacctagaaacaactgagataaaaagtttaaatattgtaaaaacccaatcaactggtctttggatcaggcattggaaagaggccagcacttgcacctcttggtggtgcaaaacccaagaacttctgcaaatttgttctgatgctaatggaacacaagaagtacagaaatgccatggaacaatcagtggggtcattaccctgcaaccctcgatggctcatcttcataataagcccaaaaggtttgaagggcaatttggcaacaaccttgccttcgaagagtgaattcagcaacccaaagaccacaaag

SEQ ID NO: 4426 - DNA, 399 bp, Glycine max
  Clone ID: jC-gmfl02220063h03a1
ggtttatcaaatttcttgagccattttacatgctgcttataacaaaacgaagaaagatcggcacaatctgtgggcacactatatatgctatcacaaagagcgaaatggtcccaattcctcatgctactgtgcgatccaaaatggcttattctaaggatgagaacaggtctttagtcaatcttgcatgtaatcgtaatgcgtctatggtacatttaaagagacatgtagacagtagcattgagagctataccttgtccattgtacttagatgttatgaattacaattttttaatttgagttcattatattgtgcagcgaaaacattctgttagagcatagttgagttggaattatacattttagacttcttcttgtactatatttgttgattgtctctct

SEQ ID NO: 4427 - DNA, 265 bp, Glycine max
  Clone ID: jC-gmfl02220063h03d1
ggttatcttggaataatttctggatttggaggaacacagcgacttcctcgaccagctggccgacaaagggacccgatacgaggcgggccccaaaaccagctaaagggaaggaagcccccaagccggagcccggggaagggggggcgccaccaaaagaaacaaagaacaccgcaccccaatgggcgccggataaaccggggcaccgaccacccccgggggccaagccgggggagagcaaaaaaaccgaacccccggaagaaggaaa

SEQ ID NO: 4428 - DNA, 209 bp, Glycine max
  Clone ID: jC-gmfl02220063h04a1
gtttatctcttttcttctttttaatatttaatttctttgtattttgtatgtaaagatgtaaaattatgattattaggtggcgcatgtgtcgcgtcatgggccaatgttatcctctgcttttaagttggaagaggcccaactcatgtgtgatgtacggctgtgattgtgtaatttaatttgcaaaatcaaaaataacaccagagtcatat

SEQ ID NO: 4429 - DNA, 209 bp, Glycine max
  Clone ID: jC-gmfl02220063h04d1
atatgactctggtgttatttttgattttgcaaattaaattacacaatcacagccgtacatcacacatgagttgggcctcttccaacttaaaagcagaggataacattggcccatgacgcgacacatgcaccacctaataatcataattttacatctttacatacaaaatacaaagactttaaattttaaaaagaagaaaagagataaac

SEQ ID NO: 4430 - DNA, 473 bp, Glycine max
  unsure (1)..(473): unsure at all n locations
  Clone ID: jC-gmfl02220063h05a1
caaggcagaaagcaagctcatcctagagttttaaaaatggcagcagcctcctccatggctctctcttccccatccttggctggcaaggccgtgaagctgggcccatcagcccccgaagtcgggagggtcagcatgaggaagaccgtcaccaagcaggcctcctccggaagcccatggtacggcccagaccgcgtcaagtacttgggcccattctctggcgagcccccgtcctacctcactggcgagttcccaggtgactacagctgggacactgctgggctttcggccgacccagaaaccttcgccagaaaccgtgagctcgaagtgatccactccaggtgggccatgctcggggccttgggctgcgtcttccccgaactgttgtcccgcacggggtcaagtttggagaagctgtgtggatcaggcccgggtccagatcttcagcgagggtgggctggactantctgggcacc

SEQ ID NO: 4431 - DNA, 438 bp, Glycine max
  Clone ID: jC-gmfl02220063h05d1
ggaaaaagcaagtaacattaagttggattgggatacacaagataattcacattatctgaagtacattgcaataacatatacttcaccaaacacaaatctaaaaactctcaaaagtccacaagtcatccttttctttcatgctcacttgccggggacgaagttggtggcgtaggcccaggcattgttgttgactgggtccgcaaggtgatcagcaaggttctccaatggacccttaccggtgacaatggcctgaacaaagaacccaaacatagagaacatggccaatctcccgttcttgagttccttcaccttaagctcagcaaaagcctctgggtcatcagcaaggcccaatgggtcaaagctgccccagggtagattgggtcagtgacctcaccgaggggcccaccagcaatacgataaccctcaaagcacccatta

SEQ ID NO: 4432 - DNA, 476 bp, Glycine max
  Clone ID: jC-gmfl02220063h06a1
gcatctcagaggccaattctttcttcgctttttctctctttccaacgcttccccctgtggtgttctcgtgttgctggtaacaatatggttgttgacgctttgaatgaggatttgagaatcaacggagcagttgaaccgttgcctgaggactttgatgcaacagctgtaatcatagatcccgtgcctttggcagttgtagacaatggcattgtcaaggaggaggcgcacatcattaaaggaaaagagaaaagagaaatagtgctgggaagaaatattcatacctcgtgtctagaagtcacagagcccgaggcagatgatgaggtcactggggaccgggaagctcatatggctagtgtgttggccagatacaaaagagcttcgactgaaaagacaaagcatcatttagggtacccctataatttggatttcgattatggtgcgctcatcgcactttcagactttttcatatacaacct

SEQ ID NO: 4433 - DNA, 507 bp, Glycine max
  Clone ID: jC-gmfl02220063h06d1
gacagcaaagattattctaaatgttattaattgcatcaaagtcctgatagaacatagggacgtacactggataaacactccaaaaaccaactacagcaataaacactagatgggatgctgcaattacttgtgcaaagcacaaaggcaattcttttcacctacgtctgatgatatacagtagggttgatccttgccatcttgaaaccaggtagcacgcttctccagaagctcgttcagaaaatcatcaagcttctcaatagagatgtttggcatcaccaccacatgtgcgatattccccttgcatgctaactgccacttgcgtataaattcctcatcatgtggcctctcaaacacaaccgtgctgctcagttcattaagcattgcaccaatcccagcctcaacaaggcggcctttgaagtagtgtgcatttcgcaagcatttctgtacttctttctgaaaacctctatatcctttccgattcaggtataccagaggaatatgggagca

SEQ ID NO: 4434 - DNA, 189 bp, Glycine max
  Clone ID: jC-gmfl02220063h07a1
caaacactagcaaagggaaggaattgtacctttcccaataacccctatctccggtggggcttgtctcatcggagggaaacaatcaataaaagaaaaaaaaaacccacaaaaagattataacaaaaaaagtatgaaaggaaaagtactaggttccgcaggttctctcatcctactggtgggtgtggtaat

SEQ ID NO: 4435 - DNA, 265 bp, Glycine max
  Clone ID: jC-gmfl02220063h07d1
ggcaaattaagtagtttccattaaatagccaaaagcaaaattcccattgcttctcccatcatcagtctatgttatatgcatactgaagacagagatgaagtggttgatacaaaaaggcataaatcataaatatgaaaagcttattgaatgattacaaatcagctcctcagacaatggagtggctatgtgtgactgcattgaaattaggtgatcgatttcctgtttataggtttattaatgtaggtaggctaaaaaagagattata

SEQ ID NO: 4436 - DNA, 470 bp, Glycine max
  Clone ID: jC-gmfl02220063h08a1
gtcgattagattactttcacaccttagtcgtttgagtacttcaccttctttctctctaagcgcaaaacctcgtactgtttttggcggttaaggatgtcggggaaaggagcgaaggggttgatcacaggcaaaacctccgccgtcaacaaagacaaggacaagaagaaacccatctcgcgttcttctcgtgccggccttcagttcccagttggtcgtatccaccggcttttgaagtcaaggacaaccgctaatggtagagttggggccacagctgctgtctactctgctgctatcttggagtatctcactgctgaagtattggagctggcagggaatgctagcaaggatctcaaagtcaaacgtattactccccggcatttacaactagcaatccgcggggatgaaaagttggataccctgataaaaggaacaattgctggaggaggagtgatttctcacattcacaagtc

SEQ ID NO: 4437 - DNA, 344 bp, Glycine max
  Clone ID: jC-gmfl02220063h08d1
aacaaagagaaatactaaatattatatccatgatcaacaacaggcaacaaagtcataaataaaaggccctactttgtttttcaagtgccatgcaaaaattacacaattagtagagagaaattttccatcaagcaagctattattcactagtaatctactccttggaagacttgttgataagagacttgtgaatgtgaggaatcactcctcctccagcaattgttccttttatcagggtatccaactcttcatccccgcggattgctagttgtaaatgccggggagtaatacgtttgaccttgagatccttgctagcattccctgccagctccaatacttcagca

SEQ ID NO: 4438 - DNA, 380 bp, Glycine max
  Clone ID: jC-gmfl02220063h09a1
attctcatccctgccattccagctttcatcattgccgagtgctatggctttggaagaccttggatttttatattgagcttacttggacttacaccacttgctgaacgtgtgagcttcatcacaaaacaagttgccttttacactggtcccacaggcggaggacttctgaatgctacatgtgggaatgttactgagctcataatagcaatatttgcccttagcagtaacaaaattgctgtggtcaagtattctctgttgggttctattctttcaaaccttcttctggttcttgggacctctctattatgtggtggcattgcaaaccttaaagtggaacaaatatatgacagaagacaagcagatgtgaactcacttatgct

SEQ ID NO: 4439 - DNA, 439 bp, Glycine max
  Clone ID: jC-gmfl02220063h09d1
aagaagaaactagcattaatagaatttttatttctcacacaataaatacaagagattctgcaaactgaaaaagggatttcttactaaagcaaactcaaacaagaacaacttccactcatttggcatctaccgtagtagaacaggatcaaaagcagctctctgatagaacacacgtatgtattatattgaacatcttgcacagtggttcatttctcacagctattgcaacttaaaatacttgcaaagcttctgcaaattccaaactttctttttctcccttctttatggatatgacaaagtgatcagatcatgaaacaataatcaatccattgaattgaatctgatttttggtttggatcgatgccaccattcttcatcttaggaagggacaacaaataggccaaagcctactaattaagcgcttaaaactgattagtgg

SEQ ID NO: 4440 - DNA, 447 bp, Glycine max
  unsure (1)..(447): unsure at all n locations
  Clone ID: jC-gmfl02220063h10a1
attacactcacactctttgtgaattaggggtttttcttattctttctagacgcttccattgatcggcgatttcttagacatggcggagcatcacgaacacgaggaagtgaagggtgagtccttgttggagaagatttctgggaagatccacgaccacgattcgtcatcttcgtcggattccgacaacgagaaaaccagcgcttctgactccttgaagtcaaaggttctcaggcttttcggcagagaaaagcccattcaccatgttcttggtggcggaaaaccggccgacgtttttctctggagaaacaagaagatatctgcatcgacactcggagttgcgaccgctatatgggctctgtttgaattgcttgagtaccacctnctcaccttggtttgccacttcctgatccttggtcttgcggtgtttgttcttggtggtccaatgca

SEQ ID NO: 4441 - DNA, 505 bp, Glycine max
  Clone ID: jC-gmfl02220063h10d1
caaaggtcctttgggtatcttgctcaacaccttcgcatcaaacactgcatattgcttcttaatctcggcaattgccttcccaccaaaagagtctacatgatcttcatatttctcataaagcacaggcacagtgtgcagcaaaacaaaagctatgtagaacagggtcaagaagttggcccagctacccaaaatagagaaaacccataatccagcaatcactgataagaacttcttgagatcccttccagatgcaatatcccttaacaacgcaaaagcccggttgatctcaactctaagagcagaggcaaattctaaaacaggtttctctggaatgtgcacttgcgggatctttggtggactcttgttgatgaaagtggatgcattggaccacaagaacaacaccgcaagaccaaggatcagggaagtggcaaaccaaggtgaggagggtgggactcaagcaattcaaacagaacccatatagcggtcgcactccgagtgtcgatgc

SEQ ID NO: 4442 - DNA, 527 bp, Glycine max
  unsure (1)..(527): unsure at all n locations
  Clone ID: jC-gmfl02220063h11a1
aagtgcttctctcctctgtctttttctctctcttgctatccttttggctagtggcactgctgcaagtgcaactccaagaagcgcagtgccaagccaccatgtttcaacattcaacagaagcctttttccttccacttttctctttggaattggttcttctgcttaccaggcagaaggagcagcaagtgtagatgggagaggaccaagcatatgggacacctacactagacagcatactgaaaagatttgggatcatagcaccggtgacatgggagctgatttttatcatcgatacaagggtgacataaaaatagcgaaagaaattgggctggactctttcagattctctatctcatggtcaagaatattcccaaagggcaagggagcagctaacccccttggggttaaattctacaacaatgtcatcgatgagatcctagcaaatggattaaaaccttttgtcactctttntcattgggactctccacaagctcttgaagatgagtatggaggattccgtagtccta

SEQ ID NO: 4443 - DNA, 398 bp, Glycine max
  Clone ID: jC-gmfl02220063h11d1
acttcgacatgccatttggcattatttatttgataaaatgatctcttgattacatccaacacaagtgatatacgatgaaatctagggaaataaacaagaaaaacactagacatgtcaaaggaacactaaattcagatcacttgagaaggaacttttgcaaccaaaaagcagagaacttggggtatcttttcaagttgttcttgtaatccacatatatgagcccgaatcgaactgtgtaaccagcatcccattcaaaactgtccgaaaatgaccatgcataatagcccttcaaattaacaccttccttgatcgcttgaagaaggaatttaagatggccatcatgggatctaatccttatactatccctgcgggcttcattgactgggattgagtcattc

SEQ ID NO: 4444 - DNA, 512 bp, Glycine max
  Clone ID: jC-gmfl02220063h12a1
ctgccttgctcatttacacacctttccaacctttcactttcagctttatttgaatccctctctctcctttccaaatggccagcgttgaggttgcacatcaaacaccaacaacagttccagaaaatgaaacaaccgaggtaatcaagacccaggaaacaaccccggaaccagtaccagccactgaggctcctgcaacagaacaagcagcagctgaggttcctgctcaagaagaacaacaagcaactgaggttcctgccccagaatcaaccaccgaagcaccaaatgaagaaaccaccgaagcaccaacaacagaaacagtagaaacaacaactacagaagaagccaagccagaggagcctaaagaagttgcagttgagaccgaggaggtggtgacacaggagacagaggatgagaagccagcagcagaagagaaatcagaggagaaaactgaagaagtgaaagaagaagcagaagagcctaaagaaactactgaaacagaaacagaatcagca

SEQ ID NO: 4445 - DNA, 367 bp, Glycine max
  Clone ID: jC-gmfl02220063h12d1
aaaggaaatatcatttattcaaacctaaagaaacacaataacacatcatcacaaactcatgtaaccctgccaataaaataaacccttatccctaaactccagcaccagcagcagattgctcacttcaatacacaactcctagaatttctcatgtcaccacgtggtaagcacgctgatgtggagccaagtgttgtgctcacacgtaggtataccctccataatacaaccaaagacttaaccatcatataataataatatattaataataaaggccactgaagaaatgaataaaaaaaaaagcttttcaacatgacatgcaaaatggtagacctaatgatccccacaactaggaccattttaaaacttg

SEQ ID NO: 4446 - DNA, 479 bp, Glycine max
  unsure (1)..(479): unsure at all n locations
  Clone ID: jC-gmfl02220064a01a1
ggagactttgagaaagccgtgtaccgatggatactagaacctgcagatcgtgatgctgttttggccaatgttgccatcaagaatggcaaaaactacaatgtcattgtggaaatcgccactatcctctccccggaagagcttttggccgtgagacgtgcttatctcaaccgctacaagcactccttggaagaagatgttgcagctcatacctctggccatctacgccagcttttagtggggttggtgacctcatataggtatgttggtgatgagatcaatccaaaattggcacaaactgaggctgaaattcttcatgatgctgtgaaagagaagaagggtagctatgaagagaccattagggtcttgaccacaaggagcaagacccaacttgttgcaacttttaaccgctacagagagatccatggcacttncatctcttagaacttgtcgatgaacgatctgatgagtttcaaagggca

SEQ ID NO: 4447 - DNA, 457 bp, Glycine max
  Clone ID: jC-gmfl02220064a01d1
aaaagccacaaagcagctatcatattaatactctataagataaaactccaagttctcatgatcaaggaaaattgaaaacagactcaaggaaaaccaacacacatgaaaccatcacacacaagtatagcttactgtcctaaactcataatcacaaatgccctcgaagaaaagtttttagtcttcttttcccaacagtgtgagaaggaacttcttgtagtccccagaggtttccttggcaatagcatgctcaagaagaacactgtttctcttgtagtaaacctctgagattatcttcaagtccttctcagcccggctcacgaccacacgggtgagtgcatcctcatcagttccaacctttttgattgcattccgcaccaccttttcgtagtacttaataggatccttgatgccacgaatggcagtgtacaatgccctttgaaactcatcagatccttca

SEQ ID NO: 4448 - DNA, 316 bp, Glycine max
  Clone ID: jC-gmfl02220064a02a1
ggagactttgagaaagccatgtatttatggtttctagaacctgcagatcgtgatgctgttttggccaatgttgccatcatgaatggccaaaactacaatgtcattgtgagaatcgccactatcctctccccggtagagctcttggccgagagacgtgcttatctcaaccgatacaagcactccttgtaagaagatgctgcaacccatacctctggccatactacgccatcttttagtggggttggtgacctcatataggtatgctggtgatgagatcaatccaaaattggcacaaacgtgggctgaaattcttcat

SEQ ID NO: 4449 - DNA, 450 bp, Glycine max
  Clone ID: jC-gmfl02220064a03a1
gaacaaaaccttgtctcttgggctcgtccactgttcagtgaccgcaggaagtttccaaagttagcagatccacagctgcagggacggtatcccatgcggggtctttaccaagctctagctgtggcatcaatgtgcattcaagaacaggctgcagcacgtccactcattggggatgtggtgacagccctttcttttctggccaaccaggcatatgaccataggggagctggtgatgataaaaagaacagggatgataaaggtggaagaatattgaaaaatgatgtaggtggaggatctggacgcagatgggatctggaaggatctgagaaagatgactccccacgtgaaactgcaaggatgtctaacaacatggatcttgatagagaacgtgccgtggctgaagccaagatatggggagagaattggagagaaaaaagacgacctagtgcg

SEQ ID NO: 4450 - DNA, 536 bp, Glycine max
  Clone ID: jC-gmfl02220064a04a1
tcgaaaactgtttgactaaaacctttcgtcccgcaacctcgtatcctggaacatgatgatgactggttacgtcaaacaccatcaaattcaatatgcccagtacctgttcgatcaaatgcccttcaaagacacggtttcttggaatatcatgctctctggttttcacagaatcacaaactctgatgggttgtaccgctgtttcttgcaaatgggaagagctggtgtgccccccgatgactataccgtctccacattgctcagagcggttataagcaccgagttagatgttttgatcccccagcttcacgctcgagcgctgcatttagcacttaacttgagtgtgtttgttgggtcttcgttgatcagagcttatgccagtttaagagacgaggaggcttttaagcaagcgtttgatgatatattgaggaaagatgtcacgtctcggaatgcttcggtttctggctatatggaagtgggaagtatggatgatgctcatacacctttgatatgatgatgcctgagaaaacatatttcat

SEQ ID NO: 4451 - DNA, 380 bp, Glycine max
  Clone ID: jC-gmfl02220064a05a1
ctgggaagatggaaatccaggcttttgggcagccagtccacagtatcagcctggaagccctccttcacggccatatgaagccccaactcctggtgctggttgggctagcactcctggtggaaattatagtgaagctggaacaccgcgggacagttctgcctatgccaatgctccaagcccatatttaccatcaacacctggtggacagcctatgacaccgagttcagcatcttatcttcctggcacccctggaggacagcctatgactccaggcacaggtggtatggacatgatgtctccagttttaggtggggaaaacgaagggcccttgggttatcccagatatattggtcaacgtacacagggcttgagaggaatct

SEQ ID NO: 4452 - DNA, 491 bp, Glycine max
  Clone ID: jC-gmfl02220064a06a1
tgcgaggctgcgacttctagcgttcgaaagagagagagaatcgaaggcgacacacagcttgcatccgattccgagaagaagacgaggcttctctttcgaatacaatctttctgctacatgatgttgaacaaatgatacagaatttattctgtgcacagaaattctggcacatatgacaggacttatgcctggagagttgccacatcatggaacacctgatggcaactctggtaaaagttctcaagacaagcaagaggaatcattaggtcgctggtatatgtctagaaaagaaatagaggaacattccccatcaagaaaagatggaattgacttgaagaaagagacatatctgcgcaagtcatactgcacattcttgcaggatttaggcatgagactcaaagtgcctcatgtaactatagcaacggccataatctttgtcatcggttctttcttcgacattctcatgcatagaatgaccgaaggaccattgc

SEQ ID NO: 4453 - DNA, 563 bp, Glycine max
  Clone ID: jC-gmfl02220064b01a1
ctgttctagtttattggcatttggatcagtaactgcaattcccaatgcaaattttcatcgggcgccaaggagcactagtgtgcttctggttgttgtctgtgttttttgtggtaacaggattcaacaatgaagagcacaggacagtggaggtagttggcctaggagaatgcgcagactgcatgcagaacaatattaagaataaccacgctttctcagggttacgtgtgacggtagattgcaagtcacgacatggacacttcagaacgagaggggcaggtgcgcttgatgaatatggaaacttcaaagtatcacttccacaggacatggttgaagatggtgagctaaaagaagattgctatgcccagttgcatagtgcatctgctgaaccttgccctttccacggaaacttcaaaattgtgaccaggtcagtctctgaagacacacacacccttgcacctgctgctggaatactcagattctcatcagcattgtgcacttcagcccttttttggcatttctttaaacaccacccagaatttccttaaccttcctaagatgactac

SEQ ID NO: 4454 - DNA, 471 bp, Glycine max
  Clone ID: jC-gmfl02220064b01d1
cataaagcatttttaagttatacgtacttgtacaaaactaacagagaaaccttcacttattaactcatcacattcaacttggtcaccaaaattaacttcaaactttctcaaacaacattgctccatcatttgtttttctcttttactctcatttccatgctcttctgctcacattctgtatccactgacatggatgttattcggattttattgctaacataagaagcaaaaacgctagaaaacgcacatataaaaaacgttactccgagaacaatgatagtctatgaatgagagggaggccagtttccaaaccatgggtgttggtaaaagaactttggaggttccatcttgggaagaggtggacacggcttcttgaaatggaaaggaggaaagtatttaaaatatggtggcgacggcgcggtaggagtaggctcataaatgggagtaggaggaggaagtggcttgtaaatg

SEQ ID NO: 4455 - DNA, 504 bp, Glycine max
  Clone ID: jC-gmfl02220064b02a1
cgaattctcacgtgatgttccgttttaaacagaacacaccagaagagaaggccaaggccggcacactttccactcttccatcacgcggatcgcaccgcaataaacgacacccagattgatcgcgattcgcccatctgatttacaaagtggaaccgcaatggaggcagctcagagaagattgggaggaggaatggtgccgttgtcgccgtcacagactccgcgctccagcgataagcccgtgcgagatctgcgatctgcggattccaattccaacagtcacagcaagtatgataaggacaaaggtgtcaatgtgcaggtcctcgtgaggtgcaggccgttgagtgaagatgaaacgaggctgcacacgccggttgtgatttcgtgtaacgaagggagaagagaggttttagctgttcagaatatcgccaacaaacagatcgatagaaccttcgcatttgacatggtgtttggtcctaactctcaacagaaagaactgtatgatca

SEQ ID NO: 4456 - DNA, 459 bp, Glycine max
  Clone ID: jC-gmfl02220064b03a1
gtaccccagaagatcgtacaaggttctccacgaagacaaacctctgttctcaactgtgtttctttacctctcacctactttcagaccataccagattgactaggctgagaagatgcagcagacaccgcctatgattcctatgatgccttcgttcccacctacgaacataaccaccgagcagattcaaaaataccttgatgagaacaagaagctgattctggcaatattggacaatcaaaatcttggaaaacttgcagaatgtgcccagtaccaagctcagcttcaaaagaatttgatgtatttagctgcaattgctgatgcccagccttaaacaccagccatgcctccacagatggcaccacaccctgccatgcaaccaggattctatatgcaacatcctcaggctgcagcagcagcaatggctcatcagcagcagcaaggaatgttcccccagaaaat

SEQ ID NO: 4457 - DNA, 498 bp, Glycine max
  Clone ID: jC-gmfl02220064b04a1
gaaccgtgttctctaatcttgtatttttctgtgtcgcttcgtggttcattcttctcgttcttgtgatctgttctattttggagtacttacaacactcctttgcaagtttaattaattaaagaggctaatcaattttcaattggactgcagcagatggctgaggagggttgcagggttactctaaatgtctatgacttgagccaaggactagcacggcagctttcaatgtcctttttggggaaagctattgaaggcatatggcacacaggagttgtggtttatggtaatgagtattactttggtggtggcatacaacattctcctgctggattaacaccatatggaactccacttaaagtggtagacttaagtgtgacacatgttcccaaggatgttttcgaaatgtatctacaggaaatcagtccgcgatacctgccttgaacatatagtctgcttactcacaattgcaacaacttcagcaatgagggtgctcaattt

SEQ ID NO: 4458 - DNA, 381 bp, Glycine max
  Clone ID: jC-gmfl02220064b05a1
gtggacaggtgaagactttccacttggctcttaaattggttcctaagaagaacaagaagccttttgtgatttacatcaaggccggtatctacaatgagtatattatcatgaacaagcacttgacctatgtcaccatgatcggagatggccccaccaagaccagaatcaccggcagcaaaaactacgtcgatggcgtccaaacttacaacaccgcaaccttcggtgtgaacgctgctaacttcatggcgaagaacattgggttcgagaacacagctggagctgagaagcaccaacccgtggccctgagggttacagcagacaatgcaatgctctacaactgcaacatggaccggtttccaggacaccctctacacgcaatcc

SEQ ID NO: 4459 - DNA, 292 bp, Glycine max
  Clone ID: jC-gmfl02220064b06a1
gttctagatcgcgagctgccgcctttttttttttttttttttatattggattcagtgttgttttttatcgtccgtatccccaccccattataacatcaagcaccatcaagaaaatgacgccttatttaaaccaaaatacccgaaataggtaaacaagaagtaaccgcctccttgtacacataaacacctaatactaaaccaagacaaatgtgcatagctaaatcgttaacaaaagaaaccttccaataagaaccaaggatgaaggttgccgccaagagactccacataaaca

SEQ ID NO: 4460 - DNA, 434 bp, Glycine max
  Clone ID: jC-gmfl02220064c01a1
gcccgtccgtgagcttatagctgatgatgcctggttgaatggggaattcattactactgttcaacaacgtggcgctgcaattatcaaagctagaaagctttcaagtgcactatcagctgctagtgctgcttgtgaccatattagagactgggttcttggaactcctcagggcacttgggtatcaatgggagtatattctgatggttcctacaatgttccagctggacttatatattcattccccgtcacttgtgccaatggggaatgggcaatagttcaaggactttccattgatgagttctcaaggaagaagttggacttgactgcagaagagctttctgaggagaaggcattggcttactcatgcctaaattagacaccattgctttatgtctactgtccttgttagtaggttcccatgtttcgcctataga

SEQ ID NO: 4461 - DNA, 521 bp, Glycine max
  Clone ID: jC-gmfl02220064c01d1
aaaattaggactaatccaaaattcaatatgcggcccatgggctcaaatatcctcctcctaaaaggattagatgttgaaatacaagtaattccaatgaaaaacagactcttctccagtgatagttcctttgtatcttagaaggagcattattcaaaattgaagctacacttctataggcaaaacatgggaacctactaacaaggacagtagacaaaaagcaatggtgtctaatttaggcatgagtaagccaatgccttctcctcagaaagctcttctgcagtcaagtccaacttcttccttgagaactcatcaatggaaagtccttgaactattgcccattccccattggcacaagtgacggggaatgaatatataagtccagctggaacattgtaggaaccatcagaatatactcccattgatacccaagtgccctgaggagttccaagaacccagtctctaatatggtcacaagcagcactagcagctgatagtgcacttgaaagctttctagctttgat

SEQ ID NO: 4462 - DNA, 476 bp, Glycine max
  Clone ID: jC-gmfl02220064c02a1
actgaattcgagaaatttcaccttttgaatatccttgtttctttttggtctccacatgtttttagcggttacgcttgtgttttttctcgtgttcaagggagttcaagggctaatccaggaatcagaatctaacaagaggaaagagaaaaacgtgttcaagtattttcttccccaagtggaggctgcatcttttatgagcataattcttgcatttatttggcaaggggcgattaggaaatggccaacttttatgcttcatttcatactttggtttacttttgtggtgtctctggctgctgggattctcctaatttgcttccaaaagcccgccactgatggtgttggagcgtgtttcattgcttttgcaattgggaatggcttatatgcttgctgggtaagtcatagaattaagtttcgttgtaaggtattgagtttgtctcttaacctgtctccaaattcctgatctgagcaaccca

SEQ ID NO: 4463 - DNA, 493 bp, Glycine max
  Clone ID: jC-gmfl02220064c03a1
attgttgcatcaccgcttgtccacttcatggctgccactgccgctgcaggcatagcttccttgttttcttcttctattaacagtgtcaaatgtcttcgttcctccaagaactgctccattatagacccccttataaccacagtgccctcaaaccgtggcatgtttgtgtcacacttggtggaacctttgtccattgggggtgccattaattcgcacaagttgtgggggcctagaatttctgctgctgttgcacaagaagaggctgttgttgtggctgatgatgaggtagatgacggtgctggttcagttgaagaagagaaagtggaggagaatgaaggagaagtagttgcagaacaagactctgattcctctgccaccaagctttattttgggaatttgccttatagtgttgatagtgccaaaactgcagggctaattcatgattttggtagcgcagaactaattgaggttctttacgacagggatacctgga

SEQ ID NO: 4464 - DNA, 337 bp, Glycine max
  Clone ID: jC-gmfl02220064c04a1
agagcctcatgctggtttcaacttttcttgggtgaatctgccactgtgggcagcgacatctggtgaactctttggacctacaaccaaaaatggcgtgaataaacctaaaactgctacgctatcatccctcatacaaccacacaccaaatataagccgccatatgttcagatgacaccagatctatcctttgggcaatgccggtggagctattacgcagcaagttgtacctgaccactgatgaccggctgatgaaacacatactgagactggctcagcgcccgatccctggggggaggattaatcctagatccgggtggatcaaagtcaccatgtgaa

SEQ ID NO: 4465 - DNA, 388 bp, Glycine max
  Clone ID: jC-gmfl02220064c05a1
gtttcgtaccactcatccaaacatttcacagtgttctctctctctctctctctctgaaaaacattccccgtataagctctctccgaatgtcacaatgccttagcgacgcctcgctctgctttcttcctccacgcgtctgtcactgttatcattccctgctctcatttcggtccctgacaatgagatcaaacttctagtagtgttctactactaactatttttctttcaaaaaagaaaaaagagagggacattattattattattactatataaatatatatttgctctctggtggagagatcagaagcgaaaatggcaccaccgttgttcaattgggggttgaaggacactcacaggggaacccctgtggggggaaaatgagaaccca

SEQ ID NO: 4466 - DNA, 339 bp, Glycine max
  Clone ID: jC-gmfl02220064c06a1
ctaaacctcatcttcctgatcatgaacaggcaccatattcataaattaaaggccctactttgttttccaagtgccatgcgcatacttcagaactggcagcgagaaattccccttgatgcaaggcatcatccactgctaagacactccatggtagactagtagatcatagacttgtgaatgccaagatattgtcctacaccagcaattgatccttttatcagggtctccaactcttccttcaggcagattgtttgttgttaacgccggggagtcttacgaatcgacttcatatccttgcttgcattccgtgccagctccaatacctcagcatgtgagacc

SEQ ID NO: 4467 - DNA, 282 bp, Glycine max
  Clone ID: jC-gmfl02220064d01a1
actggactgtggactgagcattaacacaataaactgggatctttttgctcttcacatgactatagaggatacgacttgcgtgcattgttgcgttcaaagtagatcaaggactaatccaggattgagaatcttacatgaagatagataaaaacgtggtaaaggctattcatccccaagtggacgctgtatctgtgatgatcataatacttgcatttatttcgaccggggcgattattgaaatggccaactgttatggtacatctcatactttgtattacttga

SEQ ID NO: 4468 - DNA, 283 bp, Glycine max
  Clone ID: jC-gmfl02220064d01d1
tttatatattatcacaacctttactcacaggaagactggaaccatggctcttgaccttatagaatgcatcaaaataatgacttcgatagatagccaaaatgcttcatggaggggggggaccactgcataagcaattatggctgctgggcaagcctaacatcctttgcattcatgagcttccaattcagggtacacctttgcagaacattctgaaccaaccactgtgttaacaagacacgccggatgactaccataacactgttggacataagaccatggcctg

SEQ ID NO: 4469 - DNA, 402 bp, Glycine max
  Clone ID: jC-gmfl02220064d02a1
atcactaccaaagatctttcttttttcttcttgttctacaatgaaaagcctctgccttgggccgtttcttgctgctagtgccccagttggtagaagagcctatggaggccacttaagcagaaagtgctttcaaaagcaacttcacttccactcacgttgtgttgctttctcttcattcatatgttctgcaactatatcagtgatgccagaattagaagagaagcaagtgtttgatggagagaaggctaatttgctagttaaagatctcagaaagagctttgattcaggcatgactaagagctatggatggagggtttcccagctggaagccataactaagatgttagaagagaaagagaaggaaattactgaagctctatataaggaccttggaaaacctcg

SEQ ID NO: 4470 - DNA, 348 bp, Glycine max
  Clone ID: jC-gmfl02220064d03a1
ttttgagttcaattactcatggtgttaatgaaatagcatcatcagttcgggcaagtattaggaaccagagcaaaaagtacaaacatggaaatgaaccatctgttgaatctgggaacagtgagagcattggtgaagtgtccaccgaaagcactggtgattctcatcaaatacataatggtcatcatgaagtgggtgaaaaaagtagctcgaataaggaggttcgacatcaagatagtgaattagataataagttggatagaaaacccactcttagacgcaattcatcaatcaatcagaaagatgaatcccactcattaggagtgaagcagaaatatgatttgattgatc

SEQ ID NO: 4471 - DNA, 395 bp, Glycine max
  Clone ID: jC-gmfl02220064d04a1
atggcatgcaatgctttgttatcttctccaactgctcagctaggcttgcctgaacttcagcttggaataattcctggatttggaggaacacagcgacttcctcgtcttgttggtttgacaaagggacttgagatgatactggcttcaaaaccagttaaagggaaggaagcttttagcttggggcttgttgatggtttggtgtcacctaatgatttggtgaacactgcacgccaatgggcactggatatgttgggccaccgacgaccatggattgctagtctttataagaccgaaaaattagaaccccttggggaaggcagagagattttgaaatttgcacgagctcaggctcgaaagagggctcctaacctccagcatcctttggtttgcattga

SEQ ID NO: 4472 - DNA, 118 bp, Glycine max
  Clone ID: jC-gmfl02220064d05a1
gtgactgacgcaccttttagaacttttataccactaccaccacggacgggaagttgcgtctctattaaaatcccactacaccgtcttcattaccaacaaggtttgttttagttaagaa

SEQ ID NO: 4473 - DNA, 426 bp, Glycine max
  Clone ID: jC-gmfl02220064e01a1
atgatttgtggaaccatatgctactcctgacttaactctgcctacttgatatgaccatgctacaagactcctgcagctgcggctcactgagcggctactccatatggataaattggcatgatgaagatgcgcatgcgaatacagagaatgatatggaaaaagataccgaccgacggctacattctgaaatcatggaaatattactgtctgaatacataattctttgccaaagacctgttacttaatgtcgtgaaaccgcttattgatatcctcttgagggtttctagaactgggggacatattgccttgatgcccaggaatcaatgatcaactgacgtcactattactgatcttattatgatattatgtctggattcgatcgaacaattgtgactcaaattactcaggttataaacatacgggtca

SEQ ID NO: 4474 - DNA, 334 bp, Glycine max
  Clone ID: jC-gmfl02220064e01d1
acattatacactttaaaatttcacaatattacattactttttcatattacacatggggaatcatgttatactttgtacatcgtgtgaagtgaaaaattgaaccccttaatatttctatgacatgacctttagtgccttttttgtttggcctagtacattgaacactgttgctgctatgtgagatggtgtaagaccggctaaagacaattggtcagcaggtgatccatgatcgatttaacgatccggaagaactattggccgccacttcaatttgccatctagaaggccatcaagggccatgaacttggcaacatgagaaccaaatcctccaatt

SEQ ID NO: 4475 - DNA, 385 bp, Glycine max
  Clone ID: jC-gmfl02220064e02a1
ctccgctctctcatcttaccgctttctcgggaagtcacttcctcttccctctcactctcaatggggtctccatttgctcggccacgctcaccggctccaccagatgaagaaaaggccatgtggggtatatgcatccctctccgagagtggagtgtattattcccaccgaccgccgactcccctactagacaccgccaactatcctattcatatgaagaatctctctgccaaggagctgaaacaactcgcggatgaactgcgttctgatgttattttcagggcttctagaactgggggccatttgggctcaagccttggtgtggcggaactcactggcgcacttcactatgtcttgaatgcccctcaagacacgatactgtgggac

SEQ ID NO: 4476 - DNA, 409 bp, Glycine max
  Clone ID: jC-gmfl02220064e03a1
acggaacagattctattgggtcttattggcgaaggaaccggcattgctgctaaggttctgaagtcaatgggaattaatcttaaagatgctcgggttgaagtggagaaaattattggaaggggtagtggatttgttgccgttgagattccgtttactccccgggcaaagcgtgttttggaattctcactggaggaagctcgccaacttggtcataattatattggatctgagcacttgcttcttggtctccttcgagagggtgagggtgtagcagcacgtgttcttgaaaatttgggtgctgatccaaacaatattcgtgctcatgttatccgcatggatggtgagggtgctgacagtgttggtgctactgttggccctggaagtagtaataacaataagatgccaactt

SEQ ID NO: 4477 - DNA, 301 bp, Glycine max
  unsure (1)..(301): unsure at all n locations
  Clone ID: jC-gmfl02220064e04a1
ctgacctgatacggatcagcggtcctngcacggcncaataccagttcgacgagactaccagtcggcggccgccctttttttttttttttttttatgaccttgggaggtctttaagaatatgcacccccaggggcacggggagagccgtacatcacacatgagttgggcctcttccaacttaaaagcagaggataacattggcccatgacgcgacacatgcaccacctaataatcataattttacatctttacatacaaaatacaaagacttttaattttaaaaagaagaaaagagattaac

SEQ ID NO: 4478 - DNA, 218 bp, Glycine max
  Clone ID: jC-gmfl02220064e05a1
agtaaaatctgttaatttttatagcccctccaccatggactgcacgaggcgagtttttacctcatcacatgacagggtcctcttccaacttaaaatcagatgttaacattggccgacgacttgccacacgcaccaggtgataagcatcatttggcattgtgacatacaaaatacgcagactttcaatttcacatagtagaacaggaataagccctcac

SEQ ID NO: 4479 - DNA, 527 bp, Glycine max
  unsure (1)..(527): unsure at all n locations
  Clone ID: jC-gmfl02220064f01a1
gtcctttgttggggaaggtggttttggaagggtctacaaaggcaggcttgaaaccactgctcagattgttgctgtcaaacagttagacaaaaatggtcttcagggtaatcgggaattccttgtagaggttctcatgctcagtcttctacatcaccctaaccttgtcaatctcattggatactgtgcggatggggatcaacgcctcctcgtttatgaatttatgcctttgggatcattggaagatcaccttcatgatcttccccctgataaggaaccactagattggaacactagaatgaaaattgctgttggtgctgcaaaaggattagaataccttcacgataaggcaaatcctcctgtcatctacagagacttcaagtcatctaacatattacttgatgaaggataccacccaaaactttctgactttggtcttgcgaagcttggtcctgttggtgacaaatcacatgtttctacccgtgtcatgggaacttatggntactgtgcctctgagtatgctatgactg

SEQ ID NO: 4480 - DNA, 356 bp, Glycine max
  Clone ID: jC-gmfl02220064f01d1
gacaaaagggacgggctccattatgcccgagttcagttcagggggcaaaaagtcccgttaaaaaaccagggaaaacaaagggcctaaaagggtatgttaaaaaaattttgttaccagggtcattcatgggccccccttgcaaaaaatggctactaggcaaattttaaggaaatcaaaacctagtaaaagtatatggcctaaaaggctggctgtttgagttgtttctctaaaaaagccccccaaattttcttccattttccatagccccaagggaaaaaattaagccttaaaaatgccctggtggaaactttggtttcttttttggcccaagttctttccccacattttgggtttaa

SEQ ID NO: 4481 - DNA, 438 bp, Glycine max
  Clone ID: jC-gmfl02220064f02a1
ctgcactcttgatcattctccgtttctacacaggggaaaatgagggagatccttcacgtgcagggagggcaatgcgggaaccagatcggttccaagttctgggaagtggtgtgcgacgagcacggcatatatccgacggggaagtacgtctgaaactcagatctgcaactcgagcgcgtgaacgtctactacaatgaagcctcgtgcgggcgcttaatgccacgcgcggtgctgatggacctggagccctgtaccatggacagctgtgcggaccgggccgtacgggcagatcttacgccccgacaacttcgtgttctggcagtccggcgccagcaacaactgggctaaggggcactacaccgatggcgccgagctcatcgactccgtcctcgacgtcgtgcgtaaggaggccgagaactgcgactgccttcaggggtt

SEQ ID NO: 4482 - DNA, 493 bp, Glycine max
  Clone ID: jC-gmfl02220064f03a1
ccgaaaatgaagaaagcagcgattttgaagtctctccaaaccattatggttgtcttcctgctgatagtactctttagcagcaacaccaaagcagaaaaagaaacaatccacgaccatgcaaacaaaaagacctacataatccacatggacgagaccaccatgcccttaaccttcaccgaccacctcagctggttcgacgcctccctcaaatcagcgtccccctccgcggagattctctacacttacaaacacgtggcccatggcttctccgccagactcactcccaaggacgtagacacacttgcaaaacaacccggcatcctctccgtcatccccgaactcaaatacaaactccacaccacaagaactcccaatcttcttggacttgacaaagccaccaccttgttacccgcctcggagcaacagagccaggtggtcattggactcctcgacaccggcgtctggcccgagctcaaagcctcgacgacacggg

SEQ ID NO: 4483 - DNA, 321 bp, Glycine max
  Clone ID: jC-gmfl02220064f04a1
cgcacagcagaagcttttgcagtttttatccgacaacctcaaatggcagcgagattctctctatcagatgctgaatttggtggctctccacagagatgacatcctttctgaagctgaggtctcagctttcaggacccatttgctcgaaacccttcttgcttttccccctgcgcaccaggatcacgccctcatcatcaaagatcagctcatgtttgtgcacgatctccttaatgcaaagtgcatttccgatggggagtaccactcttcaagaaggcctttgcttgtgagactcgcagttctaggaggtgagactgaaggcag

SEQ ID NO: 4484 - DNA, 519 bp, Glycine max
  Clone ID: jC-gmfl02220064f05a1
attacgacgagcaacttggcgtgctggaaccggagtcgtgaactcgttctgcgatcgtcatcaccgaccatcatcgctttttcttctttactttctcatcagagtctctcactgtgccaaaacacgatttttgtattgtacctttcttttgagttctgcgcttttcgatcttaagaagacataaaaaggagcaacaacatgttggagaagatcgggttgccgtcaaagccttcgctgcgagggaacaattgggtggtcgacgcctcacactgccagggatgttcctctcagttcaccttcatcaatcgcaagcatcactgtaggaggtgtgggggaatcttttgcggcagttgtactcgacaaagaatggttctacgcggacaaggtgattcacctgtgcgtatttgtgaaccttgtcagaagctagaagaggcagcacggtttgtattgcgacatggacgcatacctgggagaggaaagcttgaatcagcacctagagatgaagatgaagctttgaac

SEQ ID NO: 4485 - DNA, 98 bp, Glycine max
  Clone ID: jC-gmfl02220064f06a1
gtcactgactagccttttttgctttttatagccccacctcctttgtgtggaagtggccacacattatgaagcaagctacaccatcttcgtaaaatatg

SEQ ID NO: 4486 - DNA, 491 bp, Glycine max
  Clone ID: jC-gmfl02220064g01a1
cttctttatcccattctttcctcagattcggaaaaaaaaagctttccggtgctggggagcctagggttagggtttctgagagatgtgggatgttccatgcattgatgagccttatcgcgcgctgttggaagccgttcgggcacggtgacgacgccgctaatgccgccgccgccgccggaagagaatgcaaggacggcctcctctggttccgcgacatcggaaagttcgccgtcggcgatttctccatggccgtcgtccaggccaaccaggtcctcgaggaccagagccagatcgagtccggcgccttcggctccttcgtcggcgtctacgacggccacggcggccccgattgctcccgctatgtctgcgacaacttgttccgcaatctccaagcgatattggctgagtcacagagtgttgtgacatctgaggccattcaacaggcgttccggcggactgaggaagggttcacggcgcttgtttcggagctg

SEQ ID NO: 4487 - DNA, 484 bp, Glycine max
  Clone ID: jC-gmfl02220064g01d1
agacaaaattacttttctgatttttttttctttttcattttcatggataaatttctaacaagtgttacaagttcgtgcgtcatcaataagttgtctcgttatcagtaaccatacgtggcagcactatgaatggtatattctagcaacgtgccaatggtgtattttctggaattggcacagttgccagaacacccgtataagagaagcatgtttacaaatcataagagtcagtgatcgagagcacttcgaattgtgagtggcgtatttagaactgcgcctctggatataaggtcgtggtttaagaataaaacaataacagttatatcgtcgtgaaaatggcgacgaaccttcttgtcaatcttgtaaaggtctgaatatcgcatttcacgctttcttgctgcttcgtgtaaggcagccttgacaagtctcttggcactacccgcgcgtggactgctgtgaacaatatccactggttgatcattac

SEQ ID NO: 4488 - DNA, 465 bp, Glycine max
  unsure (1)..(465): unsure at all n locations
  Clone ID: jC-gmfl02220064g02a1
gtagctagctagggtgcagaaatttaaaaataaaaattcatcagaaaaatgggactggggatgtttaaggcattgttttgctgcagcaagccccatgaaattgacattgcagactcctgggactcatctcctgatcatacccccaaacaacattctaaaccaaagccaaagccaaatgctgcacctactcattccaataataaacaaaccaccacatctacacaaataggagcaattctagggaaaccatacgtgaacatacaccaaatgtacgagatgaagaaggaactgggaagcgggcagtctggtgtaacatatctgtgtgtggagaagacgacgaagcgagagtatgcatgcaaatccatctctcggtcgaagctgctgagcacgcangagattgaagatgtgagaagagaggttatgattctgcagcatctttccgggcagcccaacatagtggaagtc

SEQ ID NO: 4489 - DNA, 402 bp, Glycine max
  Clone ID: jC-gmfl02220064g03a1
gaaccaaacaaagccctagcattttatcatccttcgaagaaaaataacaccaatcaatcctagaatccaatccctcccctttgaatttgatgcctcctcgcattcaattccacgctctggtggcatcatcatcatggatcgaggtaataacaacaataacggcgttgctgttgtcgtcggttgggtgcgaacggggacacgctctgatggtgccgtttagagtaaacgacgtgctccccgtgctgccacgcgagatctccggggcggttctgaacaacctgcacagggccgtcgacctgctcccttatggcgatggggccctcactactgccaatgcctccgtcaagtggaaaagggcatgcttatttcgatacacccgccagattgagctcgcaccctctt

SEQ ID NO: 4490 - DNA, 426 bp, Glycine max
  Clone ID: jC-gmfl02220064g04a1
ttcaaaccctagaattcctcgatttccgagccttttattaacaatcccatgaggttctaaattttttgaggattttgaggttgcgtgagttcggatttggagttggtggggttgaagagggagggtttgtccgtggtcggtggaattcgagttccgtagtgtttttgttttcttttaaggttgtaattggttgtgttcgaagatcagggttcggagatcgaaattaacggtgcggttttggatttgagtgtccgatatgacttctctgagcagagaattggtgtttctcatactccattttctggaggaagagatattcaaagaatctgtacacaagcttgagaaagaatctgggttctttttcaacatgaagtactttgaggaaaaagtgcaggctggcgagtgggaagaggttgaagaagttct

SEQ ID NO: 4491 - DNA, 501 bp, Glycine max
  Clone ID: jC-gmfl02220064g05a1
gtcacgcctgaacaattcccttttttatttcagccttgagcggctcctgttcttgtcaagttggagtgaattaggagctgcttaattcaaagaatggggggagatgcacagaaaagaaacgtcatcattggcgtctctactttcttgttggtggccatggcggtcgcagtcacagccaatgtcaacttcaataacaagggatcaagccgtgattcaaaggaagaaagcaaatcccatgtcgcttcctcgatgaaggccgcgaaaaccctttgtgcacccaccgattacaagaaggaatgcgtggactatcttattgtacatgccagtaacatctccgacccacgggaactcatctaaatcggattccacgtgaccatctccaaaatctgcgaaagactcgagaagacacaactcatgcatgaggtcgagaatgaccctatatccaaagtggcactcgacacgtgcaagctactcatgaacctttccatcggggagttcacg

SEQ ID NO: 4492 - DNA, 510 bp, Glycine max
  unsure (1)..(510): unsure at all n locations
  Clone ID: jC-gmfl02220064h01a1
gttgaacttcaagaacctcataaaaccctttctctctctctctctctagatctgttcaaatccgaaaccatttccgctctaatttccaagagcaaaccctaatccgctctctctgtatgatactagatttcccctcctcaaaggcgtagttttgtgtcgatttgtaaattcattcggtagtttaggttagaatttttgtgtcaagtttttagggttttgaatcggtgagatgaatcacaacaacagcaacaacaatagagcgaggtaccctcccgggatgggacttgtgcgcgggggtttcaatccgaacctgagccagaacccgaaccagaaccagaacccgagcctgaaccagaatcatcacgcgttccaggctcggccgncgtaccaccaacagcaacaggcgcaatatgtgcagaggcatttgttgcagcagcagcagcaacagcagcagtggctgagaagggatgccaacgccgtcgacgaggttgagaagaccgtgcagtctga

SEQ ID NO: 4493 - DNA, 383 bp, Glycine max
  Clone ID: jC-gmfl02220064h01d1
agcataaggaaggaacatgtccattttaagggttttcatccctaaaacattcaattttaaaactaccatactaaaaacatgtaatgaccaaataaatctgcaaatgtaaaacaaaaacccaaactgaacccaataactttttggcaaataaaagccaattttaaactttttaaagggctcaacaatgtttcagggctcccaaaacccgaattaatctgaaagccctcagtaatgggtaatacccaatttttgacagggcattcttttatgccaggttccaataatacacaatttgccactagcttaacaaaaccttttacccacctacttgagccacgggcacactaaccactggtattaaccgcaactgttaacacaacact

SEQ ID NO: 4494 - DNA, 516 bp, Glycine max
  unsure (1)..(516): unsure at all n locations
  Clone ID: jC-gmfl02220064h02a1
caaagagctaacaagatattcattaccggcatggctaatgaagaggaacagaaaaaccacctcttcggcatcaaagatctcggtcacaagactctccttcagagtgatgcactctatcagtatatacttgaaaccagtgtctatccaagagagcacgagtgcttgaaagagatacgcaagatgactgcaaaacacccactgaacatcatggcaacaccagcagacgaaggacaacttctgagcatgcttgttaagctcacgaattcaaagaacgccttggaaattggtgtattcactggttactctctgctctccactgccctggctcttccccctgatggaaagatcttggctttggatgtgaatcgcgaatactatgagttaggattgccaataattcaaaaagctggagtggctcacaagattgatttcagagaaggacctgctctntcgttcttgacgagatgcctaaagatgaaataaaaggggtcgttgatttcgtttcgtgatgctgat

SEQ ID NO: 4495 - DNA, 520 bp, Glycine max
  Clone ID: jC-gmfl02220064h03a1
ttcaccagttaatcattgctttgattagataagactcgtggatgtgtcatctcctttattcaacgttgaatattgttattattcttgcccggtattgagaaaatactttttcgctgaagctctgaataacagaccatcatcgacagatggggtctgaaggtcctccagcagctgtggcaacagttcatgtaacaggtttcaggaaattccatggagtttctgagaatccaacggagacaattgtcaataatttgaatgaatatttgaacaagaagaagggtttgccaaaaggcttagttattgggagttgcagcattcttgagactgcaggtcaaggagcactcattcccctctaccagacattgaagtctgccattacttccaaggaatcagaatcttcaagttccaataaaattatttggctgcattttggggttaacagtgccgcaacgaggtttgctatcgagcgtcaagctgtcaacgaggctacctttcgctgccctgatgaaatgggatggaa

SEQ ID NO: 4496 - DNA, 408 bp, Glycine max
  Clone ID: jC-gmfl02220064h04a1
tactcatcactcactccaaaccctctcacaccaccattattcatatctcattctctaacctttcactattccctctcattcactctctagctagtttcctcatcatcgtagaagaaccaatacttgtactctctcttactttttaaccatgtagaatgattcacctaaggaaaaattagtagcttcttgttgtgctttttattttgttttgttgtgagtacagataaatctgtctggtattgttgtgcgttctatgaatcattcgatgggcgaagagggagaagaagtggggagaaagcacggacaaagggggcgctgatggagacaaatggtacttgtatagctgcttacaagactggcaatattggtgctggaattcaatacacgagactagcaggtctttttcga

SEQ ID NO: 4497 - DNA, 511 bp, Glycine max
  unsure (1)..(511): unsure at all n locations
  Clone ID: jC-gmfl02220064h05a1
tgctctttctctctcttaaatctttggactctcagattgcgccttttttttttcttttctcaaacctttggtctttgattccaattccagttggcttctaagaagagtgttagagaagtatttattgatcagggaatggctgggactgtgagtgaggaatctggggcgggaaagtctgtggagaggatttcaactgggcacgcgttgtctatccggggaagcattggcagagtggctgtcttctgcgcaggtggagaatggaatcgcgtccacttctcccccttactgggacactgatgacgaagatgatggaccaaaaccggcggcgttatatggaagatatacatggaagatagaaaagttctctcaaatcaccaaaagggaacttcgcagctgtgcatttgaggttggcggctacaaatgggatattttaatctatcctcaatgctgtgatgtaagcaatcatctctcactgtctctgngtgtagctaatcatgacaaacttctttca

SEQ ID NO: 4498 - DNA, 476 bp, Glycine max
  Clone ID: jC-gmfl02220065a01a1
ctgacataagaaagaaagctgaagctgttgacaggttctgtaagccaattatgatgaaaccaaagccaccaccacccaagccagctacaccagaagcaccagcaaccccacctcctcagggtggtgagcagccacagcagcagcaacaacaaccacctgaggagaatcctaatgccagtactaatgaaaaggcaggggacaatgctaatccagccccaccaccagcatctgctgaaccaatggagactgacaaaccagagaacacaggctctgcttaatttttgttgattttgtctggtctctacgttttgtataacaatttgaattgtacctggaaaaatcgtcgtgggtgagagttgatgctgggattctttgctggaaaaattggtaatgggtgaattatctgagattcggattatttttggtcaaatctacgttctataagtggaattacaatgcttggttacatttgagtt

SEQ ID NO: 4499 - DNA, 440 bp, Glycine max
  Clone ID: jC-gmfl02220065a01d1
aactcaaatgtaaacaagcattgtaattccacttatagaacgtagatttgaccaaaaataatccgaatctcagataattcacccattaccaatttttccagcaaagaatcccagcatcaactctcacccacgacgatttttccaggtacaattcaaattgttatacaaaacgtagagaccagacaaaatcaacaaaaattaagcagagcctgtgttctctggtttgtcagtctccattggttcagcagatgctggtggtggggctggattagcattgtcccctgccttttcattagtactggcattaggattctcctcaggtggttgttgttgctgctgctggggctgctcaccaccctgaggaggtggggttgctggtgcttctggtgtagctggcttgggtggtggtggcttttggtttcatcataattggcttacag

SEQ ID NO: 4500 - DNA, 370 bp, Glycine max
  Clone ID: jC-gmfl02220065a02d1
gttaacattctttgttatttcatttatttaatcgtttatttgaccaaaaagggggccgaatatcaaataattcacccataaccgattggtcccgccccgaatccccagcataaactctcacccacgacgatttttgcaggcccaattcaaaccggtatacaaaacgtagaggccagacaaaaacaacggaaattaagcagagcctgtgttctcaggaccggcagtcaacattggttcagcacatgccggcggtggggctggattagcattgtcccctgccgttttatgaccactggcattaagattctcctcaggagggaggggttgctgcagcagaggctgctaaggaccctgaggagggggggacgct

SEQ ID NO: 4501 - DNA, 414 bp, Glycine max
  Clone ID: jC-gmfl02220065a03d1
accagaaaataaaagaacaatttagactagcaataaagtgttacatacaacacaacaaacaacaaagacagagaaagacaatctgcaaacaacttaccgaccaaaactattgatgaaaaaagggaccgaacaaatgatgacatgcatatttcttactcttcaagttcaatttccttcatgtacccaaaaccaccaccagaggttattttctctcaatcagagtaggggtttgatcttgaacctgtaaagaagcctcttttttttcaaggtaggattgtctatggtgagcaacaattttcccagttcaacaactttaaagctattggaaacaactgggtcatcggtgggggacatctttgtggccttctgtagataaccgtatatgcatcttaacatcaggcttgaattcagcat

SEQ ID NO: 4502 - DNA, 510 bp, Glycine max
  unsure (1)..(510): unsure at all n locations
  Clone ID: jC-gmfl02220065a04d1
gcataattagtaaaataataattaattaattccatcacatgaacatatattacgcgtacaagaattgaggagtttgactgagggtacacactgaaaaagaagatagagaagaatccgttgttacacgttttactacaatgagagagtgatggaaaaggccaaagagagactctcatgctaacacaattgaaaacctaacatattacagctacccgttcaggcaaatacgttaatcaaaagaagaacccttaaatattaataccaaattacacgtacggtaccgttcttgcgttgaatgagggccccacttggcaaagtaattaaagtnaattgtacttttagattaaatattttgggacctcattttttttttcctttccttctttctctttggacttggtacattattgctttctagttcacacattgctagctgtctcaatcacaggcacaggaccatnnttttgttacatgattcggcttaacaacgtcaataatatggcaatttag

SEQ ID NO: 4503 - DNA, 526 bp, Glycine max
  Clone ID: jC-gmfl02220065a05d1
gcaaccaaataaagcggaacttgcattaaatattggatgaatgtatgtacattttaatagctgagaaactaaaatagacaggtgtccctgtaggacgaagaggttggttatcctatctgtatccacactcacataggtaaattcatcttaatctcaacaacgacaaaatagaaggtggcactcactgtgcctttagctataacttttcccaccaatacttgaaggcagtggctgagatctcaaatgatcagtgaccttgtcgatacaccaagacaagtaaagccctctttgcgtgaagcagccgtttaactcaagttgaataaagtacaaagggaacaatgagaaaaatggtcaacattaagcaagtgtaacttgaacagaacagccatatcgcaagtgcaagggactttgaaactgcctctggctctggcatatacctatgcgcccaaaacgctgattgaacatatgaactactcgcatggcctgaggatactcttcaactttagtttccaaaatagatttctga

SEQ ID NO: 4504 - DNA, 529 bp, Glycine max
  Clone ID: jC-gmfl02220065a06d1
ggcacaaataagagacaatcatgtttaaaatcgcccttgtatatcaacttaattacattaacgagttccggtactaaggttgcgagtaaaactatgtacaaggtaggattgttgaaaaatgcaaggccgatacactcccttatcaccttgcacaacgcacaattccgtactatactactatattaggagtgtataacagggaaggcatatatactactactactactactactactaattccacgacacggtccaaaattggatggatactcattcatgccatccatattctgattccaaacacaagcactcacttgataaaacagtcagattcagaattagaatttccttcttcaggtcatattctccaactagatggctttatgacagtcacctactactttccactccagtccggaacctggaagctatggaaatcaaatctacgaactatcaggtatctgaagatgaatgattgagctgacactcgatttctgtgcgtctgctgcaccttcactggcagattgat

SEQ ID NO: 4505 - DNA, 484 bp, Glycine max
  Clone ID: jC-gmfl02220065a07a1
ctttctcctaaaacatcttcagtgggttctttttcttgtattacaacaacctcgtccaagaccatgaccatggccatggccaccatcctgctcctggtcacggtcttcgcggtttcatcgggccgtagacttgtcgataatctagtacgacaacgcccacgccgccacgtcgggcaacgacgaggagctgatgtccatgtgcgagcagtggctagtaaagcacggccaggtgtacaacgcgctcggagagaaggagaataggttccagatcttcacggacagcctgcgattcatcgacgaccacaactcctaagaggaccgaacctacaagctctgactgaaccggttcgctgatctcaccaacgaggagtacagggccatgtacttgggaaccaagatcgatcccaaccggaggctcggtaagaccccgagcgaccgatacgcgcctcgtgtgggcgacatactacctgaatcggttgattgg

SEQ ID NO: 4506 - DNA, 307 bp, Glycine max
  Clone ID: jC-gmfl02220065a07d1
attcattctttaatcttttttttttttaaaaggaagaggggtccatccagtcctaagttatcaacatataatataccaccttgtttcatctatttcaaaattggcggaacacagaaagtctttctctatgggggaaaaatgaaagcctaccaaaacatctctccctttgggattgaaattgtaaaacaaatctccctcaattaataatataaccttgtgttcccgacacattttggcacggacttgtgaacgaacaccatggacctagttgataaaaaacggcccataaaaattcacccctgcttca

SEQ ID NO: 4507 - DNA, 452 bp, Glycine max
  Clone ID: jC-gmfl02220065a08a1
gaaaatatactgttgggtaggcctgatgcagaccaagttgagattgaagaagctgccagggttgctaatgctcattccttcatcattaaacttcctgatggctatgaaacacaggtaagaaaaaagagggctgcaactttctggagggcaaaaacagagaatagcaatagcaagggcaatgctgaaaaaccctgcaattcttctcctagacgaggcaacaagtgcattggactcagagtcagaaaagcttgtgcaagaagcccttgaccggttcatgattggccgaacaactcttgtaattgcccatcgtctctccacaattcgcacagctgaccttgtagctgtacttcagctaggaagtgtttctgaaattggaactcatgatgagctcttctcgaaaggtgaaagtggagtctatgccaagctttataagatgcaggagatggctcatg

SEQ ID NO: 4508 - DNA, 486 bp, Glycine max
  Clone ID: jC-gmfl02220065a08d1
aaattaataaggatgagcatctattcatccatttcaatctcgttcctgtattcgtctgtcattcccttggtaacattcataaagacaagattacattcttgaataggaagagaaagggggggtagggatgatacacaaactatactatggtcaaaacaaaaatgccaataattaatgggtatatatatggcttataatcctgtagctggtaatttcatttgaatggctagccttctctttcatcatcttttggtcttgttgaagagcttgaacctgaggccattccaatgacttggctggtgtgtgaacctttgtaactgaatcatgcgcgcataaatcccatccgggtgatttttcaacaactgtgaatgggagccttgctcggctactttcccatcatcaatcacagcaatcagattggcattcctgactgttgatagcctatgtgcaacgatgatagttgtttttcctgaggaggcgcggtct

SEQ ID NO: 4509 - DNA, 118 bp, Glycine max
  Clone ID: jC-gmfl02220065a09a1
ggacaaacaacataaaacactcatttggggtttaagataaaaaaaaaaaaacgcacgcatccgtggacagcacccccaacaccgacgcttactgtccgcgccagattttccagaagga

SEQ ID NO: 4510 - DNA, 279 bp, Glycine max
  Clone ID: jC-gmfl02220065a09d1
attattaaattacccaatattgatcggaaaaaagccattatgggagagccttgctcacgacagagtagaaaggtctttgttgtttcgagacagaaggtctgttccggctattagcagaagaaggccaacaaaattgaaggtgggggcacaaagatgctctgattaaacattcaatcattggccaaccaggggtgggccaatctccactccggagggaggaacagggttttttggagggggtggatccaatggaacggattttctttgttgcacagtcga

SEQ ID NO: 4511 - DNA, 327 bp, Glycine max
  Clone ID: jC-gmfl02220065a10a1
gggccctcgtttattatttttttttttttctccctcattactacaacagcgagggaaatcaattcctcatcctggatacttccttctaatttcatttctctctcttccttcttagaaaaaaaaacaaaaaaaccacagcttaatatcatgtatctagctcttcattgtctcttgttcaataaaggttacgctttaaaattctgaacctcacaacttaaggcaaatgttagcctacagatctgtgcgttgacccttggcaggatcagcttttggaagggttggaattgttcttccacatacgccattgattattccaaggttctgttt

SEQ ID NO: 4512 - DNA, 319 bp, Glycine max
  Clone ID: jC-gmfl02220065a10d1
gcttataatatttttatatttattcataaaaaaaataggcccatacatttggtaaatgaattcggcggacaccaaaatcacagaaatgtaacttttttctatgataatcactatcatagcaaccccatttatttctgaagtaaatgacagattatagggggttgctaaacaaatctaaatacagaaaagaatgcaaaacatataacactccaagtggaagacaaacccaaatcatatccacacatggtagggtacttatttgaagaattcccaattgaacttgggaggacctgatttattggtctccgagggatgtggg

SEQ ID NO: 4513 - DNA, 456 bp, Glycine max
  Clone ID: jC-gmfl02220065a11a1
tttcagtcctgtgcatgtcagcatctgctatagtggagattgtgcgcctgaaggttgcaaaagagcatggccttgttgatgaacctgttcctgtaccccttaatatattttggcaaatccctcagtaatttcttattgggggcagcagaagtattcacattcgtcgggcagcttgagttcttctatgaccaatctccagatgccatgcgtagtttatgtagtgctttgtcgctgttgactacttcacttgggaattacttgagctctttcattctcactgtagtgacttacttcactacacaaggtggaaatcctggatggattccggataacttgaacaagggtcatcttgattactttttctggcttttagccggacttagcttcttaaatacctttgtgtacatagttgctgccaaaaggtacaagcagaagaagtctgcttaagatttttca

SEQ ID NO: 4514 - DNA, 579 bp, Glycine max
  unsure (1)..(579): unsure at all n locations
  Clone ID: jC-gmfl02220065a11d1
cgttgatcaaacactacaatctgaaacgatggtgcacataaaaagagtatcaacattttctacatcaatagttacaaatggtagcaagcaatgtagagaaattgaacattaactgcccatgtttagcctaaatggtagcaggcaatctcatctcatcaatttcaggcttcatgagagagggcagagacagggctgttttgaaccatactttgtaaatgaaagaaacgtacataactgcagaacatctttattccacatgcagaacaatcacgacattgacagaaggaaatagcagaatgtcgtccttccagtccaaataaaatgcctgaaaaatcttaagcagacttcttctgcttgtaccttttggcagcaactatgtacacaaaggtatttaagaagctaagtccggctaaaagccagaaaaagtaatcaagatgacccttgttcaagttatccggaatccatccaggatttccaacttgtgtagtgaagtaagtcactacagtgagaatgaaagagctcaagtaattcccaagtgaagtagtcaacagcgacanagcactacataaactacgcatg

SEQ ID NO: 4515 - DNA, 516 bp, Glycine max
  unsure (1)..(516): unsure at all n locations
  Clone ID: jC-gmfl02220065a12a1
ctcttctgccctccacacaacttttttctcctctctctctctctacaaatcacttctttcttctcttcgctgctcactgtagcgtagccatggctttcagagttggaggagcgggaggaggaaaatgcctcttctggcatgggtgttgctgagcatagcgtacgcacgttcctggaattgcagaggaagaaagttcatcgctatgtgatttttaaaattgacgagaaaaagaaagaggttgttgttgaaaaaactggaggccctgctgagagctatgacgatttcactgcatccttgcctgaaaatgattgccgatatgctatctttgactntgattttgtgacatctgagaactgccaaaagagcaaaatcttttttattgcatggtctacttcggtagcccgcatttcgcctaagatgctatatgcaacatccaaagacaggttcagaagggagctgcagggctttcattatgagattgaggccacagacccaaccgagatggatcttgaagtc

SEQ ID NO: 4516 - DNA, 337 bp, Glycine max
  unsure (1)..(337): unsure at all n locations
  Clone ID: jC-gmfl02220065a12d1
ggttggagggggagaccccaaataaccctcaacaggggaggtttattctagctggaaacaggcaatctcatcttataaaaaaaaagcttgtgaaaaaaaggaaaaaatttgggtgaaaaaaaaaaggggttgaaataaaagattcccccggggcctgaaaatttttaacttccaaacgcaaaaaaaacccttttttgggggggggaaatgagcaacccttttgcgaaaaaaaaaaaaaaaatgcggggaggggtgttgcccaaaattcataagggggtccctcctggccgcttctaaacccgcattggtggtgaggaaactaantccggggggaagc

SEQ ID NO: 4517 - DNA, 535 bp, Glycine max
  unsure (1)..(535): unsure at all n locations
  Clone ID: jC-gmfl02220065b01a1
gcaaaatcttatcttagctaccccatcacaacaaccacgatactatttctcatactctattaggcaaaaacaccaccaaatgggagaggaaaaggagcagcctaagaatgacaccgagaaaaagcccgaggaggtagcccccaagacagacgacggacccatccctgtcgtttacaaactcgacttgcattgcgagggatgcgtctagaagatcaaacgcacctgtcgccacttcgaaggtgtggaaaccgttaaggcggatctatcgtcgaacaaggtgactgttaccggtaaaatggacgccgagaagctgcgagataagattgccgagagaacaaagaagaaggttgatatcatatcagctccgacgaaaaaagaagccgccgttgcggaaaaaccgccggagaagaacgcagaagacatgaagcctgatgagaaataaccagaggataacctagagagagtactgtggatttgaagatcanactacactgtgacggttgcattgcgaaaattcgaagaatcattcttaggt

SEQ ID NO: 4518 - DNA, 417 bp, Glycine max
  Clone ID: jC-gmfl02220065b01d1
atcgttgtctttcttcggaggaggcaccacttccacgtttcgcttcagcttctcgttcaggtacggcaacatctccttcacgtccatcgttcccttcaccgtcaccaagtccttgcttacgtcgaggctcaccaattgaacacctttgaacctaagaatgattcttcgaattttcgcaatgcaaccgtcacagtgtagtttgatcttcaaaaccaccgtactctctttagggttttcttccggtggtttctcctcaggcttcttgtcttctgccttcttcttcggcggtttttccgcaacggcggcttcttttttaggcggagctggtatgatatcaaccttcttctttggtctctcggcaatcttatctcgcagcttctcggcgtccattttacccgtaacagtcaccttgttcga

SEQ ID NO: 4519 - DNA, 479 bp, Glycine max
  unsure (1)..(479): unsure at all n locations
  Clone ID: jC-gmfl02220065b02d1
aatagattgataacatacaggctacaaatcttacaccaaggaatatgttgtttcttttgccatgaatttaaagtcttacagggtcgctggtttcaaatgctgcactaatttcgttaaccacacaatatagtaacactgcaagaaattgagcacgaaacagataaagcaacaagatgactaaggttattaattattgatcactgatcaaataaactctttctttcacaaaatgtgaaccaaatgaaaggaagtgcttagacttcaaaaaagtgcatatgctgtgcagcacaattattatatattaatgtaatcatgcccttcccaaaagaaacaaacttctagtcagattaatttgactagcacttttattcattctatcgntaatttggttggaacttattaagccctcttgaagataaccctgaaggatggaaccttatcactcaaagacaatgcttgttcccatcatcaccaacata

SEQ ID NO: 4520 - DNA, 398 bp, Glycine max
  Clone ID: jC-gmfl02220065b03d1
gagtaagtaacaataacatgtaacaaagatagcacaataacacagatattcccatagtgattatttttctacagattctcatccacactaaacaaattatcttaatttagggaatcggctagtagaagaccaaccaaaacaaaagaatagaagaaaatccaaagagcggcaagctcttaaaaattctcaggactgtcatccaattgtttctcgtcttctatatcaacctctaaaatctcagggatcctctgtttgagataattagcgactctggcaggacagtggaacgcttgtgccaaaaccgaccactaaggctaattttcacaaaaggcccatccaagtcagctagttcaaccactcctgtcataccaacagaggtgtcaaagatttgacccagc

SEQ ID NO: 4521 - DNA, 387 bp, Glycine max
  unsure (1)..(387): unsure at all n locations
  Clone ID: jC-gmfl02220065b04d1
aaaataatataaaaaaccattacactctttctaatagaaagggtgagaatataaaattatacaagattaaaacatttgatattggattgtgcatgtgctataagaggcagggtaaatttgatattgcagggatgacatatttgaaattaagcacagtttgtagaacatgcatgagctaagaggcagctaaagtaaaatgtttttttttattcctacataatattgataatgcagccttttttcaagcaaacatcttccattgggtccgtcagttaaaaatcctctgacgtgcatcattcatcaacgactaccgtctcaagctctcactattgtagtccgcatacaactcanntggatctattaaccgcttcgaaagcagctgaggca

SEQ ID NO: 4522 - DNA, 490 bp, Glycine max
  Clone ID: jC-gmfl02220065b05d1
gctaggaacaaaataaaacttagttaattataattataacattcatagactacgcagtctaccttaactaatcaatcatacatttctaaataaacttaattctagagatagattgagcataaaaaaaatactaataataatttgacattttagtagaacaataagggacaaaattagtccaaacccggtacctggtcccttggcaagtggacctcatgcctctaaataccctattttcttgttattggctttcacacttttctcttcttagttaatgcataaaacaacagtatcgatactttatctccctggttgactttttcaggtcatctgaagacatatcttggactgcatcactgtttaattgcttgttatcatatattggttggtccagagttgtcccatttttcaaagaatatgaatcagcctggtttggcttcattggtcttgaaagattctggtctggtgaagctggtactactctcttata

SEQ ID NO: 4523 - DNA, 496 bp, Glycine max
  Clone ID: jC-gmfl02220065b06d1
aaaaaaaacctgatcaaggaattatatctatataccaaatgtcatcatgtattaatatgataaattaagagaaacagctacccaacaacagactaagcatcagctatgagggaacatattagaaacaacacagccattcagtattgtccaaagtacaatgacgtttcttccaatccctgttctcctctttacagcttccacggaaagcctctaactagtcgatgggagatacacccttataagatctttcgcaacaaccttttttctacaggtagggcatttaccctgagcacttatagcagctttgatgcaatccttgcaaaaaatatgaccacatcttgtcgacatttcatgtaccatagggcccatacatattggacagttgaagacaagctccttggaggttcaggtggcttttaaaactttgctccatggaactgctaccgccttccaaatttatatacttatcacaattaataatcagatttggcaattc

SEQ ID NO: 4524 - DNA, 434 bp, Glycine max
  Clone ID: jC-gmfl02220065b07a1
atcagtgcacgagaatcgccctctatcttctttcttcttcaaatcattccgatggcgattgcgtggccctctctcgatctcactcaccactccgattgcggacccttagtctccgcagacggatacatgtctcatttgcgggtgcagttccctcctctccgagacaagtgccagaaccactttccccgacctcggcaactttcgaatcgaccgggtaactggtttccggcgtctcttcaactccgacggacgcatctttttcactcaccgtgttgccgatatcacaactcacgaaagtgcttgcctttctgttgaaccatgtgatggagaattccttggtgcagctgcttttgagatgaagaacacagagattgcagcatttattgaacgggagcgcgaatgtcgatttttagctgttgtccctgaaacactag

SEQ ID NO: 4525 - DNA, 410 bp, Glycine max
  Clone ID: jC-gmfl02220065b07d1
gcaatcaaacattgttctataaatatttgttgaacgggcactggtaccagcaatttattgacaatatataaatattattctaaacatttgctggccctattaatatatgaatatatctgcatgctagaaaatagaaatctgctttgttgggtttctaacaactactacttgtcaccgccattcaacgttcgccacagtgactcttcaatcttcaatccagatggcagatgctataataagaaataattggaacagccaaattcaaaaatggcgaattgagaactgtatcgagtatcgactctgtgatgacatcaatcaaccaccataacgggttttcaaagaatcaggtggctcttcttacaagatgcttgtacccactttttcaaagtactgacgtatggtcgttttac

SEQ ID NO: 4526 - DNA, 483 bp, Glycine max
  Clone ID: jC-gmfl02220065b08a1
gtctctctctataaatccctctctcactccttcttttcgtttacctgccacacaaacaacaaccctatcttcttctttttccactttccctcagaactctcttagatttagctgtttccaatcggtttcgaccaaaaacccattaaccccttttgcagaaaagcaagattgtgctctctgcaagggtcaacgagtgtgaaaagcagaaaaagtttggtgctttgtgctaccaacatgactatagcagaggatagtttgttgcaggtggtggaggaggaagagggtcctcctgattttgctttgcttgatcctgaggacaattctaggcctcgtagaattgctctcttcgttgagccttctccttttgcatatgtctcaggatacaagaaccgtttccagaattttataaaataccttcgtgaaatgggagatgaggtgatgggtcgtgacaacacatggagggagtacccaaggaattttatg

SEQ ID NO: 4527 - DNA, 520 bp, Glycine max
  Clone ID: jC-gmfl02220065b08d1
ggcacaatccataatttttgtcccattattatatacatcaatcaaatgaatgcattacacaaccaaccacacttatgtcccataataggcttccttaaagccaaagcaatgaacaattcaaagaaccatccaaagctcaaaagaagcatttgctttgcatcaatcaccacgctatgtgttggcttctggatctggagattggaaaatacgttgagccaaccattgaaagggtctcaagagttgagcccttttcttgcgccagaaccaaatggcagcattgtagttttcattgcgaatcttctgagtggctgctctccaatcatacttctccatctacaaacgtgcagcttctccatggtttctctaactctttgtcatccaaaagcggctttagtttgctcaggcaatcttcaagatccctcggtgataagaggtaaccaattttgccatcttggtcttctggaaatatgtctggaacgccaccggcacgcgctcccaccacagggattcctgatgacat

SEQ ID NO: 4528 - DNA, 460 bp, Glycine max
  unsure (1)..(460): unsure at all n locations
  Clone ID: jC-gmfl02220065b09a1
gtgcaataattgtaaatcatgtaattcttttgcactgatatcagacgtttccctcaaggccttcctccagaatgctccattgcatgagaatatttaattcaatgttgcatatcattataaaatgattcctcatgaaccggacccacatgtgttgcctattacgttaatttactttcttgtgtaaattaatgcaactaaaactgttattattgttggtttgtgctttgttgagcactactccattgtttgtggcgaaagataattatagcgtgcaaaattatattcatggcagtgtatatgtgctgaaattgtaaagtattttcattaataaaattgttggagttttatttanaaaaaaaaaaaaaacaaaaaccaagaaaataacaaattcacaactaagtttacaactttaatgctgaataaaataaattataaaaaaaaaaaaagggggggcggcccc

SEQ ID NO: 4529 - DNA, 389 bp, Glycine max
  Clone ID: jC-gmfl02220065b09d1
aaaaaaaaacccccccattttttttaaggaaaaacccttcaaatttccgcccaaacccccggccgaaaaaaaaaaggggccccccaaaaatattttccccccaaaaaaggggggggggggccaaaaaagcccaaccccaaaaaaaaaacggggtggggggggttatttcccccaaaaaagaaatttcccctgaaggggccccccgggggggccccgcccgggggggcatttttaaagggggggccccatggaaaaaaaatttcccccgccgggggccctttggggggggggcccggggggaaacctttttttttcgggcaaaaaaaatcccgggtttcaaattttgggccccggggccgaatttgggggttaggggcggggggggggga

SEQ ID NO: 4530 - DNA, 496 bp, Glycine max
  unsure (1)..(496): unsure at all n locations
  Clone ID: jC-gmfl02220065b10a1
ctccacccacccagcatatctctctattcctatttattagcacccctcacattaccttgtgtcaccaactactttgactcctttaccataccattacaataattatcaaacctaaccagtaaaaaatggtgacccgggaaggaaatccgcaacgctcagcgttcccatggacccgccaccatcttggccttcggcaccgccacgccgtccaactgcgtctcccaagccgattaccctgactactacttccgcattaccaacagcgaacacatgactgatctcaaagaaaagttcaagcgcatgtgtgaaaagtccatgataaagaagcgatacatgcacctgacggaggagtttctgaaagagaacccgaacatgtgcgagtacatggcgccatcgctggacgtgagacaagacgtantggtgatggaggtgccgaagctgggaaaacaagccgcaacgaaagcgataaggagtggggtcaaccaaagtcaaagat

SEQ ID NO: 4531 - DNA, 319 bp, Glycine max
  Clone ID: jC-gmfl02220065b10d1
caataacaaacacacgatcttgttcatattaaattattcttgtacaacattatgctacgataaatccacaagtgaaactagtaataataacaaactttccctggtatttccgagggttccttattgatcactcttaaatcactagtcaccgcatcagcatgatttatccctccaagggaacactgtgaagaacaacggtctcaacggttagacccggcccgaatccgaatagcaccccccactctaacccttctccagtggtactcttcccttcctccttagacttcttcctcatttcatccagaatgaacaaaacaca

SEQ ID NO: 4532 - DNA, 321 bp, Glycine max
  Clone ID: jC-gmfl02220065b11a1
ggtgtacgcagatcttgtgcactttacgctcttcgcacctgctttctgctgttgttcttgcggattggctttgtggggtgtgacaaattgtggtttttctgttgagggtctgaaaggtggtttttttgtgtgtgtgtgtctggaaatgaggtgcttttgctgaagggtgttggtggtggtttttggttttgaagattgtggctgtggaaagggaaggtgcatgtgggatcccaattgggttctatgtttggtgaagaagggtttgggagaagggagaaaaagctgggattgttgtgggtttgtgataatgagcaggggtag

SEQ ID NO: 4533 - DNA, 464 bp, Glycine max
  Clone ID: jC-gmfl02220065b11d1
gaggtataggatgcgaggcttttaaattccattaatccaattaaaatacaaacatccaagacatctgtttcaagattgtgtcttcactgcaaacacctaaaatggttatggattgacttacaagataggactcaatttcatcgtcaacagtctcatgatagttgtaaccaaagttcataccctttgtaggccagagaaagctgacacttttttctaaggaagcactgcctttaagcctctcactctcatttttacacaaaccatcaccagagactacaacagctccatccctaaaaagtgtctttttctctaacaggattgctccccctggccaaaatattcacaagaaaaacacccttcttctagaacattcttgtcataccatactgaacaggaccaacttttctatgagcagtggccccagctgcagcaccgattccaccatattgatgtgcctttggctg

SEQ ID NO: 4534 - DNA, 551 bp, Glycine max
  unsure (1)..(551): unsure at all n locations
  Clone ID: jC-gmfl02220065b12a1
ctcgagccgctttctctctctaccattgccatggatccctacaagcaccggccatccagcgccttcaattctcccttctggactacaaattctggtgctcctatttggaacaacaacttctctttaccgttggagctagaggtccaattctgctggaggattatcatcttgtggagaagcttgcaaattttgatagggaacgtatcccagaacgtgttgtccatgccaggggcgctagtgcaaagggtttctttgaggtcacccatgacatttctcacctgacatgtgcagatttccttcgagcccctggagttcagacgcctgtaattgttcgtttctcaactgtcattcatgagcgtggtagccctgaaaccttgagggaccctcgaggttttgccgtgaagttttacaccaganagggtaactttgaccttgttggaaacaaccttcccgtcttcttgtacgtgatggcatgaagtttccagatatggttcatgctcttaaacccaatcccaagaaccacatccaggagaattggaggatccttgact

SEQ ID NO: 4535 - DNA, 562 bp, Glycine max
  unsure (1)..(562): unsure at all n locations
  Clone ID: jC-gmfl02220065b12d1
actaacaaatacaaacggcatttattgagataggtcaacgagttgcattcatggagttatgggtacacacaacataatattgcaagaaaaggattagttctttcaggtaatccaaaatcacatccttatcgtactctttgcacgtctgcaactctaacaatcattctggagttggcaacaacattaaatatttggcctcgtgctgagatgagaagctatcttttggcctagagaacggtcagcctgagaccagtatgatatccagacacttgcggatctcatgggtgacccgtgggtcagataaagcatcaacccatcggcgagcaaatctatcttgcctgtcaggtgcccaagaccggtatctctctccgggctgcgttgaagttgttctccttctcaattccacacttttcacgccttccactgcagatagcgngaggtatggggaacctttctgcatgacgacaggatcataccttgagggaagtaattgacctcctatccctgtgaatgaaattcatgaaaccttcatgatgattattgtggtgagcacactttggag

SEQ ID NO: 4536 - DNA, 539 bp, Glycine max
  Clone ID: jC-gmfl02220065c01a1
ctctcgctctagttttttcgttccgcgactcagcctttcgaatcctctcacccagaggtacgattcgtaccatgtagttgtgggatttcggctttgccacttcttgattccaataattttggtttctttttttcccctaatttgatttccccagttagggtttttaactctattcgatcggcgatttcgaatactcggaggctcgaatcgtgttgggggttttccgttttgattaaaaaagtttccgttttttgtgttgggtgatcaagggttgtttgatttttttcttgcgatcgagaatgggtgaagcttcgggagctggttccgctgattgtttcagccagatgatgtcgtcgatgcctggttttcgctttcatcccacggatgaggagttggtgatgtactatcttgaagcggagatttgtgggaagaagctgaagctcgaactgattcatgaaaccgatgtgtataaatgggatcccgaggattcgccttagcaatctatattgaaactggagattggcaatggttcttttctg

SEQ ID NO: 4537 - DNA, 271 bp, Glycine max
  Clone ID: jC-gmfl02220065c01d1
gaaaatatgttaggacagcactgtttggaaattctggggaaatcccaaacaacagtcattttgggagggcccagacaaaatacctaacaacaaaactttggatttacataaatatattcaaggggaaatacttttacctactagtcttaagtttccaacataaaacccaacaaaaagcccataaagcaataagaattgataataaaaggaatggaagtccctttctgccaactcttttcatagttccagtggctttacctgatgcagcaat

SEQ ID NO: 4538 - DNA, 437 bp, Glycine max
  Clone ID: jC-gmfl02220065c02d1
cacaaaaatcgggttaattttttgaaaaaacccggcctaccgaccttttttacaggaaccaattaaatttcttccgaaagaaaaaccctctcaaagaagggaaagaaaaattttttaaaaaaaaaaaatgggaaaaaccagcttccttatttacatggaaagggggttcgaaattttaatttggaaacggggaatttgccaattggggagcctccccgaaactgggaattggagtcgttgggctgtttataaattttgggggggcccaaccccatcacaagggttcgtaagggggggggggaacttggttaaacccctgaatggggcctaacggaggggggggaaagaaacatgggcattttttctggcgtggcgggggaattgccaacccctcctgcgggacccaccggggggtgcgggcccttcctttagggggc

SEQ ID NO: 4539 - DNA, 427 bp, Glycine max
  unsure (1)..(427): unsure at all n locations
  Clone ID: jC-gmfl02220065c03d1
caaagaatggtattactaataccagaatgtacttttataattatttatatacaaagagaacagttgtggattccacgtcccataataaggggcttttcttagcatccaataaggtgaggcataaggaagacaagcctagccttaaaaccttttcctcaatcagaaacatatatttttctcttcttctgatgaatgaaatcaattctacaaaaatcagcaatatacaaacatatttcctatttgacaattcagctaataaatgaatgaagtggctttttggatcttatcttcctaaaataagctcaatctatacgtcattgccacatggnttgatgctggaatgtgactaatggcggggtaagtgaatgaaaagtgtagcccctctgtgaaagtttgatcttccaaatgaattgaattgaattgaatt

SEQ ID NO: 4540 - DNA, 380 bp, Glycine max
  Clone ID: jC-gmfl02220065c04d1
atagatactttgcctttcataaaaaaaataaaaatggaatgaagttgaagagtaggcagcgaggaaaattgacagtttcacaccatctggacccaaataccctggcttggaatttcttgatgaaccagaaacagcagatagaaacccggtggcgcaagaacagcggaaaccggcgcggtaacttcaacctcgtacgtcgattccccaaccttactcaaatcgtgtggctccagcaccagcatcctctgattcatggagaacgagtgcgtgttaaatggcggcgacagcatcgtaaccgacaccgaatccccaaccaaagtcgcgctcatcacctcaaaccgaagcctcaacgtttgaccgtacttgagttttgtttggga

SEQ ID NO: 4541 - DNA, 278 bp, Glycine max
  unsure (1)..(278): unsure at all n locations
  Clone ID: jC-gmfl02220065c05d1
aaaaaacataattttaattgacactctgttttacatttgtattaaataaaaaggggtagcttttgggtttattccaaatggaccgaataaccacactccaaagttgaaaaaacgcaaacaaggggccctttattcccctcgcttttgacaaaaaaaaaaaaactttgtgggcaggcttatacaaactgcatagttgaggatttgcatggcnaggcgaacgggaaatatggtgtaggaaaaaattcatgttgtggccataccgtctatgatgcttgggc

SEQ ID NO: 4542 - DNA, 570 bp, Glycine max
  unsure (1)..(570): unsure at all n locations
  Clone ID: jC-gmfl02220065c06d1
attcctctcttctcatcacattatattatatatttcttaattaacacctaggacatatatatgtctacaccaaacatatagctacaataatttctcacagaaaagacattaatccttgatgagctcccattattggttggctggcgtgtcttagcatcccctccaactctgtagcaaacctctccatggctttggctggcaagctaattggtaccactatcacatgctctcctttgtggttcttacatgacacgtacacgcttgtcatttgaggaaaacttgtcattccacccgtggcaggcccaccataaatgggcttgccccacccaaaatcaacctcatcaagccccaatacgtgtagtattcgaaacaaggtagggacctcgtagttgcttgatggggtcttcctttcaccacaattaaatctgaggtagagcgcacatactcctatccacgttggattntgcattttttaccaattccaaagcatacccaaatggattctcgcataaccttcgtgatgtggttaccgctgccgagagcacaaatccattaccgtaataacccttt

SEQ ID NO: 4543 - DNA, 532 bp, Glycine max
  unsure (1)..(532): unsure at all n locations
  Clone ID: jC-gmfl02220065c07a1
gttactgcacctatatcttcaccttctcctgttccagccccaactcctgctcctatatcttcaggaactgctgtggaagggtctgatatctatgggcaggctgcatccaatctggttgctggaaagcaacttggaagggaacaattcaccaaattcttgatatgggtggagggagctgggacagggataccgttgtccgtgctcttcgagctgcctacaacaaccctgagagagctgttgaatatttgtatacaggtatccccgagcaagctgaagctccacttgtagcccaagtgcctgcaagtgctcaacctacaaatcctcctgctgatgctccacaaacagcacaacctgctccagttacctcagctggacctaatgctaatccattagacctttttccccagggtctccctaacgtgggttctggtgctgctggtgctggttcattagactttttacgcaataatcaacaattccaagccttgcgagctatggtgcangctaatccacaaatattgcagcctatgct

SEQ ID NO: 4544 - DNA, 471 bp, Glycine max
  Clone ID: jC-gmfl02220065c07d1
atataaaacttgacagcaaaaagtcattatatttccaaaaacatgaactgaacccagaaacagtctgtgtcaaacgaattacacatctatcgacttgcgaatgaacaagcatgcacaattacacacgttaaaaggatgcacaataccagtaatacaaggcaaacaactatgtatatgaaatactaagaaaccctcgacgggctggaaatgataaatacatgggcaataatatggaggagaataaaacatcccttatccacttgagatttgacattatcaaaagcattacctcattaaacatagtatgtaacaaagacccatcgagaaaaaagatgacacgaaataatttggcaaattcgaaggagatctattgttcctcgaactcatgcatgtgatccaaaggtagttggcagccaattcctatttttgttacagcgaagtacacctccatacgatgcacgatcaaaccca

SEQ ID NO: 4545 - DNA, 518 bp, Glycine max
  Clone ID: jC-gmfl02220065c08a1
cacactttgcctactctagtgtcttattcataggcccaagagcaaagaaactaagaagattttgagcacaatggcatccacacaatgcttcttgcaccaccatgccctcaccactccaaccagagcttcatcacagcgcttagttgtgagcaccaaaccaaaccacattgtttgcaaggcacaaaagcaggttgtccaagagggtgaggacactactaacattgtctctcgcaggttggccctcactgttctcattggtgctgctgctgttggctctaaggttgcacctgctgatgctgcctatggagaagctgccaatgtgtttggaaagccaaagacaaacactgacttccttccatacaatggggatggattcaaactctcaattccctcaaagtggaacccaagcaaagaggttgagtacccacgtcaggttcttagatatgaggacaaatttgactcaacagcaatgttgctgtcatggtcactgcaactgacaagaagtccatcactgacta

SEQ ID NO: 4546 - DNA, 361 bp, Glycine max
  Clone ID: jC-gmfl02220065c08d1
agcaacttaaaatgcttaattaaagaaaaaaaagggggggcaaaaaaggagggtaagtccttaaaagacatgaaaaatttagaatcaaagtgcttactccaaccaacagcctcaaaaactgaaacttgtggacaaaaagtggccacataattcaacacatacacaccccttcaagatgattcacatgccgaatagccctccactgataagttcttaggcaacactgaaagaacttgctgtgctctccacaaatttttttgctcccttaaaccattttttgtctccagcttgagccttgcaaatgtatagtttgccatcttttacagttgctgcaatcaagtggtgcttgccaccttcattt

SEQ ID NO: 4547 - DNA, 446 bp, Glycine max
  Clone ID: jC-gmfl02220065c09a1
ctgggtcaaagaccataagtgtttttcgtactgttacaaatgttgggcctacaagcacgtatgttgtgaatactcacgggccgaaggggattaaggtttttgttcaaccaagttcgttggctttttaagaagacccggaaaaaggaatatgtttcaggttatactgcaaccaattggtgcccggcgtgggttatttgggaatttgtcttggacagatggcaagctcagaataaccaggcctatcacaattctgccttacaaattactctcgatcaccattcttatgctatcattgtcttcttatgagtgtgttcgcatttgctgctctttaggctgtcatatgagcgtggcccctactcctattgcattaagctctttttttttatttgtttatgtaaagccttgtcataaattaggcattcttaaaatgctgatggaatttgagc

SEQ ID NO: 4548 - DNA, 407 bp, Glycine max
  Clone ID: jC-gmfl02220065c09d1
agggagatagctccagttccatcagcattcgaaaaataccttatttatgacaaagctttacctaaaaaaaaaaaaaagaagagcttgtggcagtaggagttggaaacacgctcttattacggcctagaaaacagcacatgcaaccacactcaaaagacgacgatgataacataagaatgctgatcgagagtaattgataaggcagaattgggataggactggtaactttgggcttgccatatggccaagacaaattcccaaataacccacgacgggcaccaatgggctgcagtatgacctgaaacttcttcttttctccggcttttttaaaagtcaccgaacttggtgggacaagagccttaatccccgtgggcccgtgagtattcacagagacgtgcttggaggcc

SEQ ID NO: 4549 - DNA, 462 bp, Glycine max
  Clone ID: jC-gmfl02220065c10a1
gaattttcttcatccttctctgttctcctagaacttgattacttgaacattccctatgacagatgaggtggttcttctggatttctggccaagtccatttgggatgagggtcaggattgcacttgctgaaaaggggtttcgatatgagtacaaagaagaggacttgaggaacaagagtcctcttctcttacaaatgaacccggttcacaagaagattccggttctcatccacaatggcaaacccatttccgaatccctcattgctgttcagtacattgaggaggtttggaatgacagaaatcccttgttgccttcagacccttaccagagagctcaggctagattctgggctgattatgttgacattaagatacatgatcttggaaagaagatttggacatcaaagggagaagaaaaagaagctgccaagaaggagttcatagaggcccttaaattgttgga

SEQ ID NO: 4550 - DNA, 572 bp, Glycine max
  Clone ID: jC-gmfl02220065c10d1
gataatacggaaaatactctattgcaaaaccaacaaacacatgaaagatacatcagaaaaattttaaaacctacacaatccaacagaaagcatgaagtttggcacatccaaatgcctttttattacacaaatattatttagttgaaaggtcaagaacgaccaatacttcactatggctattaagatccaacatgaaacctactcgatgactaacttctttcttatctccacaacgaactcatagaccttgtgctgatcaggaagagactttgcaacactctctttctgtaggcacctcttggcccaagcaacaaacctggggcactcattctcaatgttgaggctgccaaaagtctcatagactttgaccaagtgtagaatggaacaagtgctatatccacaaaaccaatattgtctcctccaaataagtcttatctcccagctgttcctccaacaatttaagggcctctatgaactccttcttggcagcttctttttcttctccctttgatgtccaaatcttctttccaagatcatgtatcttaatgtcaacataatcagcccagaatcta

SEQ ID NO: 4551 - DNA, 576 bp, Glycine max
  unsure (1)..(576): unsure at all n locations
  Clone ID: jC-gmfl02220065c11a1
atctgagtggaaatatatcaggatcagacccattaaaggacaaccgcttacttttgaaagcagaagctttagatgattctcatgaagcaaggaacactgctgctgttgttaacgagctgtccaaaggaaataacanaaattttggtttctcatcctgtgaatgctaaacgtgctgcagaagggaagaacatagcaaatgtagaccttttaagaggctgtggcattcgaattgaggttacaccatttataaatagacatggtttgcggccatgcatggtagctccaacgaaaataattgctggcctgggcttatcacttggtattgatattctagatgctcctggagcaactggggactatcgaactttactaacatcaaaagcatcagcaatagctaaggcactctcagctcctttacagtcctgtcccagagtttttgttcctggagaggatgagcttaaagcaggccggtcagatggctatgactttggatttcttcatattaaggcaatagatgatgctggccatgacaaggcgagcatcctcaggtcanagcattagaagctgtagataaag

SEQ ID NO: 4552 - DNA, 581 bp, Glycine max
  unsure (1)..(581): unsure at all n locations
  Clone ID: jC-gmfl02220065c11d1
aatagaatgatttttttgaattcatatcaagctttaggactctcctacgagagtgcaaaaacaacagagaaaaatttatttaagttgagtttacattgttattttcagaacaaggcttcttattctacaaatagtacagaaaatcaaaatttgatttttgtaccttgaaatcacttgatttcagagtgagaaaagaaaaatattaactgccataacactccctcttcctagctaagcagttcccgcatctaagttaaggaatttctttacaattcccatcatttctcccccagggaaacgccccagacatccctttgcagctgccacttcatttagctcataaaccgaatcaccactataagcttgacaacatttgnctcttctctcttctgtttccaaatcatcaagcnaagtcttcacccgacttaacactcggaataggaaatgggtcaagagaagttttgagaatggtggattccccaattgcaccaacaaagtctttcaaccggcaaattgtgaacgggaccgattcaaagctatgatctncatattctactggagtagagtgatctctgtgacac

SEQ ID NO: 4553 - DNA, 317 bp, Glycine max
  Clone ID: jC-gmfl02220065c12a1
ttcagaagctagtattttgaagctcaagaattacctgaagaaaggtatggggctgacttgtgaaattccagctaaaggacctgaagtgaaacctagggataatagtggggcacagggtcatggtttcaagcagaatattaggggtcccaaaataggtaaatcaagtttcaagcgacagtctcaacgcattttagcttcacagacacctgtatcagaacacaaagagcatgctatacatattggaacagaatcccaattatcaaaagacacagcagattgtgagaaccaaagttgtactgatgagaaaaacaatcagc

SEQ ID NO: 4554 - DNA, 427 bp, Glycine max
  Clone ID: jC-gmfl02220065c12d1
aagctaaaaaaaatacttaaatataacagattaaacaaacgggtgcaaactataatgtactaattcacattatataaaaaatgggtatagacactgaattaactgtactagaactaccacaagtcctttgtcttgaagggactctgttgtttctaaagggtttaagggcttttcaatactagtaagctttccaccacataccaaaccatttttacagggatggtttctttgctctgaagacaccccacaagtagtacttttcttgaaatcttcggcattgaatagggggtaatatagaaggaaaaattagaagctctgcattttcaacctctgttcttaaggaaaggtcaaagtacatcatgtcctctaccagcttgtgaaaggccctctcaactctttcactatcaggaaaaaaataaagagcaat

SEQ ID NO: 4555 - DNA, 456 bp, Glycine max
  Clone ID: jC-gmfl02220065d01a1
gaaacccgaaacgtttcggcttgcttgacccgtttcgcgcttatcctcctactcaatggcggtgcctccgtcttcgctggagaagccattcgatgactttagggttcagctggaagaatctggaaccttgcgcgaacgaattcgaagcgtcggttcagagattgagtccttcactaggctcatctatgccacacttcttctcggtcaccagtctcgtcccactcccgagcttttagagaaggccaagtctcatgtgaatgtgttaaagaagccgtataagcaactagctgaagatgttggaggatgccctgtgcaatactataggtaccatggtgattggaagagtgagacacagtctgtagtttcaatgcttacatttatgcactggcttgaaacaggacgccttctcgagcacagagaggctgatgaaaaacttgggctgaatagttcacaatt

SEQ ID NO: 4556 - DNA, 175 bp, Glycine max
  Clone ID: jC-gmfl02220065d01d1
cttactgacaaaagaaggggcaatcctaagaaacagcccggcaaaaaaaaaatgaaaaccaaaaccaagcaaaaagaacaaaaaagaaaaaccaccaaaacaaaaggaacaaaaattgaaaaaaaaagagaaaaggggcaaaaccatcgaccctataagaaaaagaacgggagac

SEQ ID NO: 4557 - DNA, 394 bp, Glycine max
  Clone ID: jC-gmfl02220065d02d1
ctgaagatagcatcttgattcaagcattctacgactagaaaaacttgcagacttgacattactagtcatttacgtacgacgggggattattatagcatttgaatttgacactaaagtttcaagggaagttaagcagcttgatagatactagtactatatatctaagggtcatattgtaatagggaaatgtctagtttcatcacctcgagagagggagaatgttgactttggagtcttattgccatacttgacactaattctggattctcctaagaacccataaaagctataggaaccgtgcacatttgagactccctttacacgacccgtttgccactcttgaagaagtttgtccaccgcatcacctgctgggagggtcttgaaattattggct

SEQ ID NO: 4558 - DNA, 323 bp, Glycine max
  Clone ID: jC-gmfl02220065d03d1
atagatactttgcctttcataaaaaaaataaaaatggaatgaagttgaagagtaggcagcgaggaaaattgacagtttcacaccatctggacccaaattccctggcttgggaatttcttgatgaaccagaaacagcagatagaaacccggtggcgcaagaacagcggaaaccggcgcggtaacttcaacctcgtacgtcgattccccaaccttactcaaatcgtgtggctccagcaccagcatcctctgattcatggagaacgagtgccgtgttaaatggcggcgacagcatcgtaaccgacaccgaatccccaaccaaagtc

SEQ ID NO: 4559 - DNA, 439 bp, Glycine max
  Clone ID: jC-gmfl02220065d04d1
atagatactttgcctttcataaaaaaaataaaaatggaatgatgttgaagagtaggcatcgaggaaaattgacagtttcacaccatctggacccaaataccctggcttggaatttcttgatgaaccagagacagcagatagaaacccggtggcgcaagaacagcggaaaccggcgcggctacttcaacctcgtacgtcgattccccaaccttactcaaatattgtgggtgcagtaccagcatcctctgattcatggagaacgagtgcgtgtttaatggcggagacagcatcgtaaccgactccgaatccccaaccaaagtcgcgctcatcacctcaaaccgaagcctcaacgtatgacacgacttgagttttgtttgtgacgcaggaaacactattgtgggacgcacgctagagaattcatgctcaagataccaaggag

SEQ ID NO: 4560 - DNA, 460 bp, Glycine max
  unsure (1)..(460): unsure at all n locations
  Clone ID: jC-gmfl02220065d05d1
gactaattaaatcaaaacggaaaggatcaactatagatattactaatactaactaccaatacccatgttcttcaagaatacaatttcacccgtaagcagtgttaaaagaaagaacagaaaggaacgggtagaaaacaaaaaatgtccacatgactgtcctctctcacttctgaccaccagcctcagttggttcaaccacctcagcttctacaatttctggggtatggggctggtttaccgtggactggaactgaccaggtgtagaccatttaccagtgagagccatacccatcatctcatatatcttccctccaagttgtgctggattatcaggcgtaaaaccactggaaaccaaagcagcatcatacaaaagatcgatagctctgagggcatcttcatcgtcagaatttggtttaaatgcagcatncaagttcctgatatagaatgggcagggttgatc

SEQ ID NO: 4561 - DNA, 530 bp, Glycine max
  Clone ID: jC-gmfl02220065d06d1
gaaatactcgatatagatgctcatagttatttgcacaaaactggtaaaattccagatcaataaggattgcggcgaagccgcaaagatacaacattcattagggaaaacaggagtggggaaaaataaggggggaggggttgaggaagaatcaattgctcacagagcatgctaagacacctaaatattccacacacagttattgaaacaacccaatatagagaaaatttttctttggtgtattataatataaagcagaaccaaatgacttggaagattctactttcttataccattcacttggcaagttcgttgcggatgagttttgctgcggcaaccatgtttgtgagggctggcttacctcagtgtacttacgggtcttgagcccacagtcagggttcacccacaagatgttcttctcgagcactgccagcatcttgttgattctgtcagcaatttcttcagttggtggtattcttgtggagtggatgtcatagacaccagggccaattccagcaccatacttcacacct

SEQ ID NO: 4562 - DNA, 569 bp, Glycine max
  unsure (1)..(569): unsure at all n locations
  Clone ID: jC-gmfl02220065d07a1
ctcgaccagacttcttctggcgatgttttccatatggaaaggatgtttatgataaatggggagatgtcatttgtcatggtgaccaaaaggtcataaaggaaggatacaagagtttcccaagtgggtcatacttcaagggtcattttctggtctgggttttttatcattgtacttatctggaaaaataaaagcatttgatcgcaaaggtcatgttgcaaaactttgcattgtttttctaccactacttgttgcatcacttgttggcatttctcgagttgatgactactggcaccactggcaagacgtgtttgcgggaggtcttttagggcttacagtggctacattttgctatttgcagttttttccttctccttatcattctgaaggctggggtccttatgcgtattttaggatgttggaagaatctcgtggtatgacccaagtnnctagtgttcaaaattctggtcaagcgcagttagcagaggctcangctgagagccaagaggaaacaggtctcacgggtgtatggggttaaacttatacgggatcatcatgcagcattgatgact

SEQ ID NO: 4563 - DNA, 499 bp, Glycine max
  unsure (1)..(499): unsure at all n locations
  Clone ID: jC-gmfl02220065d07d1
gaatgaacggcaatcttctcaagagatttcgtattttcttatgtcaacatattcacaaaatattgaaataacaaaggttaattgtcccaaacctgactcttacaaacaactacgcttcaaggttttcagagacactagtgactgaatagaaacaactattcaacaaaatgtgttagttttaaatactggttaaaatcctaggctacgaactaacatctgatttacattttacagagagcaagatcatgaaatgtacagactttatcccctcccagattcacagtcattcaatgctgcatgatgatcccgtgataaagttaaccccatacacccgtggagaccttgttcctcttggctctcagcctgagcctctgctaactgcgcttgaccagaattttgaacactaggaacttgngtcataccacgagattcttccaacatcctaaaatacgcatagggaccccagccttcagaatgataaggaggagggaaaaactgc

SEQ ID NO: 4564 - DNA, 481 bp, Glycine max
  unsure (1)..(481): unsure at all n locations
  Clone ID: jC-gmfl02220065d08a1
cagtgacagagtaaaggaggcataccgatgactatggcgatgacggcgtcgcagttgcggtgcggttgggggtggaggccaacgccgaatcagcagcagcaacgacgtcgtatggttccgggtggtgtgttccatcgctatagagaacgcgaagaacaaagagagagcgaaactgaagaagctcttcgatgaagcgtacgagaggtgccgcactgctcccaccgaaggcgtttccttcactctccaacaattcaccgacgctctcgacaagtacgacttcaacgccgaaatgggcaccaaggttaagggcactgtttttgccacggataacaatggagcttatgttgacattactgctaagtccacggcctacttgcctcttcatgaggcttgcatccacagaattaagaatgtggaagaagcatgcataattcntggcgtgagagaggaatttatgatcattgatgagaatcagcggatg

SEQ ID NO: 4565 - DNA, 511 bp, Glycine max
  Clone ID: jC-gmfl02220065d08d1
aaatctggttttgaactggtttcactattgtcaatctgactaaagataacagggacaacctctcacaataatttggacagaaaataaagagttatacaattgcctttactacaaaactgagttgctaaaaagaaccgctacattagttcatctttctacaacaatatttggagtaaggtgtaaaaagaaaaaatagataaaagaaagaaaaaaaagggggggaggggaggaaaagaggactcagttctcaattctctcaatcacgaatcttcagctgggggtacctcactcagatccactccctctggaggcaagtctgaagttagtggtcctaagattccttcaccgctgagagttaatccactctctggctggaatctaagcatatcagcacgagccatagcttctgcttgagcaattctctgtctgaatgtctgagccatctcctccgccttctcaaagacaagctttggattgcgaaatcatgtcacaggtgtgggttccaactttt

SEQ ID NO: 4566 - DNA, 593 bp, Glycine max
  unsure (1)..(593): unsure at all n locations
  Clone ID: jC-gmfl02220065d09a1
ccacattcaaatccaaatggccctttacattacactaataattggcctcctagtaaacaccctagtactctataaatagcatttgcatgcaccttagtcttcaccaaaatactcctcttggccatcttgtggtgggggccctttttttaagctatttccttctcttaacacaattggttgtgccaattgccatagtcaccaaccaattaacaaaggtatatatatcatcatatcatcaccaaatgaaaaatattgggttgttttttcttgtggtggtggctacttttgtggtggcagccacagctggtagcttttaccaagactttgaaataacgtgggggtggggagcgtgccaaaatctatgagaatggaaaccttctcacactctcccttgacagagcctctggctctggctttcgttccaaaaaagagtacttgttcggaaaaattgacatgcagctcaagcttgtgcctggtaactctgctggaacagtaactgcctattatttatcttctctggggcctactcatgacgaaatagactntgagtttttgggttacttgagtggtgatcctacactcttcacacgaac

SEQ ID NO: 4567 - DNA, 564 bp, Glycine max
  Clone ID: jC-gmfl02220065d09d1
gaatataattttgcacgctataattatctttcgccacaaacaatggagtagtgctcaacaaagcacaaaccaacaataataacagttttagttgcattaatttacacaagaaagtaaattaacgtaataggcaacacatgtgtgtcacgttcatgaggatcattttataatgatatgcaacattgaattaaatattctcatgcaatggagcattctggaggaaggccttgagggaaacgtctgatatcagtgcaataattgtaaatcatgtaattcttttgcacccaacggatctttgcctgccccgtggcgtccagtgattggccagtggaggaagaagtttgggaattgaagtttctgtatgaggctgtgaatggggccttgctccaatccgttttcacaagcccaccccttgtggcccaatccccagcgttccaaagactagagtatattctcatgggttggctctttgggaatggaaccccttttgtctccaaattcttgaactcccttattggggtcccgtccacagagaatatgatgcttgcaggattccattggacg

SEQ ID NO: 4568 - DNA, 538 bp, Glycine max
  unsure (1)..(538): unsure at all n locations
  Clone ID: jC-gmfl02220065d10a1
ccacattcaaatccaaatggccctttacatttcactaataattggcctcctagtaaacaccctagtactctataaatagcatttgcatgcaccttagtcttcaccaaaatactcctcttggcatcttggggtggggtcctttttttaagctatttccttctcttaacacaattggttgtgccaattgccatagtcaccaaccaattaacaaaggtatatatatcatcatatcatcaccaaatgaaaaatattgggttgttttttcttgtggtggtggctacttttgtggtggcagccacagctggtagcttttaccaagactttgaaataacgtggggtggtgagcgtgccaaaatctatgagaatgganaccttctcacactctccttgacagaggcttggctctggctttcgttccaaaaagagtacttgttcggaaaaattgacatgcagctcaagcttgtgcctggtaactctgctggaacagtaactgcctattatttatcttctctggggcctactcatgacgaaatagact

SEQ ID NO: 4569 - DNA, 545 bp, Glycine max
  unsure (1)..(545): unsure at all n locations
  Clone ID: jC-gmfl02220065d10d1
gaatataattttgcacgctataattatctttcgccacaaacaatggagtagtgctcaacaaagcacaaaccaacaataataacagttttagttgcattaatttacacaagaaagtaaattaacgtaataggcaacacatgtgtgtcacgttcatgaggatcattttataatgatatgcaacattgaattaaatattctcatgcaatggagcattctggaggaaggccttgagggaaacgtctgatatcagtgcaataattgtaaatcatgtaattcttttgcacccaacggatctttgcctgccccgtggcgtccagtgattggccagtggaagaaagaagtttgggaattgaagtttctgtatgaggctgtgaatggggccttgctccaatccgttttcacaagcccacnccttgtggcccaatcttnagcgttccaaagactagagtatattctcatgggttggctctttgggaatggaaccctttttgtctccaaattcttgaactcccttattggagtcccgtccacagagaatatgatgc

SEQ ID NO: 4570 - DNA, 574 bp, Glycine max
  unsure (1)..(574): unsure at all n locations
  Clone ID: jC-gmfl02220065d11a1
gtgatttcagtgagtgatcggtgttcacttgatctcatcataatcgtcagcgtcaattgaagaagatgccgatcagaaacatcgccgtcggaaggcctgaagaggcgactcaccccgacacggtgaaggcggctttggctgagttcatctcaaccttcatcttcgtgttcgccggctcaggctccggcatcgcctacaacaagctcaccgacaacggcgctgccacccctgccggcctcatctccgcctccatcgcccatgcattcgccctcttcgtcgccgtctccgtcggcgccaacatctccggcggccacgtcaaccccgccgtcaccttcggcgccttcgtcggcggcaacatcaccttcctccgcggcatcgtctacgtcatcgcccagctcctcggctccatcgtcgcctccctcctcctggncttcgtcaccgccttcactgttccagcattcggactctccgntggagttggagttggcaacgccttgtggtggggatcgtgatgaccttcgtctggtgtacacggtctacgcactgccattgaccccagaagggtatttgggaa

SEQ ID NO: 4571 - DNA, 548 bp, Glycine max
  Clone ID: jC-gmfl02220065d11d1
catgatcatcaaccatccaaggatttaagacgaaaggaacaagtacaaccctcgaaagtgaattaggaagaaaacacaaggaaggaaaaccatacacagaagaagattccagagaaattcaataatacacaattttttttttttttattttcatttccccccctctagtagtcagtggtgggaagctgctcgtgggtgtggctgataaagacaacctcgtaaacaaggccagcgattccaccaccgatgagaggcccggcccagtagatccaggtggttggtccaggtccagctcacgacagcaggcccaaatgtcacagcggggttcatggccgctccagagaaggccccacccaacaaaatgttagcgccgacaatgaaaccaatggcgatgggagcaataattcccaaattacccttcttggggtcatgggcagttgcgttagccgtgtacaccagaccgaaggtcatcacgatctccaacaccaaggcgttgccaactccaactccagcggagagtccgaatgctggacagtggaggcggtgac

SEQ ID NO: 4572 - DNA, 518 bp, Glycine max
  unsure (1)..(518): unsure at all n locations
  Clone ID: jC-gmfl02220065d12a1
ccacaagcaagtttgctaaggcattaatctctattaccctcattatccaaaatcagaaaaaatggccactagaggcctcaaaatttgcttggccgtgtcctctcttttcttgatcattcttgccatcgttattgtgaccttaattttgaccatctttaaacccaagaacccagatatatttctccacccagttgacctagaaaactttcaattgctttcacctaatacaactagtgcacccttaggcatagtgatcacaattgtgaaccctaattatggaaacttcaagtacgtgaattccagtggctatcttaaatatcgcgacaccattatagccgaagttccattggggataagatcattccctgctcgtagcactaccaatgtgagcactactgtgggtattatgaccgataaattgatacaagatccaaagtttttgtcagatattgaaggtgnnngtgttcaatttgacagcagaggccacactttctgggaaagtgaccatgatcaagatt

SEQ ID NO: 4573 - DNA, 434 bp, Glycine max
  Clone ID: jC-gmfl02220065d12d1
aaaaagaaaaggagagagtaattatttaaaggcaaaggaaaacatattttctcccccaacccccaccaagagcatattagtttcaacatgtgtaaaaattccttttttttgcaattaacatgcattcacaatttgattttggacatgcaggtggaactagcatccacagcaattattttgaaagagaccccacaagagatataaattttggccttaagccttaaaatcttgatcatggtcactttcccaggaagagtggcctctgctgtcaaattgaacaccccaccttcaatatctgacaaaaactttggatcttgtgtcaatttatcggtcataatacccacagtagggctcacattggtagggctacaagcagggaatgatcttatccccaatggaacttccgcttaatggggtcacgatatttaagatag

SEQ ID NO: 4574 - DNA, 495 bp, Glycine max
  Clone ID: jC-gmfl02220065e01a1
gggagatgaattccctccaaagagcaagctagatcccacagtgtatggtgatcaaactagtacaataaccaaagaacacttagagatcaaccttggtggactctctgtggaacaggcactgagtggtaacagattgttcatattagatcaccatgatgcattcatcgcatatctgaggaagatcaatgaccttcccactgcaaagtcttatgccacaaggaccatccttttcttgaaagatgatggcaccttaaagccattggccatcgaattaagtttgccacatcctaggggagatgagtttggtgccgttagtagagtcgtcttgcccgcagaccaaggtgctgaaagtacaatttggctaattgccaaggcatatgttgttgtcaatgactcctgctatcatcaactcatgagccactggttaaatactcatgctgtggatgaaccatttgcatagcaacaacaagcattttagtgtgctcaccctattat

SEQ ID NO: 4575 - DNA, 374 bp, Glycine max
  Clone ID: jC-gmfl02220065e01d1
gataggagcacaatactatacataaaaactgacacaacaccctattagatatgaaaaactagatagcatccaattacaaaacttaagcatacataagaaaattatgcacacataagtttgcacgtttatttgtcaatgagaggtacgttggaaggaaagaaaaccacacaccacacaccacacactttcattagatagagatgctgttgggaattcctctgaaagtaaggccttccccactggtaggaagaagcacagtgtagggcatttgcgccggtccattacggttcctaaggcttgaattcttggtcctccctgagattttggcctcaatttccttcagcttggttccaaacttcttaaaggcttgaatt

SEQ ID NO: 4576 - DNA, 407 bp, Glycine max
  Clone ID: jC-gmfl02220065e02d1
gattggagcacatttctatacataaaaacttgacacaacatccctattagatatgaaaaactagatagcatccaattacaaaactttaggcatacataaaaaaattatgcacacataagtttgcacgtttatttgtcaatgagaggtacgttggaaggaaagaaaaccacacaccacacaccacacacttttattagatagagatgctggggggaattcctctgaaagtaaggccttccccactggtaggaaaaagcacagtgtagggcatttgcgccggcccattacgggtcctaaggcttgaattcttggtcctccctgagaatttggcctcaatttccttcagcttgtttccaaacttcttaaaggcttgaattgcctttgtgtcatcagcccaattgggatgg

SEQ ID NO: 4577 - DNA, 518 bp, Glycine max
  unsure (1)..(518): unsure at all n locations
  Clone ID: jC-gmfl02220065e03d1
aacacgttaaaatcatattttattatctacatgtaattcaacattaattattacaactttttaatactcaaataggagtatcagcggcacgagcctctccctagtttcattatgggaaatgcactcaaaggaacttcatatccatgcttgaacatttgtcccaatgtttttaaaaccatggaaatctggccacggctcatgtaagctttgtacattatccataatgttttctttgagcatttaagcttgacattttccatctcttcaaggacattatgcatttcgagtaaggtcatctgtgacccatacatgactagcttacaatgatataaggatcggcagatactccacccagagatttcngcacgtctcacaaaattttctagcttttctactgcattacatcgatnataagttgcaatnatgcgtctaaaataccctnggttgtatagaagtcccatgctcaaatgcctcattatagcattctccattttcgctaaccaggcttccttggcata

SEQ ID NO: 4578 - DNA, 378 bp, Glycine max
  Clone ID: jC-gmfl02220065e04d1
aagaaaaaacagaaacgaattattttttttcagcagttcccataagcgttttggtcgttcctttgtcagcaaattgaaaaaacaagaaagccctgttcaataaccaacccaaattaaataactggctttgggggaacaacctggggttctaggggggaaaacccccccccttccttaggggtttttacggggctttccacgaccttttcctttttctttataaaaccctggttaaatctatcataatgggggaggtcagtagccttgaacgggcggtcgcccaaaacttgaaacaaggcggcctggggaagtacttttttttcaagcagcaactctgcaattggaggaacctgctccttggggtcctcgataagctga

SEQ ID NO: 4579 - DNA, 452 bp, Glycine max
  Clone ID: jC-gmfl02220065e05d1
ctctgattatttctttgattgtgcgagatctttaaccataatctgcccgggggcaacactccttgaggtgtgcatcaaagcccacataaagagagattcaaaaataaaaaatatatttaaaattaacagaaagaaaaggcactatatgacagaatcgtgatgcaattcggagaaagacctacattccttgcaaatgaagagccatgtgtaatattatattttcaatcgacttcctagtttacagggtcatttagatacactcaaccttttttgctagtacattatatgaacgcatgaccagtatacagctgcattcatcttcaaagagtatccccacaattgcctccagagcattttacatgtgttgatgtatatagatcgtgactgctgctttgaaaaagtaaagcttcaaagcagaaaaaaactccctcggtggatttatatatgatttc

SEQ ID NO: 4580 - DNA, 576 bp, Glycine max
  unsure (1)..(576): unsure at all n locations
  Clone ID: jC-gmfl02220065e06a1
gcaaaaatagtgtgccacaaacaataacaaaatcaatatgaagttcactataatcacaatatttttttctttatttctagtcgactttggttttgcacaacaaggggatcttgacataataagatttggaggaaaaaccgaattcagatataagccaggctttcttaagtgcctggactcaagcatgtgcatcaacaactgctgtcaaaattgtgattccagctggcacatatcaaatgggtgcagttgatgtaaaaggtccttgcaaggctcctattgaggttcaagttgatggaacaattcaagcacctacaaacgtagttaaccttaagggggcagaccaatggttaaaggttcaacatgttaactctttcaccctgtcagggaaaggagtttttgatggtcaaggtccaactgcttggaaacaaaatgattgtacaacaaacaagaactgccagatgctttgcatgaatttcggttntaatttcctcaataattcaatggtccgtgaccttacttccaaggatagcaaaaactttcatgtgaatgttgtgggggtgcacaatatgacatttg

SEQ ID NO: 4581 - DNA, 567 bp, Glycine max
  unsure (1)..(567): unsure at all n locations
  Clone ID: jC-gmfl02220065e06d1
cttatatcattccatgacactttctaaaatttaaacttgggtatgcatatttgggacatattacaagctccttaataatataaataaagaagacgtcctttgttattgaatagttgcgttgaagtatttatttacaagggaatacaattactagctagacatctcctcttttaatggggatggcttgctaactcaagaaaggaaaaaaccataagaacattgttaaaaaaatgggcattattgtagttgctcattctaggctgcacaagtaggagcttttcctgttattacgggcttgacgttagcacatttagctgttgttgcagctccattgaatggtgagatcaacatcagtcatctctacaccctcacatggtgcaacactactacaaataaaaatcactccttctttagttcctgaagtgcccttaatgtttttgaaggaaaccttgcttatcttgatttttgacggattctttttggagcactggttccatggacaatactcttggtctatgatncacagggttcgaaacattntccatggntatatcttcaaaatgcata

SEQ ID NO: 4582 - DNA, 486 bp, Glycine max
  unsure (1)..(486): unsure at all n locations
  Clone ID: jC-gmfl02220065e07a1
ggaagaaccaccactaccttatccatttccactcctcaccaagccacaccatggcctcaaccaacgccctctcttcagcttccattctacgctctcccaaccgccagtctctgaccagaagagcgaaccacaacggaaagagtaaattaccgtcaaccgaatagccgtttctccgtcaaagcctccgccaaagagattgcctttgaccagcattcccgctctgctatgcaggccggcattgacaagctcgccgacgccgtcgggctcactcttgggcccagggggaggaatgttgtgttggatgagtttggaaagtctaaagtggataacgatggtgtcaccattgctcgcgccatcgagnctncagattctatggaaatgccggtgcagctcttattagagagggtgctagtaagactaacgactctgccggtgatgggacgaccacggcttcggttcttgctcgcgagataaataagctggggc

SEQ ID NO: 4583 - DNA, 424 bp, Glycine max
  unsure (1)..(424): unsure at all n locations
  Clone ID: jC-gmfl02220065e07d1
gaagaaaaatatcagatgactaccttatttcaatatcattaaacataccatgactagaatccaatattataacctcttttctctcatcaagccgaacagatctaaaactgtttacaaatacatttttttttattgaacagaattctaacacttacgctctttcaattttctgcacaaaactgttctttgccgtagccctaataacctaaaaattaaacggtaaggccttgtggggcaccagctacaggtgccttgggcttaggtttttccaccacaatggcctgtgtggtcaacaccattccagcaactgaagcagcattctgcaatgcacaccttgttaccttggcagggtcgataactccagcctccactaaattctcatacctgtctaccatagcatttgaaccgacctnccattcaccac

SEQ ID NO: 4584 - DNA, 596 bp, Glycine max
  unsure (1)..(596): unsure at all n locations
  Clone ID: jC-gmfl02220065e08a1
attaatatcaccacactttgtccatattctcattctcctcactcccatcatcttttccaatggcctccaacggcgacgccgttcatccccacccttccaaaaagatcaaactcttcagcaatttccattaactcaactaattcctcgtttatcacccatgccgagatcgaatcggaattctcccaccaccaccccacggtggcgcgcctcaacaacggcgccttcgggtgctgcccggcttccgtgatcgccgtgcagcgcgagtggcagatgaagaacctccggcaaccggaccacttctacttcaacgacctcaagaagggactccttcactcccgcaccatcatcaagaacctcgtcaacgccgaacacgtggacgagatctccctcgtcgacaacgccttcaccgncaccgncatcgtncttcagcaagccgcctgggccttccaggaagcaaaattccagaaaggcgacgtggtcctcgtgctccactaacgcctacgcgccgtcaagaaagccatcgaggctacgtggtgcgcgcccgagcacccgtatcgaagtnccccttccctttcccgtcaccttcaacgacgacg

SEQ ID NO: 4585 - DNA, 311 bp, Glycine max
  Clone ID: jC-gmfl02220065e08d1
cccacccaaatcctgggatatttaaacaaggaaattttcaacaaaccgggcaaaaaagggcaatcagaaaagggcaaactaaacatttgcaaattgtctcccacatttaaaagggccaaatttgtttttggggggttaattaaaactaaaagccgagcttgggctcccccaatttcaagccgaaaaaaaagcccaggtaacccctttttgcccaagttgattaaccgcattcctgaacttataaaagtcctaaaccttggtgtaaacctgacgagaaattcgggcatacccaataacagagccattttccc

SEQ ID NO: 4586 - DNA, 595 bp, Glycine max
  unsure (1)..(595): unsure at all n locations
  Clone ID: jC-gmfl02220065e09a1
attttcaattccaactctctctcatatgcaattctccatccaacaaaagtttctcatcatttctgtttcccataagcaattaattaaaatactgaatttggtataatttctttctcaaatataatttagttntacaattattttaatttctttttccttggattgtagccggggtttcttgttgtgagagaaaaacctttattctctgttttgggaacatctggggtctcaatttagtggaagttaaattttgaaactttggacgaagatggcgaattgggtccaaaagaagatcactgatccccttctttccattatccgaagaggagctgaaccaaaccacttggctttctctgctgctcttggtgttacattgggactatttctatatgtggtatgttgtaattaacccacctggatttatattgtcatttatgttggatttgtttattatacttgccacttgacactcanaatcatgcttgtaactaagatcttattgcttgcaccgatggtgattgaatangataagcacttacagattaaatgatttnctgcttattaaaatgtacatgtgtcacatagcggagtgaga

SEQ ID NO: 4587 - DNA, 528 bp, Glycine max
  Clone ID: jC-gmfl02220065e09d1
gtgatgcatttgctaggttgaatcagtttatacttaatttaaatatgcagttgcttcacaatcttgaaatcagattcagttttgggattatgttagtcaaatctgcattttccatgagtcgcatctctagagttaatggaaagacatagttttggaaactagagagagagagagactaaacttatgctagatggctaccaattctgaactgtggttatctagaggttgtgaggaaagactgattaatttaaaattgattgttcaaacctcatggcaaagagatgaatgataatagagagccaactgaaatcctatcagtcattaacctggatgaacagctacttaccttttctgatgaaaaccactttaaaatattctgacaaagaaaatcagtactttaagcaacaaccaaatttcatttttttcggaaaggccaaaaatttcaacttatcaacatgtttatcattaggaattaattgttcccaaaaatccccttttaccatgttaacaattattatatattatgat

SEQ ID NO: 4588 - DNA, 548 bp, Glycine max
  unsure (1)..(548): unsure at all n locations
  Clone ID: jC-gmfl02220065e10a1
ttgtgtttcagtattggttgtttttttttcttttatgtcagtttgaactttgaaggttccgtgacagatgttgttacttgttattgtttgataaggtattcaaaattgggtggttttcgattgaactgggatgtccaagccacctgttaggcatagcggaagaggaaggtcaaagcaatgtcactttgttggtttcttcctcagccaccatggaaagtgtgtgcctgaatagctcaaaactgaaagagcgcaactacatggggttatctgattgttcatctgtggacagctccgcgccgtccttctcagatgagactaagagcaatctgaacctcaaggctactgagctcagactggggcttccggggtcgcaatctcccgaacgagattcaaatctttgcttgagaagttcgattcagtttgatgaaaagccactgttttctttgcatcctgcaactgatgaacnaccattctcatcaaagcctgctgttttgggaaacaaangagggttctcagatgtcatgagtggattcgccgaggagaaattg

SEQ ID NO: 4589 - DNA, 586 bp, Glycine max
  Clone ID: jC-gmfl02220065e10d1
aacagtagaaggtgcattacatatataataacttcttgttttttatcacaccaagttgcaaacatagaagagatgatccaatttacaaactacaaatccttcaccacaacaggaacatgagagcacataaaaaatataagaacctcccacagacaggtttttggggttttataagttgtgacaatcatgaaaaaagcttactgaatataaacatcatgacaacagaacacaccgatagtaaataatatcatgatcaacaaggcagctttagtaccaaattctatccagtccaaacatgccttaagttgtgcttccaagccattatggcccttgtgttgctccctcacacagccaagaaaacattttaacccccaagcagttagatggatagaagggtgtgatgagatgcttaattctgcctagttcctgctcttacttttttcaacagctcttggtgctagaccaatggcttcagagctcttcataatccttagcctcttgcacgtctcagtaaacatctcccagggaacatcacccactagcatccagtctccatctttatcctcgtaagtagaacatattctga

SEQ ID NO: 4590 - DNA, 508 bp, Glycine max
  Clone ID: jC-gmfl02220065e11a1
agaaaacctagtgagagtaagcactcattgatcagcaacaatggcagcctactcaagccatgctttgaaaaccatccctttttcttcctttgtgaagcctgtcagtaccaaaccaacatcatttcttcacaccttcacctaccagacctttcttacccttcacctcaccaaaccactctctcaccaaaaatctcaagctgaactccactttgccacacttttgcttgtcttcagttcccaagaaatctttcacttgtagaagccaggctgagcctgttgactcagaaaaagtccaagaactgagtgtgtatgagatcaacgagcgtgaccgtggaagccccgtttatcttcgattgagctataaaagtgtcaattcgcttggtgatttagtcccctttagcaacaagttgtacactggagatttgcaaaagcgcattgggataacatctggtatctgtattttgatccaaaacatagctgaaaagaaggcgacaggtatgaagcaatc

SEQ ID NO: 4591 - DNA, 425 bp, Glycine max
  Clone ID: jC-gmfl02220065e11d1
ggcaaacataattatacttcctttccttattcattatatttgcttaaacaccactaactgaataatgtcaagcttttcgttaaatagaaactccaccactacaaaacccatcatagtccccacttgttattattattcagtaacttaaatcatactactacaaaggccaaagcaaatacaaaaaaagttgatgaattagtcggtgaagccagcaatggtagcattgggctcaagggccttagcagcaggggaaggttcaacagatggaattggctcaacagtcttgacaagaagctcctgaggcaaatccttgataccctttagaaaaatgtgtacaaaatcttgaaaggatacacaatctgacgcagcttcacttgacctttaacaccctcaaatatgccagacccaccagtcacagccaatat

SEQ ID NO: 4592 - DNA, 514 bp, Glycine max
  unsure (1)..(514): unsure at all n locations
  Clone ID: jC-gmfl02220065e12a1
caaacccgcaatttcacttcccctcttccaagagccaccggatcctgcaattcctctctctattagggtggtgcagcagtgatgggcaaattccagcttcgtctatattggagggtttttaggcagagggagtagattattggaataagggagacacatggtgctttgatagcttttgcgaatttgttttatctttgactgcgttctgaaaatggaaaatcctgacgttgaaaagtctgaagaaaccaatagacaaattgacagtaacacaaaatctaattctaaacagcagagcgtagagaaagctaatgaacaccctgattggttacctgatggctggaacgtggaagtcagaacccgtaaaagtggtgtacacatggngatctggatatnaagtgttacattgagccattgaaaggatacaaattcttctccaaccggaggtattacgatatctcgaaactgtaaaggacaacagttgcacttccaagaggggaagaaatgcagtaacatg

SEQ ID NO: 4593 - DNA, 517 bp, Glycine max
  unsure (1)..(517): unsure at all n locations
  Clone ID: jC-gmfl02220065e12d1
gaacgtgcctgggattttctgtccctgcttcctgcaacagtgtcaagcaaattgttttcactgcctccgcttcttcctgtaacattgtcaaccaaagttttttgaatatcagtttcagggactgtagtggtgccttttcctgtagcattgtcaaccaaagattttggaatatcagtttcagggatggtagtggcgccttttcccgtaacattgtcaaccaaagtttttggtatatcagtttcagctggtggtaacacaccagtgagggtattgattgcatattccaaacttgggtcagaccaggagtagtgaaatgcaaaggacagctgagattctgatttctcatcctccatttcttcattttcacgtttccccagctgaggttctgattttttccttttatttgctgactttccatttgttggtgcttgatctgcaagcactgtaactggcccacactcactttgctgcaattntgctttggagttcattgactcatgttcaattgcagctaatc

SEQ ID NO: 4594 - DNA, 341 bp, Glycine max
  Clone ID: jC-gmfl02220065f01a1
attaaactcaggaacgtgtgctcagcgtgaaaaataagttacattaggcctatgaaatagtaaatagtaagtagtaataaaatacatattgggtcttagagttctctagtaaaaatctaaagtctaaaacctatttcataaaggaaaccctcatgctttatccattcctctttttctttcttctagtcatctaatcccttctttcatctgcattagtccttgaagtgtaaaacctttgattataagagagctaaatctccattgttaggagtttgttagaccaattcttataatgtaactatgtctattatctatttaacgtatctaagggtctattaaaa

SEQ ID NO: 4595 - DNA, 316 bp, Glycine max
  Clone ID: jC-gmfl02220065f01d1
aaaaggaaaccaaaaaccggaaaaaggaaaaaagcccagggcccctttaaagaagggggcaaacaaaccccaaaaaggggggaattacccctcttaaaaaaaggggggtacccctttgggggccaaggcccaggaaagggggggttagggggctacaaaaaagaaaagggggggggggaaaggccgggggggctcctttaggaaaaggggttaaaccttgaaattttccgggggaaccttaagaccccatgggggtttaaaccctccctgccagttcctttttaaagggcccagggggacttttttttcacggggg

SEQ ID NO: 4596 - DNA, 55 bp, Glycine max
  unsure (1)..(55): unsure at all n locations
  Clone ID: jC-gmfl02220065f02d1
ggggnnnnnnnnaggagctggcagtttcacactcaggancncggtgcggaattat

SEQ ID NO: 4597 - DNA, 572 bp, Glycine max
  Clone ID: jC-gmfl02220065f03d1
gaagcacgctctaaattgttagataggtaaatgatcaacgcatatattcatacaaattcaaacataaggcagctttcaagagaagaaattaaaaggtaactggaaacctgcgaggaatattaattcccataggttcataaatcaattcctctagatttccaatataaaatggttacaattgttattttggagccatgagtttgaaccctatcatcagacgccactagcatataatcgggtccattccttcgctgtttcgacagcctcagcctcattagatttccaatgcttggcaatgttctcagaaagtggatcatctgggtttggtgcacttaatagagcttgaatgcttagtagaacaagtgcggatctgaagggcaggactccacttatctttcagaatatcaagacaaatcctgccaagcttatcaatgtttggatgatatatttttgttagaaacctaacctttggagcagccattggatattcttctggcaaaatagttctaactgaaaactcctccttcatagggcactgggttggccccaggatcatcacattgaaatatcgc

SEQ ID NO: 4598 - DNA, 491 bp, Glycine max
  Clone ID: jC-gmfl02220065f04d1
atgatcgttattatgtctgtgatacacacaattaaggccataatatacttatgtgatttacaacaacttctagcttattttatacatcatgccaacccaactaggagcaattttcatcatacaattacacttatctttaatcatcattcatcaatactggcatcagcaatacgctctaaactctgaagcatgacaaggtggtagtcaccagggaccatattgttatgcaatttatgccacaattggataagatgcacaagttgcaacaccacacatgttcttccccaattccatcttgaagtagccattttcaccccagctttctccccatgaattttttatgagccaatatgggacaccattttcaactccatatccaacagcaagaacggcatggttcacatcctgggaagtgctacacaagtgtcactagtgaaaactcctttctcgtagaaatgggaacccattcaccacctgaaggccacactaac

SEQ ID NO: 4599 - DNA, 173 bp, Glycine max
  Clone ID: jC-gmfl02220065f05d1
acactcaacaataatcattaattcacaaaacaattaacactctgaaaaaatacatacatattatgaaattatcaaaattttaaccattaatttcctaatcatcaattatcatcccacagtttatcacctttgaaagtctaattaaaatgataattcatttgttacaactctcg

SEQ ID NO: 4600 - DNA, 501 bp, Glycine max
  Clone ID: jC-gmfl02220065f06a1
cttcttctttcgttcttcattgttcattcaatttcttctctcttcatctcaccgaacaaatcattcaattgcaatcatctatggcgtctttcgacccgagcgtagattctagtaattccgacccgttgcgagaatccaatcacaagaagcgcagaaaaatcggagaccacgccgccgccgatcaaaattcggctgccgcctccccgtggagatccgaagaggagcagcggatctactcccgccgcctcgtggaggctctccgccgcactgcgtcatcggcggccaagcctagagccgccggccaggtccgcgagaccgccgaccgcgtcctcgccgccaccgccagaggccgaacacggtggagccgcgcgattctcagccgctggaggaagctccgcacgcagcacaagaaggcgaagaagaaggaggcatcgtccattaactgtttgaagagaacgaggattggcaacggagagaggaggaaccggttaccggctgtgc

SEQ ID NO: 4601 - DNA, 406 bp, Glycine max
  Clone ID: jC-gmfl02220065f06d1
aggggaactcaaaaaaaggaggaataagcaaatggcatgtacagtgtacacgataaaatacatgaatctgaaaaccaataaaaacgatttaataattaaaaaataaaataagaaaaacacctggcgcaatataacctaggcgcgggggtcaactaaacgtgccgccggcgaaacttgccggcgcggcgacggcgaatatttcggcgagagccgtcatggctcgcacttgcatttccaagggggagatatagtccgtggctttttccaaaaggtttggaaacgaaacctttcggcaaccgggaaccaaccgggtgaggacgcgcgcttttttttgtacagccggtaaccggttcctcctcttttcgttgccaatcctcgttctcttcaaacagttaatggacgatgc

SEQ ID NO: 4602 - DNA, 454 bp, Glycine max
  Clone ID: jC-gmfl02220065f07a1
cctctacggcatatcctttctccttcttcctgtatcctctgacttaatttactacaaacaggcaacaaggctcaaggaattagtattgtttccatcatgggaatttgtttgagcacccaaaattgaagctgggctgaattcaaagcatgtgagtgtcgatgcaaaagatctcagcagtccaagcagtaaaattacaaaagatctcagcaatccaattagcaataaaattacagaagatctcagcacaccaattagcaataaaattacagaagatctcagcacaccaattagcaataaaattacagaagatctcagcacaccaattagcaataaaattacagaagatctcagcacaccaattagtaaggtctcagagatcttagtgcctctgacttctcagatgagggtgagatcttgcagtcatccaatctgaagactttagtttgacagaact

SEQ ID NO: 4603 - DNA, 480 bp, Glycine max
  Clone ID: jC-gmfl02220065f07d1
aacaaaataaagtaggaaactttacaccaatatatcaaaaacaacaaaattgagctaaccagagccacataagaaagtacctgcagttccagccattttgactatatatataacaaacagaacctgaaatatatacatgcaatgtactaagatatgtaaaacctattagataacatgtgtgcatgatatgaacatgtttgagttcatgtggaaacatgcagctttcaaggatgtgtatttgcaatgtcacgtgagagcggggaagcagaagcagtggcaattctaccatgggtaaaatgatcagcactttttctacgattttgtttcacatgggggacctggagctgctccaaatccgtggcaacctcgtccatggttggtctcaactttgattctattgcaaggcatcgcagaaggagggtagctaccttacatgcctcatctaattcatattggccttcaagacgattatccaacaca

SEQ ID NO: 4604 - DNA, 540 bp, Glycine max
  Clone ID: jC-gmfl02220065f08a1
cttgaagagtgtgtctatgtcttctaggaggggttgcatttaccaccacttaaggccaacggattatcgttgctccaaagagtcattcccaagttgatcaaggctgctaatgatactcagaatattttatcgcctttgatggccccagaaacatttaaaagggataagttcttttggttttcagatgtggaatttgctagggagactttggcaggtgtcaacccatatagcatccaattggttaaggaatggcctttaacaagtaaactagacccgcaaatctatggtccacaggaatcaacaataactagggaagtcattgagccacaaattatcacttatggaacaattgaagaggcccttaaagaaaagaagttgttcatgctggattaccatgatttattcttaccatatgtaagcaaagtgagaaaaattaagggcaccacattatatgggatcacgaacattattcttcctcactgatcaagggatattaaagccattagctattgagctcactagaccacctatggatggaaa

SEQ ID NO: 4605 - DNA, 442 bp, Glycine max
  Clone ID: jC-gmfl02220065f08d1
tttttttttttttttttttttttttttttttttttttttttttttttttttttttttttttttttttttttttttttttttttttttttttaaaccaaaaaacccgggctggggcccggggggaaaaacaatttttttcctaaaagaaaaaccagaagggggattttccggggccaaaaaaaaatcgggggccaaaaaagggaaaaaagggaaaaaccctggggcccttttttttttttttttgggccccttggggggccctaacaaaaaaaaaaaaggggtttaattggggcctaataaaaacccccaactttaaaaagaattggttttgggaaccccttttccagggacccccggccccgaaaaggggttcaaaaccccaaaggggatttttcccccccccgggggggtcttaaaaaaacaatttccattcccgggggtt

SEQ ID NO: 4606 - DNA, 476 bp, Glycine max
  Clone ID: jC-gmfl02220065f09a1
tcttgttgttgaggagttgcaacctgctgagtaccttcacttcaaggaagaacttgttgatggaagttctaatggcaactttgtgcttgagttggactttgaaccattcaatgcagcctttcctcggcccactcttaacaaggtcaattggaaatggtgtgcagttcctcaaccgccacctttctgccaaactcttccacgacaaggagagcttgcacccacttttggaattcctcaggctttacatcgtcaaaggaaagactttgatgttgaatgacagaattcaaaacccagatgcactccaacatgttctgaagaaagctgaagagtttttgggcacaaagcacttctgaaactccctactcagaatttgagcacaagttccaacatattggtttgcagagagggtgagggccacaactcccagcgtgttcttgagtcaattcaacttctcttggatcttcttgaggcccctg

SEQ ID NO: 4607 - DNA, 427 bp, Glycine max
  Clone ID: jC-gmfl02220065f09d1
gaaaaaggcacggcttaaaattgaattgaggggtaaaacaccccaattcgaagcttttccaatcaagattcaaatcatgcaaaagaaaaaaagtaaaaggcttttttttttttccttttttttctctctctgcctcttatcgaaagcttaatcacaaaattaaaatcatcagggacatattatttatagaactcaagtaagacaaactccaaatgaaaaacaaaaagccggttcctccatttttttatccaactcttcatcctcagtttactcaacagcaaggggcacagactcggccaatttgcggtacttgagagcatagaacatctcgagatagcggcggctctcacggcggtcaaggttagacacatgcttccagaagccatagacaccagtgagagtgagaagcctttgtgagtaaatttgc

SEQ ID NO: 4608 - DNA, 211 bp, Glycine max
  Clone ID: jC-gmfl02220065f10a1
tgccattaaaatctgtctttgtttttcctatagttccaaagagatttttgtgcaaagctgaacttcatcttcgtgaattctaattatataatatatactcatttccaatccaatgccattttatattcttctaaaaaaaaaacacttgttaagaaaaaaaaaaaaagaaaggggcggccgtgcacttttgaagctcgtctacccgggaatt

SEQ ID NO: 4609 - DNA, 282 bp, Glycine max
  Clone ID: jC-gmfl02220065f10d1
cataaaaaaaaataaaatggcattggataggaaaagaggcaaacatagaaaagaagaatctacgaacaagaaacaaaaccttgaccacaaaagggttcgggaaatctctggaaaaaaaaagaagaattccacggacaagaagccggatttccaaaaaaagtacccggggaaacaaagggaaaagaattttaatgtggtggcgaaataaaacccactgggcggataattacaacgggcgagaaggggaaaaacctggcgataaccaacctaaacaaacatgcc

SEQ ID NO: 4610 - DNA, 571 bp, Glycine max
  Clone ID: jC-gmfl02220065f11a1
ggaaaaatggaaagtcccaaatcattcagacacagcactccgtgactcatcactccctcctgatgattctcagcattcttataaaaagctgaagacaatatctgatgatgtagttactggcaaatagtgattctagcaagaacataaattttggtgcatgtgatgaaagtatacatacaattactagtggacttttggacaaatctgttaaagataattcaaataaattaatagattcttctagcacttgctgtagtgatgagcaggacaaaagtattggggatggaccaaaagatcctacaaataagacagaatttaagaagttgtccaattcaatggaagggaaagttgatgggatgctaaggggtttcagattggaaacctctggaaaaagaattatacttaaggggagtagaaatgtttggcagaaacagttgcctcatagcaaggaacttactttctggcctgaagacttgtatggaaatatctagttacatgcattctggaggagtgtcatgccccatggatctaatgtgctcctagttcatcatgaagacagggaaaattgatg

SEQ ID NO: 4611 - DNA, 540 bp, Glycine max
  Clone ID: jC-gmfl02220065f11d1
aagaaagaagaaaataacatttatcaacgcacaagtaacttaatctttctctttacatgttcaacctagaaacatcctatttattaggaagccaaaaaaaaaagctagaaaaattcctacaatcaaagataatattttttaagtttgatgcccaactagactatagaaataccaattcttcagaatataatgatgctggttatataatttttttttaaaaaaattggtcataacctattggtataatacaaaatcacaacttatcaaaacagttggagccatctggtatattacatatggaaaactttattttagctttaccaatcctcccctcacctccaaaaagaaaataacaaaaagatggtcaagacacaagaatgtaggataaagaagatggaaacagaaaggcttgtaattctcactgtgcactctgcatcaaattttcccttgtcttccatgattgaactaggagcaacaatagatccatggggcattgacactcctccagaatgcatgtaactagatatttccatacaagtc

SEQ ID NO: 4612 - DNA, 412 bp, Glycine max
  Clone ID: jC-gmfl02220065f12a1
tcacaaaatagtagtattacagtttatcgttaatttctcccagattcgctttgtcgtgtctcgagcatccttgatgtccagggaaatccatatttgtccttttttctgcgtactttcatcgaattattgcttgtagctctataccaacttcttatatatcccatcctccacatctacgcctgaatcatcgtccaactattagttcctctctctgcgttcatatcgcaacatgcttcccttttcaactctctttcaaaccccgttaaccaccgagtattggtacaaccaccccacaacaacacttctagcgttcttgctcatctcccttgttacttgctatgcatggctcaagcccaaggcccaaaagcttgcaccgggcccatcgggccttcctttcttcgggaaccttcta

SEQ ID NO: 4613 - DNA, 471 bp, Glycine max
  Clone ID: jC-gmfl02220065f12d1
acaaaataattaatatagtgttgagcgttgaataatggatacaagtatattatagtaaactctattgataaagatctgggttggataaccgtggggtggggatagcaaccaaaggtattttctttttgagaacaattccaaatttctctgatacctctaacttttctccttggggtactgtccaatcaaataagtgtacgagtgtggcaagaaaatgcaaaaccgtcttctcagccattgctattcctgcacaaattcttcttccagatccaaaggggaaatagttgaagtcattgccactgaaatccaattttgcatctaagaatcttgtaggatcaaattcgagtgatttcttccaaattgaagggtctctatgaatagcccacacattcacaaacacccgagacccctttgggattgtgtaacctcccaaatagtggtttcgctaggacaatgaggtactagagtgga

SEQ ID NO: 4614 - DNA, 537 bp, Glycine max
  Clone ID: jC-gmfl02220065g01a1
tgtgtttgcggctgaggatttcgaacgagcgaccttcttcgtttctcgcaaagtttaagtcatcatgggtaaggaaaagactcacatcaacattgtcgtcattggacatgtcgactctgggaagtcaactaccactggtcatttgatctacaagcttggaggtattgacaagcgtgtgattgagaggttcgagaaggaggctgctgagatgaacaagaggtcattcaagtatgcctgggtgcttgacaagctcaaggctgagcgcgaaagaggaattaccattgatattgctttgtggaagtttgaaaccaccaagtactactgcacagtcatcgatgcccccggacatcgtgactttatcaagaacatgattactggtacctcccaggctgattgtgctgtccttatcattgactccaccactgggggttttgaagcttggatttctaaggatggacagactcgtgagcatgctcttcttgctttacccttggtgtgaacagatgatctgtgctgtacaagatgatgccctacccc

SEQ ID NO: 4615 - DNA, 435 bp, Glycine max
  Clone ID: jC-gmfl02220065g01d1
accatcaaaacaaaaaacagtactcatcaaaaacaaacagcaatgaaaattgaccaccgccgatcaagaacctagttttgaaagttacggctacatgaaatcggcagaaacttaaaaatataacttaaacaaaacacctaagactctgcaaggataaaactactataaaggagtaaccacgatgatgatcacatgtgctagcaaaattgcccaaatgcaatcacttcttcttggcagcggccttggtgaccttggctccggtggggtctttcttctcaacactcttgatgactccgacagccacagtttgacgcatgtccctcacagcaaaacgaccaaggggaggatactcagagaaagtttcaaccaccatgggcttggttggaatcatcttaaccatacctgcatcaccattcttcaaaaatttgggctcct

SEQ ID NO: 4616 - DNA, 552 bp, Glycine max
  Clone ID: jC-gmfl02220065g02d1
cacaccaaaggatctgattcattaaaagcaatagattcttcacaaccacacaccactcacttgacatatatggaacacatacataatccatatagccttaccttagggggggggcatttcttaacttttatttaatgcacaaacataacaggggcaggaaggaaaaccacaaaattaaaacgaagatcatatagctgttaataataacaacaacacatgcaacataaaaaccacatgcagttgtggtagtggcatcttcttcagattggaaacgcctcaatgatggaagggagagcgttgatcttgatgaatgttgtaacgcgcgaaaccggtttccttgaacagccacttccagttctcttcggtcctctctttgccaccggcgttgtgagcgagaagcatcatgtcgaatgcgatgccaacgtctgtgaagaagttcgttgccttcgggtcgaagaacgtgatccacgattatgacttttcctgtcttctctggtattgccttcctgcagttcttaagatcttgatgcagtgctcgtcgctccagtcatg

SEQ ID NO: 4617 - DNA, 486 bp, Glycine max
  Clone ID: jC-gmfl02220065g03d1
gcaaagaaatatccatgaactataattacaaacttcctagggtattatttacacgccccataggccataaatggctttatttgaattttatcttcccatatcttacagtttaaaatactcactcaagaatttggtcaactcccagacattcacaacaataaataacttgaataaaaagaacatatacgaacgaagttgtcgagcaggcagagacgagaattcacaatttcacaccatctggacccaaataccgtggcttggaacttcttgatggaccacaaacagcagatagaaacccggtggcgcaagaacagcggaagccggcgcggtaacttcacctcgtgcgttgattctccaaccccactaaatggtgcggcttcagcaccaacagcctctgattatggaaacgagtggcgtgttaaatggcggcgccagcatggtaacagacaccgaatcccaaccaaagtcgcgctcaccttaaaccga

SEQ ID NO: 4618 - DNA, 536 bp, Glycine max
  Clone ID: jC-gmfl02220065g04d1
atcaaaaaaaaaaaactgcactgataggaaataaaacagaccttttacaaaggtgtataaccagaacaaataggaaagggacaatcaatgagggtaactgacaaatctagtcaacaaaagaaatgctgctgctatcagcaactaacatgaaaaacaaaaaatcacatagcaacactgcaaagaacaggcaatcgacatgagaactactattatagatatggaggaatgcaaacttggcaagaatgtggttgctggcttgctgcttttttactaacatcatccaaaactgctgctactggagacattatcaccgttagaccatcttttgaaggcacccggtactaaatttctaccagccaaaaacccaaacctctgatcttaacattgtcaatcggttgttattattacttgaagaagcttcagcatcagcctcagccacagccacggttgtttggttaatggttggtagaaactctacagtattatcccgagctccgccaatcccatcacttgcactcccatccaaagctttaact

SEQ ID NO: 4619 - DNA, 432 bp, Glycine max
  Clone ID: jC-gmfl02220065g05d1
gataggaaatacataatatctctttatgagttacacactttattggaaactagtaaccatatatgtattaccacacacacatatataagtagttgaagcatatagataattttcaatccgaaagaagctctattttgatgcctctgattttaacacgccctttcccatatctcggaaccagcgtcaccctaacactgtcatcatcttccgcttccaattcttccaacaaatccgtaagtcccagcctcaaacaagtaatgatgtccttgtttttgtgcatatgtgaatgaggcacactcacaaagcttcctgcaaattctgtattatctggtcgaatctgcttatcatcttcatcattgataaacacatcaaatttacagggtgtgtttctctcaaactcaatcccttcaatcaccaaaacctcttcctcct

SEQ ID NO: 4620 - DNA, 596 bp, Glycine max
  unsure (1)..(596): unsure at all n locations
  Clone ID: jC-gmfl02220065g06a1
gttgggtcttcttactataaagaactgtttttatcttgtatattttcctgtttctttcaagataatttgactatcaatttccatggtaattgaatatcttggttagttttctgactagtgaatatgtggtcgcaggtcctgcaccactatacgtgctatgtttccagtaactgtgcttaagaacctaacttgttttgtgtataaagacgctcagagaccagaccttcctttttttcattttattagttttttgtttaatacttttttcttcctaattgttattattctttctattttctatattgggtatagccagatgtcagtctcggaagtgttgtataaattgaagatggggctaggaggatgagtttggagtaaatcacatgatatttgngaggtgaatggctgaaattgctgctcacgctgctaccttgtgctatgttgtggctgttgctgtgctgagatcctgtgaatgggactaaggttatanatgaacagtgaggagctgatacaatgatggcagtgaaagagatttgggttgtggtatggagttgcgatggatggtcgtatgtgtacaatagatgaacaacatgatg

SEQ ID NO: 4621 - DNA, 339 bp, Glycine max
  Clone ID: jC-gmfl02220065g06d1
accaaaccccgccaaggagggggttctaaaaaaaacacaagggggtgggcaccccccccaagaaaggaaaaaaaaagggcccccccccttttaaaacccgggggaaaaaaatgggggggggggaaaaaaaaacaaaaaccctaaaaaaaaaattgccccccatccccccaccagggggggcaacatttggggcaaaaaaaagcgcctttggggataacaagaaagaaaccccaagtctttttacgggcaaaataggggaacccccccccgggggaaaaaaaaaaccccagcccgaacaggagggacttatcaaagaacagcgcccccaaatgcaaaggg

SEQ ID NO: 4622 - DNA, 523 bp, Glycine max
  Clone ID: jC-gmfl02220065g07a1
caaatatgatccagactcattttactctttaacatacttttggaactttccatgggaaattcaaacatacccaagtcattcaacccaaaagacttttacaccatcgcttgatgaactcatcggcgaaccctatttcaccaggttttcttctgaatgatgaatcaaagtgaggtaaccaggaagagacttttttcacttgccctaagattatggatatttagaaggagtggtagtatagaggagagaacatatcaatagtgcttccgcaatgaccacatcaacattagtggcaacattctgctagtggaggtgcacttcacatgggcaatatgagaatggtaatatggtttgcatatggaatcatagaaataaatgggtttttttttttttgggaaagacatttgataaggatgaactaaaacaacaattcctattcactgcttggtcctggttaaatagccaccacacaaattttgtatactccttcctacaatggtcgattaacccttggcagtgcttaccg

SEQ ID NO: 4623 - DNA, 597 bp, Glycine max
  Clone ID: jC-gmfl02220065g07d1
ataaaatgtcataaaaacattttagtaacccttatttatattttggcatcgaatgttgcaaaacgcatactttatttgtagtgtaacaccggcagttgcaattcataacagacaaaacattctccatacttagtcgatagaaatcacacaacacaagaatatgaagtatttctatcttcatgtgtttgccaaccaataaatgtggtagacaagtagcaatgcacaccctccctttaaatatcaataccatcaaacccaaccccccgttagcgtctctccggtaagcactgccaagggttaatcgaccattgtaggaaggagtatacaaaatttgtgtggtggctatttaaccaggaccaagcagtgaataggaattgttgttttagttcatccttatcaaatgtctttcccaaaaaaaaaaaaacccatttatttctatgattccatatgcaaaccatattaccattctcatattgcccatgtgaagtgcacctccactagcagaatgttgccactaatgttgatgtggtcattgcggaagcactattgatatgttctctcctctatactaccactccttctaaatatccataatct

SEQ ID NO: 4624 - DNA, 511 bp, Glycine max
  Clone ID: jC-gmfl02220065g08a1
cttatctatcttcacctccatcttttaacagttcccctcgaaacttctgaagatgggtggcattgcattcggacgcttggatgattctttcagtttaacctcaatcaaggcctatattgctgagttccattcaccctgctctttgtttttgccggtgttggttcagccatagcctatggtaagttgacatcagatgcagcacttgatcctgctgggttactggcagttgctatttgccacggttttgcactctttgttgcagtttctgttggtgccaacatctctggtggccatgtcaaccctgctgtgacttttggattggctcttggtggccacatcaccatcctcactggcttcttctactggattgcacagcttcttggctccatcgtggcatgttttcttctcaactatgtcacaggaggcttgccaactccaatccacagtgtggcttctggggttggagctgttgaaggagttgtgaccgagatcatcatcacattttgtttgg

SEQ ID NO: 4625 - DNA, 385 bp, Glycine max
  Clone ID: jC-gmfl02220065g08d1
atatatataaagcacttctgcacaccaccaacctcttgaattctcaccaaattaaacagtagtagcacactttacaaataaattaagagaagaaaaaaaaagcatagaatggagagagagaaaaaaaagagagatagaaaaagaaagaaaagcaagaactgcttttcctccttttattatcaagaaacatgaattacaaaggccatgacttgaatcagatcaaaattcactggaaagaggtgcatggtcagagcgaatgaagacattgccgtagataaggccagccaaaccaccaccaataagaggtccaacccagtagatccagttgtcatggaagtcaccactaacaactgcaggcccaaaggagcgtgccgggttcatcgag

SEQ ID NO: 4626 - DNA, 543 bp, Glycine max
  unsure (1)..(543): unsure at all n locations
  Clone ID: jC-gmfl02220065g09a1
gctcaactccttcccccaagccttttggcatttccatgatgacacaagattcatcagaggtgttggaaaaacatgcaagctcaggctctgttgtgagggggagtagtgaatatattagactggttcatattcgatgaaccaaagggcggttgaagctgaaaccttgctgcctcgagcagaatcaagaatcaagtctttctggtggtggatgaaatcctttttatggtgtgttatctttgtgttccttgcttttattcttgagaaatggggagtgtcacttttttttgaaaaggttctttacccaatcatggaatgggaagctactgcctttggccgnccagttcttgctttagtactagttgcctctctggctttattccgcgtagttcttaatcccttctggcccctncatgtggctggctgggatgatttttggttatggcctttgcttcgttatataatggttggaacaaccattgngatggtgctgccatacttaattgggctactgttccgtgaccgaattcataatggtttaagaga

SEQ ID NO: 4627 - DNA, 204 bp, Glycine max
  Clone ID: jC-gmfl02220065g09d1
gaaaaccaaaaggaaaaaatattattaatgtaatcctaaagcaagttgtaatacacgagtatatactgtcacgaaatttttggcaaactaagctgtttaggcctttcaaggggaagcttctccatctctacagaaacagaggtaacttcatcattcaactctgccattttgagttcatttagagtcctttttgcgtagacagtg

SEQ ID NO: 4628 - DNA, 419 bp, Glycine max
  Clone ID: jC-gmfl02220065g10a1
tttttgaggagttggtgagggagttgtttcctaaattggccaatcatctggattatctgggagtgcaggtggcatgggttactggaccatggttcctgtccatttttgtgaacatgcttccttgggaaaagtgttcttcgaggggggggatgtgcttctttttgaaggaaaccgagtcatgctctttagaactgcagttgctttaatggagctatatggtcctgcgttggtaacaacaaaggatgctggagatgcagttactttacttcagtcgttggctggctccacatttgatagcagtcagcttgtactgacagcttgcatgggttaccaaaatataaatgaaactcgtttgcagcagttgaggaaataaacatcgccagctgtaatagctttcattgaagaaagatcaaaagggc

SEQ ID NO: 4629 - DNA, 518 bp, Glycine max
  unsure (1)..(518): unsure at all n locations
  Clone ID: jC-gmfl02220065g10d1
actataaataaacgagagatgtattacagttgacctcgaccgttcacttactttccaattactattattctattacataataaagaacaaacaattaatgaatatgaaattatatgttcaccctaaacaaaaattacagacaaggaagaagaaactaacttcttgctcgtcaaattgtcttgagtaggatataaagaaaatctaggcactgacttcttttctactctcatcctgtactttaaggccattgacgtcttgttcactgatcgtattttgttcctcaacgctgggatttccctcagctggctctntcattagtgggtttccccttgtttcgatctcgccatccaagtccaaatggacgagaaagcaaacttatcctcctagcagggatatccggctcttgattgtttctcgataccggagaatctgactgtgaagatcgtggagattgtagcactttaacttggccagattggtactgcaatgtagcctncagcatagattctgccataact

SEQ ID NO: 4630 - DNA, 513 bp, Glycine max
  Clone ID: jC-gmfl02220065g11a1
tgcacctgctccgacacctttggtcaacacgaccaatgaggattcccagtttccagttgaaaatggcaaaaggcatttgtctgaagaagaaatgaagatcaagacaaggagagagattgcaggcccttggggtgcagcttggtaagatgaatattgctgcatgggcaagcaaagatgagcaggaaaagaacaaatcttctccccgggacatgagtgtgcaagaacaggagagaattgaatttgaaaaacgtgcagctctgtgggaggaagctgagaaatctaaacatactgcaagatttaagcgagaggaaatcaaaattcaagcatgggaaagtcagcaaaaggcaaaattagaagcagaaatgagaagaattgaggccaaagttgagcaaatgagagcccagacacatgcaaaaatggtaaaaaagattgctatggcgaggcaaagatcggaagaaaaacgtgcagcagctgaagctagaaaaaatcgagaagcagaaagaactgtggctc

SEQ ID NO: 4631 - DNA, 303 bp, Glycine max
  Clone ID: jC-gmfl02220065g11d1
aaacaaaaaaaaaaaattttttttttttttttttttaaaaaaaaaaacaggttggggggtggaaaaaacccccccgcaaaaaattttggggcccccccgggggggaaaaaaaaaagggggtgaaagaacccaaaaaaaaaaaccgccctttttgggcccccccttctcccccggggaaaaaaaaaagcccctttggggggggggggctttttttttaaaaagggggggtggggggttttttgcccccccccccccacaaatgttttgggggagggggcctccccctggtggggaaagtttttt

SEQ ID NO: 4632 - DNA, 393 bp, Glycine max
  Clone ID: jC-gmfl02220065g12a1
atctccaccttctctttcactgctccttgctctttcttctgttaggtagccgcaagatctgcataccatggcttacaggaaattcgacaaccctcactccggcgacggggccagtacaggcaaaaatcttgatcggagggggagccaaagacaccaccctagagacgttcgtgaagtactttgagaagtacggggagataacggactccgttataatgaaagaccgtcacacgggtcggccaaggggattcggcttcatgacctacgccgatccctacgtcgttgaccatgtcatacaggagaaccacgtcgtcaacggccagccggtcgagattaagaggaccgttcccaaaggctcttcgcaggctaatgacttcgacaccaagaagattt

SEQ ID NO: 4633 - DNA, 527 bp, Glycine max
  Clone ID: jC-gmfl02220065g12d1
caagcaaatttctagcaagtttgacctacaataatacacattaacacaactccaccatgtttctaactaaatatcgaatccagaatagcgacagtctaatgcaaacatctgaatatcacattaaagcagaatgtgcctatctaaaatccatataggctgataactgatgggaagctctagattgatgatgctcagaaagctctagactgatgatgtttctaccttcggttgtctaagcaatagataaaacagacatgctagtggttcttctgacttctagaaagtggccacctgcagtaagtgccttgtgtctagaaaatgcttaaacctgcatacaaattctactgcaaagcttagtaataaaactatcttgcataaggatggtaacgactactgccaccatagcttcccctactgggatacattccacctcctgctcctccataaccagcaccgggacctgttctataaccccaccagcgcttggaccacataggttccataagccccaccaccccgtccatatg

SEQ ID NO: 4634 - DNA, 535 bp, Glycine max
  Clone ID: jC-gmfl02220065h01a1
gatgaacgctcccctcgcgccctcgctctcacagccgaagccgttcaattcaactccggcaactacactgtgtggcatttccgacggttgttacttgagtcgctaaaagtcgacttgaacgatgaactggagtttgtggagcgtatggccgctggaaattctaaaaattatcagatgtggcatcatagacgatgggttgccgagaagttaggtcctgaagctagaaacaatgagctcgagttcaccaaaaagatactgtccgttgatgccaaacattatcatgcatggtctcatagacagtgggctcttcaaacactaggaggatgggaagatgaacttaattattgcacagaactacttaaagaagacatttttaacaattctgcttggaatcagagatattttgtcataacaaggtctccttttttggtgggccctaaagctatgagagagtctgaagtgctttacaccattgaagccattatagcctaccctgaaaatgaaagctcgtggagatatctacgatgactttata

SEQ ID NO: 4635 - DNA, 423 bp, Glycine max
  Clone ID: jC-gmfl02220065h01d1
caacggaaaaaaaaacttaaatttcttattctgcatggctttcaatccttacactcaaatgccagtaatggcatgacaaaaagataaatttgcacaaacagatacatgacaacataaaaaataataataaataaacatccagtttcaataaactaggttacacataacacagagttgccctttaattactttggttactaagctgatagaggaagtctgctcttgcgccaaatccaatagttggttctaattggatcaacttgttttaggatagaacaaatatttcgggctatatttaaattttgttgttcccctttctcatcatcatctaaatcttgtttatccatatctgcggtctttaaggcgtcaatggcatctctaatgtcttcatttggttgataaccaaagcatataagatctaaa

SEQ ID NO: 4636 - DNA, 229 bp, Glycine max
  Clone ID: jC-gmfl02220065h02d1
aaggaccacacatttccttggatttcccacttggttttggcaagcctccctcccaaaaattcccttcctcaaaaaacaccgggggttaaacagtttcctgatcctatacggggaaaattttccccgccccaaaggaaaaaggtcacaacaaaaatttttatacaaaccccccttaggccagtttcacattacaaccccaatcgggcctttttttggatttaaggggggg

SEQ ID NO: 4637 - DNA, 399 bp, Glycine max
  unsure (1)..(399): unsure at all n locations
  Clone ID: jC-gmfl02220065h03d1
gggaaccccctatgcaaaaaacttcccaagtttttcttagcaaaaaaaaaaaccttgggggcaaaaactcccccacccttttatgggaaattttcatgggataatttatgaaacaggcttgtacttaaacccccgatcttaaaacacaaattttcgtcccaacaacaaaattttttataacttgggaagcccgcgggcaaaaagctaaaaagtaactaatgccagccaaagatcaaatttcattaaatgacaaacattggccgaaacaaaattttctccgatcgcaaattttggttccacaactggtcaacgattggcctttgcaaccctctcaaattcatcctttttcttgaaagcanaactgggggaagacccttttgctgcttaaaaaggtcatca

SEQ ID NO: 4638 - DNA, 594 bp, Glycine max
  unsure (1)..(594): unsure at all n locations
  Clone ID: jC-gmfl02220065h04d1
gcgttgaatcattcaagatagtacgcaaataacaatacagtattcaatagcaacatgatcccttactaagtaattattaaggcatttcgtttgagtggactttaagtaattttatccgactaaactacatcaatactaggaaatggaaagattccttcatgaacatagaagccgcaataaaaagttctatagagcatttaagagacgaaattcagtggataaaatttcaagacaaaataaattagaaaccaaaaccattaaataaaaactaccaaacactcaaagtctattcatttcctaaagatttaagcagcagttgcttgttgggcggcaatccttttcctagcttcctcaatgattgatagtttaatacctttacccttgggaagagatatccatgngttttgttcccttgccaatggtgaacacattgcccatacgagttgcaaactcgtggccagtggcatcctgaacatggatagtctcaaagcttcccttatgcttctctctggtcttgatcactccaacacgacccctattccttccacctgtcaccatgactacattcccaacatcaaacttgatgaaatcgac

SEQ ID NO: 4639 - DNA, 444 bp, Glycine max
  unsure (1)..(444): unsure at all n locations
  Clone ID: jC-gmfl02220065h05d1
cacaaatattttttatctccaattccaaatatatgcactgtaatacaacgatgttaactatcaaagaaatacacttgttaacatattcacaccgtaccaatttatttttactcaaaaacataacaaaaaaccaaaactgtagccgatgaagagaaattaaattaaagctaactttattgtcatcctcaaaaaaataagaaaaaaactgaattcatgaaacacaatcaaagagcgatgatgatgactcgcaagctcctgactagaataatctcggggagtatctaatagaaaaaagtggcggcaactgaaagcagggtggcaaatactccaacaactccaagagatgcagcaccagagttctgtgggggaggagtgacagcaccggctggagaagggctaaaggatntggtgggggggggccgcggcggaaggtggggtgtgcgg

SEQ ID NO: 4640 - DNA, 588 bp, Glycine max
  Clone ID: jC-gmfl02220065h06a1
cggctcgagaattctgcagaatggattatgagcatgcaggcttgcaatgctcatggactttattgtgttcctttatatgataccttgggtgctggggctatagagtttattatatgccatgcagaggtctaattgcatttgcagaagaaaagaaaatacctgagctattgaagacatttccaaatgcaacaaagtatctcaagacaattgtaagcttcggaaaggttacccctgaacaaaagcaagaagttgaaaattctgggttggaaatatattcatgggatgaattcttacaagtgggtcaaaatcagagttttgatcttcctattaagaaaaggagtgacatctgtacaataatgtatactagtggaactactggtgaccccaagggagtgttgatatcaaatgagagtattattactctcttagctggggttaagcgactgttggagagtgtaaatgaacaattgactgagaaggatgtatacatatcataccttccacttgcacatatatttgataggtcattgaggagacattcatatgcatggtgcttaatagggttctggcgtgggggatgtcaaatgt

SEQ ID NO: 4641 - DNA, 508 bp, Glycine max
  unsure (1)..(508): unsure at all n locations
  Clone ID: jC-gmfl02220065h06d1
gaataattatatatgtaaaaatgattcatggatactgtaatacacctagagatagaaaaagagaagaaagacaacttacttagataagtccggtagaatagataatatgacgtgaaaaaaaaaatcaaaataaatgacgtatccatatataactactcagcgtatatacagtcaccaaaaggaaacaattgaacggagacaaacaccatcacatacagaaaataaattatctcccaaatcaggtctcaggcactgggtttacttccactcttatacatgttgtcaatggcattctgatagtatttaagcaactgtggcctcttcttcttgtatgttggagtgataaggtcacgttccatgtcaaatggaattgagtcaaggtgaactgcttttataaactcaaaacctttcaacttcttttccttcgcaatctttgagagctcttcanttatgtaactttttgctcgagcatcttcacagagagaattgaagntcatggatataccat

SEQ ID NO: 4642 - DNA, 337 bp, Glycine max
  unsure (1)..(337): unsure at all n locations
  Clone ID: jC-gmfl02220065h07a1
cagcgtttctgcaaattccaatttttcaaacttaaaaacaaaaacgggcgttggagaaaaagctgttattaattcgggagcgatatggaggtcgtactcaaagagttgcacgccnnnncttcaatctntgagccaatcgcttcccgatccatctcaccatgatttgctccgcaagattcaattgcgtgttgaggaccttgcgaagcttgcagaggctgcacctgttcgtcgctctaaagntgaggatttgagtgctgangttcgacatagcaatccttatagtcggcttatggcacttcagagaatgggtattgtggacaactatgaaagaatgcgc

SEQ ID NO: 4643 - DNA, 316 bp, Glycine max
  Clone ID: jC-gmfl02220065h07d1
gtgtgttgattgtttttttgttgttaatttcttatttggtaaaggtgtgggggaggggaaaaaaacagaaaaaaaccccccccccctaaaaaaaaaagagggggcagggggggccgggggggggaaaaaaaagggggagagggggaacatagaaaaaccagaaggaagcggtgcacagggaaagggaaagaagacatgggcagagaccacaggaaggacatttctttaaagaggaggaaaaaaaaaaaggaaagcgccgcccgggcaaaaaaaaagcagggaagacggcccccaagaaaaaaccgggggggggaaa

SEQ ID NO: 4644 - DNA, 466 bp, Glycine max
  Clone ID: jC-gmfl02220065h08a1
tgaagagtgagagagagagagagatagaggcacttggaatccaaaaatgagagaaatcatcagcattcacataggtcaggccgggatccaggttggcaactcctgctgggaactctactgcctggaacatgggcatccagcccgatggcatgatgccaagtgactcctccttcggtgtagcccacgacgccttcaacaccttcttcagcgaaaccggatccggcaagcacgcccctcgcgccgtcttcgtcgatctcgagcccaccgtcatcgacgaagtccgttgtggcacttaccgtcaactcttccaccccgaacaactcatctccggcaaggaagatgccgccaacaactttgccagaggccactacagccgttgcaaagagatcgtagatctgtgcttggatcgcgttcgaaagctcgcagacaactgcactggtcttcagggcttcctcgtcttcacgct

SEQ ID NO: 4645 - DNA, 402 bp, Glycine max
  unsure (1)..(402): unsure at all n locations
  Clone ID: jC-gmfl02220065h08d1
aaaccaccaaaatagaagcataatgatgatatcacttcacagtttgaataatggagaactatatcacacaggagtaaaaacaaaaaggaacgaacaatactggttcagggtaatgtaacgaagcatataccctttttactcgaaacaattacattgataataaaaccttcatttatgaataggcctctccttcctcataattttccgctccttcagccccaacctcctcatagtccttttcaagagcagcaagatcctcacgagcttcaaagaactcttctttttccataccctcaccaacataccagtgaacaaaggccctcttggcatacatcagatcaaatttgtggtcaatgcgagagaacacctcaaaactgcagngttgttgctgatcatgcatac

SEQ ID NO: 4646 - DNA, 272 bp, Glycine max
  Clone ID: jC-gmfl02220065h09a1
tatgaagaaaagctagtcaaagggtggtatatatagtttgccttttttttgttctcaaatgctattaggctgatgtattttccttctcttttttacttgtgtgtagttttccctgcctaaagtacgtacttaagtctttttcaatgaaagaaataagcaaaaaaaaaaaaagaaataacaaaaataggggatgaaaaatagaatgaaaaaaaatgtttattatttttatggataaaaatagaaaaaaaaaacataaatgaatttagtccttg

SEQ ID NO: 4647 - DNA, 272 bp, Glycine max
  Clone ID: jC-gmfl02220065h09d1
caaggactaaattcatttatgttttttttttctatttttatccataaaaataataaacattttttttcattctatttttcatcccctatttttgttatttcttttttttttttggcttatttctttcactggaaaaagactaagtacgtactttaggcagggaaaactacacacaagtaaaaaagagaaggaaaatacatcagcctaatagcatttgagaacaaaaaaaaggcaaactatatataccaccctttgactagcttttcttcata

SEQ ID NO: 4648 - DNA, 476 bp, Glycine max
  Clone ID: jC-gmfl02220065h10a1
tcttcactttcaatctttttcccttcctttccttgtctttttatttttttacatcaaaattaaaataataacacccatcaaacaaaccacacttctccccctccctttgaaaacacctcaataaatctcgatgatcatggcagcactcaattcaagcacttgtgccaaacctcaattccctcaccctctctcctcctctttctcttcttcttcatcattaacaagagatttgggcttccccacaaggtttcagaagaagcccattagaaaggtggtggattgtgctctacactcccccccagtgatccatttcccaaaccagccctacaacaaacctgaaattaccaaagaacccaccacctccaccgcggaaagggctcagtggaacccattccaaaaagccgcagcaaaggccctcgacatgttcgagagcgcgttgctctcacgcgagctcaaccaaccttttcaaaaacact

SEQ ID NO: 4649 - DNA, 564 bp, Glycine max
  unsure (1)..(564): unsure at all n locations
  Clone ID: jC-gmfl02220065h10d1
gacaagagagtcaggaaggcaagattgaaaattgaagaaccaaaagccaaacagaaagcgaattcttttttaaaacaaaagaaaggaagcaagaaacagaaagcagctgagcttcatccacaaactacaagctgattcgcgaaagcatagataaatatttattattgagaagggtagaaaaggcaacaaaatgtttgttgtctgaaatgtgttttaccgtttaagcgaccaaataaaatagtccaggtggacttcaatgagcctccacaaacgtgccatggaagccatagggcactcttgaaggcagcatgacagtggcctccaacttcaaatcaagtgcattcagaatctgcaactcggactgccacgtcatctcgtcatgcacaaaagccatcacgtacccttcatcctcattcccattcctccacgtgttggcaagaagaatggctctccaccgaaccttctttctccgtactcgtgcctcttcacttccccactctccaggtccaccttcgccacccncgacaccttcggccacggttccgctatgcacaaatatgcgaa

SEQ ID NO: 4650 - DNA, 559 bp, Glycine max
  unsure (1)..(559): unsure at all n locations
  Clone ID: jC-gmfl02220065h11a1
gaacagagcaacactgaacaatggcgcaaccttcctcctcctcgaagcctgttgtccctctcctgaaggacgagctggacatcgtgatcccgacaatccgaaacctcgacttcctcgagatgtggcggcccttctttgaaccttaccacctcatcatcgtgcaggacggagaccccaacaggaccatcaatgtccccgaaggcttcgattatgaactctacaaccgcaacgacatcaatcgcatcctcggacccaaagcctnctgcatctcgtttaaggattctgcgtgtcgctgctttggttacatggtctccaagaagaagtacatctacaccatcgatgacgactgcttcgttgctaaggatccttctggaaaggatatcaatgcacttgagcagcacattaagaatctcctttgtccatccactccattttttttcaacaccctttatgacccttacagagaggtgctgatttcgtccgtggatacccttttagtcttcggagggtgcccccatgctgnttctcatggcctctggctcatatacctgattatgat

SEQ ID NO: 4651 - DNA, 354 bp, Glycine max
  Clone ID: jC-gmfl02220065h11d1
atcaataaattggtctataatcttgcattataaaaaaaatatggtaacaaatatgataatcaattaaaactgacaaggaagaaactactccaattgaaaactaaaatccgcaaccataaaaggttcacttggcagcagcagcaccattggttggctttgaaggaacttcttcagatgtgttgttgttaagctcatcccaagcttcaatccaagtaaccatggcatctgctagcttgatgaagtagggatcaacagccccaagcttctccttgacttgcttggagagttcaatgtaacatttttggacagacgtgcactcttttaaaagagtggcactttggaagaatggaatga

SEQ ID NO: 4652 - DNA, 491 bp, Glycine max
  Clone ID: jC-gmfl02220065h12a1
gaggtggagctataggtcttggtgctccatctatgcctgctgctttgaagcatcctaggacccccccaactaatccttctgttgactatccatctggagactcagatcatgttgctaagagaaacaaggccaatgggaatatcagatgaggtaaatcttcctgtcaatgtgttgtcagctacattcccaggtcatggtcaacatagtcaagcttttaatgcacctgatgacatacctaagactgttgtgcgaactcttaatcagggttcatctcctatgagcatggactttcatccaatgcaacaatctttacttcttgttggtacacatgtgggggacattgctttgtgggagggtgggttctagggagcggttggtctcaaggaatttcaaagtttgggatcttagtgcatgttcaatgccatttcaggctgctcttgcaaagaccggggtgtttctgacaatcgtgtaatttggagtcctgatggtgc

SEQ ID NO: 4653 - DNA, 377 bp, Glycine max
  Clone ID: jC-gmfl02220065h12d1
ctaattaaatagctagaagcaacttgaaagtactcaaaagaacttgtacatcatcttagcattaaacttaacaagaatttttcacatctattggcaaattacaatgtgattttggtcttccaaccaaatgagttgctccaaacctttggcatgtacgatggatggatttaacttagctggatcaactgaattggagagagtgccctgcattaacttaagtacaaatttagttcttaaaatggccagcaagccaagtatgtaaaagaaacttgccttcggctgacatggatcatctttgagcttgatctgaaggtccaactgaagtagctgccacattgcttgcagacccattctcaatcggaggaggcacaccccac

SEQ ID NO: 4654 - DNA, 494 bp, Glycine max
  Clone ID: jC-gmfl02220067a02a1
gccacttgttcactcatttccacactcttaccttctccttcttcttcttctttatcactctgtcgttcttcctcaaacaccaccaaaccaaccaccattcacctctgcaaatccctccatctccaaactgccatactcttcctcctttgcctgccaaagccaaaaccggcgcttccaatgataccgctcttccccaaactcaccgtttccaactcccttctccttcgctgcacctccctcgctctctccttcactctcgtggtctaccccggcgactccgacgacgtctttgatgacacctccccaaggaagctccagtccgatgaactcgacaaccgccgtctcttccaagagaacactccctacgttgtctacataaccaaccttgctgtcaagcaggatgcgtatacattggacgcgttggaggaccctcaggggtcaggatctggctatgtttgggataaggagggtcatattgtgaccaagtatcacgt

SEQ ID NO: 4655 - DNA, 500 bp, Glycine max
  Clone ID: jC-gmfl02220067a03a1
caccattccaatttccatggcactctcctttcgccccgtcatccacccccgcgtcaccgaccggtcactctttcagttcctcccacccaagcctccccctcttccaacttcgccacctccctccgttctcctccccctcacgcgtcgccgcggcggcttccttccctcctgcctctccgacgacgccgtctccacccgcaacttcgaccgcggcttcaccgtgatcgccgccatgctccgccgcatcgagcccctcgacaactccgccatctccaaaggcgtgtcccccgccgccagagactccatgaagcagaccatctccaccatgctcggattgctaccctccgatcacttcgccgtcaccatcaccgtctccaaacaccccctccaccgcctcctcttctcctccatcgtcaccgggtacactctatggaatgcggagtacaggatgtctctgacaaggatttggatatatcaggttccagggatgaagggtcaga

SEQ ID NO: 4656 - DNA, 490 bp, Glycine max
  unsure (1)..(490): unsure at all n locations
  Clone ID: jC-gmfl02220067a04a1
gttgcggcgtagcagatncggatccggtacgactatatacgacgttcgatgcagctcacttcgtacagctggggcgatccctgtgcttctgagtgagtagtaatagagttgtgtttgataagacgtgccatgtgaacagtagaagaggagatgagggatacggcaataggtgctgcttatgtctgttaatttactagccaggtatgagaatacagtgaagagaaaacggagtcttcgatcctgagatgtcctatacgatagagctggcatgaacccgaactgaacaaatgactggggacgccaggggaatcgatcaggggaaaaatggacaattgacagggacattgcacttatcgagaaactcgaacactgtggaagcgaggctcacaacgctcttgagtcacatcatttcgcgagagacgcagaagctgggctttacagggaggtcgcaggcgcgtgtgctggtacttgggtgactgggcccagagaa

SEQ ID NO: 4657 - DNA, 560 bp, Glycine max
  Clone ID: jC-gmfl02220067a05a1
tgggcgtaatcacgatcgaggtacggttcggcatagctatgccgggtcgacgcgctcgctcgtcggcgggcgtcctgttcgagttgagcgattcatcagcttcattatgagacttaacagtaccaaactccttagggccttcttcaaactcctctttcgtgccactatcttatctcactcatcctcgtcttcctcttcaccttcaactaccctcctctcgccccagacttcacctcccaccgccacctccactcccactcccacttcctctcctcctcctcctccttcgcctcctgggagaagcaggtccgccactcctccacccctcgccgccccaacggcctcaccgtcctcgtcaccggcgccgctggcttcgtcggcagccactgctcccttgccctcaaaaaacgcggcgacggcgttctcgggctcgacaacttcaacagctactacgatccctccctgaaacgcttccggcaggcaatgctctggaaacaccagggtttcattcgggaaggtgaccttaacgacacccccttgcttgagaagctcttcgacgt

SEQ ID NO: 4658 - DNA, 429 bp, Glycine max
  Clone ID: jC-gmfl02220067a06a1
atctttcaatttcaatcaacggctatacccttttctatttgagcatcatcatgtccaccgcagcgcagcccatggccacgtaaacggcgtcgtccacgaagcctctctcccatcctaccttcgccgcgatgatagcggaggcgatagccagtctgaatgagagaaccggttcgagccgctacgcgatcacctaatccatcgaaggctggcacagggtgttgcctacaacctacaggatgcttgatctagaccatttcatgaagtcggcagatgctggcaagctacctaagggcatgaactctttcatgcttgtaccggctaagtctgctcctgataaagccgatgctgctcccaagaagcccaccaaagctgcagttaatcccgtcgtcaagcccgctttcaagcccatagctgctgcacctaagaaga

SEQ ID NO: 4659 - DNA, 415 bp, Glycine max
  Clone ID: jC-gmfl02220067a07a1
gggcatatctcttgcctttctttgatgatctgtcctcatacctaacttctatgttcggtaaagacagaacctcagaggaaaggagaattgccatttgtatatctgatgatgtcgctgagcatggtcgtgaagctgctcttaaatattatgagactttgcttccattcttactagaagcttgcgatgatgaatatccacatgttctacaggctgctgtctatggcgttggtgttcgtgctgagtttgggggatctgttttcaaaccccttgatggataggcactttcaaggttagatgctgtgataaggcatacaaatgcactacattctgataacataatggcatatgacaatgctgtgtcagctcttggaaaaatatgccaatttcatcgcgatagcataaatgcagcacaggt

SEQ ID NO: 4660 - DNA, 588 bp, Glycine max
  Clone ID: jC-gmfl02220067a09a1
attggcctcttccatcgcagcctctgctggcaacttctaccaggattttgacgtaacttggggagatggtcgtgccaagatactcaacaacggcgatcttctcactctttcccttgacaaagcctctggctcggggtttcagtcccaaaaacgagtatctcttttggcaagattgatatgcaactcaagcttgtacccggaaattctgcaggcactgtcaccgcctattatttgtcatcaaaaggatcaaattgggatgagattgactttgaattcttggggaatctgagcggtgacccatacattcttcacaccaatgtgttcagtcagggcaaaggcagcagagagcaacagttctatctgtggttcgacccaactgcagatttccatacctattccattctttggaatcctcagcgcataatcttctcagtggatgggaccccaataagagaattcaagaacatggaatcaaaaggagttgcattcccaaaggaacagccaatgaggatatactctagtctatggaatgctgatgactgggcaacaagaggtggacttgtgaagacagattggacaacaagctca

SEQ ID NO: 4661 - DNA, 619 bp, Glycine max
  unsure (1)..(619): unsure at all n locations
  Clone ID: jC-gmfl02220067a11a1
gtgataatggtgactccaactccatatgccctagtcataatgagcctaatacaccacatgccgttcctgctgatgtaagacctgaaatcaagagtggattagacaatgagaatagggataatgaaaagcaggctgctgctgcacgtgcagataatggaaactcaatctcaaagaacttgtactttttggatcctgatgattcatatgatggtaatgagtcaggaacagaagaggagcaatcagcttttatgaaggagcttgaaaatttctttagggagaggagcatggaattcaaaccacccaagttctataaagaggagcttaattgccttaagttatggagatctgtacacagattgggcggctatgacaaggttacctcatgtaaattctggcggcaagtgggagagtctttcaaacctccaaagacatgcacaacagtttcatggacttttcgggttttttatgagaaggcacttcttgactacgaaaggcatacaacanaaggtggtgagctgaatgtgcctattactcctcttgcagagccaataaatattgaaaatcagtctgtccagggttcagcatcataggtagggcacggagagatgctgcagcaagg

SEQ ID NO: 4662 - DNA, 615 bp, Glycine max
  unsure (1)..(615): unsure at all n locations
  Clone ID: jC-gmfl02220067a12a1
catgaggcaaaaaataaggatggaaaaattaagttgcaggagaagtttgggttcaagcctgacctaaatgggattacatatgctggcaagaatgattatacaggaaaaaaggagagcaggaaaaaggagaatcactcatatcggggtcatgactttcaagatgttagtacagataccccatgcaaacaggaggtatttcatgctcctattcagaatcagttgccggactgtgatactgaaagatccacaaagagatctcttttggaaagaactgatcaagaagtacatggaaaagggaagccattgccatcatttccatctgaaggatctcaagttgagacattaggtcattgcccacgaccagttggcttacataaaggaaatggagatatggaagttgatccttccaaagtggatgatgtgtcaaagttacaaaagaagcaattgaaaaagaccggccatcanaatggaaatcagcaaattggttcacgaaatcccatacttaatggtcacaagttcaaggagcttgatgcccctagttcagctagaaggtattcttacactcatgctgctaacaatgctctgaangaagctaagatcttaacatctggctga

SEQ ID NO: 4663 - DNA, 505 bp, Glycine max
  Clone ID: jC-gmfl02220067b01a1
cgagaccaccgcagtcatcactcgcgacgtgagacggcgagacctccacctcctcaccgctgccttgctgcgccgccgcgacgcgagagtgaaagacggcgagacctccgcaccgctgcgccgccactagagctcctcgccctcaccctcgcgagaccccctcattcctcattcagtctcagactctcagcacctcaccggcgccgttagagacagttctcgttggacctcaccctctcatcctcacggacctcgccgccattgatcctcatcttcacggacctcaggaatgccagaacgcaaaccagttgttgggttatcatggcaaccacagttgcctattccatcatcattaaaagccactgatgggtctcacaccaaacctcaaactgaggcatcaagcactgttaggaaatccagttcagagctggttgatggcttttttgtccctccaaatgatccccaaaaattaaacaagttactgagaaagcaagctaaagatact

SEQ ID NO: 4664 - DNA, 499 bp, Glycine max
  Clone ID: jC-gmfl02220067b03a1
cgcacgtagatacgatccaggtccggtacggactagctatgaggttcgacgcgctcgctcgtcggctcggcgatctgctcgagctaacaaccacgtatccgctttctacttataacgagtgaggagaaatgtgccgtctgaggatcggacagtctgagtcaaggaggtacccgatggagcactataacagactctctggcctggacatgccgcacaagtatgcacgcacgaccgcatcaacggacaacactgagctacgagagatggcaccctggctacgagcatgaaaactggcaggcaagcccgacatgatacttgaaaggcgtggttcaagaggccagactaggtcgagcaaccctgatgatcatgaagagctattggagaacgagcgaaactgtagagaggaccccaggtcttgatccaaatgaccctgtgcaacgagggaggcagtacctaaacctctgcaccatgtgaagggtgaccctaacttccgctctta

SEQ ID NO: 4665 - DNA, 626 bp, Glycine max
  Clone ID: jC-gmfl02220067b08a1
tggcttcctcgtgtgcttcctctgccattgcagctgttgccatctccacaccaagttcccagaagaatggatcactcttgggaagcacaaaagcttcttttcttagtgggaggaaactgaaggtgaacaactttacagcaccagttggagcacgatccagcactacagtttgcgcagttgctgagcctgataggcctctgtggttcccaggcagcacccctcctccatggctagatggcagtttgccaggagattttggctttgatcctctaggtcttgcatctgatcctgagagcctgagatggaatgtccaagcagagcttgtgcactgcagatgggccatgttgggagctgctggcattttcatcccagaattcctcacaaagattggtatcctgaacaccccttcatggtacactgctggagagttggagtacttcacagacaccaccacactcttcatagttgagctctttttcatcggttgggccgagggtagaaggtgggctgacatcatcaagccaggctgtgtcaacactgaccccatctttcccacaacaagctcacaggaactgatgttgggtacccaggtgggctttgtttgaccacttggctggggagtggtc

SEQ ID NO: 4666 - DNA, 572 bp, Glycine max
  Clone ID: jC-gmfl02220067b12a1
gcgcctctaacgctcgcagttccttgatctctcctgtcaagatgcatatattcatgaaaactttgaccggcaagaccatcacccttgaggtggaatcctccgacaccattgacaacgtaaaagctaagattcaagacaaggaaaggatcccacctgaccagcagagacttatctttgcggttaaacaacttgaggatggtcgcacccttgccgattacaacatccaaaaggaatcaaccctccatctcgtgcttcgcctcaggggtggcatgcaaatctttgtcaagactttgaccgggaagaccatcacccttgaagtggaatcctcggacaccattgataatgttaaggccaagatccaggacaaagagggcatccctccagatcagcagaggctgattttcgctggtaaacaacttgaggatggaagaacccttgctgattacaacattcagaaggaatccacccttcacttggtgcttcgtttgagaggtggcatgcagattttcgtcaagactttgacaggaaagaccatcaccttggaggtggaaagttctgatacaattgataat

SEQ ID NO: 4667 - DNA, 544 bp, Glycine max
  Clone ID: jC-gmfl02220067c01a1
cgcactagataggattcaggtccggtccggacttaatatcaggttcgacgcgctcactcgtcagctggcgatcctgctcgagaagaaggaactgtcatgaatattaaggaataatgcgtcaccgaaattatacactctaaatgttgtacgagctacgctgagctactaccctatcagacattagagcctactctaataactgaacacgctgcagaagtagctaatcacgagatattgcatgaacataatgagttcctggaatcttccaacaaaagaacgcgcatgatatcgcacatgcatgcacattgcgattcttaagagtgctgctttagaatgccacactatgtcttgcaaccctgatgatgatgaaaagcttttgtcgaacttgtgaaactctagtgtgtcacccgcggtctttcgcagctgcaccatgagcaatgagggagccacttgaaaaacctatgaatcaactgaaaggtgaccctttcttccgctcttatcaccttgcactgcatcttataattccgcttgtgaacattaaatc

SEQ ID NO: 4668 - DNA, 492 bp, Glycine max
  Clone ID: jC-gmfl02220067c03a1
aaactgattgatcatcatgctctcattaacaatataaaaactaaacaattaaaatcaaaaatagaaaagaaaggaaattaaaaacagctgattaattaaccttgtagcatcatcgtgcatcatcataattcatcattaacctatctaatacattattatttgcttcccccttagatcaagaactagaagatccattggcaccaacaacgttcaccccatcatagggattactactcggatcttcagcgcgatcttcaccaccatcattgttagggttttcaaaaaccttgacattacttgcatttgcatcattatcagtagaaatattatttttagtagtaatattaatatcattactagtaacaatattattggtatcctttttggcaaaggtgtttttgctggtatgcatacaaaccttgagaacgcttctatcaacgccaacttcgttgcaaatttcgtgaatcaaatcctcgttgggcttctgaatct

SEQ ID NO: 4669 - DNA, 477 bp, Glycine max
  unsure (1)..(477): unsure at all n locations
  Clone ID: jC-gmfl02220067c04a1
cggagtaatcagatnctcgaccggtatagactagatatgacgttccacgcgctcactcgtagctcgcaatctgctcgagctgcggattgggtgaagccatggttggtatcaatttgaccgatgacaaggttgagaggtatcgtcaatcgctctgaatgaagtgaatcataattctcagatttgtttctctgtggcgcttcaatacggactattaagggttatagttgctacttatatattataataaggttatgtatctagtgtccggtgttttgaaccgtgttaatcggattttagaaaaaccgaagggaataaatagataggtagctatttgggcatgccttgtaatatgcctatacttggtcttacatattcagcgtcgcggtattgtgttgagttagtagtgcgttcgttgtaaacgagaatcgaatcattcttgattttggatattcaatcctaaagccaataatggaccaa

SEQ ID NO: 4670 - DNA, 601 bp, Glycine max
  Clone ID: jC-gmfl02220067c07a1
ggaaaatcatagtattttgtaactaaatgcttttgttcttgtgaattaattttcattcactttcagatttctggtttcatcatctattcaaatagcttccagcataatattttgaatttgactgctaaggaaagaccccatttttctgagttggaaagtgacttatatttttttgagctgagaggaatatttggaatcaaggattgtgtgcttggttgaccagacttgctatctcagcaattgatgtgagatccacggggcgaaaaaagaagcaacttggccttatattattcatcagatgtctgcattctggagctgaggaaatgggttcttgcatctcaacaagcagtaggagtacttgtagcagcaagagcaatggagatatggtctctccatcttgcttagaaattggatgctgtggccaaaagagaacaaggagaacattctctgatcatgttatttctctccaccatttaccatccttacctagcagaattttctccaatggaaagagccgcggttcgtgcatatttaccagcagggccgcatggtattaataagatgccatgatgtgtggaagattcatgtcgaagatctatct

SEQ ID NO: 4671 - DNA, 614 bp, Glycine max
  Clone ID: jC-gmfl02220067c08a1
ctgagctttgattagtgtggcctagttgctgttttctcgatgagaaaggcttcttccactatgcattgcgcacttctgcgcttttgggttcccttgttgctgcttgctagcttcagctatgctccttctgtttcggccacaactgaaaatttcagggaatgaaatgaacacagatgggaaggtgataaatgaagagttagcaaaaccaagtctaaaaggacatgatgaagaagcaaagttcaaaggattttttccaaaaccaattcctatagttaaaccaattccaaagccaattcctattattaaacctattccaattccagtttataagcctattccaaaaccaattcctattgttaagcctattccaaagtcaattccagttgctaagccaattcctaatgaagaagaaaaattcaaaggatttattccaaagccaattcctataattaagcctattccaaagataattcctattgttaaacctattccaaagataattcctatcggtaaacctattcctattccagtttataagcctaaaccaatactaattcctggtgttaagccaattgctgtattagcctgttccaaagataattcccgttgtaaac

SEQ ID NO: 4672 - DNA, 480 bp, Glycine max
  Clone ID: jC-gmfl02220067d03a1
ccgcagctgtgtcatgattcatttctaaaccctaattctccttgtttccatttctgcttcattgttttttaagcaattcccgagcattgatcaaatgggtttttgttcatttccaattttctgaaatagcgtgcccttaaaaaaaatattatctgatcacattttctgcttctgcaaattctgcatttttctctttctttctttctttctggggtctctgctgaacaagggaatctcgcagattctttgtgtttctcttcggttttcggtctcaaaatttaagcttttggacctttagtgatgcaaattgttgacggttattgtggggtggtggctttgattttccatggctgcggttgctgagattcccgctgatgccaacaaaatggactcaaaacctaaggctgaatctgaattcatgtgcagaagctggttgacatgttcacacagttgaatcctttggctaaggactttttccct

SEQ ID NO: 4673 - DNA, 511 bp, Glycine max
  Clone ID: jC-gmfl02220067d04a1
tgggcgtccttttttaggcgtgaatgtatcccttttgatgaacttatgggccaaaacgttttccatagaacaagcatgttaagttccttgctgatggagcaggcaaatacaccaatgccctaggacttgagcttgacctaaccgacaagggtctcggtgtacgctcaaagaggatagctaagatggtggaagacctcaaggagaacgtcgcaaatgatgaaagtggatgagagttcaccatattcagtgctgaagagatcattaaggtcctctaaaccctagaatcctcttgcatggtcttttgccgactataatgtgtggcgtgactcatttgatgcctgaacatactaaaatgctttccattttcatagatgtaatcgtgaaatgtgctctggaaaggaccatgatttggtgcatattatggaaatcaataagatttcttgcttcatatacttcttattattagaaaacaatttggaagccaattttgcatccttgaatggggccccaa

SEQ ID NO: 4674 - DNA, 485 bp, Glycine max
  Clone ID: jC-gmfl02220067d05a1
gcaaaatggataatgggtcgggtctgcttcagagacccgattcgtttgggaggtttggcaagtttggagggaagtatgtccctgagactctgatgcatgctctcactgagcttgacgctgctttctattccctctctgatgatgaacagtttcagaacgaactaactgggattctgacagattatgttggacggtagagtcctctctattatgctgaaaggttgacggagcattacacgaggcctaatggtgaagggcctcacatttatctgaagagggaagatctcaatcacaccggggctcacacaattaacaatgctgctgctcaagctttgattgctaagaggttgggcaaaaaacgcattattgctgaaactggagcgggtcagcatggagttgccactgctactgcatgagctcgatttggtttacaatgcgttatttatatcggcgcacaggatatggaaaggcacgctctaacgttt

SEQ ID NO: 4675 - DNA, 350 bp, Glycine max
  Clone ID: jC-gmfl02220067d06a1
gcaaacttcaacttgtaatcaagggagagagaaaatttcaagctcaaaatatggcggtcaagaaagtggagatccttggaggtggagatgacggtgccaacctttcataagctatccatcgtctagctaacgtcagccttattgctccgaatgattttaaagagattacatggtccagtttcaggggattggctgacctaactaaagcttacacgcttgagatcacccatagataggactatgaaaggggcaaccttgggagatacagccgctgacaacatacctgaaactgtaattgtgactgaatactgtcagcaaattgtctatgactatggcgttattgactgtgg

SEQ ID NO: 4676 - DNA, 431 bp, Glycine max
  Clone ID: jC-gmfl02220067d07a1
ctgagcttcgattagtgtggcctatgtgccgttacctcgatgagaaaggctgctatcactatgcatcgcgcacttccgcgctctggggatcccttggtgctgcttgctagcttcagctatgctcacctatgttgaagccacaactgaagtcccagggaacgaagtgaacacagatgcaacgagctataagtggagtgagctaggccgaatcaacaggacatgaggtaactaagataatggatacctccgatccaattcctatcgttaaaccaatatccaaagccagtccctatcagtaaacctactccaaccccagttaataagcctattgcaaaaccaactcctattggtactcctattccaaagtcaattccagttgctaagccaatacctaatgaagaagagaaatccaaaggatttattccgaagcc

SEQ ID NO: 4677 - DNA, 595 bp, Glycine max
  Clone ID: jC-gmfl02220067d09a1
gcaagaatagtggttctgctacctgcaagcgtgggtttgttcagttctgttatgagcccatcaagcagattattaacacttgtatgaatgatcagaaggataagctgtggcctatgctgcaaaagcttggggtcaccatgaaaatctggaggagaaggacctcatgggtaaagcattgatgaagcgtgtcatgcaaacctggcttccagcaagtagtgctctattggaaatgatgatatttcatctaccctctccatcaacagcccagaagtatcgtgtggagaacttgtatgagggtcctcttgatgatcaatatgcttctgctatcagaaattgtgatcctgaaggtcctctgatgctctatgtctccaagatgattccagcatctgataaggggagattttttgcctttggccgtgtattctctggcagggtttcaactggtttgaaggtgaggattatgggacctaattatgtccctggggagaaaaaggatttgtatgttaaaagtgtgcaacgaactgtcatttggatgggaaagaggcaagacactgtagaggatgtcccctgtggtaatacagtggctatggttggt

SEQ ID NO: 4678 - DNA, 426 bp, Glycine max
  Clone ID: jC-gmfl02220067d10a1
gcctaggtacagcgccagcgacgggtttcacgtgatagcggcgcacaccgacagtccctgcctcaaactgaagcccaaaacggcgcaagcgcaagtggaactataccatggagaatgtgcatacttaacgagctggcacgctgaacagctagccatgaaagggattggcgtgctgctggaacggtgactcttataactggccataattctttcgcgcataacctcgcatgagctgatacaaccatacagcgcataccatcacttgacgtgcatttcgaccgagagcctgcttggttttccaccagagacaaagacttatgtagatactatgctctcaatgaaacctggaggcactgatctggaatcctactccaatgagaatagtattgccatgggattcaaagctgatgatgatcaactggttat

SEQ ID NO: 4679 - DNA, 544 bp, Glycine max
  Clone ID: jC-gmfl02220067d11a1
cttcaatggaatttggcaaaaagtagccatcgccccaacgatcccatttcccttgacttctctacgtgaagatccttgtgtcgcatagagctagttaaaatgtctgagggaaatgcagggaaaggaaagagaatcgacatcattggcgatgaagccttattgcagcaggctatggctgtcgcaatcacagttgtggtcaatctcaatgagaatggttacagcaatgatacagaggacaacaagaaaaatcatgtagattattctataaaagccgtccaaaccctttgtcatcccacagattataagagagaatgcgaggaaagccttatagctggggctggacataccacagatccaaaagaacttatcaaaattttcttgaacatcaccattacaaaaattggtgatgcactcaaagaaactgatcttgcgcatgatgttgactgatgaacccagagtcaagatggcacttgaaacatgcaagcaactcatggatctttctattggggaaataacaaggtcacttgatggaatatgtgagttt

SEQ ID NO: 4680 - DNA, 630 bp, Glycine max
  Clone ID: jC-gmfl02220067d12a1
ctagtcacaatttgttggaggagaagagatggtttggccaattaggtccagaataagttctcttctctgttctaaggcacctttagttggttcatacatctatgactcatgtgggtgcttacgcttttctgcttcaaccagctgctccataacaaggcattggccaaaaattatggattgggtacaaatggaccgttgccgtgcagcagcatcgttaccttcgatcaaagagaaacaaccagaaagtcatagtaatcgtgtcagactcggtcaagaaatcaaaggtcttgatgaagggaatatggctgaaattgatagctatcaaaacttgtttggtttgatgaaacagaggtttctgagtttcaagagccaaagatatataaaagagttggagcattttgaagctcttgctgaagctcaatttcctaaggtgatagcaaacaggttacctagcccatttaattttcttgtagtacaaaactatcacattttagcttaatttattgggtatggtggtctttaactgataaatccaagtacagtttatggtgattgcttgtgcagactctagggtatgcccctctaacatattaggattccaaccttgagaagtctttatgatacgtaaca

SEQ ID NO: 4681 - DNA, 420 bp, Glycine max
  Clone ID: jC-gmfl02220067e05a1
tgagaaatatgaacgacggatttcagactattcagtatggaattgaatcatatacatggatcagtgggattgtacacatcttacgatgttacatgatactacagattcaatagcaaacaggcggataaatagatgaagcattagacttgcactttcagtcgatgcatgagcgagacaaatagctaatggtagctagcaatatctcgattgatataccagtaaatggtatctttcgtagaaatagcattcttgcttatgtcgatgattctcaataccgaacacagagcacgggaatcactaaatataggactattggtgtgaatgacatttttagcacggaggattctttaattgagcatgaaggaggtaaagaatttaagacagaatggcatcttaaagcatgtcaagcatagttcattt

SEQ ID NO: 4682 - DNA, 493 bp, Glycine max
  Clone ID: jC-gmfl02220067e06a1
ctttgaagttcacacacacttgttcacccctgaaatggaacacaacctcacaatgaagtgtcgtagaaatgaaaaccttctaaccagtggcactcatttgccagaaagccctcgagtaccaatggagtttctgtcaagatcatggagtgcctcttctcttgaggtctctaaagcccttacacttccaccacctccacctctttcttcttacataccttccaagcctcctaatgcaccctcttctgtgactaactccatttccgaagaaacttcagaggaattctcaaccatgtgtggcaaccagttctcttttgcttcctctgccacctcacaacttgtccttgaccgcataatgtcacagtccgcaagagaggaagtgtctccattaacgtcaggtagattgtctcatagtagtgaacctttgaacggtggtgcttctttaaccggaacggatagtccaccaatttctccttctgacgagtttgacgatgtt

SEQ ID NO: 4683 - DNA, 631 bp, Glycine max
  Clone ID: jC-gmfl02220067e08a1
cgcgtcgctccgcaccagtttcaccgcacgaatatcttgttgtttggagcgatccgagaaaaactctgtaaacatgttggtttaccaggacctccttacaggtgatgagcttctctctgactccttccgttacaaggaaattgaaaaatggaatgctgtgggaagttgaggggaagtgggttgttaaaggagcagttgatgtagacattggtgcaaacccttctgctgagggtggaggagaagatgagggagttgatgatgcagctgttaaggttgttgacattgttgacacattcagacttcaggagcaacccgcattcgataagaagcagtttgttaccttcatgaagaggtttatcaagaatttgactcccaagctcgatgcagagcaacaggagttgtttaagaagcacatcgagggagcaactaaatacctgctctctaagattaaagatttccaattttttgttggtgagagcatgggtgatgatgcttgcttggtctttgcctactacaaggacggcgctgctgatccaacattcctgtactatgcatatgccttaaaggaggtcaagtgctaagtgacttaatgtacccagctatctactcattttatctaagtttttttacg

SEQ ID NO: 4684 - DNA, 571 bp, Glycine max
  unsure (1)..(571): unsure at all n locations
  Clone ID: jC-gmfl02220067e11a1
cggactcggagaccccttcacggagctccgtcgtgggctcgtggccaagcaccacggcaaagatcggtacctgctctcatcgccggtggcctcaaggacttgggcaccaaaaatcccgttctctacctcgatttcgaagttcccgcctaattcacacggcttatgctgaagacactgctgctgctgctgcaagaaaataaaataaaaattgccaaaatagggaaacacaaaattgttggtggtgttgaggtgctaattagaggacaaattgcaaatggctacatctgttaataagattggacactggaagcgaaaagagttgtggtttcttgtaatttatgcaatccttttctatgttatcatcatcaaccgttcacttcaactctctcgtgattattacaaacagcttcacggtttacgcccgggatggctcatagctcattacctcaatgatgtttcagatgctcagtggaggaatttgcgaggaaatatacctgttcttactcttggtcttgcaattttcactctgctggccaattcatgagggccttcattttagagtgaanggaat

SEQ ID NO: 4685 - DNA, 549 bp, Glycine max
  Clone ID: jC-gmfl02220067e12a1
gaaagagcaccatggacccagcattggcgactgctgtataatgcgctaaggatgtaaaggtgatgcaagatggcagtggggaattcaagaccatcactgatgccattaaaagtatacctagtgggaacactaagcgtgaataattacattggagctggaaattataatgagatcatcaatattgagaagacaaagccttttgtcaccttgtatggggtaccagagaaaatgccaaacttgacttttgggggcactgcacaacaatatggcactgttgatagtgctacattgattgttgaatcagattattttgtggcagctaacatcatgatctcgaacactgcaccgagacctgatccaaaaacgccaggaggtcaagcagtggcattgcgtatttcgggtgacaaagcagcattttataattgcaagatgtatggattccaggacacaatttgcgatgataggaatagacattttttcaaagactgcttaattcaaggcaccatggattatattgtcggaagtgggatgtcactatatgagagtact

SEQ ID NO: 4686 - DNA, 357 bp, Glycine max
  Clone ID: jC-gmfl02220067f02a1
gaatcctttgcctctgaaattgaacaaattcacatcccactttgttctttagctttatttttctaatttttttggctagagcgcatatttaaaaacgaaaaaaaaaattggttatttggttccagttcgttctttacatttgagtatctaaatatgtgaattgcttcagtacttttttaaaaggaatacatttcaaaaaattaaaaaggttaatttctgcattttatgtcctagtgtttataccctttgtgagtccaaatttgagtgattacccttcatgtattggtgtttatatggttacggtttaattggctctttacatatgtgtttctaaattagtgattaaaacgcttcagt

SEQ ID NO: 4687 - DNA, 561 bp, Glycine max
  Clone ID: jC-gmfl02220067f03a1
cgcactaggtcggatctacgtacggtatcggcatagctatgacgttgcatgcgctcattcgtaagctgggcgttctgcttttgctaagtgtattacgggaagcaaataagcacgggcgagagcgttgtaatcaaagtaatctacaaagagcaagtgtgaaaagaaggaatgatggaacaaatcaaacgcgaaatttccgtgatgcgtatggtgctacacccaaacgcggaggaaatcaaggaagtgatggccacaaagacaaaaatcttcttcgcgatggaatacgtgcgtggcggggaactcttcgccaaaatctccaaaggcacactcaaagaagatctaggctgcaagtctttttatgtgttaatcagcgccgttgattactgacacagcaaaggtgtattccaccgtgatctcaaaccacagaatctactccttgacgaagacgaaaaccttcaaatctacgatttcggactctccgctctgacggagcagattgggtacgatggactccttcacagccaatgcggcacccctgcctacgtgggacctgaagtgtta

SEQ ID NO: 4688 - DNA, 509 bp, Glycine max
  Clone ID: jC-gmfl02220067f04a1
tcctttttttgctgatttcttttagatacaaacaccagatcacatttattgccgctcgctacgcagatacgctgaacacgctgactatagccataaatggggacgcacgcatactctaagttgaacgatcccttatgtgggtaggatacatcccacggagagcatgcatagtagtgattcaattaggattatgcaaatgattcaactaaacatctactctatgggactgcataaggagtgacaataaagagcatagctaaaagagaccacttcatcttaaggtcagaccgtctgagttaacctaattgcatgaagattgacctacatattcatggctcaaaatctgatgatagctcttaggctttgccaaactcagcgctgtagtgagcactggattccactttctttgcatcattcaggtgtttaacagccttaatcaaatcttcatggatcacatgatcacgttctgcactaattgatggcataccagcttccgagcacacattttg

SEQ ID NO: 4689 - DNA, 494 bp, Glycine max
  Clone ID: jC-gmfl02220067f06a1
ccgaggagatcccttccgccatcaagccctacaggaacttccagaaggagaagaagctcgaggacaacgacttcaccggcgccgttttcgaaggcaagttttacggccccgatgaggttaagaacctcgaatccttgcccacgcgcgctgagatttacgccacccttttgggggctttgaagagccctgcttccgctcttgttggcactcttcagtctcctgctagggaacttgttacggttctcaaggcgcatattaagaaccttgaagaacaacaaggtgttgcgcaatagataccaataggtgtgtagccttgtttatgtgttttctttattgcatttcagttgttctttgtttccttatttgtctatggatgtgtagattattattattatcatgtgttttcttgtgaagaaaaaaaaatgtagaatggtgcctaggaattgggaatgctggaaaatctgttccctttgaatcatgctatttcactattt

SEQ ID NO: 4690 - DNA, 570 bp, Glycine max
  unsure (1)..(570): unsure at all n locations
  Clone ID: jC-gmfl02220067f07a1
aattttagggttttgctttcttgtggtttgggggaataactgcataattgcaagagtcctctttctttgtatttctacagaggatttcaaaggtggaggttgagattgattactctgttactgtcgaaacagtaggaaatactgctatggggtgaggtcagtagcatagctgatgacatcagagaaggtggaagttctgttgaaccaaatgacaaacaagatcaacatgataacatgactcaagattcctctggagggatcactatcccaactgcaattcccacagtatcagttgtttcagttgaagagccctatgtgggtcaggagtttgggtcagaagcagcagcacatgcattttataatgcttatgctacagatgttggattcattgtacgtgtgagtaaactctcgcggtcaaagcgtgatggaactgctattggacgcactcttgtttgcaacaaagagggtttcagaatggctgacaaacgtgaaatgaatgtgaggcaaagggctgagaccagngttggttgcagggcaatgatattgtgaagaaacttagttctgggcaat

SEQ ID NO: 4691 - DNA, 616 bp, Glycine max
  Clone ID: jC-gmfl02220067f08a1
cgggcggtttgtcccacgcgcagtgctgatggacctggagcccggaaccatggacagcgtgcggactgggccgtacgggcagatattccggcccgacaacttcgtgttcgggcagtccggcgcgggcaacaactgggccaaggggcactacacggagggcgccgagctcatcgactccgtccttgacgtcgtgcgcaaggaggccgagaactgcgactgcctccaggggttccaggtctgccactcgctcggcggaggaaccggctccgggatggggacgcttttgatttccaagatcagagaggagtaccctgacagaatgatgctcaccttctccgtttttccttcccccaaggtctctgatactgtggttgagccttataacgctactctttctgttcatcagttggtggagaatgctgatgagtgtatggtgcttgataatgaggcgctctacgatatctgcttcaggactctcaagttgaccactcctagctttggtgacttgaaccacttgatctctgcgaccatgagtggtgttacatgctgtcttcgattccctggtcaactcaactttgatctgaggaaattgcccgtgaatcttattccttccctc

SEQ ID NO: 4692 - DNA, 563 bp, Glycine max
  unsure (1)..(563): unsure at all n locations
  Clone ID: jC-gmfl02220067f09a1
tgaaaggctaatattgaaaatgccgtacaacatagtgaaacctaatgaacgaacttgtggcatcataataagtggttattgcaaggaaggcaatatgccagaagccttgaggtttctatacagaatgaaggagcttggtgtggaatccaaatccagtagttttcaactctcttatcaaaggatatctagacactacagacacaaatggagtagatgaggcactgacgttgatggaagaatttgggatcaaaccagatgtagtaacctttagcaccatcatgaatgcatggagttcagcagggcttatggaaaattgtgaggagatattcaacgacatggtgaaggccggtatagaacctgacatccacgcatatagcatccttgcaaaaggctatgtgcgtgccggacagccacgaaaagccgaagctcttctgacttctatgagcaaatatggcgtacaaccaaacgtggtgatcttcactaccatcatcagtggatggtgtgccgcatgcaaaatggatcgtgcatttagactttgtgagaaaatgcatganatgggaact

SEQ ID NO: 4693 - DNA, 622 bp, Glycine max
  Clone ID: jC-gmfl02220067f11a1
caccactttagttttaggctaatattgtgaaagaaagatgagcaagagggcaaggagtccaaggttggaactgaggctgaacttgtccccaccaagggcagcagcaacctcaattatatcttcttcggagctgtcatcgacggagtcttcgacgttgtcgccggtgtcggtgcaatcgctggagagctcctgcgtgtcttccgaggctgaagagacaagggcaatgcttctcgtggggtgtcctcggtgcctcttgtatgttatgttgtcggaggttgaccctaaatgccccaaatgcaagagtactgtgttgcttgacttcctcaacaacgaggaaaacaataccaagaagagtagcagcgagtgagagatatgttgtgaacaccacatgcattaccgtcgaagattaaccactccacctagtaccaagaaaatgttgttttttgttattgttggatttccctttttagttaattattagagtagaattggcattttcctctctcaagttttttctgtgaaattttgctggtacttactgtacctgtacaagacaatttgcaagttaagggaagagattttaaatttgaagtttattaaaaaaaaaaaaaggccgtcgacg

SEQ ID NO: 4694 - DNA, 614 bp, Glycine max
  unsure (1)..(614): unsure at all n locations
  Clone ID: jC-gmfl02220067f12a1
cagattacaaggcagcaagtagagctctggacttcttctttggttggtattctgatccggttttctatggtgactatccggagagtatgaaatcttcagtaggttctaggctcccaaaattcacaaaagctgaatctgaaagtctaaaaaattccatagattttcttggtgtgaattactacaccacttattatgcggaacatgctgaacctgtcagtgccaaccgaaccttctacacagacatactagccagtctcagtacggaaaggaatggtctacatgttggaaccccgactgatttgaattggctctttatctttccaaagggaattcatcttcttatggcacacataaaggataaatacaagaatcttcctatttacatcactgaaaatggcatggctgaatcaaggaatgactcaataccagtcaatgaagcccgcaaggatagtatcatgattagataccatgatggacatgttagatcccttcataagcgatcaaggaaggtgttaatttgaaaggctattatgcatggtcattttcggacagtnttgaatgggatgctggttacacagttcgattcgggctcatatatgtggatacaagaacac

SEQ ID NO: 4695 - DNA, 494 bp, Glycine max
  unsure (1)..(494): unsure at all n locations
  Clone ID: jC-gmfl02220067g01a1
cctccaccccttagtccttttcctcaaagggactaccataatttttctctcccaaacaaacccaagagaggaagaaagaaagaaaagagtataaacacacaatatctctttaaactcttgacccttctcttggaggcatggctttcccaattctcttccttctcttcatttcccttcccttctcctccgcaaagctcaacgtcgattactacaaaaacacatgcccagacttcgaaaaaatcgttagggaaaacgtcttcaccaaacaaagcgctagcgtggccacagcaccgggtctccttcgcctcttcttccacgattgcatcaccgatggctgcgacgcttccctcctcataacttccaatgcatacaaccctcatgcagaacgtgatgcggacctcaacctttctctctccggtgatgccttcgacatcatagttaaaatcaaaaacgcattagaacttgcatgccctggtgttgngtcgtgttccgac

SEQ ID NO: 4696 - DNA, 516 bp, Glycine max
  unsure (1)..(516): unsure at all n locations
  Clone ID: jC-gmfl02220067g02a1
tgcacgtaagtacgatnctggatccggtatggacgagctatgacgttgcacgcgcgcactcgtcagctcggcagatctgctcgaggcggcttcaaccttgtagttattctctttcttctttattagctatccctctcttgaaaaatctagatctcgttcttccttgatctacgttacgctattagagaccggatctgtatggatctgaaccagatctacacgccgatggtggctaaggcgctggcctatcatcagatctgatgcagtgggaggcgtcagcatgctactggtaacacgaggatacgtgtatgataatgggatgagaacaacgcatatgcagccgcttacgattgttcgatcgctacacacgctcgaatcggattattcatgattgatccatatacagtatgtcttcgctccggctatagtagctgcgcatctcggatgtggtcaaacaagtgtatgaagtgaagctatgggctggaaaatgtggacgccagagattccgggaccaaa

SEQ ID NO: 4697 - DNA, 496 bp, Glycine max
  Clone ID: jC-gmfl02220067g03a1
catttttggtagaaggtttgcaatttagcatctgataactcaagaagtgatgagggaaattagctcgaaaatgtatgtaattgattcatttagaactttgtggaggaggaatttgcatgtcgagaggacttgttggcttagttgtaagacccggcatctatcataatgactacatcatcaaggatccaatggttagattgaaagagactggttcatgggcatagaacaccctatataataacctgattctttctgccaggagattcttcgagcatatggctccacggagaattgcatgactctatctaacccgttctagttgccctggagtattgtatgcctatgctcaagtcatatatacaatatatccaagtatcgtccaggagagtatgttcttaacaactacttttcgtgacaggcaatgattatatatcatctaatagatagtgacctgttgattgatgatcttctgcatcctaaattgtaaatgttacct

SEQ ID NO: 4698 - DNA, 499 bp, Glycine max
  Clone ID: jC-gmfl02220067g04a1
gcgtccttttttttgatgttttatgtatactttactgttggcacttgcacacatgatttgccctgaacatgacgtgatcttagacgcactgtctggcgaacatgatacgggggaacatgattggagcgcactactattcgtagccactgtctcaacaccctattgaatacggaaaactatgtagcactccaatttcaaaacttactgcctacataagaaaattatccacacagtagcatgaccgatcatttgataatggcaggtgcatcggaaggaaatgatgccacctaccagacagcatacagttttattagatagagaggctgttggcaattcctctgaaagtcaggcctttcccactggtaggaataagcccggtgtatggcatttgggccggtccattacggttcctaaggcttgaattcgcgttgctccctgagattttgacctgaatttccttcaagtcggatccaaactatttaaaggcttgaattgcctt

SEQ ID NO: 4699 - DNA, 406 bp, Glycine max
  Clone ID: jC-gmfl02220067g05a1
tagtgatataggagcaacatttgagctaagtgcaaaccacgccacaatttcattatttacattaacacccgattctgcttaaattggcacaccaccaattcttcgcgggaacccgaaccaataaaacaaactgagagtcccatgttgggaaaatcattaccattcattcttattcatcaacgtatacccttctgagcccacttgcaaatcttatcctctctctatggattgaggctgctgccttccacagagggattcaaggcagtagggtcgacccaattcctacaatggtggatggcacgacgcccagaatctaacggtcaagctagtgctctcatgtgattctggtgtcggcataagctgtattgctctaccattcggtcgcggtcagcttgatccaacatct

SEQ ID NO: 4700 - DNA, 494 bp, Glycine max
  Clone ID: jC-gmfl02220067g06a1
ggacgtcaacactgggagtttgatcctaatgctggaactccacaagaacgtgctcaagttgaaagggtacgagaggaatacaaaaagaaccggttttgcattaagcaaagcggtgacctactcatgagaatgcagctcacataggagaacacgtgtgggcccattctagcaagagtgaacgtgaaagacacggaaaacgtaacggaggaagcattgatcactacaatgagaaaggctatcaattactattcctctattcaagcccatgatggccactggccagcagaatctgctggccctttgatagtccttcaacctttggtaatggcactctatattacagggtccctaaatgatgttctaggaccagaacaccagatggaaattattcgttatttgtataatcatcataacgaagatggatgttggggattgcatatagagagtcacagcacaatgtttgggtcagcgttgagctacattgccatgagaat

SEQ ID NO: 4701 - DNA, 392 bp, Glycine max
  Clone ID: jC-gmfl02220067g07a1
ggcatgttggctagttggcgtccccaagaggaggttttggctcacccagcggttgggggattcttgacacattgcggttggaattcaacgttggagagtgtgtgtgaaggggttccaatgatgagttggcctttctttgctgaggcactagaccaattgtcgaattttgtgcatggagtgctggattgtgttggagatagaggatgttaagagggacaaagttgaagcacttgttcgggagtcgttggctggggtaaatgttaatgctatgaatgcgagatcttccatgtgtcagaattcggcacgctatgctgcgtctaatcctgatggatcttcacttgggaacatgtacaacgggttatgacaggtcctgatgatcacatttggtccat

SEQ ID NO: 4702 - DNA, 532 bp, Glycine max
  Clone ID: jC-gmfl02220067g08a1
atactctgacaaccagcctggtgtgttgatccaggtctttgaaggtgaaagagcaaggactaaagataacaatttaggtgaacattgatggctagtctgtacatactactgccttcagcggtgatgctcagattactgcgtgctttgacattgatgccaatgggattttgaacgtctctgccgaagataagaccactggccagaaaaataagatcactatcaccaatgacaagggtagactgtcaaaggaagatatcgagaagatggttcaagaggctgagaagtacaaatctgaggatgaagagcacacaaagaaggttgaggccaagaatgctttggaaaactatgcatacaacatgaggaacactgtgaaggatgacaaaattggtgagaaacttgatcctactgacatgaagaagactgacgacgcaattgatcaagctatccagtggctagacagcaaccagctcgcagaagcagatgaatttgaggacaaaatgaatgaattggaaagcatctgcaatctatcatt

SEQ ID NO: 4703 - DNA, 657 bp, Glycine max
  unsure (1)..(657): unsure at all n locations
  Clone ID: jC-gmfl02220067g09a1
ggtttttgcgttgcgttgcactagcccctgcacagtagtgtggtacgatgatttgattttgataagataggtctgtgctgtggggaaaattggaagcatcgatcggaaaatgcaatcgttatcgttgagtatgagtctgaagagtagtagcttagtgaattttcttttgctgggttcagagacgagagtgagaagcagaaggagtgtcatcgtagcgtgtgcttcagagggagacagtggcagcagtagcacaagctcgtttctctctcggacccaaacctacgctcttcttaagcaacaattgcaagtagctgctaaatccgaggattacaaggaagccgctagaattcgagactcgttgaagctatttgaggacgaggaacctgttttgcgtctgaggagactattgaaggaagcagttgctgaagagagatttcaggatgctgctagttatcgtgatgagctaaacaaaattgctccacactctcttttaaaatgttgcagtgatgctacaacattggtatgatccctactttcagttaaatactttntgtctcctagatagttctatcttgatgtaagctatcttaagagaaatacaataacaagganagcaacttcccttttttaaacgtcctttaagtgattgacttttaa

SEQ ID NO: 4704 - DNA, 592 bp, Glycine max
  Clone ID: jC-gmfl02220067g10a1
ggcaagtagcaactagcaaggtctaccaatgcacgcgccacctcttccagtttccactattcccttccaaaccctaattttactccaattctccgtttcacatttgcaatttttgattccaagacaccccaaaatatgaattattaagagcatatacgtttttgctttctttgttgctgctgcccttcctgtgttgcataacacaacctattcttttaccactgtgatacccatttgattactaagcaaaatacaactactttctcagtttaattgagttcatttacagttctttgcatcaaattttgattttgaattggtgagtgtttttgttctgttatgagtgatgatggcactcgaatcttgggttctcagtcaccaagtgttcacctccagttccagattgttttaccctgcgcatgagaatcggcgaaagagcttaccaatcaaagttttgggtagaaacactagatacccatttccctttgtgcccaattgtgttgctccatccacttttgcaaggcttcaggcttcaagttttggaacaaatgccagttactagatagaactaagttgacgtgtttaggtagta

SEQ ID NO: 4705 - DNA, 495 bp, Glycine max
  Clone ID: jC-gmfl02220067h01a1
aaattatatttttcttacaaaaaaaatggcaggtgaggtggtgaagaaggaagagtctctcaacctgaaagtcactaacaagagccatgttcaatcagaggagaaaattggaagaaaagagtaccaattggtcacttttgatctttcctacttggccttttactacaaccagaagctcttgttttacaagggtgaagatttcgagggcatggtccaaaaactcaaagttggacttggagtggtgctgaaggagttccaccaacttgctggcaagttagggaaagatgaagagggggtgttcagagtggagtatgatgatgacatgcttggtgtggaggttgttgaagctgctgtagctgatgatgaaattggcgtggatgatctaactgtggctgaaattagtaacacttaattgaaggagctgataccttatagtggtatcttgaatttggaaggcatgcataggcccttgctggctgttcagttaacgaagct

SEQ ID NO: 4706 - DNA, 482 bp, Glycine max
  Clone ID: jC-gmfl02220067h02a1
aaattatatttttcttacaaaaaaaatggcaggtgaggtggtgaagaaggaagagtctctcaacctgaaagtcactaacaagagccatgttcaatcagaggagaaaattggaagaaaagagtaccaattggtcacttttgatcttccctacttggccttttactacaaccagaagctcttgttttacaagggtgaagatttcgagggcatggtccaaaaactcaaagttggacttggagtggtgctgaaggagttccaccaacttgctggcaagttagggaaagatgaagagggggtgttcagagtggagtatgatgatgacatgcttggtgtggaggttgttgaagctgttgtagctgatgatgaaattggtgtggatgatctaacttggggtgaaattagtaacactaatttgaaggagctgataccttatagtggtatcttgaatatgggaggcatgcattggcccttgctggctgttc

SEQ ID NO: 4707 - DNA, 483 bp, Glycine max
  Clone ID: jC-gmfl02220067h03a1
agaagaggagagagaaagagatagagaacccgttcttctttttttccattaacattttcaatctctttcacctaagacacgttcctctttccattcctttcttcctccgtcccattctcgaattggcgtgtgcctcttgctatccctcaaaggttgtgctaaggaggttgaatccgagaatttcattgcgttttgctttgcgttgacttttgtggatgcagaagataactgataaatctgatgataggatcactggggttgtgaatcaatgcatgttgggaagtgggaatgctctacttgcttaaatatgtagtcattaatttgtatttgatatttagtgtagtcttttttgtttgactcaatgacaaagggtgggggagttggatccaaggttcaagtcttgacaagcttagagttattttctgattctgaactgcaaaaatcatgaaaaaaaattattcgatgttgatccatgatatcata

SEQ ID NO: 4708 - DNA, 495 bp, Glycine max
  Clone ID: jC-gmfl02220067h04a1
cacacctcatcgtttctctctctagatctctgtttcttctttttctccaaccttcgtttcaccaccacacttacattactttgtcgaaatggctccaccaattgagaccccaaacaaggtttacagctatcaacagtccccaaaccctcgtcttaacgagaggattctttcatccatttccaggagacacgttgctgcacacccgtggcacgatcttgagataggacccgaagctccaaagatcttcaactgtgtggtcgaaatagggaaaggaagcaaggtgaaatatgaacttgacaaaagaactggacttattatggttgatcgtatactttactcatcagttgtttatcctcacaactatgggttcattccacgtactatttgtgaggacggtgatcccatggatgtcttggttattatgcaagagccagttcttccggggtgctttcttcgggccaaagctattggtctcatgcctatgattgatcaggg

SEQ ID NO: 4709 - DNA, 573 bp, Glycine max
  Clone ID: jC-gmfl02220067h05a1
tgcctcggacgtaatcggaatcggatccgtatgacgagttatgacgggtgcacgcgcctcactcgaagctgggcattctgttcgagatgagtttgaggaagaagaatgagaagaaagagcaggggcaaacgtatgcgtgcggcatctgcaacaactctgagtccttcttccctctacgccattcccattctttgggatgcgtatgataccatctgcattcactgcaataacacaggcgaggaggccaaggaggatggactttcgatttgcaacggaaggggctgacccgtcgctgtccatgccacctgccttgtcaccggacctaaatttgacggttccggtaacttctgctgcccctactgctggtacaagcgcgccgttgacacgtgtcgacgcctcagggagaaggccctggaagccaagggagactagtcacgctttctggacaatcacgaccacgcacgtgcggctgcacatgtggatctggttggacaggatagtgaagaactcatggaggaaacaggaacacaagcacagtctatagataatcaagatgaggaggcagaagcacgt

SEQ ID NO: 4710 - DNA, 497 bp, Glycine max
  Clone ID: jC-gmfl02220067h06a1
ataacacaaagcacaaagcaaagctcatccttgagttaaaaaatggcagcagcttcttccatggctctctcatccccatccttggctggcaaggccgtgaagctgggcccatcagccccagaagtgggaagggtgagcatgaggaagaccgtcaccaagcaggtctcctcaagaagcccatggtacggcccagaccgagtcaagtacttgggcccattctctggcgagcccccgtcctacctaaccggtgagttcccaggcgactacggctgggacactgctgggctttccgcagacccagaaaccttcgccaagaaccgtgaactcgaagtgatccactccaggtgggccatgctcggagccttgggctgcgtcttcccggagttgctgacccgcaacggggtgaagttcggagaagccgcgtggttcaaggccgggtcccagatcttcagcgagggtgggctcgactacttgggcaacccaagcctgatccacgc

SEQ ID NO: 4711 - DNA, 239 bp, Glycine max
  Clone ID: jC-gmfl02220067h07a1
gatggggtggttgtatggatcactcacagaagatgtgctaactgggttgagtatgaaaagaagaggttggagatcagagtgttgtacaccagatccaattgccttcacaggatgcgctcccggaggattactctctacaatggtaccacaaaagagatggttcactggccacactgtaatcttttttggaaagcattctcctcttatgtgcatgctctttggtaaaatccagttcagag

SEQ ID NO: 4712 - DNA, 602 bp, Glycine max
  unsure (1)..(602): unsure at all n locations
  Clone ID: jC-gmfl02220067h08a1
ctctgtgtttgcggctgaggattccgaacgagcgaccttcttcgtttctcgcaaagtttaagtcatcatgggtaaggaaaagactcacatcaacattgtcgtcattggacatgtcgactctgggaagtcaactaccactggtcatttgatctacaagcttggaggtattgacaagcgtgtgattgagaggttcgagaaggaggctgctgagatgaacaagaggtcattcaagtatgcctgggtgcttgacaagctcaaggctgagcgcgaaagaggaattaccattgatattgctttgtggaagtttgaaaccaccaagtactactgcacagtcatcgatgcccccggacatcgtgactntatcaagaacatgattactggtaccttccaggcttattgtgctgtccttatcattgactccaccactggtggttttgaagctggtatttctacagatggacagactcgtgagcatgctcttcttgctttcacccttggtgtgaagcagatgatctgctgctgtaacaagatggatgccactaccccgaagtactctaaggctaggtatgatgaaattgtgaaagaagtctctttctacttga

SEQ ID NO: 4713 - DNA, 617 bp, Glycine max
  Clone ID: jC-gmfl02220067h09a1
gacgaatgcattcgtcaaagtttagctctactgactcatgtgaccttctcatatgtgatgaggctcacagactgaaaaatgatcagacgataacaaaccgggcgtttgcaggggagagctgccaatgcccggtttgttatcgtctgctaacgttgaattttgttgcaggaacttccttgcacaatgacttagaagaattctgtgcaatggttaactttactaatcctggaatattgggtgatattgcacattttcgacgttactatgaggcaccaattatttgtggaagagaacctgctgccactgcggaagagaagaagctaggtgctgaacagtctgctgaattaagtgtcaatgttaaccggttcatattaagaaggactaatgcattgttatcaaatcacttaccacctaagatagttgaagttgtttgctgcaagttgactccactgcagtcagaactatataaacattttatacaatccatatatgttaagcgggcaattactgtagaactgaagcaatcaaagattttggtctacataacagctctcaaaagttgtgcaatcattccaagcttattctttgataccatacgaagtgggagtccaggaact

SEQ ID NO: 4714 - DNA, 348 bp, Glycine max
  Clone ID: jC-gmfl02220067h10a1
ggaagattacttgtgaagatttgtctcgatcgaccagaaaagcccgtttactttttataaaagaagaaacagacacttttaaaagggggctgctgtttcatattcacctcgcgtagaactagaacctgtgctgtacactgttttcacttgctttgccttctgtcttattttagtataaaagcgtctatctgctatcagccatatcacggatctcttcctccgttcctgttggctgtcactcccaactatatttatcatatcacttcctcattatatgacgatcatcaaagcctttgctttatcaacgagttatatgcattctatgctcagataaaatagaacaacaaa

SEQ ID NO: 4715 - DNA, 554 bp, Glycine max
  Clone ID: jC-gmfl02220067h11a1
atttttcttcatcccccaaagtttcaatctttgtattcaattcaccctttctctctctccatggccacttgtgttgatgcctcaacccctctttctcggaaacctaacgggtcccaatccgatgatcattcctttaattacatgaaattctgccgaccctctttctctgatcgcgttccctgcatgcccatttgcaagaatcgcgacaccgccttcacacgtgtggaggagtttgacacacgtgtggagaatcatgttgaggttgacgttgtagagggtgttgatctttggttgaagattcaagaggaagcaaggttagatgttgatcaagaaccaatcttatccagctactatttcagttccattttgtctcacaaatccttggagagtgccttggccaaccacctctccacaaatttgagcagcttgagccttccaagcagcaccctttatgaccttttcatgggtgtttttgccgatgataatgacatcataggtgctgtcaaagatgatttgatagctgttaaggagagggaccctgcttgcataagtat

SEQ ID NO: 4716 - DNA, 130 bp, Glycine max
  Clone ID: jC-gmfl02220067h12a1
atgtttcttaatgccacaacgcttcattcatcgtatacaatatacccttcgtttctctccatggacactggcgtggatgcctcagcaccactctgtaggaaacctaacgggtcccaatccgatcatcatt

SEQ ID NO: 4717 - DNA, 513 bp, Glycine max
  Clone ID: jC-gmfl02220068a01a1
ccagcagcaacatttgcgcaaatcgaaattgattctctgccacttaacctaaaatggaaatctttccgattcccgccgaatcctacactctcggcttcatcggcgccggaaaaatggccgagtccattgcccgaggcgccgtccgctccggcgtcctgccgccttctcgcattcggaccgccgtccacttcaacctcgcccgccgtggcgccttcgagtccttcggcgtcaccgttctcccttcaaacgacgacgtcgttcgcgaaagcgacgtcgtcgttttgtcggtcaaacctcaattagtgaaagacgtggtgtcgaaattgacgccgcttttgacgaagaacaagcttttggtttcggtcgctgctggtaccaaattgaaagatcttcaggaatgggctgggaacgacagatttataagagtgatgcctaataccccagcagctggtggccaggcagcatttgtaatgaagctggggggatctgcaacggaagaagatgaaatattat

SEQ ID NO: 4718 - DNA, 314 bp, Glycine max
  Clone ID: jC-gmfl02220068a01d1
agtggccaagtgggtttattttatttttactggtagtactcttcttttgcaaggaaacttcaagttctcatatagactcggatgcattcatgatgctagctcgaaaagactgttatggccaaacattcttgtttactcctctcaaagaagagccccaagttctcataatagtgactgaaaattcgaccgaaatcagattttggtctaaaaaaaaaagtagaatcctaatctcttgattcaggaaagctctcggctgcgcttagcagcagcaacaacagcattcatcagtgttccacggaacccaccattttcta

SEQ ID NO: 4719 - DNA, 430 bp, Glycine max
  Clone ID: jC-gmfl02220068a02a1
aatccttgtgcaccgtaagggttgtgaagcaggcagagaagagccatggtgcacgtttccttctaccgaaactatgggaaaaccttcaagaagcctcgtcgtccgtacgagaaggagcgtttggacgccgagttgaagctggtcggtgagtacggacttcgctgcaagagggagttgtggagggttcagtacgctctcagccgcatccgtaacaacgccagaaatcttttgaccctcgacgagaagaacccgcgccgtatcttcgagggagaagcccttctccgaagaatgttccgttacggacttctcgatgagactcagaacaagcttgattacgtgttggctctcaccgtcgagaactttctcgaacgccgcctccaaaccctttgttttaagtctggcatggccaagtccatccaccacgccagag

SEQ ID NO: 4720 - DNA, 457 bp, Glycine max
  Clone ID: jC-gmfl02220068a02d1
gcaagaataccattgatcaccacaggcattggaacaaaacttgaatagtttagaaagaacagttcaaaaccatgatatctcaggcacagctttacctcaaaacaagaaacaaggatggcaaaattataacaagtcagaccatttcaaaaatctaaaatgtctaccaacacagataatataaaaaaaataacaaccgcaaggcctaaatatcagtagccattaataatttaatcttcgtcctcctcatctccatctccaccagcagccttcttagcagcagccctttggttctttctcttcacacgtcctggacgaccaccaccaagtggactggtcagtgagaagtcaatgtgcttctgcgaatcaaccctaaccatgaatgatgggatgttcaccacctgtctcccaaccctgatgtgcctctgcctgatgaggactctggcgtggtggatggact

SEQ ID NO: 4721 - DNA, 368 bp, Glycine max
  Clone ID: jC-gmfl02220068a03a1
ctgatacaatcgaccggatcatggaacgcgttgaagaaaaggagggaattccacctgggccgcagagacttatatatgcaggtaaacagcttgctgatgaccaaacaggttaagagtacaacattgggggtggctctgtactttacttggtgcttgcattggggggggggacttaatagtggagatgccatatcagaacccaaaggcctggaagggagctttatttctggcccggcttttttgaagacataatggttctttaatgggctgggtttttgtaattgtggctactattggtggtcaggaactcagtatctttttagtggtatgctatttaaaaccctaaggtggcctttataatgaatttc

SEQ ID NO: 4722 - DNA, 314 bp, Glycine max
  Clone ID: jC-gmfl02220068a03d1
gacactggtaaaaaagtttgacgggcaacccttcgtgctcccttgacaggcaaagaaaagcagattatgaccctaaaccaaggctataaatgaatggtgcaccatatccattgttaacgcccacttagggtactaaataagatacaactacataggtaccgaattactgccccccaggtgtttccacatttaccaaaaccaggctcgttcatgaaccatgatggattcctagatacggtgcaggaatgaaggttccttgtaagcctcagggttccgatatggcctactcactagttagtgccaccccttgatgc

SEQ ID NO: 4723 - DNA, 346 bp, Glycine max
  Clone ID: jC-gmfl02220068a04a1
cactgaggacaagagaagtccattcactcagcaatccaatattaggaatgatgagtactatggaaagaaagtggcaggttccaacaaggacccttttgtggaatctgaggtagctgttagtgatgatgtgatggaaccaagcttgcacaagtatgtgacagtgaaaagaggtggtggtgtagtagtagaagacatggaggaccaagagtcttcaggaagcaacagcttcactgtgagtagtatcagtggccaacattactgggggaacaacattttttgttcttcatcatgggaaccaaattcttgtgactccaccgattggctggactttttcaaaattgagctt

SEQ ID NO: 4724 - DNA, 537 bp, Glycine max
  unsure (1)..(537): unsure at all n locations
  Clone ID: jC-gmfl02220068a04d1
aggaagaatgacaaattgttcataaacagcacaagtaacatgacatagatgagagagatcaacttgaattggccttgctgaaacaagaaacagttgcaagtactcaactccaaacagaagaactgtcaacacctcattgaacatctaacatacatcagcaaaaggtgaaaattcatggtatcatgatatcatcatcatcatcacacacacacccctttattggaaccaagcctgccacgtacaatgccaccgctatgttcatgatcacactctctccttctgctgttcaaacccttgttcttcttcttggcttcagatgacaaactacatcccaatcctaagggtgttttctgagcctactcctctctggagctcaatcttgaagaagtccagcaatcggtggagtcagcagaatttggctcccatgatgaagaacatgacatgctgttgccccagtgatgttggccactgctactactcacagtgaagctgttgcttcctgaagactctaggccctncatggcttctactactaca

SEQ ID NO: 4725 - DNA, 590 bp, Glycine max
  Clone ID: jC-gmfl02220068a05a1
ctgcttcctcgtagtacttcattgagagagacatggacactgtactaagtactacgctgctactcatgttggcatgctccatcgtgcatgttcttcgttcactacaagcaagaatgagaagaaaatcaaactacaatcttccaccaggaccctctcttctcaccatcattagaaactctaaacaactctataaaaagccacagcagacaatggccaagcttgccaaaacctatggccccataatgcgtttcaccataggccaatcaaccaccatagtaatctcctcaatagaagccacccaagaggttctccaaacccatgactcattattctcggacagaacaaaccccgacatcacaacctcgtacaaccacaaccgttacagcttggtttttctccctgtctcacccctctggcaagaactaagaaaaatctgccacggaaacttgttttcggcaaagacccttgacgcatgcacggaccttaagcgcatgaaaatgaaagagcttcttaccgatatccgccaaagaagcctcaacggcgaagtggtggacattggaagagcagcccttatggcatgcattaacttt

SEQ ID NO: 4726 - DNA, 466 bp, Glycine max
  Clone ID: jC-gmfl02220068a05d1
aattggatcttgttttaaatattgttttgaatgtttgtcattttaatagtctgttattctaagaaagacaggaagaccctgttggactaataggttggttaaaggaaactgtattcacactcccataggtaggttcatcctaatgggaacaacgaccaaatttaaggtggcactaactgagcctttagctataactttttttaccaatgcttgaaggcagaggctgagatctcaaatgatcagtgcccaagtcgatgcacctagacaagtcaagccccctttgggagaaacaaccgtggaactaaagttgcataaagtacaaagggaacaacgagaaaaatggtcatcattagagcgagtgttacaagaacggaacaggcatatcgtacgtgcaagggactttgaaactgcctatggctatggcataaacctatgcgcccaaaacggggattaacatatgaactac

SEQ ID NO: 4727 - DNA, 571 bp, Glycine max
  Clone ID: jC-gmfl02220068a06a1
gtcatctttgtcatattccaaaattaagcttgcattattcaccagaatggctaattcatatgaaaacaacttcccccctcagaagcaagacactcagcctggcaaagagtacctcatgaatccaccaccccaatacaacagctcccaatacaagccatcaaataaacttcagggaaagatagctgtagtaaccgggggtgattctggaattggacgagccgtgtgcaacttgttttcattagaaggtgctactgtgatcttcacctacgtgaaggggcaagaggacagggacgcgagtgacacgcttgagattataaaaaaagctaagactgaagatgctaaagatccattggctatacctgttgacgtgggttatgaagagaattgcaagaaagtggtggacgaggttatcaacgcttatggccgcattgacattctggtcaacaatgcagctgagcagtacgagagtgattcccttgaagatattgatgatgcaagactcgagagggtcttcagaactaatatattttcccatttcttcatgaacaaacatgctcttgagcacatgaag

SEQ ID NO: 4728 - DNA, 411 bp, Glycine max
  Clone ID: jC-gmfl02220068a06d1
ggctcatataaaagaccgtcatgtaaaagattagacctggcgtatcatcttaacagcattatccaggaagctcactcatggggcgagtctacctatgatcaaggtacgatcgcttgcaaaggctaggcccttacacatgacttttcagctggcataatgcggaatctcagactctgctgctacataaagagcgcttctcagtgtgggcttctttcctactactacattctactactatccacttacacagacactgcttcagactaggacggctcctgatttgatcccagtcatgcccatgaatgcgagactcatgctgatagctggatgggacttactctttacactgtagagcattctatctacggacagatcctacccctggaggggattgtgacagccatctgctag

SEQ ID NO: 4729 - DNA, 511 bp, Glycine max
  Clone ID: jC-gmfl02220068a07a1
gaaagaatgagtgattggcaaaagcgtcttgtctctcagctagggaaaaagatggttgaaatgactggagactatactcctgatttgacggctctcttgtcggccaatatcatcatatctactcctgaaaagtgggatggaataagtcgtaattggcatagccgtagctatgtcacaaaggttggacttatgatattggatgagattcacttattgggggctgatcgtggacccattcttgaggttattgtttctaggatgagatacatatcatcccaaacagaacgtgcagtacggtttgtaggtctttctacagctctggctaatgctggtgatctagctgattggttaggcgttgaggaaattggactcttcaatttcaagccaagtgtgaggcctgtacccctggaagttcatattcagggttatcctggaaaatattactgcccaaggatgaatagcatgaataaaccagcatatgcttgcatatgcacacattcacctgcaaaac

SEQ ID NO: 4730 - DNA, 537 bp, Glycine max
  Clone ID: jC-gmfl02220068a07d1
gcttgcggagatccattccttcacaatttataaatgttcagacatctttcaatccttgcactgtaaacctttatacttacaaatggcgacacgacttggaaaataaataaagaaaatctaaaaacaagatcattatgattacctataaaacaattaaatgcaagagattgcaaatcctatggatatacatattgactttttctcaagttaaaaaaaaaacattttttggtacaacctgggcagccccaaccctcttcaagaaatcttacgtttacgttgtatgtacaatggcactgaccaatggtgtctccactacttaacatacatcaagttcttcaatggagtgttcttgttcaaatccaatgtaacaatcggagactaaaatcagttttacgccctgaagattagctggagtcagaggcaacttcattgaggtaactaagtgatctgaaacagaaactcttttcaaagcatatagctcagacgtagaggtattaccaagaaccaaccaccattgttccctctttatctttggaa

SEQ ID NO: 4731 - DNA, 485 bp, Glycine max
  Clone ID: jC-gmfl02220068a08a1
cgaaaatattcatcacacagggttttggtttattattccaatttttggttttcccttttgttggatattagagtgtgtaagaaagagaagagagagaaatgggaaggggaagagtggagttgaagagaattgagaacaagatcaacaggcaagtgacctttgcaaaacgaaggaacgggcttttgaagaaagcttacgagctttccgttctttgtgatgccgaggttgctctcatcatcttctccaatagaggaaaactgtacgagttctgcagcagttcaagcatgctcaaaacgctagagaggtaccagaaatgtaactatggtgcgcctgaggctaatgtgtctacacgggaagccttggagttaagcagtcaacaggagtacttgaagctgaaggcacgttatgaggccctacaacggtcccagaggaaccttatgggagaagatcttggtccttaagcagcaaagagctcgagtctcttg

SEQ ID NO: 4732 - DNA, 451 bp, Glycine max
  Clone ID: jC-gmfl02220068a08d1
ggatgaaaaaataggtgaacgtttataattcgattatcaatactcttatgaatagggaagaaacagcctccgaagcatacatgtgcacatgaatgcaagagctagtacgcacagacaacactgcttaactttgttcctactctatactcgggagacacttacagcttcattacatccagggccattatcttgcttctaattcttgtcgctgcaaataacattggaacggctaatgtgctgttgcagaggatcttatgcaggaaacgcagactatcgtaaccatactgccatgacattgctcatgcttgaccctgctgacaccactgatactgcatcaggctgatacccaatgatgtaacgacggctgacactgcattcgctgaaagaggtcttcacccagagttagagctggatgcctgacatattccatcgcttgaacttcggcattcag

SEQ ID NO: 4733 - DNA, 601 bp, Glycine max
  unsure (1)..(601): unsure at all n locations
  Clone ID: jC-gmfl02220068a09a1
ggctcatcccgtcaaagaaaaaaatgacgggaaagctataaatggaggtaagaacgaacgaagttgcaaagcaaagaatagaagacgaagggtatagagctcataacaatccatttggtcttaatttgtttctgttttcttcattctgtcagccatatatggcttccttggcgacggtgcaagatgaacgttgcgttcagagaagctactggattgaacataccacagatttgtccgtagagtcaatgatgctcgattccaacgcctctgatctcgacaaggaagaaagacccgaagttttgtccctactaccagcatatgaaggaaaatcagttgtagaacttggagcaggtattggaagattcacaggtgaattggccaagaaagctggccagttgcttgctgtggatttcattgagagtgctataaagaagaatgaaagcattaatggacaccacaagaatgtcaagttcatgtgtgctgatgtcacttctncaacttgcatatttctgaagatcagttgatctgatngtctccaatggttactcatgtatctttcagataaagaggttgagaatttagctgncaggatgatcaaatg

SEQ ID NO: 4734 - DNA, 463 bp, Glycine max
  Clone ID: jC-gmfl02220068a09d1
tttgttggatgttatatgttttgtagcttatgttctttttattattatttatttttagattttgtggatatggaaaatttgttgatcacaggatgataggggtgttcagagtgttcgaagagggggcccccaatatcataaggatattctactatatgagagagcaggtggaaagggtttggagcacaggaggactagaacaaccaaggaaataagagaaaaaaaagggacaaaaacctggccagaaagtactggatgaagaacgtggaactgggggaggagacatgtacatggcagaaaattttgaagaagaagatgttggcattgaccgctacataaacataatttctgttgccattgaacgcgccattggactcagatgctgcgcagaatttgagtgtgccgattgcactaaccgaacaagggctgtgaaaacataagatgtaatgtaggggcgggacac

SEQ ID NO: 4735 - DNA, 613 bp, Glycine max
  Clone ID: jC-gmfl02220068a10a1
cttcgttatgtcgcgacagagatccagaagagtcgaactacctcccgctcaggagaatattgaaaaattggagaaggttgtaaacgatggaaattattatggagctcagcaaatgtacaaatccgttagtgccagatatgtttctgctcagaggtactgtgaagcattagatatcctacattcaggagcgtgcattcaattgtctcatgggcaggttacctgtggagcagagctagctctattgtttgtggagacattagggaaagggaaaattccttacaatgaggaaattcttgaacgtctcgacaaaatttacaaatcatttcctcgggtttcattgccacaaaacctatgggatgtcgatgacatgcagcagctttctgaaaacattggaagtgcaaagacacgtgttgagggctgctcctcattcttaaaagctgctatcaagtggtctgccggaaatggagtaaataagaatggatctccagagctgcacatcatgctagctgagtacatattttctgaaagtcctgaggtggatatggctaaagtgacacatcattttgtgagaggaaataatccaaagaagttgcttctactctaggagtttttg

SEQ ID NO: 4736 - DNA, 450 bp, Glycine max
  Clone ID: jC-gmfl02220068a10d1
gttaaattagcatttacaaatcacgagatagcatagattttcttcaatgaggagaatttgctctatcattaacaaaaaagaaaagaaaaattatttgaacgttctgttgaagttgctggtctatctggtagtgtctccataatgattggcattactcagctcccatcaacttggatatatctccaaacattcccatgggggtccttcgctgtactccaaagaacctttccggaatatcatctagcatcttattgaacgcaggctccctgtcaatacttggcttaaaatttgctctcaacatactaaaaagaggcaaagcatctttttccaacgtttgcaaaagatatgcgataaattgcatcaactctgtcttaggaaatgcaaccttagcccgattcagttgcttctttatctcttccattaggatgttcgcatctttcaaattacctg

SEQ ID NO: 4737 - DNA, 356 bp, Glycine max
  Clone ID: jC-gmfl02220068a11a1
ttcctctttgacatgcttgcttttggtgatttttgggattgtgcttctcatcgtgatcatagttcttgctgcttagtcaaagattgtctcaattccattatggagcaaatgcatatatacagggaagcagatagcatctcccttgctgatgatgtcacttgattggtgttttgccgggtctggtggttgactggagtttgttgcatctgatttcagttcatgatgtgggaattcccataattttgttgtgtggttttatgtgctctctatgttagtgtttggggttttaaaatgtgtcacggattatggtgtaagttctctccatgtttctttaattaaaaagtatttaattcttt

SEQ ID NO: 4738 - DNA, 357 bp, Glycine max
  Clone ID: jC-gmfl02220068a11d1
aaagaattaagatactttttaattaaagaaacatggatagaacttacaccataattggtgacacattttaaaaccccaaacactaacatagggagctcattagactacacggcaaaattatgggaattcccacatcttgaacggaaattgaatgcggcaaactccagggaaccaccaaacccggctaaacacctgtcaagtgacatcatcagcgagggagatgctatttgcttacctggatatatgcatttgctccataatggaattgagacaatctttgactaagcagccagaactatggtcacgatgagaagcacaatcccaaaaatcgccagaagctagcatgtcaaagaggaa

SEQ ID NO: 4739 - DNA, 340 bp, Glycine max
  Clone ID: jC-gmfl02220068a12a1
aattcggctcgaggcgtggcctcacttctgctgggaaaagcaataggggtttacgtggcagaggacatctctaccacaaaaatcgtccatcacgcagggcaacctggaagagaaacaataccctctcccttcgtcgctaccgttgattttgttgcagttatcgtatgttgcttcattttctgagtatttggaggaaaatcgtcagttttggatccctgaatcatgccttttttccccgataatgtctttagtactaaaacagcagagattaatgatgtaagctttctactatgtgccgggattgtttttatttattttgttcgacttttttcgttgtggc

SEQ ID NO: 4740 - DNA, 330 bp, Glycine max
  Clone ID: jC-gmfl02220068a12d1
gccacaacgaaaaaagtcgaacaaaataaataaaaacaatcccggcacatagtaaaaaacttacatcattaatctctgctggtttagtactaaagacattatcggggaaaaaaggcatgattcagggatccaaaactgacgattttcctccaaatactcagaaaatgaagcaacatacgataactgcaacaaaatcaacggtagcgacgaagggagagggtattggttctcttccaggttgccctgcgtgatggacgatttttggggtagagatgtcctttgccacgtaaacccctattggttttcccagcagaagtgaggccacgcctt

SEQ ID NO: 4741 - DNA, 471 bp, Glycine max
  Clone ID: jC-gmfl02220068b01a1
ggaaaacaaaccagaggaacccatggcaaaggagaaaaacccagaggaagaagcaacccaagagaaaaaaccggagcaagagtccaaagaggaagttgctgctgctgctgctgctccgccaccgccaccgacaccgtcaccgtccgagattgtgctcaaagtgttcatgcattgcgagggttgcgcccgcaaggttcgtcgctccctcaaaggattcccaggtgtcgacgatgttgtcaccgattgcaaatctcacaaggtggtcgttaagggagagaaagcggatccgctcaaggttttggagagaatacagaggaagagtcacagacaggtcgagcttctttctccgatcccgaaacctcaagaggagaagaaggtccaagaggaagagaagcccacgcccaaccccgaagagaagaaagaagagcctcagattgtgacggttctgaaagttcacatgcattgcgaagc

SEQ ID NO: 4742 - DNA, 354 bp, Glycine max
  Clone ID: jC-gmfl02220068b01d1
aaaaagactaaaataaaattttttcattgtcaaaaaaattaaacccattttttgatcttattttggcccatcagggggccccctcccaaagtactattgaggctggggtttttaaaggggcaaccgttattgtgcttaaagacgggcccaaaaagtgttcccaatttttgttgcttttgcataccttggtctttaaccgtccggggtaccgcggaatgggcctcatgttttttccccccccaagcttcaaaatttttccccaatgcccatatatcccggggccccttagttttgacctcatgacaatgctggcatttgggtgcttacagttgaccatttggggggggtttgaat

SEQ ID NO: 4743 - DNA, 364 bp, Glycine max
  Clone ID: jC-gmfl02220068b02a1
agaaaaggatgatcgtgtcgttatcaaagatcccaaccctaacttgttttttgctagtcaggtaattaataatgcttgtgctacccaagcgatcttgtccattcttatgaattcaccagatattgatattggtccagagctgacgaaattgaaagaatttaccaagaatttccctcctgagctcaaaggtttagccatcaataacagtgaggccatacgtacagcccataatagctttgccaggccagaaccttttgttcctgaagagcaaaaggttgctagcaaaaatgatgatgtttaccatttcataagctatctacctgttgatggggtactatatgagcttgatggattaaaggagggt

SEQ ID NO: 4744 - DNA, 398 bp, Glycine max
  Clone ID: jC-gmfl02220068b02d1
attaaagaattcattcattaacagattacatacgggctccaaatcttacaccaaggaatctgatgaatattttgccctgaatatagagtcttacagggccggtggcatcaaatgctggactaatatcgcttaccacactgcatagtaacactgcttgaaatcgaccacgaacctgatgacgtacccagatgactagggatattaattcttgatcagtgatctaatacactctttactttcacactgtgtgaaccatgcgagaggaagtgcttgaactgctaaaaagggcatatgctgtgcagcacatttattatgtattactgtaatgatgcccttccgagaagactcagacttttagccagactacattgactggcacttttattcatcctatcgat

SEQ ID NO: 4745 - DNA, 91 bp, Glycine max
  Clone ID: jC-gmfl02220068b03a1
gtcacgtgtggttgtacgatatttattgccaaaaccgtttccattttggcacaagggttaaaagataaaggcgactatggtggttatgcac

SEQ ID NO: 4746 - DNA, 409 bp, Glycine max
  Clone ID: jC-gmfl02220068b03d1
gagtaagtaacaatgacatgtaacaaagatggcacaataacacagatattcccatagagattattcttctacagattctcatccacactaaacaaacggtcttatctggggaatcggctactagaagaccaaccgaacgatgctaacattggaagagcccaagcgcggagcgcttttgaaaattttgaggactgagatccaattgctgctgggcttctatatgaacctctaaaatctcagggatcctctgtttgagataattagcgactctggcaaggacagtggaacgcttgtgccaaaaccgaccactaaggctaattttcacaaaaggcccatccaagtcagctagttcaaccactcctgtcatgccaacagaggtgtcaaagatttgacccagctcctttcgagc

SEQ ID NO: 4747 - DNA, 510 bp, Glycine max
  Clone ID: jC-gmfl02220068b04a1
ctcgagccgcaaaatatgactgccttctttttgatttagatgacactttgtatcccctcaaatctggtcttgcaaaatcatgtctccaaaatattaaagactacatggttgagaagcttggcatacaccctaacaaaattgatgacttgtccaacctcctttacaagaattatggaacaactatggctggtctaagggcaattggatatgactttgactatgatgaatatcacagttttgttcatggaagattaccttatgagaacctaaaaccagaccaagttctgaggaacctgttgctgagcctaccctatagaaaacttatcttcacaaacgcagacaaagttcacgcggcgaaagcgcttaacaggcttggattagaagactgctttgaaggaatcatatgctttgagacccttaatcccatccacaagagcattgtttctgatgatgaagatgacattgagtttgtaggttcaagaaccaccaatccaaccaccacttgtaatg

SEQ ID NO: 4748 - DNA, 505 bp, Glycine max
  Clone ID: jC-gmfl02220068b04d1
cgcaaatactagaaggaacattattttggtggtattatccataaccgtgacacaatgaacaatatcgaaggggctaaattaatatgatgcacataataatcatctgaagctgcgactgacgtgtccacagctagctttgcagggtatgcagctcctggatgtactataacgctcccatagtccaggcgcagactacctaaggtcgagaatgcttttcaaagcataagctgcaccttatacatcactgtgatgtgccaaccagcacagtgtgaagccccacacgttttacagcttgtatgttgcgggtactgtgctctgcgaacatagttctctgctgcctaagattggctatattgagggccagctcataggcattatctgatggctagcacactataggtgtctttggcgcgactgcactgggattgacctgacataatgccctaagatgtcaaagatttgagaggtgcccgaaccattacatgtggacgatggattggaggct

SEQ ID NO: 4749 - DNA, 435 bp, Glycine max
  Clone ID: jC-gmfl02220068b05a1
atcacaacaacatggccgaacgtggaggcggagaccgtgccggtttcggtcgcggctttggcggtcgtggacgcggcggcgacaggggacgagggcggcgcagggcaggagggcgccgcgacgaggaggagaagtgggtcccagtgacgaagctggggcgcctggtgaaggaggggaaaattccgagcctggagcagatctacctacactcgctcccaatcaaggagcaccaaatcattgacaccctcgtggggcccaccctgaaggacgaggtgatgaagatcatgcccgtccagaagcagacccgcgccggtcagcgaacccgcttcaaggccttcgtggtggtcggcgacaacaacggccacgtcggtctcggagtgaagtgcagcaaggaagtcgccaccgccatacgcggcgccatcattctcgcaaagc

SEQ ID NO: 4750 - DNA, 511 bp, Glycine max
  Clone ID: jC-gmfl02220068b05d1
gaaagttcagtaaataatatccattcaactaaatttgagaaaaaacaaaaagcatggagatatataatatgtccttcaatagaaaatgaaataacaaaaggtagcaaaacatataattactgggtcctagcatgcttaagacgaggcacaatcatccgataacatcaaaactgctgctgcttctgctaactcaagccttcaccctttcctcctcgaggataagggccttccctgttggctttgccaatagatcagagtactcttggaatggtgatttggagaaccgagtctccttccagaattcaggtgttagaaaaccgtaggttttcagcaaacagtcaaaagtagccttgacgaaatttccgagggttttggtggaacccctggaggaagtgaagacgtcatcgattccagcgaactgtaagaccttcttggggaccctagcggcgacgattccggacccacgaggggctgggaccatgcggactgtgacggagccacactttccggt

SEQ ID NO: 4751 - DNA, 550 bp, Glycine max
  Clone ID: jC-gmfl02220068b06a1
aatcaagtcaacccctctttcaatttcaaccctatatctgctctctttttcttcatcatttgtttttgggtctctctgtttccaagtttttgagttatggcatcgaaacgcatcgtgaaggagctcaaggatttgcagaaggaccctcctacatcctgcagcgcaggtcccgtggcggaggatatgtttcactggcaggcaacaatcatgggacctcctgatagcccatatacaggtggcgtattcctagtttcaattcattttcctcctgactatccattcaaaccaccaaaggttgcatttaggactaaggtattccacccaaacatcaatagtaatggaagtatatgccttgacattctaaaagaacaatggagcccagcactaaccatttctaaggtccttttgtccatttgctcattgttgacggatcccaaccctgatgacccgcttgtgcctgaaattgcccacatgtacaaggctgacaaggctaagtatgaagccactgctcgtagctggacacagaagtatgccatgggataatcatgct

SEQ ID NO: 4752 - DNA, 395 bp, Glycine max
  Clone ID: jC-gmfl02220068b06d1
ggtcctaactattaattcgttaccctaatttggaaaagcacgcaaccacgcactaaatttgggacattttgcaacatattttttcctgcccgatgttttgcaaaggaatattccccagtgatcattaattcccttaccgtggttgatttccactggccaaaagaaggcctatcactcattaaagggatatccaggtttttaataaattatgattgggccttttccgtgcgcctcttaagggggcccttgacaatcccaggggatactttggggtccaggtacaaacagtgggttcatactgagccttgttagccttgcacatgggggcaatatttggcacaagcggggaattagggtttgggacgcccaacaaggagccaaaggcccaaaggccc

SEQ ID NO: 4753 - DNA, 538 bp, Glycine max
  Clone ID: jC-gmfl02220068b07a1
ggtgccctaggttcttatttgccaaatgcttcatggcacaataggaaaatccaaaaagaatataattttttgaggtttcggtggccaagtttgaaccaccattacaaaagcattgaaggagggtgtacatgtaaaaaatgtaatataaaatttgttgtgaaagcgacctctgaaaaatcttttgagtctgaacctcaagcttttgatccaaaaagcattttggactctgtcaagaattccttggatgctttctacaggttttccagacctcacacagttattggcacagcattaagcataatttctgtgtccctccttgctgttgagaaaatatcagatatatctccattattttttactggtgtgttggaggctgtggttgctgccctgtttatgaatatttatattgttggtttgaatcaattgtctgatgttgaaatagacaagataaacaagccgtatcttccattagcatctggggaatattcctttgaaactggtgtcactattggttgattctttttcaattctgagtttt

SEQ ID NO: 4754 - DNA, 526 bp, Glycine max
  Clone ID: jC-gmfl02220068b07d1
catcccaaaagaaatatatcttcatttaaattagcaattaaaaacttaaaactaatgtagcgactccaagccggcctgtgacaaaggcagcaccatttaaacaaaactaattctcaagtcaatattgccgctgcatcctcatctaacaaaaggaatgagtaagtattctgcataaaatagcttccaaataaacatatagaaggatgttatcgaagctttgcttttcaaatctacagatttggcatgaaaccagagaattgaagccagaacagcgtgtcccaaacccgtgacaattttgctccaaagacaaggagatgcagttcccaccaggagggcgactccataagctatttcaagaaggataacacaagtccagaataccggcttctgacctaaacgcactgaaaaagattggatgccaaatactttatctccttcaatgtcaggtatatccttaaacagtgctataactacagagaagaagctcatgaatgcagtagcaaaaatcaatgatcttgaaaagaca

SEQ ID NO: 4755 - DNA, 586 bp, Glycine max
  Clone ID: jC-gmfl02220068b08a1
caaagcgcaaagcgcagttgttgctctttgaactcgaacgaagttctccgaagtcgaaacactcgttcgattcgctgaactctgaagttaatttttgttgcgaaaatgtcggtggcgaagaagttgattagatgcgtcatccttgacttggacggcacgctgctcaacacagatggcatcgtaggcaacgttttgaaggttatgttaggtaaatacggaaaggaatgggacggaagagaagctcagaagataattggaacgacgccgtttgaggccgctgctgcggttgtgcaagattatcaacttccctgctccgccattgaattcctctccgaaatttcgccactcttctctgaccagtggtgcaacattaaagcacttcctggtgctaataggttggttaaacatttgaagagtcatggagttcctatggccttggcgtcaaactctccaagggaaagcatcgaagccaaaatatcctatcatgatggatggaagaattctttctctgctataattggtggagatgaagtacgaacagggaaaccctttcccctgaatatccttgagctgctaggaggtaaca

SEQ ID NO: 4756 - DNA, 506 bp, Glycine max
  Clone ID: jC-gmfl02220068b08d1
ctggctctctttatgcatgttgcaaattacatagcatcggcatgattatgaatgatagggactaatatgcaaactgatgtccagtagaataactggattatgcccttacaacgatcaacaccaaggtcctattcgacctgaagctaagcggatgataagattgttctacgagcttttcgaatacgaatcattcttaaaacttgaatataacgggaggatcaagagccctatgggcatctgttcgatttcatgaatttgagctaccaccctttgaagggatgaaaaattgacctggggacgtttgtaaccaactatatcaagccgactttcttacccatagaaatgtcgattaaagccatggagtaaccatggttctatagcccaaaatttgttgtagaaatatggatgccaaccaatgatcatcaccattttaaaagcacctcttgccgccatccagctcatccggaataaacacttgcacgatactgtgaaaggatatctgaata

SEQ ID NO: 4757 - DNA, 517 bp, Glycine max
  Clone ID: jC-gmfl02220068b09a1
atacaaaaccctgaagaaagacactgccattgtttacttttcattgattgagccaaagctttgtattttctgcgataattttccattgggtggaagaaagtctcaacctttattcgaaagagcaaggatctgagttgagttgagtgatcatgtgtggtggtgcgattatctccgacttcataccggcaggtcccgccagcggggcgcggcgcgtgaccgccgacatcctgtggccgagtttgaggaagcgcttctcgaagccgctgctggacgatgatttcgaggctgggttcagagaattcaaggatgattcggaaatcgaggatgttgatgacgaggacgatgaagacgaggaggagttgaagaagaagccctttgggttctctcgctccagcaacaaggctgcttctaagcctctctctcgtggatcagcaactgtggaatcaaaggggcaagctgagaagtgtgccaagagaaagaggaagaaccagtatcgtggaatccgtcagcgtccatg

SEQ ID NO: 4758 - DNA, 527 bp, Glycine max
  Clone ID: jC-gmfl02220068b09d1
aacataattgataatccttaaggacatcaaacagaaaatcccctgaaaacgaggtctttgagttcacaaaaggataccctataataaaaacctatatatagtcctatactactgcattagctacaagataaaataaactccacataagctttaagcaggtttcttgctgtggactccatcaccaacatcacgatcacaattcctgaaagcaaatacaaaaatcaaaatgataataatatacatatacattcagaaacatgcagggatgcaaaaaaataataataataaaactagaagcagaatgaaaattacgaacttgtagctttatttacataaaaggggagataaagggtgttcagaagactcctgccatggaaggcaggtcgtccaagcttcaaaggttcatagggtttccggcggcgtaatgagttgcgtctccgccgagcaaagacgccaatgtagcatcagcccaggctttatcaagaaaagaaggggtctcaaagaacttgagctgggattcaatgtct

SEQ ID NO: 4759 - DNA, 563 bp, Glycine max
  unsure (1)..(563): unsure at all n locations
  Clone ID: jC-gmfl02220068b10a1
atatcatttcacacacctccttgttcttcttgttgttttttttcttccctctcttctctttgtttttcttctccttcggttgaatcaatgggtgcagaggttaagatctggaatcccgttgaagtcgctgagcaagctcgccatgactacgcttcgcagattcatccctcacatctcaccattgatccctccctcgagcttcctcaaatgacacctctcgtcctaaagttgtgcaaggatatgttcaaggcgtggtcgaatttggatgattcttgctttgttgttgagaaaatttccgggggcataacaaatttgttactcaaggtttcagttaaacaagaaaactgcattgaggaaactataactgtcagattgtatggacccaacactgagtacattattgatcggcagagggaattgcaggctaccaaatacatcacagctgcaggatttggtgctaagtggctcggcatatttgggaatggcatggtgcaatcttttataaatgcacacactctatctncttcagatatgcgagagccaaagctggctgctaaaatagc

SEQ ID NO: 4760 - DNA, 517 bp, Glycine max
  Clone ID: jC-gmfl02220068b10d1
atgatgacaacaatacaagaaaaagaatgatatatcaatttatatagcctatgtactaggattacaacatagaatgtagaagagcctgtagctcaaacataaacgcctaattagccattattgtgataagcgtctaaaaatgatatgttacacaaacattaaactacatgaatcaggggactcatgctacaaacttgacgtacaaaaatcccacgaatgactgagtataagtataatctatctatctactcatctcattcttgcatcctgaaaggtaggactgtgccagcaagaaatacttctctttgtgccttttgtactcgtggtatcgaaggaaaaagtaaccaagataatcaaattcaattgcagacatctttgcctgaattagaccccacaatgcccagaaaatgtgagaagcaagggaaaatgtatttgcctcaacatacaaagtttcaagatctttctcagacacctcttggggtctttcaggtttcaagtaatgcctgaggaaatgata

SEQ ID NO: 4761 - DNA, 557 bp, Glycine max
  Clone ID: jC-gmfl02220068b11a1
tggtgctaaaaaggagcctttagttacttgggtgcaccattggctagaccattcttaggtccatttgcagccttttcagatggtctagccaatggtgctaaaaaggagcctttagttacttgggtgcataaaaattttcagggaatactcaccaacgagactaggtgcctgcgatgtgaaactgtgacagctagggatgaaacattttttgatttgagccttgatattgaacaaaatagttcaattacaagttgtttgaaaaacttcagttcgacggagacattgaatgccgaagacaaatttttttgtgacaagtgctgcagtttgcaagaagctcagaagagaatgaagataaagaaaccacctcacatcttggtcatccaccttaagcggtttaaatacattgaacaactgggtcgctacaagaagctgtcttaccgggttgtcttccctcttgagctgaaattgagcgatactgctgaaaattcagatattgagtattctctatttgcagtagttgtccatgttgggaagtggcccaaccatgggcattatgt

SEQ ID NO: 4762 - DNA, 331 bp, Glycine max
  Clone ID: jC-gmfl02220068b11d1
ctacgagtgaacctgccattgcatcaagttaatatcgatcatatactaaacaggtaacatgatggatattctgctggtgaaattttaaaaccatatgcactgattttcatggtaggactcaattaggtgaaaaaggacagcgttaccactgtccactgtgcatgtccaccactaaggctacattttgccaacccttattctttaagaggtgcttaataactacttatgcctgttgtatttacccggaccatcatcattgactactacacctatgtacctgacaagtgcaaatgactctagcatgtaagattcataaggctactacgtttac

SEQ ID NO: 4763 - DNA, 522 bp, Glycine max
  Clone ID: jC-gmfl02220068b12a1
ctcgagccgattcggctcgaggaacgatcaggagttccgcggacggaggaagaacacaagttgtttttggttggattgcagaaagtagggaaaggtgattggagaggaatctccaaaaactacgtcaaaacgcgaactccgacgcatgttgtcagccatgctcagaagtactttctccgacgaagcaacctcaatcgccgtcgccgtagatccagcctctttgacatcaccaccgacacggtctctgcaattccgatggaggaagaacaggtccagaatcaagacaccctgtgtcattcacaacaacaacccgtgttccctgctgaaactagcaaaatcaatgggtttccagcgatgccagtgtatcagcttggcgttggctcttctggagtgatttcagtccaaggtactggatacccaatggaagaactcactctgggacaaggaaacgctgaagaacacaatgtgccaaacacggcctctacagtgtctggtatcatcaccccctgttcttctagttct

SEQ ID NO: 4764 - DNA, 478 bp, Glycine max
  Clone ID: jC-gmfl02220068b12d1
catcagtgaaagttcatatcgaacgttaatacattatcagcaaagaacagagtgtactttgttattttcagttacatcaactactacaaacgtaaacggccaaataaacaagaatctaaagtcatgacattaattaacataagcaaacatgacgaaacaggacaggaccttttctggggtctgtacaaggaacagaaggatcaaattcagtctgttaaaactcttcttgccttctctaatccatcgccctttccttcaacctctttctctttctcccaccaaaaagacaggaaactagagaaatattaatatatgtaattaatctgtgaatccaaggaccatattctcaagcaacactaatgatgctatctccattgctgaaacattgcatggcatgtaaagctgaaatgcttgatgatgtctgtctttggtcagatgagaaggatagccccagggacagtgtcggtggtgggtcaat

SEQ ID NO: 4765 - DNA, 510 bp, Glycine max
  Clone ID: jC-gmfl02220068c01a1
attttaatcacgcgcacatcatcacaacacaacaattcactaagctaaaatcacttcatcatggcttcctcgtgtgcttcctctgccattgcagctgttgccatctccacaccaagttcccagaagaatggatcactcttgggaagcacaaaagcttcttttcttagtgggaggaaactgaaggagaacaactttacagcaccagttggagcacgatccagcactacagtttgcgcagttgctgagcctgataggcctctgtggctcccaggcagcacccctcctccatggctagatggcagtttgccaggagattctggctttgatcctctaggtcttgcatctgatcctgagagcctgagatggaatgtccaaacagagcttgtgcactgcagatgggccatgttgggagctgctggcattttcatcccagaattcctcacaaagattggtatgctgaacacccctttatggtacactgctggagagttggagtacttcacaaacacc

SEQ ID NO: 4766 - DNA, 462 bp, Glycine max
  Clone ID: jC-gmfl02220068c01d1
gcaaaaactgtgattacttcctgaatttacattaaatgcatctaaaccttaaataggtatttgtacattgaatcttcaatctatgcatgacaatagaagtagccattttacaagctttcaccaacataaacactcccacctaaaaccatttaagcgttacaacttagttaaaaaggtttgccaatgtttctccaaggcttgcaatcatagagttgttccaacacttctcacttgggagtgaaagcagcaaaaatagtagcatggccaggatctgcaaggtgagcaaagaggttgtcaataggaccagtgccagtgtaaatgtgctggaaccatgcccccatcacagccaacatggccaacctcccattcttgatctcctttgctctcaactccttgatcttctcaggagaaccacttccccagccaagtgggtcaaaccaaagcccacctgggtacccaaca

SEQ ID NO: 4767 - DNA, 569 bp, Glycine max
  Clone ID: jC-gmfl02220068c02a1
cgaaagggggccaagtatcattccaccgttaacacattacacaactttaccatctccatctcctctgtgttatattttgtcctcttttattctcatctgatcacacacactctgtcacgcacccaccattctactacactcctctctctcactctcactctctgctccgtgatagctgtaccacgtttttctctccatctcgaaacaccatctctgcctcagtcccaacccatcaccattctcatggctgctctagctctagcacttcttcttctggctttcaccggcacttcaagtgctacatggtgcgtttgcaaggatggaagcgacgcgatcctgcagaagacgttagactatgcttgtggagctggtgctgactgtaaccctcttcacctaaacgggccttgttttcagcccaacaccgtcagggcccactgtaactacgccgtgaacagctacttccaaaagaaaggtcaagctcaagggtcatgcgaagttgcgggaacagccactgttactgcatctgaccccagctctagcggttgtgtctacccttctagcgtcagcgc

SEQ ID NO: 4768 - DNA, 431 bp, Glycine max
  Clone ID: jC-gmfl02220068c02d1
ccgaaacaattgggcatgatttctattcattgaaagcacaaaattaacggtttatagttacgttaaaaattacatagcattggtgtcactaggtccacccttccatctcattgacaacgttatgtacttcttcgtacagagcttaagattaagaacaagtggagccaagttgttaccatattcaattaattaatcaaaaaaccaatagctagtggaaggtggagaaaaatattatataagaaccccaaaaactaacgtcccaagttcaacacctagaaaaatagcattcacattaatacagtgaaataaggcattttgcaccatatacccaggtcaagccattttcattctcaaccccagcagagcatcatgaaggcagagatgagggcgatcgcgatcgagaagaaactactgctgtgaacaaatctaat

SEQ ID NO: 4769 - DNA, 433 bp, Glycine max
  Clone ID: jC-gmfl02220068c03a1
ggtcaaactcgcgaaacctgtcatcgcgttttccacctcgaacgccgcgaaaaacattccctcctccctcaaattcggcacaatcctcctcgattcccctctcttcctttccatgctcaacaacaacgaatacgtcaacgccgattcacgaactcgccgagtcgaagtgagtcagtctgactcggcggcgattctgttctcctcgggaaccacggggcgcgtgaagggcgtgctccttacgcaccgcaacttcatcgcgctgattggagggttctatcaccttagaatggtggtggatgatgatccgcacccggtgtcgttgttcacgctccccgtgttccacgtggtcgggtctttatgctgggtaggggcatcgccgacggagagacgcttgtgttcatgcatagggttgatttcaagggatgctgaagct

SEQ ID NO: 4770 - DNA, 371 bp, Glycine max
  Clone ID: jC-gmfl02220068c03d1
caaagaatggtattactaataccagaatgtactttaataataatttatatacaaagagaacagtagtggattccacgtccaataataaggggcttttcttagcatccaataaggtgaggcataaggaagacaggcctaaccttaaaacctttacctcaatcagaaacatatatgtttctcttcttctgatgaatgaaatcaattgtacaaaaatcagcaatatacaaacatatttcctatttgacaattcagctaataaatgaatgaactggctctatggatcttatgttcctaacataagctcaatctaacgtcattgccacatggatgatgctggaatgcgactaatggcgggccaagtgaatgaaagt

SEQ ID NO: 4771 - DNA, 355 bp, Glycine max
  Clone ID: jC-gmfl02220068c04a1
accttctgaggttaaagcaatatacaaagagagagagagagagaaaatgatgaaggcggcgatgctcagatctctacactccgtcgccacccgcggtgcctttcatattttctcggcgtggtgacgcctccgagccggtgccggagcgcaaggtaacccttctcggcgccgtcggcgggattggaaaagcctctctccctctaaatgagcttaatacccatagttcgagcctctttctttacgatatagccggaactccccggtgttgtccccctatttaaccccacttacaccacttctggggtatggggtaccaaggggacgaaaagtttggaaaagcatatggagggtgccg

SEQ ID NO: 4772 - DNA, 78 bp, Glycine max
  Clone ID: jC-gmfl02220068c04d1
tttcgccctttttttttatagaatcttgggatttcacaaatgaagattacacatggactgagcttcatgacacatgag

SEQ ID NO: 4773 - DNA, 365 bp, Glycine max
  Clone ID: jC-gmfl02220068c05a1
gtttctcagtcatctttggcatatatcaaaattaaccttgcattattcaccagaatggctaattaatatgaaaacaacttcccccctcaaaagcaagacactcagcctggcaaagagtacctcatgaatccaccaccccaatacatcagattccaatacaagccatcagataaacttcagggaaagatagctgttgtaaccgggggtgattctggaatcggacgatccgggtgcaactaggtttcattagaaggtgctactgtgatcttcacctacgtgaatgggcaagaggacagggacacgagcgacacgcttgacattataaaaatagctaagactgaagatgcttaagatccattggctat

SEQ ID NO: 4774 - DNA, 469 bp, Glycine max
  Clone ID: jC-gmfl02220068c05d1
ataatagatcttgcttcaaatatatttcaagtagtacattttcttaggtttatacgtttgaaagcaatatttatgcttgctttcaacgaatcttcatccagacatatattatacattcatacatatcgatagaaccgtgctcattcactgccattcgtaacatagtgatggcgtagacaagaaccacactgagtcaatgacatttcatataccagtctcgattaatgaggtatcatatatatatccgccaattcatcaagcattcacaatgattccaccattggggtggaggacttggccagtaatgtaagaggagcatatgttgctagcaagaaagacatgagagggagcaacttcaataggttggccagctctcttcattggcacatgcgaaccaaattgaacaataggttcctcgtgcatagttgctactattaacggaggccagatgggtccatgtgcaaccccg

SEQ ID NO: 4775 - DNA, 118 bp, Glycine max
  Clone ID: jC-gmfl02220068c06a1
ggaactgaagcataattgtcgtacttcaaaattcaactcccaacacacaacatcatggctcatggatatcaacgcctccaccgccggagaaagcaacacagttatcctgacccagaat

SEQ ID NO: 4776 - DNA, 393 bp, Glycine max
  Clone ID: jC-gmfl02220068c06d1
gaacgtaacaggactctataattgatattgcttgaggtatattgcacgttgtgcatattataaggaaaatacgttagactggacatcttatgtttgcacttaacaaatcgagaatcatacaaatgttacacgctcgtaccattggatcgtatcgcgctcgtatcatgacatccttcacgaacagaagtctttacctggcaccacagtgaggccttgactgttacgaatgccagaaagtatccatgaggtatcatcatggatcgcacaatcaagtgcgcactcgcaaaggatctagcaaggcagtggacgacttggacaatactgtagtatgggacaatgatgctaccatgcgagacgagctagggaagagctttaatgggctggtcaaatgtt

SEQ ID NO: 4777 - DNA, 523 bp, Glycine max
  Clone ID: jC-gmfl02220068c07a1
atgattttagggttctcactgccgttgaattggggatgcggaatcatgaaatcgtacccaccgaactcatcgaccgaattgcgcgtctcaagcatggaggcacgtacaaggttttgaaaaacttgctcaaacacaagttgttgcatcacgactcttctaaatatgatgggttccgccttacctaccttggttatgattttcttgccattaagactatggtgaacaaaggagtgtttgtagctgttggacgccagattggtgttggaaaggaatctgatatatttgaggttgcccgtgaagacggaacagttctggctatgaagttgcataggcttggaagagtctctttccgagccgtcaaatctaagcgtgactacttgagacatcgcagtagttataattggctctatttgtctcgcctcgctgcacttaaagaatttgctttcatgaaggctttggaaacacatggctcccctgttcaaatgcaatagaaagcaatagacattgtgtagtcatgtcactc

SEQ ID NO: 4778 - DNA, 549 bp, Glycine max
  Clone ID: jC-gmfl02220068c07d1
aatagcagtttgaaaagtcaaatataaaaaaatggggcaatgacaaaattttccaatatagagaaggcaaaattttcattccaaataaatatcggaaataatatgattatcctccgcaggaaaagggggtcgagacaataacctatttgctttcctatttctcaactttacacatgtttgaacttttgaacagataaaggccacctacaattgcctacctatctgatagatgtcaccgttgaaactatatataaagtccttttcagttcacttcacaacaaggcctcatattttcaccagctgctcaactgtttctggattttagaattgtgagatgatctaccacctttgtctttgtaggaatttctggctgcaacagtctttcgtgccttatgagctttcgctatggcatgtcgacgttgcttactcaagttcttaacgagttcagcttcattttgcaatgtatcttcattgctttgcccattgacacttgcatgtccctttttagatccactgctttcacgtgctttacagatctcctctttccct

SEQ ID NO: 4779 - DNA, 555 bp, Glycine max
  unsure (1)..(555): unsure at all n locations
  Clone ID: jC-gmfl02220068c08a1
ctctctctctcctgtatttgtcttgattccgatgcgaatggtaattgcagaaaccccaaccctcctttcctctccctcctcctagatcgagtcagaatcatggccaaagctgaaggtggcaaggaaccaataaatgaacaagcagtagcaaatatgtatgctgcaatgaggtctgagctcaaccaaatttactccaaaataactgaactggagatggaagttagtgagcacacattggttaccaatgccattcaaccacttgaccaatctagacgatgctatcgtatgattggaggggtgcttgtggagagaaccatcaaagaggtcttgcctgctgtgcagcgaaataaagaaggactcgaagaggttgtggcaaggcttaacgaggcgttggaaaagaagaaaaaggaaatttctgagtttgaggctaattataaaatcaggataaggaaggctgatgctgangtgaaggatgaatctggtaagaaggaagggtctgctcaaggggttcatcgtggtcctgcangtggaagtgaatgatttggctatttttat

SEQ ID NO: 4780 - DNA, 425 bp, Glycine max
  Clone ID: jC-gmfl02220068c08d1
gggaaaatgccttaaacctttttccattacttttttttggattggttcaaaaacccaatttaacaaaaggggggtttagaaaagccttttacccctggtgaaacattttggttcctaaaagaggccaaatagcttgatccccccattatttgccctaattttgcatacaaaaattttccttaaccccaaccaatgaaaataaattttttcagcccaaggcaagtaaacctaagggcttattaagccagggatacctgcttaagaacgggggtggaaacaccttttggatccccggttaagcagcaaaaccccgttaaaaaggggcccaagttacctttacttgcctttatttggaccggacaagaatttaatttggaccccccctttagcttcattttaagccaatgaccaaactggctgtaccc

SEQ ID NO: 4781 - DNA, 508 bp, Glycine max
  Clone ID: jC-gmfl02220068c09a1
ggctcgaggaactaccctaaacgacgccgcattcaaatttccgccaccgacgcattaaccccttccaagccccgacggttcccgagtggtgatggcggaaacgcacgaagacacaccgaaagaaaccgttcacaaagaagaagaagaagaggaccaaagcttcgaagagctcggcgtggacgctcgtctccttcgcgccctaatcaagaaaagaatcgagaaacctactccaattcagcgcgtcgcgattccactcattctggaaggtaaggacgtggttgcacgtgccaaaacaggttcgggaaagacactcgcgtaccttctcccgttgcttcagaaactgtttactgctaactctgatcggaagaaactcgcgccaaatgcttttgttcttgttcctactcgcgaactaagtcaacaggtatatgcggaagtgaagtctctggttgaattatgcagagttcagctgaaagttgtgcagttgaatagtaacatgcttgctaatgac

SEQ ID NO: 4782 - DNA, 494 bp, Glycine max
  Clone ID: jC-gmfl02220068c09d1
gaaagctaaattctagtttcaattagcataatttaacttagtaatgagcaataacttcaggccctacgcggtataaaggaaacaacaattccaatactgtactgtttttcgttttacgatatttggacctaaattacaacaaaattgagcctgttataaggctttgtaggaaacgggcaaatcaatcaaatacccttattctttttgtgtttatgcctatcactgctatttaggctatcgcttccaccagtcttcctagctttgtgcggtctttttgatgacgccgtagcatagatagccttcagagggtctccttcttttcttaattatctcttggatcccttgcggcgattattatttcccattgcatcccttgcaagcttgaccatttcccttgcctctttcgttggtttgtctaataggtacttaagcacatcccgtaagtgaagaggtggtgcattcttgctaaaattttgtcatgcttcagtagatct

SEQ ID NO: 4783 - DNA, 594 bp, Glycine max
  Clone ID: jC-gmfl02220068c10a1
ccaggcgcacgttagcacaaactatcatggccacggcaacagcagctgccacctcgtcctttatggggacgcgtctcctggaggctcactccggagcggggcgagtgcacgcccgattcggcttcggcaagaaaaaggctcccgccccaaagaaagcctccaggggatcgggccgagacaccgacagacccctttggtatccgggcgccaaagcgcccgaatacctcgatgggagtcttgtcggagactacgggttcgatccgtttgggctagggaagcccgcggagtacctgcagctcgagctggactcgctggaccagaaccttgcgaagaacgtggctggggacatcattggaaccaggaccgagctcgcggacgtgaagtccacgccgtttcagccctacagcgaggtgtttgggctccagaggttccgtgagtgcgaactcatccatggaaggtgggccatgctcgccactctcggagctctcactgttgagtggctcactggtgttacatggcaagacgccggaaaggtggagctagtagaatggtcatcataccttgggcaaccacttcattctcaacaccacactg

SEQ ID NO: 4784 - DNA, 260 bp, Glycine max
  Clone ID: jC-gmfl02220068c10d1
aaaaccatcaatggtcaaaactcaattccccggcattacgtttgatggtgggctcaatctaatgcgtatttattacccctcgtgattccctttgaaggcccggcatagtcaacatttacaggggagcatttaacatcaagctgaaacctttttgcttacccactccaattttacgttacaagctttctacaagtactacgaattcaacttggggaaaatgtgctaatttcaaccaaaggccgaccaagaagggcctttta

SEQ ID NO: 4785 - DNA, 557 bp, Glycine max
  Clone ID: jC-gmfl02220068c11a1
gttttctggtttctttcgtcatgctctgatttattgcttacgatttggaatagtgacaagtaaagacaaatcacaactcacggtcatccaattccaagaatagagctttacgaggcagcggcttcaaaaggaggggaatattcagaggaaaagaaagagtagttgttgaacaataagagctttcctcattcttagtttatctcacaaggaaggtacgtaagatccttaacacccttaccgcggttacttgccgcctcaatccattgctgaaatgaatgctcataaataaatatatttgcaggctacgaatctctgctcctagatttttgtttcttaattatcaatctagtctctaaattatattaaaagatttaatttgattccaaatttttaaataatttaatttaatttctatattattttaaaatagattaatttgaccatttttgtccaattgtgattagtataacaaatttcagcggcttttatttatgaacagtggaattattatatttattattagtttaaaaaataaaacaattttcaattctttttct

SEQ ID NO: 4786 - DNA, 519 bp, Glycine max
  Clone ID: jC-gmfl02220068c11d1
atctctatatcttcaaattcaatgtctaccactgtgctataagaatctgaatatattgcttggcaaatttttagcataaaaagtcctgtaaattgtcattaattagttttagaaagcattagttggaattcagattttgagatcacgatgagagtgcatttatccatgcatttcatttattttgtgcacattagcatgtggtttattaaaagttgtgttttaaaacataacttattcataactccgtaataaattcaaaaattactcatgttgataaatttttcaaaaaaactaccactgttatgtaaaaaaagcctaaattggaatacggttataggtctaataaactgtatattctaaagcatatagttaaataatgaaaatatacgtcactataaattcaaaagtttggagcatccttaaaaaaaaacttaattattaacttggttactaaattattttttaaaaggtttaatttattcccaaattttttaaaagtttactttagtcacaaattat

SEQ ID NO: 4787 - DNA, 302 bp, Glycine max
  Clone ID: jC-gmfl02220068c12a1
cgcgatttctcttccaccgtgaaaccctagacccgactgcgagcgcggagccgagccatgtgcctcaaccgcctcctttccgcggcccgacgctccgaccggcgggcctccgccctctcctccctccgatccctctccgcctacaccgtcgtggcccccgtcgcctcgtgccatatgaacgttgtgctcacagcggcatctgcaatgaacgtaccgcagatgccttcatatcgatactgatgctgcttgccaactcctatgatcgctacaaggaacacagacccgaaggtccgaccctacta

SEQ ID NO: 4788 - DNA, 412 bp, Glycine max
  Clone ID: jC-gmfl02220068c12d1
aagctaaaaaaaattcttaaatttaacagattaaacaaacgggtgcaaactataatgtactaattcacattatataaaaaatgggtatagacactgaattaactgtactagaactaccacaagtcctctgtcttgaagggactctgatgtttctaaagggtttaagggcttttcaatactaggaagcttttcaccacataccaaaccatttttaccgggatggtttctttgctttgaagacaccccacaagtagtacttttcttgaaaatttcggcattgaatagggagtaatttagaacgaaaaattagaagctctgcattttcaacctctggtcttaaggaaaggtcaaagttcatcatgtcctttaccaggttgggaaagggccttttaactctttcactatcaggaaa

SEQ ID NO: 4789 - DNA, 247 bp, Glycine max
  Clone ID: jC-gmfl02220068d01d1
ggaaaaaaaaaagggatgttaacctttaaacaacattaacatccataaataaacattacataaaaccatgttggaaaaattgaccctttaaaactggtgatggacagaacaaaatggccaggggccctgtacaatatgggtgcattcgggcttcccgcccaaaattatgataacttgcaagaacccccaaccaatttgagcccacatacgtaataaaccccctgacattggaccaaatccctcttaa

SEQ ID NO: 4790 - DNA, 229 bp, Glycine max
  Clone ID: jC-gmfl02220068d02a1
attgaactcaaggtaaaatttattgcttgtacaatgctctcaatgtaagatgcagttgtcctagtaacaagtgatccattatacattcatggaactcagatatcaataggtttttttgcagctgatccctaaaagaaaaggtgtcaaccttcttggtctagcctggtttgacattactactttgtaattcgaaatttaagtagtgaaataagtgtgaatttgatattcc

SEQ ID NO: 4791 - DNA, 229 bp, Glycine max
  Clone ID: jC-gmfl02220068d02d1
ggaatatcaaattcacacttatttcactacttaaatttcgaattacaaagtagtaatgtcaaaccaggctagaccaagaaggttgacaccttttcttttagggatcagctgcaaaaaaacctattgatatctgagttccatgaatgtataatggatcacttgttactaggacaactgcatcttacattgagagcattgtacaagcaataaattttaccttgagttcaat

SEQ ID NO: 4792 - DNA, 417 bp, Glycine max
  Clone ID: jC-gmfl02220068d03a1
gctaattgaaggcatgggaggtggtccagagaaatcaaaatctccttcaacttcgtcttccctttaggtgtaaaagtcacagctaacgatatagaaatgaaaccgctaactgttaacactgaagattctttttccagttttactggaacttgcttctaacaatgatattgaaggcttcaaggtccttttagagaaggattcttctacgatcaatgaggttgggctctggtatggccggcaaaacggatcaaagcaatttgttcttgagcacagatcccctttgatggttgctgccacttatggtagcattgatgttatgaagatggtacttttgtgccccgaggctgatgtgaatttcgcgtgtggggcgaacaaaaacactgcccttccactgtgctgattctggtgggcctacca

SEQ ID NO: 4793 - DNA, 379 bp, Glycine max
  Clone ID: jC-gmfl02220068d03d1
gaattaaaaacgaaatggatgtatataaccagtacaattcaaggttacccagtttaaccggaagaacaatgtaaactttactatctaatttatctgccgtaaatattcaacagtgcaaatcatctttaattattccctcagaaagaaacaacttcaaccataggcaacagcaaatcattgacttggcttaacttagtgaacttcagaaaaatctttcaaaacaaacgcatgctaataatgggttttgttccattataaaccaaactagcttgcttgatcgtgaactcagaaatcaagtaaaatagcaaggggaaaaatcctgaaacggggccattttggaagaaaaatggataaccccgacgggatttttcttctacta

SEQ ID NO: 4794 - DNA, 169 bp, Glycine max
  Clone ID: jC-gmfl02220068d04a1
attcttttaagatgtagctagttactctagtctaagtcttgtacacacaaaaaaagaaagttactcaagtctaaattttatcttttcctgggattttttggcttttaagggaagggaaattatcctttaattaaaaaaaaatatcaaaatttataatattttaaagggg

SEQ ID NO: 4795 - DNA, 136 bp, Glycine max
  Clone ID: jC-gmfl02220068d04d1
attcaaagactaatttccattcagtaaaatgcaaaaaatacacagaaaaagatgaaatttagacttgagtaacttcttatttttgggggtacaaaacttttacctgagggaactagctacattttaaaagaatctt

SEQ ID NO: 4796 - DNA, 478 bp, Glycine max
  Clone ID: jC-gmfl02220068d05a1
gcttgaacacaccgtgtttcggagagagacgtcgcaatggggaggaggcctgcaaggtgttatcggcagataaaaaacaagccataccccaaatcacgcttttgccgtggtgttcctgatcctaagatcagaatttatgatgttggtatgaagaagaaaggtgttgatgagtttcccttctgtgttcatctggttagctgggaaaaagaaaatgtttcaagtgaagcattggaagctgctagaattgcatgcaacaaatatatggcgaaatttgctggaaaagatgctttccacttgagagtccgagtacatccattccatgttcttaggatcaacaaaatgctttcatgtgctggagctgataagcttcagactggaatgagaggtgcatttggaaagccacagggaacatgtgctagagtcgccattggtcacgttcttctttctgtccgctgcaaggacaggaacagtcatcatg

SEQ ID NO: 4797 - DNA, 465 bp, Glycine max
  Clone ID: jC-gmfl02220068d05d1
tgtcgcccttttttaccttttttgaaaacactattggttccattttttttggtgtataacagattcgatcaacttaacatagtgtaatagtttaatactacgagtcgagcaattaagaaactcagattgagtcgaacacaactattgtggtcaaagcccactgtttccatgtgacaagccatcttagcagtcgcagtagcactagattgaaaagctcgtcctggttagacggtttgccagtggtccatggcacccacgaagcttagcattcacaccatgaggcacaatcctgctctctgacttgtacttgagataatcagcacggctaaacttggtgaaaccccatttccggctaactatgatcttctgacgaccagggaacttacacttagcacgacgaagagcctgctgtgcatgatgactgatgctgtccttgcagcggacagaaagaagaacctgaccaat

SEQ ID NO: 4798 - DNA, 438 bp, Glycine max
  Clone ID: jC-gmfl02220068d06a1
gggaattgctcaaggagatggttgatgatgcagggatacagccggatgtggtgtcttataacatactcattgatgggtgtatactggtggatgacagtgctggggctctttccttctttaatgagatgagagcaagaggaatagctcccaccaagattaggtacactactttgatgaaggctttcgcatactcgggtcagccgaagcttgctcacagagtgtttaacgagatggacagtgaccctcgggtgaaggtggatttgatcgcgtggaacatgttggtggaaggatattgcaggttgcggttggtggaagaggcgaaaaaagtggttcacaagatgaaggagagtggatttcaccctgatgtgggcactgatggcagtttagccaacggaattgcattggcaaggaacccggagaggcacttctgctttggaa

SEQ ID NO: 4799 - DNA, 522 bp, Glycine max
  Clone ID: jC-gmfl02220068d06d1
aaaataaaaagtcatccaaattattcattgatttcatacctgggaaacctgtgttttaattacaaagcgacattgcagttgtagagtacaataggcactttattttggtaactaaacatttattgctacattgtacaatagaagagtcctttctcatacttgagtatgttttgacaagctattaaagggggagcaactgaaccgaatcagaggtattgccatacccttccataggttttaaccgtcactcacttccatcataataggaattatgcaaacccatccaaaacttaaacgcctcagcagtccttttcctctctactcttgtgtattgtgtagcccttgaagcatgcttactagtaaacattattgaatgcattcccacatacattctagtaaacttggacttgttgggaggtatcccattgtacttcatgcaagccactatttacaatgcctttctaaagaaagcagccctcacacatatatcagcaattgtatctaaaagcgctacatccggtt

SEQ ID NO: 4800 - DNA, 463 bp, Glycine max
  Clone ID: jC-gmfl02220068d07a1
ctctctctctcctgtatttgtcttgattccgatgcgaatggtaattgcagaaaccccaaccctcctttcctctccctcctcctagatcgagtcagaatcatggccaaagctgaaggtggcaaggaaccaattaatgaacaagccgtctcaaatatgtatgctgcaatgaggtctgagctcaaccaaatttactccaaaataactgaactggagatggaagttagcgagcacacattggataccaatgccattcaaccacttgaccaatctagacgatgctgtcgtatgattggaggggtgcttgtggagagaaccaataaagaggtcttgcctgctgggcagcgaaataaaaaaagactccaagagcgtgtggccaggcttaaccaagcggtggaaaagaagaaaaaggaaatttctgagtttgaggctaattataaaatcacgataaggaaggctgatgctg

SEQ ID NO: 4801 - DNA, 473 bp, Glycine max
  Clone ID: jC-gmfl02220068d07d1
attgattggcacttttttttatagattttggttcaccttatgttaccttatgcacaaaagattgaaatctcataggattattgtcccaagcctgacttttacaaacaacttcgcctcaaggtttttagagacaccattgactgccttgagacaactatttaaccaaatgagagacctgaaaatcctggctaaaatcctaggcttcgaactaacggtctcctatacattttacagacagcacgaacgtgaaatgtactgactatatcccctcccagaatcacagtggtttaatgctgcatgatgatcccgtgataaagtttgctccatacacccgtggagaccttgttcctataggctatccacctgaaactgtgctaactgcgctagaccagaattttgaacactacggacctgggagatactatgagattcctcccacatcctaaagtacgcataaggaccccattcttgac

SEQ ID NO: 4802 - DNA, 545 bp, Glycine max
  Clone ID: jC-gmfl02220068d08a1
tctcactcttgttcttcggtctcctcctattctccgctgccgtagccaccgtcgaacgaatggacgatgaagacaaccttctgatccgtcaagtggtgccggacgcggaggaccaccacctgctcaacgcggagcaccacttctccgccttcaagacaaagttcgccaagacctacgccacgcaggaggagcacgaccaccgcttccgtatcttcaagaacaacttgctccgcgccaagtcgcaccagaaattggacccctccgccgtccacggcgtcaccaggttctccgatctcactccgtctgagtttcgcggccagttcctcggcctgaagccgctccggcttccctccgacgctcagaaggctccgatccttccgaccagcgaccttactaccgatttcgattggcgcgaccatggagctgttaccggcgtcaagaatcagggctcgtgcggatcgtgttggtcatttagcgccgttggagctttggaggtgcccattttctttctaccggtgggctcgtgagccttaatgagcagcaac

SEQ ID NO: 4803 - DNA, 383 bp, Glycine max
  Clone ID: jC-gmfl02220068d08d1
acttgcaataactataggtaaccgcgggtaaaatttgtagctcaactaattaacataaatacttacggctttaatgcataaccgagggcttaacaagaaccgcctccataacatatttcattactgcaatttttgacgtacgccctatactggggcccctaccatgttaaggcatccatccgtatgtttaaggggtaaaaacgtgtatagcatctacagttgaaaccatagagctcaccccacatacattgcaatctatgcaaatctttgaatatcctttttttacccagctttccccccaagaattttttatgagccagttagggctttccttaaaacgaatcggagcattagcaccagatccatagcccacccaaagaacc

SEQ ID NO: 4804 - DNA, 531 bp, Glycine max
  Clone ID: jC-gmfl02220068d09a1
gtggagggcaaccagctaatactgttatatgagtacatggaaaacaattgtctatctcgcattctttttggcagggatccaaacaaaacaaaacttgactggccaacaaggaagaaaatttgtcttggtatagctaaagctttggcttatcttcatgaagagtccagaataaaaatcatacatagggatgttaaggcaagtaatgtattgctcgacaaggattttaatgctaaagtctcagattttggtttggcaaaacttattgaagatgagaaaacccacattagcactcgagttgcaggaaccattggttacatggctcctgagtatgcaatgcgtggctatctaactgacaaagcagatgtttatagctttggggtggttgcactggaaactgtcagtggaaagagcaatacaaatttcaggccaaacgaggattttgattaccttcttgattgggcatatgttctgcaagagaaagggagtcttctggagctggttgatccaaatttgggttagaataattaactg

SEQ ID NO: 4805 - DNA, 498 bp, Glycine max
  Clone ID: jC-gmfl02220068d09d1
gtacgctataattatttttcgtcacaaacaatggattagtgctcaacaaagcacaaaccaacaataataacagttttagttgcattaatttacacaagaaagtaaattaacgtaatatgcaacacatgtgtgtcacgttcatgaggatcattttataatgatatgcaacattgaattaaatattctcatgcaatggagcattctggaggaaggccttgagggaaacgtctgatatcagtgcaataattgtaaatcatgtaattcttttgcacccaacggatctttgcctgccccgtggcgtccagtgattggccagtggaggaagaagtttgggaattgaagtttctgtatgaggctgtgaatggggccttgctccaatcccgtttcacaagctcacccattgtgggccaatcctcaatgttccaaagactagagtatattttcatgggttggcttttttggaatggaacccctttaggtttcaaattcttgaactcc

SEQ ID NO: 4806 - DNA, 524 bp, Glycine max
  unsure (1)..(524): unsure at all n locations
  Clone ID: jC-gmfl02220068d10a1
ctgagacataccatagactatatggtgtttctccacaattcccatggagcctaagacacagccccaagcgaatagtcctccaccaaaaccttgggaacaagcaggttcctcttcgggtccagcgcctttcaaacccccgtcagctggcaacacaagtgatgtaattgaggcttcagggactgcaaaacctggggaaattgtttctagttctgataggagtgcagctgtcaacaggaatactcttgggaggcctgttcccacaaggccatgggagcagaattatggaaacagcacctatggaggatatgggtctacaatgaattataattctgggtatggatctggaatgtatggatcttcttatggtggactaggaggaggaatgtatggatcatcttatggtggggggatgtatggtaacagtatgtacaggggaagatatggtggcatgtatgggtcatccgggatgtacgggggtggaatgtataacagtggcttanggggtccaatgggtggttatggca

SEQ ID NO: 4807 - DNA, 400 bp, Glycine max
  Clone ID: jC-gmfl02220068d10d1
acgcaagctataacgctattaaatggcccacgaagaagtaaaggtcagcatgccctaaggacacaataatacctgtaaggggaaaattactgttcactggaaagtcaaagaacgtgataaccaggacatgtgcatgaatggcatgaggatcaagataccatgacttgcaaaattgaaagccatcttatgctgcgatggaacatcctgctggatggtaaacccaggaacacatgacttatgcgcgatcagtgtcatcatgtgaatgcaggcgcccaacggatctttgaatgcccctgggcgaacagtgattggccaacagcagaatgagttagtgaattgcaggatttgcctaaagcttggactgggaaccacgttgagcagcctttggtgactccatgcc

SEQ ID NO: 4808 - DNA, 584 bp, Glycine max
  unsure (1)..(584): unsure at all n locations
  Clone ID: jC-gmfl02220068d11a1
gacaggttcaaaccggagcaaaaaaacttgttacgatggtttcttccgacaaggatccacgagaggaagtccttcaagcatggtacatggatgatagtgatgaagatcaaagactcccccaccacaaagaacccaaggagtttgtctcgttggaccaacttgctgaacttggagtccttagctggaaattagatgctgataaccatgaaaatgatccagagctgaaaaagattcgtgaagagcgtggctacacctacatggatgtttgtgaggtctgcccagaaaagttgccaaattatgagcagaaaatcaaaagcttctttgaagaacatcttcacactgatgaggagatccgcttttgtgctgctggaagtgggtattttgatgttagggattgcaatgatgcttggattcgagtgtgggtcaagaaaggaggaatgatcatcttacctgctggaatttatcatcgctttacactagatgagagcaactacattaaggctttgcgttnttttgttggtgagccagtttggacttcacacaatcgtccatatgaccatcttccctgcaagacaacatttgtc

SEQ ID NO: 4809 - DNA, 526 bp, Glycine max
  Clone ID: jC-gmfl02220068d11d1
aattgaatcttataaataagaataaagatagtacttgatagcataattttacaaatcagctaaatatatgacatagcttaaaatggactataacttacatgaatatgtagctataatattatggctatctttcaaagggtcacctacacagaaacacaggcgtgggtaaaaggcttaaagggtcatctacacagaaaccataacataaaaagctgggaccctttatttaaaggcaccattattttcatttgttcaaaccttactttagcaacacaaagtctcagtcccacgtactacgattaggcggaaccagatcttacgcggcggcatcaacagcatggttgccaacatccttttccacaaaatccttgacatattgttgccttgcagggagatggtcatttggacgattgtgtggagtccaaactggctcaccaacaaaaaaacgcagagccttaatgtagttgctctcatctagtgtaaagcgatgatgaaatccaagcggtaagatgatcattcctccttt

SEQ ID NO: 4810 - DNA, 466 bp, Glycine max
  Clone ID: jC-gmfl02220068d12a1
gcctatcattaatgtgcaactgtatacataccagatatgccgtggtttaaatgatttgcatcatgtgatcagagtctgtcatcgggacattaaaccccagaatctattggttaatccccagactcatcagttaaaagtatgtgattttgggagtgcaaagatgttggcgcctggcgaacccaacatatcgtacatatgctcgcggtattatagagctccagaacttatatttggtgcaacagaatacacaactgctattgatatttggtctgctggttgtgtgttggctgagcttcttgtaggacatccaatgtttcccggagagagtggggttgatcaattggtagagatcattaagatcttgggaacaccgaccagagaagaaatacagtgcatgaatccaaattacaccgaatttaagtttcctcagataaaagcacacccatggcataaggtttttcacaag

SEQ ID NO: 4811 - DNA, 470 bp, Glycine max
  Clone ID: jC-gmfl02220068d12d1
gaaacatgatcaaagaactgtaagaactcgttatcttttacaaatgaggcatacatcaatcataaactacttgaaaaaatggttgcaaccctatcaccaggcactacttcatcaatgggattgtagcttgcgagtcaatgataaaaaggtttcatggttttaaggttcctatgagctgtatagtcatgattgtgcaggtggacagcagagacctagactattagcaaaggtagcattgctggtgtagatatctctattaatccaaaaacccatttacaatgctcaataatgaattcaacttcttgcatgctcaggaatgagacgtcgccgcaactcatcaggtgcacctgccagttcttgagcagtgaaatcgaacaatggaggcaatgattgcccatttggcaagcatgcatttggatctcgcatatcatcaaagaaagggtgtgcacatgcttccaaagcagtgcatc

SEQ ID NO: 4812 - DNA, 347 bp, Glycine max
  Clone ID: jC-gmfl02220068e01a1
attttgcgttcattctgttttcttgaagtctttccctagccaatggccactgatcgtttgacccgggttcacagtctccgtgagaggcttgatgaaaccctcactgccaacaggaacgaaattttggcccttctgtcaaggatcgaagctaagggcaaggggatcctgctacaccaccaggtcattgctgagtttgaggaaatccctgaggagaacatgcagaagcttactgatggtgcctttggagaagtcttgagatctacacaggaagccatagttttgccaccatgggttgctctggctgttcagtcaaagcctgctgtgtgagagtacctgaaagtgaatgt

SEQ ID NO: 4813 - DNA, 205 bp, Glycine max
  Clone ID: jC-gmfl02220068e01d1
aaatctgtctcagcaccctattaaaagctaaaacccaaatttcaaacaattacggaccttttacttacataacaaaattatgcccacctccgattgcaaaacaaaaagccggtgccaggattttttgaaggaaatattacccctcagtttactccacacactggggttaaaaacagacgcttttgggagatccctgaaaaataaa

SEQ ID NO: 4814 - DNA, 424 bp, Glycine max
  Clone ID: jC-gmfl02220068e02a1
ggccaagttatggcaggtacctgagacactgctggatgaggtgcttggtaagatgagtgcaccacccaagagtgacgtaccagtcattacccccaatgaactatccgaggctgatggctttgtattcggcttcccaacaaggtttggaatgatggctgctcaatttaaagcctttatagatgctactggaggcttatggagagcacaacagcttgcaggcaagcctgctggcctattctacagcaccggttcacaaggtggtggacaagagactacagcactcactgctatcactcaactggttcatcatggaatgatattcgttccaatcggttacacattcggtgccggcatgtttgagatggagaaagtgagaagtggaagtccatatggtgctggaacttacgccggtgatggctcaaga

SEQ ID NO: 4815 - DNA, 542 bp, Glycine max
  Clone ID: jC-gmfl02220068e02d1
actcaaactggtcgttgcaatgtttatgtgcttaacggggcaatacaaaagataggaacaagtactgtttccgcctaacactaaaggactagacacaaactttcctcattcaacaaattgcaacatccactgcaacatgtaacactcatacaaagcatttcctttaccaagattagaaagaaaaaaaaaatacttgcaagcacaggaaaaaaaaactcaatatatttcaagtctaaaaattggacaatgattttcaagcaatattgtggtatggtttaataataatagtatgatctaatatgaaggcaaggcaacattatgcagcttgcttgagcttctttgtgatgccagcaatgtacttcccttggtggaatgcttgttgtaactcaagctcactaggctgtcttgagccatcaccggcgtaagttccagcaccatatggacttccacctttcactttctccatctcaaacattgccgcaccgaatgtgtaaccgattggaacgaatatcattccatgatgaaccagtgagtgatacagt

SEQ ID NO: 4816 - DNA, 499 bp, Glycine max
  Clone ID: jC-gmfl02220068e03a1
ttctgcgtctccaatgcccttggagaatagggtgcttgaccctaagaagtctcagaacattgccattttgcttagagcgctgaatgtgactattgatgaagtttgtgatgctcttagggaaggcaattgtgatacgttggggacggaacttcttgaaagtttattgaagatggctccaactaaagatgaagaatctaagctgaaggagtttcaagatgaatcgcccttcaagcttggcccggctgagaaatttcttaaagtcgtgcttgatataccttttgcttttaagagagtggatgctatgctctacattgcaaactttgattctgaattagaataccttaagaagtcctttgaaactctggaggtggcctgtgaggaattaaggaaaagccgcatgtttttgaagatactcgaagctgttcttagaacaggaaattcgatgaatgttgaaccaatcgtggtgatgctaatgcgttcaaactggacacacttttga

SEQ ID NO: 4817 - DNA, 450 bp, Glycine max
  Clone ID: jC-gmfl02220068e03d1
ataagaaaaaagcaacttgaaaattagccattggtcattcgagaatacaattctagagaagcagccaacctagcacaaacgtataaatgaatgcactcaggatatgctctaggcggtacaacatatacagggttgcacaggcgggaaaacgagagctatgacagcatgagctgggcacgattatcgtaggggtaaagctgggttcatggtgcagtgagatttgagtgaaaatggcccttcacatgataatattgggctgatgaaaatccaagccatgaatgaccaaacatgcccaagctactttaacctggaacatctgggtcagattggctttgagaggttaatcagattcagaggaatcagatggctggttaccaataatgtcagggaaaaaggtttgcatcataggatcggcaggcattacagattgacgggaaccaaccaacgtgc

SEQ ID NO: 4818 - DNA, 464 bp, Glycine max
  Clone ID: jC-gmfl02220068e05a1
ctttttcaagaggctgaagcatgtttcagagtggtggcagttgcacaagcaacaagaagagaagaagagtggaaagaaacaaagctgggagtgcaaggaatcaacaacccattaggaataagtgcaaagcttcattaaaagctggaagaggaaaatcacaacaggggtctgactctggatcctcacaggaatcatcatcatcatcatcatcttctgcagcaacaacaacaaccacctcatcatcctcatcctcaaaatctgattctaaattcaataagacatgttacagaccaagaaggagaaaaccaagaagaccaagaatctcattctcatcctcaccaattccatatccaattccaaccttttcatcatcaacaagaacaacaacaacaacaatcttacacaggtttagacacggagatcttaaacccactccaaccaccgaagaaacggtcttgcctacc

SEQ ID NO: 4819 - DNA, 363 bp, Glycine max
  Clone ID: jC-gmfl02220068e05d1
tttctttcttttttttttttttttttttttttttttttttttttctttttttttagcaaactagctcttttattgaatttgcatgtttttcaaatcactacaagaaactcgaaactgaagaagttccaagaagacactattacttaacaaagggaaacatagcactccaatacagaagaaactaaagaaacatagcactccaattcagaagaaacaaaagaaacacaatactcctagtcctaggtaaattaagcatgaaaaacataagttgaacattaaaagcataacaaaccgagggattggaaaacccgaatatccacctcagaatttcttgaattcccgttgtagcttgaaaatccattc

SEQ ID NO: 4820 - DNA, 520 bp, Glycine max
  unsure (1)..(520): unsure at all n locations
  Clone ID: jC-gmfl02220068e06a1
cattttcgcttctcgtagcgttttcggaacagttatggcttccattgccggatccaactgcgtcgctctccgaaccgccaacttcggcgcctccggtaaccggaaaatcggccagatccgccaatggtctccgattctcacgaatctccgtcccgtttccggtcttcgtcaccgatcgaatactccgtttagctcctccggtgtgagagcacaggttgctactctggaggaagcaggaaccggagcaactcagaaagtggaagcgccggttgcagtggtgaccggagcttccagaggcattggcaaagcgattgcactgtcattaggtaaagcaggttgcaaggttctggtcaactatgcaaggtcatccaaggaagctgaggaggtttccaaggagattgaggagtttggtggtcaagctcttacatttggtggagatgtttctaacgaggctgatgtggagtctatgattaaaactgcagttgatgctnggggaacagttgatgttataataaacaat

SEQ ID NO: 4821 - DNA, 316 bp, Glycine max
  Clone ID: jC-gmfl02220068e06d1
gggccaaaagtgacaggattgcaaataaaataaatgcctattacggtgacaggtccctaatagcccagatggaccatgaagctgcaccccattgcttttactagctagacatttacagtttgagccaaaatggcttgctaactctttaaaggaaaattccataataacattgcggggaaaatgggcttaaacgaaactgctcattaaacgatgtataagcgggcacaaatcctgtaaaaacgggcaagcctatggcgcatgggaaaagggttgctaatttacatgaccgtgcctccatcatgggggaaaactcgcc

SEQ ID NO: 4822 - DNA, 476 bp, Glycine max
  unsure (1)..(476): unsure at all n locations
  Clone ID: jC-gmfl02220068e07a1
ctcgagccgattcggctcgaggttgttgttcgctctgtgtctctcactctctctatatttgcatcattcatcggaaatggctctcgaggttgctgttaaggctgctgttggggctccaaatgttctcggagattgtccattttcccaaagggtcctcttaactttggaggagaagaaaatcccttacaaactccacctcatcgatctcagtaacanacccgaatggtttctgggtgtgaatcctgaagggaaggtgccagtggttctttttgatggcaaatgggtggctgattctgatgtaattgtggggatactagaggaaaagtacccagaaccctctctaatcactcctcctgaatttgcctccgtgggatcaaagatatttgggtcttttgtgagttttctgaagagcacggatacaaacgatggaactgagcaagcatcggttgctgaattgagtgccttggatgaacatc

SEQ ID NO: 4823 - DNA, 456 bp, Glycine max
  Clone ID: jC-gmfl02220068e07d1
gaataatatttttttatgattaccttataacaccatcaaacaacatgccatgactttaataaaagggtaacacctcttttaaataataagggctaaccaatctaatactgaccacgtatacatacagttcaatagaactgagatgtaacaatgcctcactatcaataatctgttcaagcctgtaccttgggggccccttcatcacttacaaattccaccgttggggcttgtggggcaccaaatgaatgtgcctagaacataagcttagtgaccacgagggcctgtgccaaacataccggaacattcccatgtctcgaaatggcccaatgctcccacaagaacctacacatggggggccaaactaagatccactgaagtgacatacctgcctaccatggctgggccacggaccttgcaatgaccactctaggcactcaatacaacaaccaaagcttg

SEQ ID NO: 4824 - DNA, 570 bp, Glycine max
  unsure (1)..(570): unsure at all n locations
  Clone ID: jC-gmfl02220068e08a1
tgttatttgaaattaacaagtattaagatgtttggaatcatcggaggaaacaagggtcacaagataaaggggaacttggtgattatgcgaaagaatgtgttggatatcaacagcattaccagtgttaagggtgtcatcggaaccggcattaacatcattggaggagtcgtcgacaccgttactgctttggcgtcccacatctccatccagctcattagtgccaccaaggctgatggacatgggaaaggaaaagttggaaaggctacaaatttaagaggacaagtgtcgttaccaaccttgggagctggcgaagatgcatacgatgttcattttgaatgggacagtgacttcggaattcccggtgcattttacattaagaacttcatgcaagttgagttctatctcaagtctctaactctcgaagacattccaaaccacggaaccattcacttcgtatgcaactcctgggtttacaactcaaaatcctaccattctgatcgcattntctatgccacaatacatatcttccaagcgagacaccggcttcacttgtcaagtcagagaagaaga

SEQ ID NO: 4825 - DNA, 569 bp, Glycine max
  Clone ID: jC-gmfl02220068e08d1
aaggacaacccttgctgtaatggaaatcgtttacataagatgatgatttattctagtttgcactttgccatgccagctatcattgttgaaacatgcgcgagaacacttaacagcaatttatacaaacagaatttcttcattaacacttaacagcaaacacgagaacattcaatcaccccaaatacataacttaaccatacataggtagatgaaggaatcatattccttctattcacttttattgaaaaccagggaaagtactgcaacaaccatagagcccctagatggagatactgttgggaattcctctgaaagtcaatccctcctcactagaaggatagagcaaagtgtaaggcattttagccggcccactgcggtttctcaacgtctcgtccttggtcttctgtataagcttttggtcaatctcttgaagcttctttccaaacctcttgaaggcctctagtggaccagcatcagaagtccaatagtcaccaccatctgtgttcccaaggtagaactcatcagatgtgtgccttgacaagatttctatagttgcaaggtcaatgagg

SEQ ID NO: 4826 - DNA, 491 bp, Glycine max
  Clone ID: jC-gmfl02220068e09a1
ggctcgagggtaagaggatgcgcatgccaacaaagctcacatgctgcagtataagagcattgctgaggcgaatgaagatgcattgaaagagatagaaaaggcgcatgagaagtttaaaacagaggctgacaatggaaagaaagttatggaatctgaacttaactcacttagagagaagatgttagagattgaaaatgaatcttctttgaaatatgaagaagttgcttctgaaactgttggaaaggaagaggctcttacatctgctatggctgaaatcacaaatcttaaagaagaaattttgaccaaatcttctgaaatttcagcaatggaaattcagatctcaggtttaaaagaaaacctggacagggagcatcacaaatggcggtcaactcaaaccaattatgaaagacaaggtgttctgcagtgcgaaactattcacgagttgacaaaaacatctgaagcactagccttgctgcaagaggaggcatttg

SEQ ID NO: 4827 - DNA, 123 bp, Glycine max
  Clone ID: jC-gmfl02220068e09d1
gtgatgcatatcgctagtgttgaattacgcttatacgttaatttaaattatgccgtttgcaatcacaattattgaaagtcagattcatgatcagggataaatgattagtgagagcatgtgttt

SEQ ID NO: 4828 - DNA, 532 bp, Glycine max
  Clone ID: jC-gmfl02220068e10a1
ctcttcttctcttgcggctagggttttagcgcatcttcttctagatttaaggaagatgggtaaggaaaaggttcacatcagtattgtggtcattggccatgtcgactctgggaaatccactaccactggtcacctgatttacaagcttggaagcattgacaagcgtgttattgagaggtttgagaaggaagctgctgagatgaacaagaggtctttcaagtatgcctgggtgctggacaaacttaaggctgagcgtgaaagaggaatcaccattgatattgctttgtggaagtttgaaacaacaaagtattattgcacagttattgatgcgcctggacatagggatttcattaagaatatgattactgggacatcccaagctgactgtgctgttcttatcattgattcgaccactggtggttttgaagctggtatttccaaggatggacagactcgtgaacatgctctgctttcattcacccttggtgtgaaacagatgatttgctgctgtaacataatggatgctactaca

SEQ ID NO: 4829 - DNA, 492 bp, Glycine max
  Clone ID: jC-gmfl02220068e10d1
gaacactacaaatagaaagttgacatttaataaaccaaagcaacacaacgcagcaaagtcctgaaactcgctgcgcttaacaaaaatgtaatcaggggttccgacaaacacagcacattaaaacacagataaataaaagcaattttgccaccgtcgatcaagaacccagttctgggaacaacagttgcgagatgatggtggagacttcaaactttgtccgaaaaacaagctacctagaaaagaagacacaagagtacagaagagaaaccaacatttattgtaaccaacatcccctgatgaaccagcccgcacgattcacttcttcttctgggcagccttggtgaccttggctccggtaggatccttcttctcaacgttcttgatgactcccacagcaacagtttgacgcatgtccctaacagcaaacctaccaagtggaggatactcggagaaagttttaacaaccatgggtttggttggaatcatcttaac

SEQ ID NO: 4830 - DNA, 483 bp, Glycine max
  unsure (1)..(483): unsure at all n locations
  Clone ID: jC-gmfl02220068e11a1
ctttctcctaaaacatctccagtgggttcttcttcttctattacaacaacgtcgtccaagaccatgaccatggccatggccacgatcctgctcctgttcacggtcttcgcggtttcatcggccctagacatgtcgataatctcgtacgacaacgcccacgccgccacgtcgcgcagcgacgaggagctgatgtccatgtacgagcagtggctagtaaagcacggcaaggtgtacaacgcgctcggagagaaggagaagaggttccagatcttcaaggacaacctgcgattcatcgacgaccacaactcccaagaggaccgaacctacaagctcggactgaaccggttcgcggatctcaccaacgaggagtacagggccaagtacttgggaaccaagatcgatcccaaccggaggctcggcangaccccgagcaaccgatacgcgccacgtgtcggcgacatactacctgaatcggctgattgg

SEQ ID NO: 4831 - DNA, 457 bp, Glycine max
  Clone ID: jC-gmfl02220068e11d1
aacagcaatcaaatatgttcgccatttggaattggaatttgaatacaaatacagtgcatcaataatataaccctatgtacacagccaatatctgactgaaatttgatacagaatagtatcaattcgtatcataataaaatggcacagagaaatttatgtgaaggtaaaggggaagtgtatcagctggtgttttaattcttcgtctttcatttacttcatcattggctccttgctgcacgtgcacatttcctttatctgcttaagcactgatgaccttggtcttacgcccaaaggtccaatggggtttagccggagtacgcctcaatgccttcactccgaatgggttgttcttgctcttgagacaagttccagcataagtgttgcagatgggatagtcgatagggcagcaactgtagtggtcatcacagcaggtagcacccttaagaggacagcagcc

SEQ ID NO: 4832 - DNA, 525 bp, Glycine max
  unsure (1)..(525): unsure at all n locations
  Clone ID: jC-gmfl02220068e12a1
tggccacctctgctattcagcaatcagcattcgcaggtcaaactgctctgaagcagctcaatgagttggtccgcaagaccggtggcgccggcaaaggtcgcaccaacatgcgccgtaccgtcaagagtgctcctcagagcatttggtatggccctgatcgtcccaagtacctgggtccattctcagagcagattccgtcatacctgaccggagaattccccggtgactacggatgggacactgctggactatcagctgacccggaaaccttcgccaggaaccgggagctggaggtgattcacagcagatgggccatgcttggtgcacttggctgcaccttcccagagatccttgagaagaatggtgtgaaattcggcgaggccgtgtggttcaaggctggttcacagatcttctcggagggaggacttgactacttgngcaacccatacctgatccatgctcaaagcatccttgccatctggggctgtcangctgcgctcatgggttttgttgaggctacagagt

SEQ ID NO: 4833 - DNA, 548 bp, Glycine max
  unsure (1)..(548): unsure at all n locations
  Clone ID: jC-gmfl02220068e12d1
agggacagaaatttctaatatatataatataatggttctcatacagattcttctggtacacaggtgtaggtacattagagaaaatgggagcagaagattgcattgaattgcaatgctcattgtccagggacaaagttagtggcataagcccaagcattgttggcaacaggatcagcaacatggtcgtaaaggttctgaatagggcccttgccagtgacaatggcctgaacaaagaaaccaaacatggagaacatagccaagcgaccgttcttgagttccttgaccttcaactcagcgaatgcatcagggtcatcagccagaccaagagggtcaaatgcaccaccagggtagatagggtcaagtccttcaccaaggggtcctccaccaactctgtaaccttcaacaaaacccatgagcacaacctgaacagcccagatggcaaggatgctttgagcatggatcaggtttgggttgcccaagtagtcaagtcctgcctccgagaagatctgtgaaccagccttgaaccacacggnctcggcgaatttaca

SEQ ID NO: 4834 - DNA, 452 bp, Glycine max
  Clone ID: jC-gmfl02220068f01a1
ggccaagttatggcaggtacctgagacactgctggatgaggtgcttggtaagatgagtgcaccacccaagagtgacatcccactcattacccccaatgaactatccggggctgatggattagaattccgctttccaacagggattggaatgatggctgctcagattaaagcctttctagatgctactggaggcttatggagagcacaacaacttgcaggcaagcctgctggcctcttctacagcaccggttcacagggtggtggacaagagactacagctctcactgctatcactcaactgggtcatcatggaatgatattcgtttcaatcggttacacattccgagccggcgtgtttgagatggagaaagtgaaaggtggaaattcatatggagctggaacttacgacggtgatggcttaagacagccaagtgagcttgagatacaacaag

SEQ ID NO: 4835 - DNA, 487 bp, Glycine max
  Clone ID: jC-gmfl02220068f01d1
actcaaactggtcgttgcaatgtttatgtgcttaacggggcaatacaaaagataggaacaagtactgtttccgcctaacactaaaggactagacacaaactttcctcattcaacaaattgcaacatccactgcaacatgtaacactcatacaaagcatttcctttaccaagattagaaagaaaaaaaaaatacttgcaagcacaggaaaaaaaaactcaatatatttcaagtctaaaaattggacaatgattttcaagcaatattgtggtatggtttaataataatagtatgatctaatatgaaggcaaggcaacattatgcagcttgcttgagcttctttgtgatgccagcaatgtacttcccttggtggaatgcttgttgtaactcaagctcacttggctgtcttgagccatcaccggcgtaagttccagcaccatatggacttccacctttcactttctccatctcaaacatgccggcaccgaa

SEQ ID NO: 4836 - DNA, 536 bp, Glycine max
  Clone ID: jC-gmfl02220068f02a1
cttttaagttaaatagtttttcattgtttcatttaatctacaatggctgcttcaacaatggctctctcttcatcatcattggctggccaagctatcaagcttgccccctccacccctcagcttggtgttggaagggttagcatgaggaaaacagcctccaagactgtttcttctggaagcccatggtacggcccagaccgtgtcaagtacttgggcccattctctggtgagcccccatcctacctcactggtgaattcccaggtgactatggttgggacactgctgggctttctgctgacccagagacctttgccaagaaccgtgaacttgaagttatccactccagatgggccatgttgggagccctgggctgtgttttccctgaactcttggcccgcaacggtgtcaagttcggtgaagccgtgtggttcaaggccgggtctcaaatatttagtgagggtgggcttgactacttgggcaacccaagcctgatccatgcacaaagcatccttgccatctgggccactcaagttat

SEQ ID NO: 4837 - DNA, 555 bp, Glycine max
  Clone ID: jC-gmfl02220068f02d1
aatccaattaatgcgtataattaataatataatgcgctcttgttggtattgcagctctaccacatctaccgaaatatataaagtgcatcaacactacaaaactaaataaagatctcaatgcacaataagatatataattcatattcttcttaaaagaaaacattcaatatgtatttctccaaataacaatgaaactctcactctaattttcaagtcactgtgtttctctttgtttcactattgctatgctcactttccggggacaaagtttgtagcataggcccaggcattattgtttaccgggtcagctaggtgatcagcaaggttttccaaaggtccctttcctgtcacaatggcctgaacaaagaaaccaaacatggagaacatggccaacctaccattcttgagctctttcaccttcaactcagcaaaagcctctgggtcatcagcaaggcccaatgggtcaaagctgccacctgggtagattgggtcagtcacttcaccgagaggcccaccagcaatacggtagccctcaacagcacccatcaagataac

SEQ ID NO: 4838 - DNA, 470 bp, Glycine max
  Clone ID: jC-gmfl02220068f03a1
cggtgacgaaaggaaagaagaagaagaagcgttctttcggagagttcgaagatgtcgggcgttaccaacaacaacgaggaagacaagaagccaaccgaacagggagcacacatcaaccttaaggttaaggggcaggatgggaatgaagtttttttcaggatcaagagaagcactcaattgaagaagcttatgaatgcttactgtgaccgacagtcggtggatttcaactccattgcttttctgtttgatggacgccgcctccgagctgagcagactccagatgagttggaaatggaggacggggacgagattgatgccatgcttcatcagacaggaggttctgttgtctgaaggatgtgattacctttgctcctcattataagtaggaattagttaacttagagctatgtatggcataagatacatattttattatctgctattatatacagcttttgccggtggatttt

SEQ ID NO: 4839 - DNA, 264 bp, Glycine max
  Clone ID: jC-gmfl02220068f03d1
aagagaagaaataaaaaggtaaccggaaactgcgaggaatattaattccaatagttcataaaataaattcctctaggattccaacctaaaatggctacaattgccattttggagccatgagttcgaaccctatgatcagacgccactagcatataatcgggtccattccttcgcagtttcgacagcctcaggctgattagattgccaatgctaggcaatgggctcagaaagcggatcatgtgggataggtgcacaaaatagagc

SEQ ID NO: 4840 - DNA, 112 bp, Glycine max
  Clone ID: jC-gmfl02220068f05a1
ttttagctatatatttttctttgtaaaccgcgttaatgttgcactatgtgccaagggtcgaatcgatcccttcatgaaacgccggaactgactacctaattcggtgccggtt

SEQ ID NO: 4841 - DNA, 498 bp, Glycine max
  Clone ID: jC-gmfl02220068f06a1
gcttgtgaatcagcaccacattcacctgagctttttgtgaggattccaaagcatggcttcccttgcagcatccactgctgctgcttcccttggcatgtcagaaatgcttggaaaccccatcaacctcagtggtgccacaaggccagctccatctgcctctagccctgcctccttcaagactgtggctcttttctccaaaaagaaggctgcacctccaaaaaaagctgcagctgctgctcctgccaatgatgagcttgccaagtggtatggtcctgacagaaggatcttcttgcctgagggtctcttggaccgatctgagatcccagagtacttgaccggagaagtccccggagactatggttatgacccatttggtcttagcacgaagccagaagatttttccaaatatcaggcatttgaattgattcacgccagatgggcaatgcttggtgctgctggattcatcattcccgaggccttcaacaaatatggagcaaa

SEQ ID NO: 4842 - DNA, 549 bp, Glycine max
  Clone ID: jC-gmfl02220068f06d1
ccaaggaacaaagccaaatgccttaatatctcagtgatatgtattgtacattaagtaagattggagaaaaacatgaagatgaatgatttagagagttggagctctctcagcagatccagaaatgacagtgagcaagttgttgccaaaagggtcactgagatgttttgcaaggttctcaacaggaccttctccagtgacataagcttggaagtagaaaccaagcatggcaaacatagcaagtcttccatttttaatttccttcacctttagcagtgcagcttggtctggatcatttgcaagccccaatgggtcaaatggaccacctggatgaagtttgtcttcgaaattcaggccattaataattctgtagtactctgcacctcccacaagaacaatctcagcaatgacagccacaataagattgatggggatgggtttcccgaagtagttcaaggtacccccatcaagaagcagagctccagtcttgaaccaaacagccttaggaccgcagtttgctccatgattgttgaggcctcgggaatgatgaat

SEQ ID NO: 4843 - DNA, 524 bp, Glycine max
  unsure (1)..(524): unsure at all n locations
  Clone ID: jC-gmfl02220068f07a1
aggaacagcatgtggccaaaacattataagactatatggccgaaaagcttggcatagagaaaagcaaaattgatgacttgtccaacctcctctacaagaactatggaacaactatggctggtttaagggcaattggatatgactttgactacgatgaatatcacagttttgttcatgggagattaccttatgagaatttgaaaccagacccagctctgaggaacctcttgctgagcctaccctataggagactgatcttcacaaactcagacaaagtccatgcagttaaggcactaagcaggctaggattagaagactgctttgaaggaatcatatgctttgagacccttaatcccatccacaaaagcactgtctctgatgatgaagatgacattgaatttgtggggggttcaggcacaaccaatccaaccacataaaaagatgctagcagctntcaaatctttgacatcattggccattttgctcaacccaatccccacacagttttgccaaagacacccatt

SEQ ID NO: 4844 - DNA, 372 bp, Glycine max
  Clone ID: jC-gmfl02220068f07d1
gaccatcaatgatctaagccgtcacagatgtctccacagcacgcttgccaggatctgccccttctgatattatgtcatctctccatagtcatggctctggcttcctaatgttgcggatgctacctgatgcataatcatgctcctgtacttctatgagattttcctaccagctcacagggaagacccacacgtacatcagcttgtgtgtggcggaccctatccttaaagaacataggtctttgcggagtaacgttggatctcttgagggccaactcagtggcatttaccgagggttagcagatcatcgctgtctttgccaaaactgtgacatgattggacctgagcacaatggccaatgcatgcaaacatttg

SEQ ID NO: 4845 - DNA, 521 bp, Glycine max
  Clone ID: jC-gmfl02220068f08a1
ctcgcaagcaaaaagaaagaatcccaggcgaggagaaagatggaggggaaggagcaggatgtgtcgttgggagcgaacaagttccccgagagacagccgattgggacggcggcgcagagccaagacgacggcaaggactaccaggagccggcgccggcgccgctggttgacccgacggagtttacgtcatggtcgttttacagagcagggatagcagagtttgtggccacttttctgtttctctacatcaccgtcttaaccgttatgggagtcgccggggctaagtctaagtgtagtaccgttgggattcaaggaatcgcttgggccttcggtggcatgatcttcgccctcgtttactgcaccgctggcatctcagggggacacataaacccggcggtgacatttgggctgtttttggcgaagaagttgtcgttgcccagggcgattttctacatcgtgatgcaatgcttgggtgctatttgtgggcgctggcgtgtgacggtttcgaggggaaaacaaat

SEQ ID NO: 4846 - DNA, 488 bp, Glycine max
  Clone ID: jC-gmfl02220068f08d1
cggcctgtcgttttttttttaccaacaaaatatgacattcattccatttaagatgggtcatcagacattcattacacatgacatgggcctattgcaacttacaagcagaggataacattggcccatgacgcgacacatgcaccacctaataatcataattttacatctttacatacaaaatacaaagactttaaattttaaaaagaagaaaagagataaacagatcatcttaatgaaatgaaaccaaaacccacaaacattggcttgatttttgttgttgttgttgttcccaacttgattaagcatgaaccgtttgattgaatcacttggacttgaagggaatggccctgattacgacctggtggtagagtgctgcaagagctgcaccgatgaatggtcccacccagaagatccagtgttcatcccaaccaaggtccttgttgaagatgatagcagcaccaagactacgagcagggttgataccagtt

SEQ ID NO: 4847 - DNA, 507 bp, Glycine max
  Clone ID: jC-gmfl02220068f09a1
ggtcctttctctaatccaaatatctctccgttaatgctctcaccacaaacttcaatagactagccaaaagctaacaccaactataggccaaatcaccaataaatattatttcccgttcttttggcgtgttggccacccactgaacacatttgcactcacacatagaagcagagagaggccattggttggtttcagagatgggaagcatgcacatagaaaccccagaaacttttgctgatggtagcaaaaacttcgatgatgatggacgagctaaaagaactgggacttggattactgcaagtgctcatatcataacggctgtgattggttctggagtgctatctcttgcatgggcaattgcacagatgggttgggtagctggtcctgcagtgctctttgtcttctctttgataacatacttcaccttcactcttctcgctgactgttaccgttcacctgaccctgtacatggcaagcgaaactacacatattctgaggttgtcaaag

SEQ ID NO: 4848 - DNA, 542 bp, Glycine max
  Clone ID: jC-gmfl02220068f09d1
aacatagcaaactaaacattttattatattactttagtataacaagttgtctcgatttcgagaattgaaaatataacaactatttcaaaacatagtaatacaaattttgtcgccctcaatagaaactcttggctcaagttggaatactaagtatgaaagttctattgttctgcttggaagggcttgtatttcttgatactaaccgaaaggccttggatggaacccacaagtgagataatagaaatgatcaagcaaacccaactcaatatcttgagccaagtccaggtgaaggaaaatctttgcatatttgacttcttaatgtacatctctatagggaagtaaaccgtcaatggccagaaagagagtgcaccaataagggccaaaaagtcattgaagaatgggagtaacatagctacaacggcagtgataatcacatatgcaggccttcacactaccctaaagaagttcacattggagctttcacatagaggaatgttcaaagtatgctcggcatttataaattggctttctgtccattttct

SEQ ID NO: 4849 - DNA, 586 bp, Glycine max
  Clone ID: jC-gmfl02220068f10a1
catccagaaagctaaatgacctaagcaagagacgatcagaagaaaccatgagaatgaaagagatcatttctaaggaggagaaggcaaaagaattagcaaaactagaaagagagaaatatcaagatgcatcacgagaagctgaatatttgaaagaatgtgctgaaagagaagcggcagataagaaagaaatggagttgagagccattcgtgctgcaaaagagaaagaaaagctggaggatgctctcagtggttccacgccccagtaccggaagtttacatgggatgaaataatcttagctacttcatctttctctgaagatctgaaaattggaatgggagcgtacggagtagtatacaagtgcaatttgtatcacacaactgttgctgtgaaagttctcactctcaacactaacgtaaacagcaaaagacagcaattccagcaggagttagagattatgagcagaattcgtcatccaaacttgcttcttcttcttggtgcatgtccggatcatggatgccttgagtatgactatatggagaatgctacttggaggacagactactacgaaaaaccacacttccccaa

SEQ ID NO: 4850 - DNA, 519 bp, Glycine max
  Clone ID: jC-gmfl02220068f10d1
ctaaaactaaggtatgtattcaggaggatatatcattcataaataaaagagtacacatgaatgtttatacattagctagccttgaatgtatacatggttcttattttatttatagtaagaacaagatttgacatatgtatgtatacacagaatcagacaatagaatcaaatttatctacacttgaaatcgctctacctaaattaaccagacagcatgcttggaatggtacaactacgaaaaaaatctgcatccaagacactgctaaaggtcatacccaccaaactttctagccactctctacatcagagaaatcattggtctcaatattaacatggagaaagataatgctgatatcacgattctctggacttccactccaaaattgctgagagcagtgtgtaattaggaattaaatgcttatgaggtaaagccatgttcgtcattggtgatttgtcgttctcttcaagccacttttcaaattgctttgcgatcatatgtatatccatcagcagcaacac

SEQ ID NO: 4851 - DNA, 528 bp, Glycine max
  Clone ID: jC-gmfl02220068f11a1
tgctctattttgatctagcgtgatttattcccggatcgacgcgcttcggctcgagaaacaattctaacatacttttctttcttttttttcccctctttaaaagtctggcttttggtcctttgattcccaacttcacttgtcacatatcatattatgaagctcacaggtttcctgcaagcggtgactcttgctttggtgttagccaccgtctctgcatcagatcctgatcctcttcaagacctctgtgtcgcagaccttgcttcagcggttaaagtgaatggattcacatgcaaagatgctgccaaggtaaatgcgagtgatttcttctcagacatactagccaaaccaggtgccacaaacaacacctatggctccctagtgactggagccaacgttcagaaaatcccaggactcaacacccttggcgtgtctttatcacgcattgactatgccccaggtggcatcaacccacctcacacgcacccacgtgccaccgaggtagtgtttgtgcttgagggacactagatg

SEQ ID NO: 4852 - DNA, 423 bp, Glycine max
  Clone ID: jC-gmfl02220068f11d1
atactctaattccaaaactttgaatttatgagtgcccaaccaacatgaattgtaaagcaacaggaaccaggacaagagaggaaggtgtttgatgtaacaacagagagagagacattacaaccacgtcccacattacgtattaataatcccttaggagcaagcctagacttgatggtcttcaacctccttggttcccacctggaacgccttggtataacacattgtctggaaccggaggtgatcctgcaaacaacgttagagcaatggactgagtgccaagcaattgactgatgaatgctgcaattactgaagcttgctacttgacattggccttttggaagtgaaccaacccttttgggaacacaaatattatagccttgcttatgctctttgatatgatcgcgcaggctgaggatatgaacc

SEQ ID NO: 4853 - DNA, 491 bp, Glycine max
  Clone ID: jC-gmfl02220068f12a1
gaagaactgttaaaacatcgcatgcttaagttcagaaagattggtggattccaggaaggtattcctatagatcctaagagaaaagccaacatgaagaagagggatctatctattgctaagatttctgatgctgaactagaagttgaggttgagaaactgaagcaacaggttttggaagctaaggaatcttctcctgttcctgcaaaactagatctggatgagatgctaaagcaactgacaagggaggttgatctagaatactctgaggcagctaaagccacgggcttgacagacagtttgttgaaactaagggaggaagtttcaaaagcaaatgcagataatcaaattgctgatccattgctgaaggataagatagaaaagctaagggtggagtttgaacagcaactgcgtgcagctcccaattatggcaggctgcagaataagtctacctatctgagcgaattatgtaaagttaagcttctggcagatgc

SEQ ID NO: 4854 - DNA, 449 bp, Glycine max
  Clone ID: jC-gmfl02220068f12d1
acttacagcaccaagcgtcgttgaatgactcggaacgtctacctgaaactaattatacactgtatagataaagatattgagggagaaaccgaacatttgaagatgagtaaccaagagcataatgatcatgaaaagaaaagaacataagatgacatcctaaacataactgccacattgtgactcacacacatacagaagggtattcaatgctagaccccgctactgggcctttattggcagagtattgactgcacattggccaccattaacaccgaatgtgcttaaaatgaccaaacatgcatctaagaagtatggcgattataatactagaggatgatctaaatctagagtcaccaatcctactgtatggttctgaatcatgcgtctctccagccttaggaaccttcaatttcaattgcatggcctagctcttaatatcatgcgatgag

SEQ ID NO: 4855 - DNA, 306 bp, Glycine max
  Clone ID: jC-gmfl02220068g01a1
ggtgccctaagattttttatgttaaatgctacatggcacaataggaaagggcaaatgagaatataattatttgaggttccggtggccaagtttgaaccaccattacaaaagcatagaaggagggtgttcattgtaaaaattgtaatttatacatttgttgtgaaagcgacctctgcaaaatcttttgagtctgaacctcaagcttttgatccaaaaagcattctggactctgtcaagaattccgtggatgctttctacaggttattcagacctcacacagttattggcacagtaataagcataatt

SEQ ID NO: 4856 - DNA, 435 bp, Glycine max
  Clone ID: jC-gmfl02220068g01d1
accattaaaacaaaaaacagtactcatcaaaaacaaacagcagtgaaaattgaccaccgccgatcaagaacctagttttgaaagttacggctacatgaaatcggcagaaacttaaaaatataacttaaacaaaacacctaagactctgcaaggataaaactactataaaggagtaaccacgatgatgatcacatgtgctagcaaaattgcccaaatgcaatcacttcttcttggcagcggccttggtgaccttggctccggtggggtctttcttctcaacactcttgatgactccgacagccacagtttgacgcatgtccctcacagcaaaacgaccaaggggaggatactcagagaaagtttcaaccaccatgggcttggttggaatcatcttaaccatacctgcatcaccattcttcaaaatttgggctcctc

SEQ ID NO: 4857 - DNA, 485 bp, Glycine max
  Clone ID: jC-gmfl02220068g02a1
atcagatgttcatgctccttctttcattaaattaacggtagagatcccataaacaagtcaatttttttggagcaggaagagatttttttttcttttcaattcgaattattcattatctatgaaaagcccttgacttgtgcataccaaattcaaaaattgctatgtgatatcgacatttctggctagtggctacaaaatctctgtaccaatttatgaacagattctaggtatggaaactctatcatatgggtcagcaccatgctgccaagctgtgaactcacagtggaagtcacatgaaaagagtttgagtctacgtcaatcacagagtttcctctataggaaaacttggagtttattacacatgaactatttctgcatgtgcgcctgtgagattttatgagatgggtactagggtgcagctaagaatctcaaagagattcaatttcaaggattgtagaggaagttctgatgatggatatgtgatt

SEQ ID NO: 4858 - DNA, 501 bp, Glycine max
  Clone ID: jC-gmfl02220068g02d1
aacataaatcatcttctgagtaatagttgttcactagcatgctctcttggtgagtaattataggtatattatatatacaagattttacctatgattctaaagcatttgtgcatgacttctctttatacaaactatgacagagatgacaggctacaacgttgatttagtattgaagatgccatatgattcaccctgtcattgatgtttggctgccagaatattactgaacttggattgagatctgatgaaagatcttatcctgtcccaaagtgagaaattggaagcgaaatatctgaccatcactgactttttcgaaccttgtctgggaaactctaaatccctgtcaataatagaatgctttatactgtctagatcttcaagcattggtaatgacacataaccctgagactctaggtttctgatgcacccgcgacgtaagaaatttatgatctcacgaacttcatcatgagggcagtgaccaacatggctgattcgatatat

SEQ ID NO: 4859 - DNA, 501 bp, Glycine max
  Clone ID: jC-gmfl02220068g03a1
gagaaagtggcatcgcttaggtacagatacagacacaacctggtaaaaatcccgaccccagtgccgcacaattttccttcactcgcagcggaggtttacttttgatctagtacctgctatccctatgtataagcatggacttctagcatactattgtttgattaaccaagttcttccatattggttgaggaagcctcgagtcaatatttagtttttgctgccatctgtgggtttctgatggatgatgccgggcatcgtgaaaatggaaggcacaaagcagcagatcaatataaatctgctcagggacagtggttgatgcaacatcagccttccatgaagcagattatggcaattatggctgaaagagatgtagccattcaagaaagaaatctggccatttccgagaaaaaagcagcatatgctgagcgcgatatggcattcatgcagcgagatgctgcaattgctgaacgtaataatgcaattttggaacgagataatgca

SEQ ID NO: 4860 - DNA, 450 bp, Glycine max
  Clone ID: jC-gmfl02220068g03d1
gaaacaaggaaaaaattaacatacatagttgattttacatattaccgcatagaggttccaggatgactgaggacacgagtctacaattattcaggtttaaggactacatgcattaaaccagactatctaacaagtatttatccatcccatcatgcacactttctatccatgccattggcgccatcaaaccatctaagaaaattaagtgcgtacaaatgaccaacgaggatgactttaacaccaggcttatgcatcctaaatatagcaggggcatactctaatcattacctttcccagatgacctttacacttacattatttctctcattcgacttgagaatccataattgatcgctaaaagctgatcctattcatgtaatgctgccccacaaacaatttctcatgctgtactttattgtgatgtaacggttcgttccatgttttgcccaa

SEQ ID NO: 4861 - DNA, 274 bp, Glycine max
  Clone ID: jC-gmfl02220068g04a1
taattctacaaggcatatctcttgtcacataaagactcgtcattatttatgttgttagaaattattattgtgtacaagtacaactacacatcgtgaaagtgattcaaaagtttgctgtttttctttagtttggaaaaaaaaaactgtgctctatgtattttagatcttgagaaatttcagataaactcgtttgtaaaccattttataataatagagaaatgtttgcttattatcatcccaaaaaaaaaaaaaaaataaaaaaaaaaaaaatagg

SEQ ID NO: 4862 - DNA, 241 bp, Glycine max
  Clone ID: jC-gmfl02220068g04d1
gatgataataagcaaacatttctctattattataaaatggtttacaaaccagtttatctgaaatttctcaagatctaaaatacatagagcccagatttttttttccaaactaaagaaaatcagcatacttttgaatccctttcacgatgtgtagtagtccttgtacacaataaacatttttaacaccctaaaaaatgacgaggtctttttgggcaaggaaaaatccctggaataataacta

SEQ ID NO: 4863 - DNA, 478 bp, Glycine max
  Clone ID: jC-gmfl02220068g05a1
agcggacatactagaccgttatggtaaaccactatccttgtcgcaaattgtggagaacatagaagacgcaccctccccagatgcctctcttctccagagagtcctgagagtgatggtgcgcagaaagatcttcagtgcacaagaatcagagacaggagaaaccctcttcggcttgacacgagcctcgaagtggatccttcgcgacacgaaaatgaccctagcacccatgttgctgctggagaaccacccaattcacctgaaccctgcgcactacatcagtgagattattagagaaggcacaaaaaatggcactgctttctttaagtgccatggacatgagcaatttgagatgacgggtttggatcctgagtataataggttgttcaatgagggcatggtgtgcactgctagggttgtgtccaaagctgtgatcactggctacaaagatgggttcaaccagattaagtccttggttgat

SEQ ID NO: 4864 - DNA, 479 bp, Glycine max
  Clone ID: jC-gmfl02220068g05d1
aacaccaaaggatctgattcattaaaagcaatagattcttcacaaccacacaccactcacttgacatatatggaacacatacataatccatatagcattacttaggggtggggcatttcttactttaatttaatgcccaaacataacaagggcaggaaggaaaaccacaaaattaaaacgaagatcatatagctgttaataataacaacaacacatgcaacataaaaaccacatgcagttgtggtagtggcatcttcttcaaattggaaacgcctcaatgatggaagggagagcgttgatcttgatgatgttgtaacgcgcgaaaccggtttccttgaacagccacttccagttctcttcggacctctctttgccaccggcgttgtgagcgagaagcatcatgtcgaatgcgatgccaacgtttgtgaagagttcgttgccttggggtcgaagaacgtgatccacgattatgacttttc

SEQ ID NO: 4865 - DNA, 529 bp, Glycine max
  Clone ID: jC-gmfl02220068g06a1
ccatctttgccttctgcatgttggttctctgtaaacagatactgcaaaagaagaataatattgaatatttggttgggttgaatccctgggttgaagcgttgcagacatcacggctattctaagagtgtctcgctctctcattcatgtcccaactgtacgacggaggacaggttgcgtaactgccaccaacccttcgccgcacggtgggcgtggtgctttgccttctgaaggtggtagcccttcagacttgctcttcttagctggtggtggttctgctgtcttctagcttcttcttaactcttttttctttttactacttttaagctaccttgttttcaaaataacaaaaacaaacactttcttacttcataagatcaccttttcttcatcttctacttctccttcactaaaatgatgctcaaaatcaagagggttcccactgtcgtttccaacttccaaaaagacgacgctgcagactctcctcgtcccgtcggaggttgtggtcggaattgccttaaagcttgttgca

SEQ ID NO: 4866 - DNA, 509 bp, Glycine max
  Clone ID: jC-gmfl02220068g06d1
acaaggacaaacagttacctgaatttattatttctcgcagcatgaaagccacgatagacagtcaagtcaagcattatgatacatcagaccccaaaataccaacaacactactcagctgagcagttattatatcgtactttcacatgaaagtgtcataaaggcagataaaagcatatacattcaacacacacgaccataaggctcaagcacaaggcaatagtatgacttaaacggtgacacatttcagcaattattcttaaaacactgcagattttctgaatttgttcaaaatacaagagccttgttactgtagaaccacacattcttgtgaaccagccaccaccaccacagtagggtgttcgcttgtgctgactgcatcaacttcttttttgacactttgaacattgacatcctccaattcaccacagccaatggcttcaaaaacaagatcattgacttcttgaaacctctcttgagaaagggacacctcagcaagaagcctccaagca

SEQ ID NO: 4867 - DNA, 601 bp, Glycine max
  unsure (1)..(601): unsure at all n locations
  Clone ID: jC-gmfl02220068g07a1
aaacaaagaagtgaaaataacagcaaaaagtagcagctgctgcagctcccccgaagcttatctcagcagcagatactcaaccctgtttgagtagccgagaataacaccaatgggagaggaggaaaagaaaccagaggaacaacccaaggcagaggagaaaaaaccagaggaagagaagaagaaagaagaagcagcagcagcggaaaaaccaagcgaagagaaaaaaccggaacaagagtcgaaagaggaagttgctgctccgccaccgccaccgccaccggccgagattgtgctcaaagtgttcatgcattgcgagggttgcgctcgcaaggttcgtcgctccctcaaaggattcccaggtgtcgacgatgttgtcaccgattgcaaatctcacaaggtggtcgttaagggagagaaagcggatccgttgaaggttttggagagaatacagaggaagagtcacagacaggtcgagcttctttctccgatcccgaaaccgcangaggagaagaaggtccangaggaagaaaagcccaagcccacacccgaagagaagacagaagaggctcagattgtgatgacggttctgaaagtggcatgc

SEQ ID NO: 4868 - DNA, 417 bp, Glycine max
  Clone ID: jC-gmfl02220068g07d1
ctggctcttgcttcattatcactgcgtgctttccggttctcttgtacacgtactcaaccaactttgctggatcgtacacccccttcacgctcacttgtgagttctgcagatcgggttctgctgattccactcccttcattctctgtatgcgtctcttgatttcctgagagcaagcttcgcagtgcatgccaactttcagaaccgtcatcacaatctgagcctcttctttcttctcttcgggtgtgggcttgggcttttcttcctcttggaccttcttctcctcttgcggtttcgggatcggagaaagaagctcgacctgtctgtgactcttcctctgtattctctccaaaaccttcaacggatcccggtttctctcccttaacgaccaccttgtgagatttgcaatcggtgacaaca

SEQ ID NO: 4869 - DNA, 100 bp, Glycine max
  Clone ID: jC-gmfl02220068g08a1
ctcgagccgaatcggctcgagcgcttagatatactctgttatcatcagttgttttctccagggtacaaggagatgattttcttggattcagccccataca

SEQ ID NO: 4870 - DNA, 215 bp, Glycine max
  Clone ID: jC-gmfl02220068g08d1
agttattgtttactctaaggaaatctagaaatcttaccttattataggaatgaagatgactagagaaatatttgtattttatgtgtacaaaagaaaaacagatgagacgattaaagaattactgcatgactagccagaatgggcagaaagcatggggctacaaaatggacctacaacatctggtccaagcccaagctttatgcaaaaggccgaag

SEQ ID NO: 4871 - DNA, 600 bp, Glycine max
  Clone ID: jC-gmfl02220068g09a1
aaagggtcaagagatgaggttgatgagtctggtaagtgtttgagttggttggacaagcagccaccttgttcagtgttgtatgtttcttttggaagtggtggaacactctctcagaaccaaatcaatgagttagcctcgggtttggaattgagtggtcaaaggttcttgtgggttttgagagcaccaagtaattcagttaatgctgcttaccttgaggctgaaaaggaggaccctttgaaatttttaccaagtgggtttttagaaaggacaaaggagaaaggtttggttgtgccatcatgggcacctcaggttcaggttcttagtcacaattcagttggagggttcctgagccattgtggttggaactcgacattggagagtgtgcaagagggagtgcctataatagcatggccactctttgctgagcagagaatgaatgcagttatgttaaccgatggacttaaagtggcgttgaggacaaaatttaacggtgatggcatagtggagaaggaggaaattgcgagggtgatacagtggctgatggaaggtgaagaaggtaaaggatgcttgaagaatgatgaatttaaagattctcttgta

SEQ ID NO: 4872 - DNA, 273 bp, Glycine max
  Clone ID: jC-gmfl02220068g09d1
gaaaaccatttggaaaaaattttattaatgtattcctaaagcaagttgtaatacacgagtgtatactgtcacgaaatttttggcagactaaactagtcacgacttttacggggaagctaatccatctctacagaaacagaggtaccttaatcatccaactctgccatttggggagcatttaaaggcaaaaactggttaccagagaaggcttaaaggttaccaattgcaaaccgaaagaaaaaagggttggttacgaaaaccccagttttcaag

SEQ ID NO: 4873 - DNA, 465 bp, Glycine max
  unsure (1)..(465): unsure at all n locations
  Clone ID: jC-gmfl02220068g10a1
cgcaaatacgagaaggaacaaaacaccgcggaagcaaccatggccgaagcagaacacaacgatcccacctcgccggagcgcgaggtccaaaccaaaagcaacaagaagaaactccgcaagaggaaaaggcctcacaagaccgagcagaaacgagatgaggacaagaacgatgctaacattgatagtgcccaaacacaaaccgaagatgaagaagaagaacaaaaagaagaagacacaaacaacttctcatccggaatcatgagcaccgagtctttctcctctctgggcttgtccgaacccacttccaaagccattgcggacatgggcttccaccgtatgactcagattcaagcgaaggcaattccgacgcttctgaccaggaaggacgttctgggcgcggcgagaacgggtgcgggaaaaaccctagcgttttagtatcgcggttgagtngctgtacagcattca

SEQ ID NO: 4874 - DNA, 238 bp, Glycine max
  Clone ID: jC-gmfl02220068g10d1
gtattacagtttgtccttgtctgttattttctttttaattactattattttataacataataaagaacaaacaattaaagaagttgaaaacatatgtagaccctaaacggaaattacagacaaggaagaagaaactaacttcttgctcgtcaaattgtcttgagtaggatataaagaaaatgtaggcgctgacgtctattctactctcatcctgtactctaagggcattgacgtcttg

SEQ ID NO: 4875 - DNA, 531 bp, Glycine max
  Clone ID: jC-gmfl02220068g11a1
tgaagtactctgggatagtgatgcatactcccgggtcgacgcgctcactgatcgagagaaaatgaaagtccttgttttctttgttgctatagttctagcagcatggcattgccatggctcagaccatgaccatgaccatggccacacctaccaaattttccctctgagaatgaaaactggccatggtggccactacattccggaggtatcatgccaaagttggaggcttggtgtggaagcacacaacgtcattgactggaaaaccgttcctcaagattgcgagggatatattgggaactacatgcttggcgaacaatatagatcagactccaaaatagttaaccaacaagcttatttctatgctaaaaccctcaatatcactgccaaaaccgcatgggtgttcgacatagatgagactacactctctaatctcccttactatgctgaccatggatttggggtggagttatataatgaaacatcgtttaataaatgggttgaccttggcgaggcaccggcactgccagagag

SEQ ID NO: 4876 - DNA, 396 bp, Glycine max
  Clone ID: jC-gmfl02220068g11d1
aaaaaaaccccaaaagaaaaaaccccgggggggttggacaggtttttaccacggggcctttgggcccacacaaagggccatacctgggaattaaataacgggggcccctggggtaaaggcgatttctccatttttccaacggggctttttttttattcaagggaaccgggctaaaagagccctaaaaaccccaactaaggggggaccggggaacagggcacttaaggggcctatcgccgggggggggtcccaaaagaacgctccatggggccccaagggttccaaaggattgggaacctttttcccccaggttttttttttcaagaaaattggcaggaaaggggggttaacccggggtttcaaagggtttctggggaaataacttttcccaggggg

SEQ ID NO: 4877 - DNA, 636 bp, Glycine max
  unsure (1)..(636): unsure at all n locations
  Clone ID: jC-gmfl02220068g12a1
gattggcctagccagtagtagccaatttgttggagctggttgggaatggcgtcgaaaccgaaatcaaatggaaattccaaatgcaacaaaggattcgctgacagctatatgctgttgaatcctgaagacgctcatttcttcgatcttgttcatgtgctgtattcccgtaacttgggaaaccgaaaatttgtggacagcaatgctgagggatcttatgagggaagcttccgccaaagatggcttatattcgtctctgtggtgctccagaagcttctgttgctcatcgctaagccactttcgttctttggctcttgcgttgagttcttcatcaacctccttgtcctcaacggtggcttcatcatgatcgttattaacttcctcacaggtcacctggtcgtccccgatcgtaatgcaccaaattatttgtcttgcatcggaaatttggacgcgagagtaaagttggatgccatcacgcgtgatgactgcaggtactatngttcattagctatgatggcttcaaggcatcctatgagaatgcagcttaccttaaatctctaataaaaaccactggaagatggactccgtgagatttttgattgctggatgatttcaagaaaagccccacccaagtttgat

SEQ ID NO: 4878 - DNA, 516 bp, Glycine max
  Clone ID: jC-gmfl02220068g12d1
gaaataaacaaacttcacattgatctcattaatgataaatccatgcaccaaaggaaacaactttaaacctagcttattaattactatacaataactcgtactgacgacaaactgttatattattcatgatcattatgatacataactattcttcacatgatacataatcaagtgttattaccattttttctaaaactaaaaatcttgattatgtaaattttagtctgcatgaccatacacatgtacgtagtggtatggaatgatcatgtatacggacacatcaatctgctttaaaatgtttttcaattgatcccagaagagtggaattaatataatcttgtggaccgtgagcaggtaagccaggaatcagcagaccaaccaacctgaaactaaagagaaaccatccttctctatagtgaggtccatttttgtacgctatggtaaagctccttattagttccaaaacagcattgaacatcatgggtatcacacaccatggcgagaaatagttcttat

SEQ ID NO: 4879 - DNA, 482 bp, Glycine max
  Clone ID: jC-gmfl02220068h01d1
caaggtaaaaattttattgcacaatgagaaggcagagaaaattgatggttctgtttctcagtacaagttttagaatgaaaaatgaagcaacaagtgtttgtagtggtagtagtagtagtagtaagcatacaaaactacaatggcatggtacatacatataataattgaattaccaattcagaatttgatggctctcacttccacttgttggcaacaatgtcagccaaatccacaaccctttgggagtagccccactcattgtcataccaagcaatcaccttaaccatgtcatctcccatgaccatggtcaacgatgagtcaacggttgaggacacatcagtgcacctgaagtcaacagacacaagtggctcatcacacacagagaggattccctggagctcattgtctgcactctctctgaatgctgcattcacttcttctgcaaaggtcttctttgagacctgaacaacgaggtccaccac

SEQ ID NO: 4880 - DNA, 550 bp, Glycine max
  Clone ID: jC-gmfl02220068h02a1
cgcgctagctagggtttcattctcacccactcccaacaatctcccaatagaatgctgaaagagaattgctgattatcgcttcactcaactctaccaaatcgcatcactgaccaatctggtggagccgattccacagtatatgacatgaaaccgtgcttgcggacaaagcctcttcttcttctgctctctctgctacttctccacaacatcacattcgttctctccgatgattccagcaggaaaaacaccttccgcgagcgcgaagcctccgacgactccctcggataccccgaaatagatgaggatgcacttgtgaattcaaagtgccccaagaatttggagctcagatggcaaacagaagttagttccagcatctatgcaaatcccttgattgctgatattaacagtgatgggaagcttgagattgtggttccgtcttttgttcactaccttgaggttctagaaggtgctgatggggacataatgccagggctgcctgctttccaccaatcaactgtgcattctagtcctcttctatatgacattgaca

SEQ ID NO: 4881 - DNA, 504 bp, Glycine max
  Clone ID: jC-gmfl02220068h02d1
ggagagaactgtgtattaattataaatatctattttgattcaataatggaaaaaagtatatgtaactcggttaaacatttcagtatcagattacactacactacaacattttaagggcaaaatcccgacattaaggtatcattcactctgttgcaatcttcgactatctctaaagtaactttagctgaactaatttttcagcttgtaaaagattgctccaactccgtgatcaaagttcaccgcagcacccaaggcatacatcataacagattctactcaatttgacataaaaatattcacattttctgaactgagtatatgaaatagagtaatcatcattaatcattgttccttgaaaaagatggcaatggcattgagccttgtgggcgaaggattacaagcacaccaaacatcccaagcattggaagaacatgatgccacttcaacagtttatagtagtgcatatggaatgtaagagagaaatcatcagagaaatacagtcca

SEQ ID NO: 4882 - DNA, 499 bp, Glycine max
  Clone ID: jC-gmfl02220068h03a1
acttcattaaccaaaatggactgctccatcaacttccacaagctccaaacaaagaaaaccacgaaacctcggaaacatcatccacagctccgaaagatcgcaaacatgttgcgttacgcggagttgtgcgttgttctggtcttggtttcgaggctctccatcaacctaccctacacaaccgagtgtttccgcaacttcatgggtagccctcgcttcgtttttctcctgggaaacgtcatcatcataacgctcttcgcacaatctggccacttttcatcttcagccaaacgtgccccagaacctgcagatctctatctcgagttcctccaaaacaccaccattcatcagaaacttcaagtccacgtcagcaaaccaaagccaagtgcgagagtattggagagtgttataataaagggcaccaaaactgcagagactggtttggaggtgaagaaggattatagaaggtctaaatcggatattgttgtgaagcgcgtggaga

SEQ ID NO: 4883 - DNA, 459 bp, Glycine max
  Clone ID: jC-gmfl02220068h03d1
ataggatcaatcaaaacattattttactcactttcatttaatctatacagtacatacatcacatattttgtttgtttattgattaaaccgaagcaatagcactgcatgtgtatagttttttcacttttgaccccaatagtagaaagcaataatatacagacatttgagtttttttatattttttttaccaatactcatagtcctatactcctattaattaattacagagttctgtagttcgtagcctctgttggcgagcaatgaaagcctcaaccttgcgacgaaagtcgtcgttgctcatgccatcttcagggtacgagttattattaacaagaactttctcagtctcacacctctgcaacacgcgtggaggcaccttctcactctccacgcgcttcacaacaatatccgatttagaccttctataatcctttttcaccttcaaaccagtctctgcag

SEQ ID NO: 4884 - DNA, 515 bp, Glycine max
  Clone ID: jC-gmfl02220068h04a1
cgacgacggcgatgacgatgccgtaaacccgaagccgggaagcctccggcacgccgtgatccaagacgagcccttatggataatcttcgcaagagacatggtgatccagctgaaggaggagcttctcatgaactccttcaagaccatcgacggaagaggcgccagcgtgcacgttgctgggggtccatgcataacgatacagtacgtgaccaacgtcatcatccatgggattcacattcacgattgcaaacagggagggaacgctatggtgcgggactccccacggcactacgggtggagaaccgtgtcggacggcgatggcgtgtcgatcttcggagggagtcatgtgtggatcgaccattgctcgctctctaactgtaacgatgggttgatcgacgccatccatggctccaccgctattaccatttctaataactacatgacgcatcatgataaggtcatgtttgtgggtcacagcgatgcttacacccaggacaaggccctgcaagtcacta

SEQ ID NO: 4885 - DNA, 526 bp, Glycine max
  Clone ID: jC-gmfl02220068h04d1
ggaaagaatgaataagccagaagagaagttgcttgattgtttgtcagcaaggagaacctttcttacaactgagtgcaccagcacctgttgttatggaaccaacaagggaagatggtcttgcacttaagctagaagcccttgcatagctagaggaggctccagcacccgatgatgtgaaaaacgcaccgtttactaacaagtccccttctgacctccaattccaatcctgccactcactctctggcgcatcttcacgttttgtcacctctttgctgaatctgtcatcgggtgcaacaaacctattgccttggcagttgatggttggattagcacttccaccaatggcatacattttccagtgagtataatcattgttcaccacatggaaatacccaagcctacaccttggcatcctttgaacaaggccttcaccaaagtggttgaaagcaatagtgacttgcatggccttgtactgggtgtaagcatcgctgagaccccacaacatgaccttatcatgatgcgtcat

SEQ ID NO: 4886 - DNA, 511 bp, Glycine max
  Clone ID: jC-gmfl02220068h05a1
agattatgttattgtgaccattatcttgacaaggtaagaggatatatggagtatttttcatatttatatgatgtacacacaaaacaaggccaatgagaggaagccacttataggttgggaagaagcagcttcaattcagagagtgagtgctttttctctggcccatgagattccatggcttcatttggtgcagtcaattacaaattcttcttgtgcctacttctatggctctggaactttctacctctatctcaaggtaatcagcactggcatgaaaatagatacccttttatcagaaatgcaagctcattctcatcaccatcaatttcaactacgacaagcaataatgcctatgactacataatagttggaggaggcacagcagggtgtcctttggctgccaccctctctcagaacttcagtgttttggtgcttgaaagagggggtgttcctttcaccaaccccaatgtttcatttctggagaactttcacattacattggccgacattt

SEQ ID NO: 4887 - DNA, 459 bp, Glycine max
  Clone ID: jC-gmfl02220068h05d1
gactactaataaatcaccctttactagaaattactaccaactacattcattttcaatcctaccactaacgcttttttttttcttgatgtgcaacagtgcttctcttatcttccttttacacaccttttttcaagatttgccatgatcttcacacaagggattcctccttatataccagccaatttccccaacctatgtctcaaaatcttcagccccatgtacctgcccatcatcatgacagttgcttgaggatttgttcctggtgattcgtcaaatgttgagccgtctaccacacgaagtctgtcaacgccaagaaccttgtaatcagggctgactaccttccccacatggcaccctccatggtagtgccaaattgtgatcacggtgtctttgcaaaactgtgctatcgacgctgtgacattgggatgcttgggtatgaagttgacattagccttgaca

SEQ ID NO: 4888 - DNA, 464 bp, Glycine max
  Clone ID: jC-gmfl02220068h06a1
caagaaggagaaaaccaagaagaccaagaatctcattctcatcctcaccaattccatatccaattccaacctcttcatcatcaacaagaacaacaacaacaacaatcttacacaggtttagacacggagatcttaaacccactccaaccaccgaagaaacggtcttgcctaccgcctcttccgccgccaccaccgccgccttcgtcgcttgcttcatccgaacatgcaagaaaaatgggagagctacaacaccatcaacaacaggcagcagcagcagcagcaccgtcgagagcggcgatgagaggcgtcggcggcggcgagattgtggaggtgcaaggcggccacattgtccgctccaccggacggaaggaccgccacagcaaagtctgcaccgacaaaggccccagagaccgccgcgtgcggctggcggcgcacaccgtcatccaattctacgacgttcagga

SEQ ID NO: 4889 - DNA, 544 bp, Glycine max
  Clone ID: jC-gmfl02220068h06d1
gcactaacttggaaatatacaataactagagcaaactagctcttttattgaatttgcatgttattcaaatcactacaagaaactcgaaactgaagaagtacaaagaagacacaatcacttaacaaagggaaacatagcactccaatacagaagaaacacaagaaacatagcgctccaatacagaagaaacaaaagaaacacaatactcctagtcctagttaaattaagcatgaaaaacataagttgaacataaaaagcataacaaaccgagggattggaaaacctgaatatccacctcagattttcttgaattcccgttgtagcttgaaaatccattcatcatgatcttccaaaatcatgttctctccatcaattgaaccattttcaatgcaaccccacaaaccctgagggagaacaaagttggggttttcgatgtgagtttttcaaatcaatggcgagaatcagaggaagcagaggacggcttgtcggacacgccgtcgtgttcctctttaccctgaattcgtgcacgaatgcggaagcccga

SEQ ID NO: 4890 - DNA, 593 bp, Glycine max
  Clone ID: jC-gmfl02220068h07a1
catatccccccctagctacagagcagccaaaggggaggaataataataagcctatattctaaggccggaaaaataaaaaaggaataacaaaaatgtctggaaaggtaattatctcggctgtttctctcatcctggtggttggagtggccataggtgtggtggtggccgtcaacaagaagggcgaggatcccacacttcaatctcaacaaaaatcagtaggggttatctgccaaaacactgatgaccagaagctctgccacgaaaccctaagctccgtgaagggcatggacaccgctgatccaaaggcttacatcgccaaggcggtgaaagccaccatggacagcgtgaccagggccttcaacatgagtgataggctcagtaccgagtacggaggcaacgataacggaaccaagatggcccttgatgattgcaaggacctcttgcaatccgctatcgagagcctccaactcagcattgacatggttcacaacaacaacttgcaagccgtgcataaccaacaggctgacttcaagaactggctcagcgctgttatctcgtaccaacaggcctgcatggagggttttgacgatggc

SEQ ID NO: 4891 - DNA, 470 bp, Glycine max
  Clone ID: jC-gmfl02220068h07d1
aaacaaagccatttaaaaaattttcaataaaaatatttccgggagacccccaaagataaaacccacgaatacccaatgggccacgggctataacccccaacaacccactttttaacaggccccaaatgaggaacccaggatatggggtgggggaaattcaattaacccctccagaagctaagggcgtgaggaacccggggagctttcaaccaggcgcttccaccgggggttccagcccgtaggaaccgggccggggtgaaatggggaccttcttcgggggtaaaaaaaccccgggaaccctttcacttggaccttccggaaacgtgggcgcccagggccaccggggggggattcacccaagaacaagggggtttcaaaatgcaccccggcccatgggcaccaaccttcggggggaaggaagtccccccgggggatcccaaaaaacccgccctaaaaaaggcccaaggcct

SEQ ID NO: 4892 - DNA, 552 bp, Glycine max
  Clone ID: jC-gmfl02220068h08a1
tcttatcttagctaccccatcacaacaaccacgatactatttctcatactctattaggcaaaaacaccaccaaatgggagaggaaaaggagcagcctaagaatgacaccgagaaaaagcccgaggaggtagcccccaagaaagacgacggacccatccctgtcgtttacaaactcgacttgcattgcgagggatgcgtcaagaagatcaaacgcacctgtcgccacttcgaaggtgtggaaaccgttaaggcggatctatcgtcgaacaaggtgactgttaccggtaaaatggacgccgagaagctgcgagataagattgccgagagaacaaagaagaaggttgatatcatatcagctccgccgaaaaaagaagccgccgttgcggaaaaaccgccggagaagaaggcagaagacaagaagcctgaggagaaaaaaccagaagaaaaacctaaagagagtacggtggttttgatgatcaaactacactgtgacggttgcatttgcgaaaatcgaagaatcattcttaggttcaaaggctgtcaattggtgag

SEQ ID NO: 4893 - DNA, 476 bp, Glycine max
  Clone ID: jC-gmfl02220068h08d1
aataagatcaacaaatttcattgaaataatagtaaaccatttattctgaaaaataaacaaaacaaagaacagctcatgtgatgtgagttctggacaggattctccagccagccggccattctctatctctattctctaaaacaacaacctacacatatgatatattattatatcaaaatcctaccatattataaaaactctctatattaattaaattttaataacacggaatattatccacccctcaatttttacacgcacgtcaatttttttttatttacaaattacaccatgcgtattccgtatccgtatcccgtacgtgtgtaagtgtacaccgaaaattaatcaccgatcatcacatgattgaacatgcattggggttttcatcgctgaacatctgcggaggaggagcgtgcgggtgcatgtagtacggtagaagtggctgcagaggataaccctggttcacgtaccctggc

SEQ ID NO: 4894 - DNA, 497 bp, Glycine max
  Clone ID: jC-gmfl02220068h09a1
ctcgagccgtggcgagtcacagaagtggagagactgaggataccttcattgctgacctttctgttggtttggcaacgggtcaaattaagactggagctccatgcaggtcagagcgtcttgctaaatataaccagctcttgagaattgaggaggagcttggtgcggaagtagtgtatgctggagctaacttccgtacccctgttgagccctactaaagttttcaagtggaaaaaacctggagatccccacgagtttgagcaatgagatttggatgcgcggttttagttgtgatcaataagtcgatagttagaacaatagtcttggtataaggaccttgccaataattttttagttctgattcacagagctaagacagttccgtcttagactttaaaagttttgatatttagctttaatacttgaagtttacttccaattttatggggtatccccaaaacatttcatactctttgctatgttaacttttttcccctttc

SEQ ID NO: 4895 - DNA, 381 bp, Glycine max
  Clone ID: jC-gmfl02220068h09d1
tttttttttttatttttatcttactttcttttgttttgtcttttttatattttttatatttttttatatataattaatttacttttttttattttacttataatagactgggaaaaccactaaaaaacttaatcttaatcaaaggggggaaaaaaaagcacaacaacaaaaaaaaaaaaagcggggggggccccccccaaaaggaggagaaacagcgagccaacagccggaaaaaaacacactcaaagagcaaaaacaaaaaaaaaccaacccgggaaaaaaacccaaaaaaaatagggccgggggacccacccaaaaaatacgggaaaacccctcacaaaacggccaaacacaaaaccccgcccacaaaaatggttgagc

SEQ ID NO: 4896 - DNA, 571 bp, Glycine max
  unsure (1)..(571): unsure at all n locations
  Clone ID: jC-gmfl02220068h10a1
agcccgtcctacaaaatcctttagtggtggctggaggatgagaatttctttagctcgagcactttttgtgcaaccaactctattattgcttgatgaacccacaaatcatcttgacctgagggctgttctctggttggaagagtatttgtgccgttggaagaaaactctggtggttgtctcacatgatagggattttctcaacacagtgtgtactgagattattcatctccatgatttgaaacttcatttctatcgtggaaattttgatgattttgagagcgggtatgaacagcgtcgtaaagagatgaataagaagtatgatatttatgccaagcaattgcaagcggctaagaagagtggaaaccaggctcagcaaaaaaaagttaaggatcaagctaagtttgcagcagctaaggaaaaaagcaagggcaagggcaagggcaaggttgatgaggatgaggccccaccagaggcacctcagaagtggagggattacagtgtggagtttcactttcctgaacctactgagctcacacccncacttctgcagcttatngaagtcagctttagc

SEQ ID NO: 4897 - DNA, 432 bp, Glycine max
  Clone ID: jC-gmfl02220068h10d1
attcttaactcaaactttggtaatccaaaaaccacaagtctcactagtgtattaatagcatttcccgcaacctaaaattacagagttgcagaatacaagaaaatgaacaaggagaaggggaggacaaagtccagcattggcgggaggcaagttatctttatcagcaaaatacaggaagccaaaaatgtagatatatgaggacaaattgtcactaaaataatttttttcagaaaaggaagctcaatcatcaacttcagctttaatctctctcagcaagtcgtccttgtaatcctcaaatgttcctgggaaatttttgacagtaccatcttcgacaacccagatttgactcctttcttcatcctcacatacacgtgatatcaatcttgaatcatgactaacaagaacaacttcaccggtgaattcattcagtgc

SEQ ID NO: 4898 - DNA, 566 bp, Glycine max
  Clone ID: jC-gmfl02220068h11a1
caccatcacagccactgcagttgctacagcaacaaccgcagcagaggcagaatgatcacacttctcatccagctcgccaggttgagtctgagatgggtggtgaagacagtccatctactgctgatagtcgtctcgcccgtgccaccatgaatatttatggccaaaatttcacaatgcctatgcagtcgccaaactttgctctgatgacacctgcctcaattggtgcaggaggctccaatggcagtcacagtgaaaagaagcaaccccagcagcaccctggtccaaaggctggaggtgaaacagctcctgcatttgccatgtcatttgcatccatgaatggagctactggcgcctctggccttgacctctcatctattgcacagaactaccattcaatcatgcagagtaatcataactatcatataatggcagcacaagctgccagtgctcagttgaagatgagttatcatgccgccgaggaagggaaaagtgtagttaatccttctaatctagacgaagatagaaaagcaatatctgctgggaaaaattccgcaacaatggggcaa

SEQ ID NO: 4899 - DNA, 437 bp, Glycine max
  Clone ID: jC-gmfl02220068h11d1
gagggaattcatcgtctgatgttcaagttttatataaaatatatgggagggtttctgttatttatgatcaggtggccacgtacatacttcatccttcgaccacatagactctgtcccatagatgcttactgcggctctagtagccctataggacggctttgaatgactttcttgaaatgatgaggagaaagaacatgtccgtgctctacattacatccccatgggatgagctgacgggactatccctggctttactgcatctagctttccccatgacatgcttgtgaagaaccctgtcgaattttgggtcaactttgcgatcaaccttgagagaggtattaacgccgaggggcatgcttattacttgacacaatatacgctcgtccatgttcttgggatggacgattggccatccagcattgatgaatccaaatcat

SEQ ID NO: 4900 - DNA, 493 bp, Glycine max
  Clone ID: jC-gmfl02220068h12a1
atcagctgtgactgaccacttatagccagaatgtgatgagtcttgaagatggtattgtcaagggttttgatattcggactgccaactctgattcctcatcagatctgagttctacatttacacttcatgcacatgacaaagctgttacctcagtatcctataatccatcggcacccaatctccttgccactggatccatggacaaaacggtaaaactttgggatttgtcgaacaaccaaccctcttgtgtagcatctaaatctccgagagcaggggttatctttaaaatttctttctcagaggacaaccccttcttgttggctataggaggctcaaagggaaaattgcaagtttgggataccttatctgatgctggcatttctcgaagatatgggaattacaagaatagatcgcaatctgggtcttgaagttgtagtcttgcttaccgtactgctcaagttgcgttgcatacatcacaattttgggattcact

SEQ ID NO: 4901 - DNA, 248 bp, Glycine max
  Clone ID: jC-gmfl02220068h12d1
atacgaataaccaattccaatttgtgctatctcaaatgaacgttgtcatgatgctaacattgaatttatcaagaacatattacagctatggatcccttactttgggattatgcaactcaactcgagcgagtcggtacggacctctgccatgtccaaaccctggttgcaacctatctgtgtcatctccatatcttagagagcgccgccttcacataaggcataccaaacttgctaaaatggcctttgag

SEQ ID NO: 4902 - DNA, 338 bp, Glycine max
  Clone ID: jC-gmfl02220069a01d1
aggctcgtcgatcgcgtacggtccgtgctcattcccgggggggcagctactagtcggagggcgcccttttttttttttcttcgatgctaagtagttttgatagccagcgccacctgtgagcatgaactgcgtgacctctgtctgaagactgtgctactcgagtaccaccaagctgataccgacgaccactgctaggtgatccggatggccgttctcgtcgccatttgcaatggttaccggacatacagacataccgctgttggatgtcacgcctatgacacattgacgatagggggcctgagagaagaaaattttattagatttatctaagacgacct

SEQ ID NO: 4903 - DNA, 413 bp, Glycine max
  Clone ID: jC-gmfl02220069a02d1
ttttttttttttttttttttttttttttttttttttttttttttttttttttttttttgttttttttttttttttttttttttttttttttttttttttttttttttttttttttttttttttgggggggaaaaacccccccccccccctttttttttttcttttggtggcgccggcccaacacacgggggggacccccccccccctttgggggggggaaagggtaaaaaacaaccgggggggggaaaaaaaatttttactccccgttttttcccggggaaaaaaaaaaaaaaacccccttctataatttctccggggggccccccccggaaaattttgtgggggggggggctctctcccccaaaaaaaacccttttctctcttttccccgcccgggggggggtccccccttt

SEQ ID NO: 4904 - DNA, 391 bp, Glycine max
  Clone ID: jC-gmfl02220069a03d1
agctgcaatatatatagttatacaaatcaaatcaggatgcaggagtcctatcacaacaggattaaaaacgaaaaccacactaagattgttttctacttgctaattgctaatacaatgaagcacatgcgattaagatgcactttctataaataatttcatactataacaatgggaaacgcaaacctacaacattcgacaacagttgactaggttgttaaaaaagcacactgtaatcaacccactatttttttgtttttttaatagaaaatcaatcctatcgattcatctgtcattcccaatgaggcttctctgaattatgttgttctctcgaaaccacctcctatctgcatatgcagccattcaggaggggatgatccctgagcataccccc

SEQ ID NO: 4905 - DNA, 369 bp, Glycine max
  Clone ID: jC-gmfl02220069a04d1
aaattagttaaaaatacatgagtggaagaaaataatacatataaaagggttatctatcacaaactaaaagacatttgagatcaaagaaaaactacagagggggtaactaaaaagctgttatgaccattacagtcaaccatgaaggttttagtcgataaattccctaaatccttcgatcctagtaaaaatttcattagacaaggccaaactaaagctttctttcaacaaaaatctaaatgcaaatgtgttacaaaagggggagaaaaacaaaccaatccccgtagaattctacagtatttggtatctactggaaaatttttctaaatggtgtaagagaaaaccaaagtaattatgttctcttctcttttt

SEQ ID NO: 4906 - DNA, 500 bp, Glycine max
  Clone ID: jC-gmfl02220069a05d1
atgtaacatgataggacttacatacgggtatcaaatccaagttggtgacatagagaaatttgatttgacattcatagatcagaatatcagacttacatacgggtgaacatgatacgggtgaacatgataggagcacaatactatacataaaaactgacacaacaccctattagatatgaaaaactagatagcatccaattacaaaacttaagcatacataagaaaattatgcacacataagtttgcacgtttatttgtcaatgagaggtacgttggaaggaaagaaaaccacacaccacacaccacacactcttattagatagagatgctgttgggaattcctctgaaagtaaggccttccccactggtaggaagaagcacagtgtagggcatttgcgccggtccattacggttcctaaggcttgaaatcttgttcctccctgagattttgtcctcaatttccttcagcttgtttccaaacttcttaaaggcttgaattg

SEQ ID NO: 4907 - DNA, 561 bp, Glycine max
  Clone ID: jC-gmfl02220069a06a1
ggaatttgtcaaagagtagccatcgccccaacgatcccgtttcccttcacttctctacgcaaagccccttgttttgcatagagctacttaaaatgtcggagggaaatgcggagagaggaaagagaattgccattattggtgtctcaaccttattgttggtggcgatggttgtggctgtcacagttggtgtcaatgttagtgagaatggttccaacaatgaggacacaaaaattgcttcttctgtaaaagccgtccaaaccctttgccatcccacaaattataagaaagaatgtgaggaaagcctcatagccagggctggaaataccactgatccaaaagaacttatcaaaattgtcttcaacatcaccattacaaaaattggcgataaactcaaaaaaactaatcttttgcatgaggttgaggaggatcccagagccaagatggcacttgacacatgcaagcaactcatggatctttctattgaggagttaacaaggtcacttgatggaataggtgagtttgacctgaaaaatatcgacataatcctcatgaattaaaagt

SEQ ID NO: 4908 - DNA, 494 bp, Glycine max
  Clone ID: jC-gmfl02220069a06d1
gattgaacatgttttgttagttattgtgactttgaaaagttgtcataagtacatgttctcatttataggaatacttttgacacaaaagatccttacattgtcacaccattagcctcgataccctttcttaggaaatacaatgggtaaaatatctagaagacccatttattagtcactaaacaaaaaaaaaatatcaaagaggaattacgttacattgatttcaattccttgagatacaaaaatgtagctcactctaaaattaattaatgaaatcaaaataattaaagaataaagaagctcaatcattccttattaattaatttatatttcttgctttcacaactcatcacttttattaccaattaagccttgtctttttgtgcctatggtgtgcgggaatgtcacgaaagcaaggaatcccagtaacttcaatccagtcagttccgtgaaaaaacttagatgctgagaaccaacgtgcagcttttgaattgaga

SEQ ID NO: 4909 - DNA, 437 bp, Glycine max
  Clone ID: jC-gmfl02220069a07a1
gcctgagagagacttagatatagagccagataaatatcgacttacacatatggatccctttaggagaacagtacatgtatgggacaggccccgtggccccaccccatatatgactggatgacaaagcattataccatgaaaattagcagagccttacaagatgtgccgctgataagaaagtaggatgcagtcacttgaagctaaaggctgatttcaaacgctagtgcattgtacaaagattaccaactacagacttcgtgatgtctttgacgtctctagctatcatgggcatactacatgccatacttcacactatgggaataatggccgccccgtggatatatatcttggacttaagtcacatgtctactgtcttcgtggggtactctcatagggatacatgcccgtacccgattactacgattgttactggcttg

SEQ ID NO: 4910 - DNA, 440 bp, Glycine max
  Clone ID: jC-gmfl02220069a07d1
ttttttttttttattttttttattttttttttattgtgaatttctatttttttattatggttttttttttttttattttttcttttttttatttatttttttgttttttttttttttttttttttggggggggggcgccaaaaaaggaaaaaaggggggggaaaaaaaaaaaaaagggggggggggaaaaaaaaaaaaaaaaaacaagaaggggggggcccaaaaaaaagagggggggcaaaaaaaaaaaaaacgcggagggggggaaaaaaaaaaaaaaggttccgacgggcgcaaccaccaataaaaaaaataacaggggggggggggggggaaaaaaaagtgggggcccccgggccaaaaaaaaaagggcaccacccgggggggaaaacccccgggggggggtaaaaaaaaaggggggagggggggggggggttttt

SEQ ID NO: 4911 - DNA, 600 bp, Glycine max
  Clone ID: jC-gmfl02220069a08a1
gtttcattagatgaaaagtgaaaaatgtgacaccatctatcccaacatacatataaataagaaaaatatataaaaatatgaaatttaattaaatcaattttattcaaatcacataaacaaatccacgtggataacatggtcacattcacttcactgttatcaaataaaacttattaaaacatctttggctcaaaataaggtcgtccaagtttacaaaaggaaacaaattaagcagcgaaataaaataaagtaaaatagcatgttcagaacattatgcaattaaaacaaaatctcatgccccaatgtcacatcctatcagagcattatgtcacaacgtcctctagcacgaggttctttaaagtcgtccacctagtcatctgctcccatgaaaacaaggttcgagatcatcacaaaatctaaacacaaacaacacgtagggagtgagttatcatatttttaaataaaatatagataaacaaatacataagcaaaatacattataaaaatatttatcacatagttcaacttaatacaattcacgtcacttcatcactttatcatttaaaactcatttttcaatcatcaattacattacacatg

SEQ ID NO: 4912 - DNA, 329 bp, Glycine max
  Clone ID: jC-gmfl02220069a08d1
actagaacaaaaaagcaattaatttagaagaaagcaacgaataaagagggggtgttgtttttcactgacatggtaccacattgcatatacgcttgagtcttagtatagctgattcataacgcctatgaattttttattatgaaattggtgttggtacgtcttgaatcgagtgtgggattcatgtgtaatgtaattgatgattgaaaaatgagttttaaatgataaagtgatgaagtgacgtgaattgctttaagttgaactatgtgataaatatttctataatgtattgcgcttaagtatttggttatctatattctattcaaaaatat

SEQ ID NO: 4913 - DNA, 559 bp, Glycine max
  Clone ID: jC-gmfl02220069a09a1
cggaggcgcagagtagagcagcagagaagagagaaaacggcactgcagccgtagaaggaaaaccgaccatggtgcacgtctccttttacaggaactatggtaagacgtttaagaagccccgccgtccgtacgagaaggagcgtctagacgcggagctgaagctggtgggggagtacgggctgcggtgcaagagggagctgtggagggtgcagtacgcgctcagccgcatccgcaacaacgcgcggaatctccttaccctcgacgagaagaacccgcgccggatcttcgagggcgaggctcttctccgcagaatgttccgctacggactcctcgacgagactcagaacaagctcgattacgtcctcgccctcaccgtcgagaatttcctcgagcgccgccttcagacgctcgtcttcaaatccgggatggccaagtccattcaccacgccagggttctcatcaagcagagacatatcagggctgggaggcaagtggtgaacatcccatctttcttggtgagggttgactcacagaagcacattgacttctcactttacag

SEQ ID NO: 4914 - DNA, 457 bp, Glycine max
  Clone ID: jC-gmfl02220069a09d1
aatggaaaatcttgatactttaaaatatccaaattcacaaaaacataatatgtcaccacttaatattttctcaaacaagggaaccaaaggatgaaaatgtataacaaccaaaatcgattaggtaggcaaagtaaaaggtggcataagatctaatagcactagagaaagacataatgaacagtctaatcctcgtcttcctcgtctccgtctccacctgcggccttcttagcagcagccctttggtttcttctcttcactcttccagggcgtccgccaccaaggggacttgtaagtgagaagtcaatgtgcttctgtgagtcaaccctcaccaagaaagatgggatgttcaccacttgcctcccaaccctgatatgtctctgcttgatgagaaccctggcgtggtgaatggacttggccatcccggatttgaagacgagcgtctgaaagcggcgctcga

SEQ ID NO: 4915 - DNA, 502 bp, Glycine max
  Clone ID: jC-gmfl02220069a10a1
ctgagattcagatgatggcgagtgagtcgcaaaactgggtgttcatggtcactgcacagacaccaaccaacattgccgttatcaagtattgggggaaaagagacgaaaccctcatcttaccggttaacgacagtatcagtgtcactctcgatcccagccacctctgcaccaccaccactgctgccgtcagtcccgctttccaccaagatcgcatgtggctcaatggaaaggagatttctctttctgggggcaggttccagagctgtttaagggagatccgtgctcgtgcttgtgatgttgaggatgaaacaaagggtataaagatcacaaaggaggattggggcaaattgcatgtacacattgcttcgtacaacaacttccctactgcagcaggactggcttcatcagctgccggttttgcatgccttgcttatgcccttgggaagctaatgaatgtcaaagaagatgaaagccaactatctgctatcgcaaggcaaggatc

SEQ ID NO: 4916 - DNA, 544 bp, Glycine max
  Clone ID: jC-gmfl02220069a11a1
gcagcagcaacagcaacaagatcaaccttcggtggacgagaaatacacgcagtggaagtcccttgttcctgtcctctacgactggctcgccaaccacaacctcgtctggccctctctctcttgcaggtggggcccccagcttgaacaagccacttacaagaatcgccagagactctacctttctgagcagactgatggtagtgtgccgaatactctggtgattgcgaattgcgaggttgcgaagcctagggttgctgctgctgagcacatttcgcagtttaatgaagaggcgcggtccccatttgtgaagaagtacaagaccatcatacatcctggtgaggtaaacagaattagggaattgccacaaaattccaagatagtggctacacatacagacagccctgatgtccttgtttgggatgttgaaagtcaacctaatcgccatgctgtccttggagctacaaactctcgttctgaattgatattgacccgacaccaagataatgcggaatttgctcttgctatgtgcccaactgaaccctat

SEQ ID NO: 4917 - DNA, 472 bp, Glycine max
  Clone ID: jC-gmfl02220069a11d1
caaacagaaaatagaattgtatcaattaagtaacactaaccacaaatcatcgtcagatctacgttaatctaggttttccctactccagccccatacatgaatggttttaaaatgccatgaaacatccaccgcaaatgttaaattaaatacaacagcaataataatataactcatttttgcctacgacgtatgtcatttttcagtctttgaagcacacgccacaacatgagatttgaatttctccagctcggccaaaacctcatcttctggtctgtagatcaaatcactcatgcgccatatctgcaacgttccccctcctccagtactttcacagtcattagacacactaacaatcgtccatggatcatatgcattccaatggaagtcaacaactttatccctatgacctgcatgttgaaaaaacaaccctggaggagaacttattgattttccagatcgctctatcttttta

SEQ ID NO: 4918 - DNA, 578 bp, Glycine max
  Clone ID: jC-gmfl02220069a12a1
gcaaaggcagaaagagctgaagcttcttcgtgtgtgacaaagtaacaaatttcagcattagcttagaaaatggagttcgttcctgaagaaggcaagcaccttcacgaggattgctccactttgattttgcctgctctgtcgattggcaatgtggggcagctagttgcagatcttttgatttcatcaatgggttctgagagagttgggtatttggatgatcctaacgttttgccctgtgttggcaatgatgcttatggaccctttcctcaaggagacctggctcttcctcttgaagcttatgattccccttctaatgctctcactatcatccaacagagatcaccggtggttaagggtatgatgattgagtttgcaaaaaatatggctgattttcttgctggtagtggaaagaagcatattgctgttctctccagcttagattttggaaaatggcaaatagttgacatgtcaagtggtttgcagatttattacctttctagtttcaacagcaatggaacagatgaaaattgtgaacagcttgggtggaagacacttcaagagtatgacccttctcaatg

SEQ ID NO: 4919 - DNA, 266 bp, Glycine max
  Clone ID: jC-gmfl02220069a12d1
gaaaattataattaatataaccttcagaagacaaaatccccacactgcgtaaaaatatattgttacatttcacctctaaacgcacatcaatgcatgcaggtcatcgctgtttgattccaaaaaagagagaatattctaaaactataatttttatcttcagcagccatttaattttacaaattagtacataaatccaaccttagaagatggacacatctgggggtggtccatatacactcatccaagaaagtggaactcgccatttg

SEQ ID NO: 4920 - DNA, 538 bp, Glycine max
  unsure (1)..(538): unsure at all n locations
  Clone ID: jC-gmfl02220069b01d1
gacaaataacattattatatcaacatataagcttacaaatttccacattttcaggaaacaaatgaaggaaattcatcccagttttgacttctgattgagtgaagccacaagacacgtatcgaagttcccaaattaacacaaattgcttggtcagatgacccaaaaccaagctataacagacccagcagctagaccaaaaactaagaataatacactcacaatccctgcagtctctgcatgctgcaacattacaattttaggaatcagaatcatcaatgcactggttaggtagccattagtaagccctaacaggcaagtcagtattgtcacgggaatctcagtccggaagaatttgggaccatgcaagcaacctaagaagagagggaaaaacaacaatcttgctatgcaaccacctatggcaacttttgcattctgtangaggtaaactgcagtcagacacttgccaacangatcaaacacattatagccagcaattaggagaattggataccaatccttaagaattgagagtgaacat

SEQ ID NO: 4921 - DNA, 496 bp, Glycine max
  Clone ID: jC-gmfl02220069b02d1
gacaggcaaccatgcatatatatacttcataataagatgttcaaaagtcaggcccccaaggaaactgcatacataattaacaattaaagcaaacaactttggccacacttgcagaacacaacatcctgctgcattgctcaacagacaaacctaccaagacattgttaatttgcaaggggatctttcgttaatctatcttgtaggcccatccatgtttgtccaaaaatgcctccaccgcttccttaatggccaagtttggcactaactgtgatggatcaaggggttctcgtgtgattgggtcgaatttaccaaccttctgaagatgttcaagaatcacagctctctcatatgtaagtccacttggagtgataacaggatcatgaaaaatgtcgagtgtgattctacagcacaaataatctggcacctcagtaggtatgtcagcttctgcagctgtattgaagactctttctaaagcctctaattgttctgaatggga

SEQ ID NO: 4922 - DNA, 168 bp, Glycine max
  Clone ID: jC-gmfl02220069b03d1
cctacgagccccggggggggccacaccccacacacaaaaggggccaaaaaaaaggggcactaccgggctttcccccaaaaaaataagggcgggaccggcaatacgaagcgaaaaaaaagaaaaagaatagcccccccaatccagaagggctaaacaggggggataaaa

SEQ ID NO: 4923 - DNA, 440 bp, Glycine max
  Clone ID: jC-gmfl02220069b04d1
gccaaacgtagtgaacaaattttatgcaaaaaattcgaagttattcaaacagccgtgttcggacttcagactccaaaagtgctacaaattaaagagccttccagaaaaaatggctttcaacattagatacaaaataagtaaccttgtattcttccaattatgtgatgattaataagaaacaaatgctacaaaaccaagcctaaatgtctcatttcttgacttcctcatactcggcctcgggagcctgttcaccaccctgagaacctccggctgaggaaccgccactagaaccacctgaaatgtgctctccaatcttggagacagctttgtttgcagcatcaagctttgccttaatttcgtcagcattgtctcctgccattgctggtctcaaatccgatactgcattttcaatctctttggccacttcactggggatctta

SEQ ID NO: 4924 - DNA, 500 bp, Glycine max
  Clone ID: jC-gmfl02220069b05d1
gaccttaaacagttgaactttgaaaggagacacaaaatctagattttgctgctccaatattaaaagctggtttggtatcccttcaaatagacagataaacgaattatttatataacttatttatataaactcgtccttgaatttttacctttataagaatacatactgatctaaaagaatgttttttctttcctaattagaggtgaaaatcttattgatgaatttgcaaatgaaactcatcaaattttcacatctattttgaggacatctaccaaatagagacctaagaggtgaactcaggaggaagttctcctcgtaggaaaaatgagatcatggttagggctctctgcggttggtaacttggaaccatgtgcccagctcctcttacagtgattagtgtgagccctttgtacccaaccaagtatcctccaacctcattgctagaataccatggacgccatgttgtctccactggaagtttcatggaatttattgaatac

SEQ ID NO: 4925 - DNA, 590 bp, Glycine max
  Clone ID: jC-gmfl02220069b07a1
caagaccacagggcagaagaacaagatcaccatcaccaacgacaagggtagactatcgaaggatgagattgagaagatggtccaagaggcggagaagtacaaggccgaggatgaggagcacaagaagaatgtcgacgcatagaatgctttggagaactatgcctacaacatgaggaacaccattaaggatgagaagattgcatcaaagctttctgatgacgacaagaagaaaatcgaagatgccatcgagagtgctattcagtggttggatggaaaccagctagcggaggctgacgagttcgaagacaagatgaaggagcttgagagcatttgcaacccaatcattgccaaaatgtaccagggtgcaggtgctcccgacatggctggaggcatggatgaagatgttcctccatctggatccggtggtgctggccccaagatcgaagaagttgattaaattggttcattatttagatgggatgggcttgtgttggatctattccgttttttattctttatttaatttgtctagatattggccattatttgttactacaccaggatgggatggaaatctttttttggtttga

SEQ ID NO: 4926 - DNA, 347 bp, Glycine max
  Clone ID: jC-gmfl02220069b07d1
aattagattattccgtttttaaaacatttttctgctctataccataggaccagcccatttcgcacgaaaaacgtctatatcaaacatcaacagcgcagaaaaaactaaaaaggaacggcccaaaaaatgggaaaaaaaaacaaaaatttttaacaaaaaaaaaaaggggggaaaaccggaaaaaccattttaaaccaaaaaaaaagattatccaaaaaaccaaccgggagcgggggcccaaaaaaaggggccttgtgactaaaccaaaaaacaacccgcgcaaagcgacggagttgggtcctcccacgccccacccaaaaaaaaaacgcccccccccccccccgggg

SEQ ID NO: 4927 - DNA, 573 bp, Glycine max
  Clone ID: jC-gmfl02220069b08a1
ttccaatatattccattctctctgtgtatttccctacctctcccttcaagatgcagatcttcgtcaagaccctcaccggcaagaccatcacccttgaggtggaaagctctgacaccatcgacaacgtcaaggccaagatccaggacaaggaaggaatccccccggaccagcaacgtctcattttcgccggaaagcaacttgaggacggccgtacccttgctgactacaacattcagaaggggagtactcttcacctcgtcctacgtctccgtggtggcatgcagatcttcgttaagacactcaccggcaagaccataaccctagaggttgaaagctccgacaccatcgataacgtcaaggccaagatccaggacaaggagggtatccccccggaccagcaacgtctcatcttcgccggaaagcagctcgaggacggccgcaccctcgccgactacaacatccagaaggaatcaacccttcaccttgtccttcgtctccgtggtggcatgcagatcttcgttaagaccctcaccggcaagactattactctagaaagtcgaagctccgacacca

SEQ ID NO: 4928 - DNA, 456 bp, Glycine max
  Clone ID: jC-gmfl02220069b08d1
cacacattcataacaaacgtaggtgggatattagagtactattattaatgggacacaattgagttcaacacaaaccgaacttattttcaagggacattattacagacccattaaacatcaaagttcttcaaatgttttgggaacacattcaacattacacaacgagcttaaaaccccccacggagacggaggacaaggggaagggttgattccttctggatgttgtagtcagcgagggtccttccattctcgagctgctttgccagcaaaaatcagcctctgctggtccggtgggatgccttccttgtcctgaatcttggccttcacattgtcaatggtgtcagagctctccacctcgagggtaatagtcttacccgtaagagttttcacgaaatttgcataccaccacgaagacgcacaccaagtggagagttgactccttttggatgttgtagt

SEQ ID NO: 4929 - DNA, 555 bp, Glycine max
  Clone ID: jC-gmfl02220069b09a1
ctttcattggtgtggcctagctgttttctcaatgagaaagccttcatctctgcaaagcgcacttttgcgctttggggttcccttgttgcttgttatcaccttctgttatgctacttctactgctgcagcaacaaactcaagtttcagggaatgaagagctgccaaagacaaacctaaatgggcatgatgaagaagcaaaattcggattttttcatcataaaccaatattcaagaaacatattccaattccagtatataaacctgtaccaaagccatttccagtgtataaacctataccaaagccagttccagttccagtgtacaagcctattccaaagccagtgtataagcctattccaaagccagttccagtgtacaagcctataccaaagccagttccagttccagtgtataagcctattccaagccagtgtacaagcctattccgaagccagtgtataagcctattccaaagccagttccagtgtacaagcctataccaaagccagttccagttccagtgtataagcctattccaagccagtgtacaagcct

SEQ ID NO: 4930 - DNA, 574 bp, Glycine max
  Clone ID: jC-gmfl02220069b10a1
aaggggcaatgtaagggttatgaatcttgagagtcctgtgaagactgaagtggaggaagcttatgaaggggaagatgagcatgaagaatcaccttccatcaagagggagctctctgattttgatctccaagtcctcgaagttgctgcaagcaaaggaggatgtgatccatcaagtgaagagataaaataccctagtttatacgaaaaccaagctaacattcaattggaagacaaagaccatgaatacagcaaaaagagttgtgacataattcaaagtggacatgtcagtgatcctgggattggcaaagctgaattttgtgcttctccaaagctcaagcgatcctgctctgacctggaaagaagggatgtactaagggagacttgtcatctctttccatcttcaaagtcacagtcttttgaggatttgcaggggttatcagcacatcagatggttaatctagaaagccccaggtctgtgatgactcaccgcagtgctgatagagtgatgttgaaaaggcattcctcaagtcaagttctcccttctagaagtaaaagactgtggtggaagttgttc

SEQ ID NO: 4931 - DNA, 399 bp, Glycine max
  Clone ID: jC-gmfl02220069b10d1
ggaaaacatcaagctccacacactaattttggagacgaagaaaactgctttacatcaagttttaaaccaagagactttcaatggctagagcagtctcctttatgggataatcaaacccccatgataactaacggggtgaaacaaaacaacaccaattcccgcaaagcctttttattccacaaagggggttacaggttgaagcaagtcctgggtaaaaacaagtttgaaaaaaactcctccattttatcaagttttaaaaatactgatgaatgccgcttttcacaaacacctaaggaggtttagttgggctccttgacctgttcctgattttttgggaaacactagcactgtttttatgcacactggaacttgacccttcatggccgccaccttttttta

SEQ ID NO: 4932 - DNA, 580 bp, Glycine max
  unsure (1)..(580): unsure at all n locations
  Clone ID: jC-gmfl02220069b11a1
tgttgttcttcttcctcttctttttttgcttctgcaaagccagtagtactaccacctccaccacaaagtcactgtcccccccttcttcaccctccactacttcctcctctgacgttgagcttctcttgggaaagatcaaagcttcactgcaaggtagtaactctgacaaccttgttttgtcttcatggaactcctccaccccactttgtcagtggaaaggcctcatatgggtcttctccaatggcactcctctctcatgcactgacttgtcctctcctcaatggaccaatctcacactcctcaaagacccttctcttcacttgttttccctccggctcccttctgcaaacctctctggttccctccctagagagcttggagggttccctatgctccaaagtctctaccttaacattaactcattggagggtaccatccctcttgagcttggttatagctcctctctctctgagatcgatttgggtgacaatatgctaggtggtgttctttcaccttctatttggaactngtgtgagaggcttgttcccttaggctccaccggtattctttatctgggtta

SEQ ID NO: 4933 - DNA, 530 bp, Glycine max
  Clone ID: jC-gmfl02220069b11d1
gcataattgtgtgactatatttgatttcaaaaacaatagggactacctgatgcaaagagttatggagtaaaccaaaaattacaacattctctctagatcatcaaaaactagccttatattcagattcagctgagaaaaaggaaacacaaatattaagtaaaaatcactagttcgcttaagcatgttgaaagggaaggctcaaaatggggtaacacttccacttcttgtttctgtagggctgtataatgcagacctgttccttggtctattctcctccaactgcctcacaacttcatccatgcttggcctaacagatgccactggtgcacagcaccccattgccagttttagcgcctgcaccaacccatctttcatagggcttcttatccctttcaaaagctccacattaaacacttgcatcgtcgtgttcttcaaaaccgccactttcaccatcgaaggcaagtccacatactcgccatttattccaatcttcccaggcttcttccaatcaagaattcaagcagcagtat

SEQ ID NO: 4934 - DNA, 486 bp, Glycine max
  Clone ID: jC-gmfl02220069b12a1
tatcaaccctgctcgtagtcttggtgctgctatcatcttcaacaaggaccttggttgggatgaacactggatcttctgggtgggaccattcatcggtgcagctcttgcagcactctaccaccaggtcgtaatcagggccattcccttcaagtccaagtgattcaatcaaacggttcatgcttaatcaagttgggaacaacaacaacaacaaaaatcaagccaatgtttgtgggttttggtttcatttcattaagatgatctgcttatctcttttcttctttttaaaatttaaagtctttgtattttgtatgtaaagatgtaaaattatgattattaggtggtgcatgtgtcgcgtcatgggccaatgttatcctctgcttttaagttggaagaggcccaactcatgtgtgatgtacggctgtgattgtgtaatttaatttgcaaaatcaaaaataacaccagagtcatataaaaaaaaaaaaagaa

SEQ ID NO: 4935 - DNA, 470 bp, Glycine max
  Clone ID: jC-gmfl02220069b12d1
atatgactctggtgttatttttgattttgcaaattaaattacacaatcacagccgtacatcacacatgagttgggcctcttccaacttaaaagcagaggataacattggcccatgacgcgacacatgcaccacctaataatcataattttacatctttacatacaaaatacaaagactttaaattttaaaaagaagaaaagagataaacagatcatcttaatgaaatgaaaccaaaacccacaaacattggcttgatttttgttgttgttgttgttcccaacttgattaagcatgaaccgtttgattgaatcacttggacttgaagggaatggccctgattacgacctggtggtagagtgctgcaagagctgcaccgatgaatggtcccacccagaagatccagtgttcatcccaaccaaggtccttgttgaagatgatagcagcaccaagactacgagcagggttgata

SEQ ID NO: 4936 - DNA, 467 bp, Glycine max
  Clone ID: jC-gmfl02220069c01d1
caaacataatgtactttaatatatatccaaagggaggaaagcaacctaacagcacaacaccattgcttcacaccagaaaacacaataatggaaattctcaaaaagtaccccaaaactgcttatttttcattataagggtaattctggccatggaagtatgtaaatacttctttcactttaaaattccccactggattctttccatccaccatagctctcttcaggttcagcataatcctgctcctcatttttctcaacagtaaaagtgagagccaccttaatctctccacaatattcttcgtccttcacaaccttgtaagcagtttctggaatgctacccgcttcaaacactggatccagatgaatggttgccacgccaagacaatcatcttgactaaagttgtctttatccattatctttagattaagttcagatgcactgtcagagacagtgaatagaaagctct

SEQ ID NO: 4937 - DNA, 377 bp, Glycine max
  Clone ID: jC-gmfl02220069c02d1
aaacaagccttaaaagaatttttttttctcacccaataaatccaagaaattctgcaaactgaaaaaggggttttttactaaagcaaacttaaacaaaaacaacttccccttatttggcatctaccggggtaaaacaggaacaaaagccgctttttgatagaacacacctttgttttatattgaacattttgcacaggggtttatttttcacagcttttggaacttaaaatacttgcaaaggttttggaaataccaaactttttttttctcccttttttttggagatgacaaaggggcccgatcatgaaacaataatccacccccttggaattgaatcttgttttggggtgggaacgaggcccccctttttttatttt

SEQ ID NO: 4938 - DNA, 419 bp, Glycine max
  Clone ID: jC-gmfl02220069c03d1
gagagccatgatcacaattactactaccattctccactacacacaaaaattctcacaacgatgtaatcaaaagaatagtacattttcgaaaccacaaatgacactagctagaggattcatcaacagataacaaaacttagggagggcacatatttagaatatggcttcacacttatcctgttgcataatgtatcaatcaaaccctggaatctagggccatgatggtgctaagattcatggggtgcatgtactggtcagagccagtcatcatctgttggactatgattcggttagctttctccgatgggtgaaatggatcccaaaacgcgtataggtctctatttggacacaagttggaaaggggtgtgcagagtccaaccccattaaacgggccttgcccacaacaagctatctttgat

SEQ ID NO: 4939 - DNA, 420 bp, Glycine max
  Clone ID: jC-gmfl02220069c04d1
caatatgaacaatatacatgaatataagaaatatatgtaagtacacgcatggtcagttcatatccgaagggtcctaaccaaccacaaaacggtcgtctcagcggtctgaagtaaaacgtgataaacaacatttataaactgtaccagcataagcaatcaaacaaacacaacatatcaatatgacctattgggtttggaagatgatgaggttttggatttggcaaaatcaacaagatccttgaaaagggcatcttctggcttctgttgtttggttggggtggatgaattcagggagagattttgagtttgtcccaccaagctgtcataagaggaactggatccactacttgaatgagatacaccttgttgctcaaaaaactgttgtctttgattatactttgaaggtgggggccggatgat

SEQ ID NO: 4940 - DNA, 563 bp, Glycine max
  Clone ID: jC-gmfl02220069c05a1
ctcgctttctcccccgacgaggaaatcggtggccacgacggtgccgagaagttcgctgactcctctatcttccaaagtatgaacgttggcgttgttcttgacgaaggtctggcttctcccgacccccattaccggtctttctatgccgaaaggagtccctggtggttggtcatcaaggcctttggtgttcccggccatggcgccaagctttatgataactctgccatggagaatctctttaagagcattgaaagtatccgaaggttccgctcctcgcagttcgacttgatcaaggccggcttcaaggccgaaggcgatgttgtttctgttaatatggtctttctcaaggctggaactccatctccaactggttttgtcatgaatttgcagccttctgaagcagaagctggatttgatattcgggtgccacccactgctgatccagaatcgttggagaggcgcattgctgaggaatgggcaccttcatcccgcaatatgtcatttactttcaaccagaggcgcacacacgagataagtctgggaaaccaatcctcaccaaaact

SEQ ID NO: 4941 - DNA, 385 bp, Glycine max
  Clone ID: jC-gmfl02220069c05d1
ggaaacaaacatatttgtttcctttttattggtatggggcaaaagctacaacaaagtcaggggggggggtatttttcctctttattggtacataaaaaaaggccaaaaatgagaattaggtggggggaggggccacaccacttgctcataactaatttttggaggctccattttttccattatcatccaacgatgcatataccttaattattggctcggaaattttaatccctttcaaggattcatttttgtgcaaaaactcattgtggtcatgtaaaaaaacaggagtgtttgccataggggaaaatccaattgctggtaatccacgttcacggaagtagcgtgaatttgtagcggggggaaaaacctcgggcttaccaagttt

SEQ ID NO: 4942 - DNA, 609 bp, Glycine max
  Clone ID: jC-gmfl02220069c06a1
ctcgagccgattcggctcgaggagagagaggagcggaggagagaaaatgacgacgaggttcaagatgaacaggaagaagagaggccacgtcagcgccggtcacggtcgtatcgggaagcaccgcaagcatcccggtggtcggggtaacgccggtggcatgcaccaccaccgcatcctcttcgacaagtaccatcccggtttcttcggaaaggtgggtatgcgctacttccacaaactccgcaacaaattctactgccccatcgtcaacattgataagctatggtccctcctaccccaggaggccaaggacaaggccaccgccgacaaggcgccattgctcgatgtcacccagttcggttactttaaggctttgggtaaaggggttttgcctcagaaccagcctctggtcgtgaaggccaagcttgtttccaagatcgccgagaagaagatcaaggaggccggcggagccgtcgttctcaccgcctgattcttttggggtatttttatttacaaggattttgagatctgtcgttatttttgttttggctcttgcttaatctgctgaactggattagttaaatgtcccttttatattctcaaggcctggat

SEQ ID NO: 4943 - DNA, 441 bp, Glycine max
  Clone ID: jC-gmfl02220069c06d1
aaaaacgatataatccagaacattgagaatataaaaaaaaacatttaaactaatccagttcagacagattaaaacaagaaccaaaaccaaaaataacaacagatctcaaaatccttttaaataaaaataccccaaaaaaatcaggcggggagaacgacggctccaccggcctccttgatctttttctcggcgatcttggaaacaagcttggccttcacgaccagaggctggttctgaggcaaaacccctttacccaaaaccttaaagtaaccgaactgggtgacatcgagcaatggcgccttgtcggcggtggccttgtccttggcctcctggggtaggagggaccatagcttatcaatgttgacgatggggcagtagaatttgttgcggagtttggggagtagcgcatacccacctcttcgaagaaaccgggatggtact

SEQ ID NO: 4944 - DNA, 557 bp, Glycine max
  unsure (1)..(557): unsure at all n locations
  Clone ID: jC-gmfl02220069c07a1
cttaatgatatggtattgcagggaataataaaggaagagcaattggatacttttaacatccctttctacactccatccccatctgaagtgaaattggaagttcttaaagaaggttcatttgccattaattgtttagaggtgtctgtagtgcactggagcgcttgggatgaatggagtgttcttgactttgaatctgaaagcggatacaatttgacacagagcatgagggctgtggcagaatctatgctggttagccactttggtgaagctatcattgatgagcttttcagccgttaccaagaaatcttggctgatcgtatgtccaaggagaaaactaagttcatcaatgttaccatattattgactagaaaaccataagcaagaagtttgcatctaaagtttctcaaaaggtttgtcgttgtaattattgtgactgtttgcttgatttgttcttctttttctagcaaattataactacgagtattctggtgtacctttggtagtagagctttcttttatatattttctccattctgggtataaatattntattacgt

SEQ ID NO: 4945 - DNA, 424 bp, Glycine max
  Clone ID: jC-gmfl02220069c07d1
agacgaatcacgtatcgtaatttcacgtaataaaatattttataacagaatggagaaaatatataaaagaaagctctactaccaaagggacaacagaatactcgtagttataatttgctagaaaaagaagaacaaatcaagcaaacagtcacaataattacaacgacaaaccttttgagaaactttagatgcaaacttcttgcttatgggtttctagtcaataatatgggaacattgatgaacttagttttctccttggacatacgatcagccaagatttcttggtaacggctgaaaagctcatcaatgatagcttcaccaaaggggctaaccagcatagattctgccacagccctcatgctctgtgtcaaattgtatccgctttcagattcaaagtcaagaacacttcattcatcccaagcgc

SEQ ID NO: 4946 - DNA, 540 bp, Glycine max
  Clone ID: jC-gmfl02220069c08a1
cttaaagatatgttacttttttttttcttaaaattttggacatttttcttgcaactcttagatcagatagttgtattttgcaagggctaaacgtagttataaatgtgtatgacagaagatgtcccttttaaaatagcttacttataacaaggttgatatggcatctgcatctattgtgtaaggaggcaagtttattgataactggatttatggctataaaatagttatacaaggctccagagtgatttggaaatagtcagttgcttagtttttttaaacagctttaaattttggggtttaagagaaaagagttagcaattacaatctgatggcagtggaatcaacggctaagtgctattctctggttgtctggtattgtacttttgcctgtgcttaaatgctttgattgaaatgtgaacccccccccaccccccaaacacaatggttttaaggtttcaatctaacagtggaaattgaggtaaaaatattattctgagtgtggtgcaagccacctatgtactatttttcctttacttatgc

SEQ ID NO: 4947 - DNA, 497 bp, Glycine max
  Clone ID: jC-gmfl02220069c08d1
ctacgaaataataacgatgtttttgaaagtgaaacagacaatacagtatatattgattcagatatgcaaggtcgaaaagtagtgttcaaacagaagtactaaacatgtggatatgtaatagtcttcttaaccgtaggacctgagagaaaaatacatgttaaaattctctcagtattcaagggagccaattgatggtagtcctgaaacaatttcatgagaatctgcaccagtgctattcagcctctgtcctggacttggaccaagggattccagggcttgttctcccattttatggatatcttcaggtgaaagtattttgatataccatacattattgacaaatgattcccacggatcgtctccaaggagaagaacatcgttctccctgtcgacgaatacaagctgccagcctgatctaagagggtcttctaatttcccctcaaataccaaacatctgtgccaactcctccgcagctcatgataactgctgaaccggg

SEQ ID NO: 4948 - DNA, 562 bp, Glycine max
  Clone ID: jC-gmfl02220069c10a1
ggaaaacgaatctcaaacttcacaagtgtttgaggcgccatggcggatcggttgacgcgtattgccatcgtcagcaacgacaggtgcaagcccaaaaagtgccgccaggagtgcaagaagagttgccccgtcgtcagaaccgggaggttgtgtattgaggttacttcctcgtccaagattgctttcatttcggaggaattgtgtattggatgcggtatttgtgttaagaaatgtccttttgaagctattcagattatcaacttgccgaaggacttggacagggatactactcatagatatggtcctaatacttttaagctgcataggttgccggttccgaggcccgggcaggtgcttgggttggttgggactaatgggattgggaagtccaccgctcttaaagttttggccgggaaactgaagccgaacttgggtcgattcactaatccccctgattggcaggatattttgacctattttcgaggatctgaactgcagaattatttactccgattctagaggatgatttgaaagctatcatcaagcctcagtatgttgacca

SEQ ID NO: 4949 - DNA, 373 bp, Glycine max
  Clone ID: jC-gmfl02220069c10d1
catctaaaaaatgtaaggatttatttccacgaaaatttaaccctcaacgacaactttttccaaacagaaaacatttttttaaattaagtaacagggaaggaacgtaaactttgttacatactcaactgaaatgggcgataaactcagtctgacattatgaatgttcctttggacttaggacatcgaatgaaaaccatgcccaatataaactcatgtaattttcaaattcacccccccaagtcgtagcaaacctggggatgagtaactgcactaaaattaaggggaaaaatacaaaatgccccaaccaacatagggtttgcaattgcatgcaggctctttttttttttgagaaagatgcttttttcggcaaaaa

SEQ ID NO: 4950 - DNA, 565 bp, Glycine max
  unsure (1)..(565): unsure at all n locations
  Clone ID: jC-gmfl02220069c12a1
cagtttcggacactcactcccactcgctccgattaccgcaccattctgcgtcgccatttagggtttcttcgctcctctttgttggatcttcctcactttgcatcgttctcttcgattcgtaaaatttttcttgcttctcctgtcttggctcgagatccgggccaagcacagaagaatccgtttctgatttgcattttgtactcactggtttggcttgtttttttctctttgtataaatggcttcgagcgaggggtttctgaccgatggccagagggaactgctaaaaattgcaagtcaaaatgcggagaatctgtcttcgtcgccgaagtctcagtcgtccttgctgtctgaccatcatgtgaaagcccctgctggtggtaaggcacaaaccgctggaatagctgtgaggcatgtgcgtcggtcacactcgggaaagtatgggaaggtgaagaaggatggtgctggtggtcagggtactcgnggaaaattgctcgatacagatatcgcttctcacatagacctgcatgatccatattatgacagtggcgaagaaccctatcagct

SEQ ID NO: 4951 - DNA, 394 bp, Glycine max
  Clone ID: jC-gmfl02220069c12d1
gatactgaaaaatacaatatatgcccttctgaaatacctcttggtgcaatacaacatcctaaaaagctgttaatggaatgcgaccaacttaactttatacaatggctgagataacaggaaactctgtcggtgagatgattcagggaaaaaagagtaagtaaaaggaacaaaaaaataaaaggatcattagaagccagatttatccattatccatattcaccattcggtgggagctaaaggacaacacacatgagagaaacaataagacacaaacgtcctcaaaaagctgctgccgggggtaattaggcatctgtggcaggtgaatcaaatgagggtagaagccagccattcgactgagcatgctccacatagaagccaaatttctcctttgcgt

SEQ ID NO: 4952 - DNA, 543 bp, Glycine max
  Clone ID: jC-gmfl02220069d01d1
agaaagctcaaaatgatcttttatttaatattggaggtcgaaaggcctataagaaacagccacgtgagaataaaccgaaaagtcaccacaggttggggagcacatacaataaacattgaacaatcagaaatataaaaagctcataatgtgggacaggaacgactaatacaaaaggagcaatacgtaagcaaatccaagagagaaagtggtaactaaaagcacatccaaacccccaccgtggcttgctgagtcatgcgagtttggcagcagagaacatcctaagcatgcttagcaaactgatggtgaatgttggccttgtcagaattggaaagctgcacctttcgttgctgtgaggacaatatgtaaggatacataacagagtcctctttgtgagagtgatcaagtccaagtagatgccctatctggtgcatcgccgcagtctccaagtccaaaactccatcatctttagacagtgtggcgttttcacttggaagtaaccagcccatgttaccgttcagaagtaccacccctttcttactagaa

SEQ ID NO: 4953 - DNA, 423 bp, Glycine max
  Clone ID: jC-gmfl02220069d02d1
ggagaagacttttttacatattataaagcaaaagataaaaatgtagagaatcaaccacatgggtagtgttgcagttgtttacagggttcaaaattaatgaacaccttaaggacccacattagacccttgaatgtctaacaatcagaaccacaacgagaaaaaaaaattatatatagcacaaaatgtaacatggaaataaagcaaactatacattgcttacataaacatggttcatgccagccacacctaaacctccgaattttgttatatgctttactacttgccgcatcacaaaattctctcaaccgcggaggagagaagcagaaggtctaggataagcagaagcctttctaggggcatctgaaccaccatcgccaccattggtacggccggggccggaattgcgtacatgatgctgtttat

SEQ ID NO: 4954 - DNA, 416 bp, Glycine max
  Clone ID: jC-gmfl02220069d03d1
gaggttcaaacaaacaaaattgaccgttacaacttacagggtaccactcaattcgccattttctcaagtaaaagagccaagtacaagaagttcacaccatcaaaaaccctgcttttacacagaacaaaccggcaagcagaatactctctccctatagaaactgctctatcaagtgtgtagcacggaacacactgccctatacatcattatttataagaatatgcatagtaatgtaaaacttctaatcccgggattgtccatcgacactcttgtttcttcatctcgcttcctctgtggcagcgacaatgaagacatgactttggctgaggccacctttctcgctagtggtttccacttaagataactcttccttttctcttgctgcattctcaattgaaattgcctgcataagggaa

SEQ ID NO: 4955 - DNA, 407 bp, Glycine max
  Clone ID: jC-gmfl02220069d04d1
gaaataatatacattaattctcataatatacaattaaataatttaaatcctcataataataatagtcaaatagtaattaattaaaattcacgatttattaaaaaataattcaccaagacagtaacattttagaggggaggaggaattaatctccattattctcctctacaccaaaactttcattttactaaaaataaaaatcacacaatactgcacttacaattccatcatcgacgatcattcacgggcggttaaaccaacacgtaaaagaaatgatccgtcaccaattaatctctatatatttatcaatttatggttccgatgacgttgctaaatgcagaaggagtttgttgcactggtggcattttttgaggacccgcagctttttccatgtcagcgataatatt

SEQ ID NO: 4956 - DNA, 355 bp, Glycine max
  unsure (1)..(355): unsure at all n locations
  Clone ID: jC-gmfl02220069d05a1
ngtnantcggacattctggcattcgacgcgatagaggtgtgattctcttgctcgtaacgacgagcacagtgatgcgtgtcagtacaagtaggcacagacctacagagcgtctattgaggtagcaaggctgtactgagtaggcatcggttatgctctgttactgcccaatctacccgtaccgcttgcttcaatgtggagctagaaccgtcagtggactggagcacaatcgctctgtaaccctacggttccagagaagccttgctcgcgcaggggggcatgcggccgtgaagagccttggcgatccggtggcactggcggagccgcctgatagtgacggtctggtcggtgatctgcc

SEQ ID NO: 4957 - DNA, 241 bp, Glycine max
  Clone ID: jC-gmfl02220069d05d1
cataagatcgagaaggtcaaaaaaaactttcaaaagaattgggttaaaagcgattaaaatatgagcccaaaccgaaaatgacaacgaatcccattttgctttttagataaaaataccccatacaaaacaggcggtgcgaacgactgttccaccggcctccttgaacgaattattggcgctcttgggatcaagtttggtgtttaacacccgtggctggccttgaggaaaatccccttttatc

SEQ ID NO: 4958 - DNA, 579 bp, Glycine max
  Clone ID: jC-gmfl02220069d06a1
caccgagaaagtcgtactgattcctcttcatctttcgttaaagcgagtacttttcgttcttgatctgttggttacgatgtcgtattcaaggagatctaggtattctccttctccttctccttctccatacaagcgatacggtaggtctgtgtccaggtctctctcaatatcaagatccagaagccgttcaaggagtttatcaagagatgcagaaaatccaggaaacaatttgtatgtgacaggattgtctcctaggattaccaagagagaactggagaaacattttgctgctgaaggaaaagtgatagatgtccatctggtagttgatccttggacaagggaatcccgtgggtttggctttgtgacaatggagactcttgaggaggctgaacgatgtgtaaagtatctgaatcgctctgtacttgaagggcgtgtcatcacggtggagaaggctaaaagacgacgtggtcgaacccccacgccagggaggtatctaggactgagaactattcgtgctcgacgtcgctctccagttactctcctcgtcgctcttctagctattctcccttcagaagaagc

SEQ ID NO: 4959 - DNA, 481 bp, Glycine max
  Clone ID: jC-gmfl02220069d06d1
aagggaaagtacgaaattagataatctatactgagtaacataatttcaatcccatactacatgaaataagatcaggtggtttttagacaagtcctgaacggaaccaaacgaaaactccatctagaactgcatacatataccacactaatatattatccactataagcctaagatgttaagccatataggaccaacaaatttcaagttgaaggagaggtagaccttggagtatttgacctcgatactgatcttgaacttgcattcacactcgagcttcttgagtagcgtttctcacatttgccactcctcttagagcttcttgaatggctcctccttgacctgggggacacatttcgtgagttgcttctctttgaaacaggtgtagcactccgtgagtagctccttcttgaccttctccttggcctgggtgaggcactccgagaaacagacctgaacggtgcctttcatattaggatcatca

SEQ ID NO: 4960 - DNA, 637 bp, Glycine max
  unsure (1)..(637): unsure at all n locations
  Clone ID: jC-gmfl02220069d07a1
atgggttgttgccaatcatcgacgttgctgagagtgggagagagggagactcaccctgaaaaggaaaaggaaaaagaccaccagaggctctctgaggccgagaaagagggctttgatttctccttctctgagttctcgctggctgagctgaaggcggccaccaacaatttcagctctgactatatcgtgtctgagagtggggagaaggcacccaaccttgtttacaagggtcgcctccagaaccatagccgctggattgccgtcaagaagttcagcaagtctgcttggcctgatcccaagcaattcgtcgaagaggcttccggcgtcggcaagttgcgccatccaaggctcgctattttgatcggtttctgctgcgacggcgatgagaggcttctcgttgccgagtacatgcctaatgatactcttgccaagcatcttttccactgggaaactcagactattgagtgggctatgcggctgcgagtcgctctttacatcgnccaggctttgcattattgcagctctgagggtcgtcccttgtaccatgacttgaatgcttaccgtgttctcttcgaccaggaaggcgatccccgtctctctttgctttgttttatgaagaacaccnggatggtagagt

SEQ ID NO: 4961 - DNA, 477 bp, Glycine max
  Clone ID: jC-gmfl02220069d07d1
aaaataaacagaattatgtagattatgaatttatgcaggcatcacataatatcatgaacaccatggccttgaccagtgaagagttagaataacctcaataaacacctggttgacagtaagtaacccagtaggcatcaaccaatcaatttcattaacaatggaaaaattaccggtattccttcccaatttagagtgcataagcacagttttcaagttaaccgattcctataagatggtgaaataaaatgcatgtgccatctactccaccacttttgtatttctctgacacattttatactcattcaaacgttagttttgcttcccagctcaacctttatacagaacttgacaccctcaaattagcccactgcataaaactatgatcctctcgctcctctttgcctcttctcttccaatgcagctgcctcatttaacatatcagccgcatccttgtgcatgtccagttttgcaagagca

SEQ ID NO: 4962 - DNA, 487 bp, Glycine max
  Clone ID: jC-gmfl02220069d08a1
gcactgtttcacagttggatggtggggctattgcagagcatcctttgaatacagttgattcattgcagataaaaaatgatttgaggcatcctgctacgacttcaggagatggtgaagccatttcatcgagttgtgtagagaaaagtggtgatggtagatctcagataaatagctcccctacagatttcttacaaaatgctgaaggtccatgcttacggcctgaaatcaaagaggatacttctgaaactatattgccagataaaaaggagactaatgtagacctcggaggttctgactctaaattaaagtcatgcactttctctattgatgatgatcagaaggttgatcacatgaatgagggaaccattgagaatgaggaattgctggttccaaaagctgttgcaagtgttaagtctgaaaatgaatcatgtgaaaagcaagctgagttatcctcaggcgtggataatgagaaccagatttgttcaga

SEQ ID NO: 4963 - DNA, 462 bp, Glycine max
  Clone ID: jC-gmfl02220069d08d1
gaggctaacctgtgcatatatcaatagccagaatgtgataagtgacaaaattccaaagtcaagactacagcaataactatatatgtaacaaaagttgaaaaaaaatgatttaaagaagacaaactagcctcaagcttagccagttcatacatccaatcctttccttccaaatgctcgagagcggattgggctcggtgctgttgcagaacagtcacagtcaaacacttgatgccaatttctctgattctaggcggcattatcacacctgctggtttcagttagatatctacacaggaaaaacatttatctgcaagcgacaatctgggagcagattcatacaaaacaactgcatcagaggccctgatcgctttatcaagtcagaacttgagaggcacattagcaacaagggtagcatctttgcttgttgccatggctaacactcaaaataatatccccattttt

SEQ ID NO: 4964 - DNA, 498 bp, Glycine max
  Clone ID: jC-gmfl02220069d09a1
ttttgtgctgccactaataaaactgcacttcaacttcaaattttcaacctttccccattcacgtcccttcttccttccaatgttcccttccatcataaattctaatcaatctcgtgaccagcaacaacaaagcaaaagggagaatggttagcaggaagtttcaaggcagagaacttcattccagggcttgttataggtttcatttttgggttgttgctggatttatcaaagcccggtagaaatcacttgtccaagaaaatttgctcatctgccagacctcaacaacagcaaatctcagtctcaagcaatgctgatcaagaacttaaaatggttctggtcgttaggcaagacctaaagatgaaatctggaaagattgcatcccaatgtgctcatgctgccactggcatgtacgctgaattaatgcaaagtgatcggtatcttttgagaagatgggaacagtgtggccagcccaaaattgtgcgacttgcaggaatcaac

SEQ ID NO: 4965 - DNA, 408 bp, Glycine max
  Clone ID: jC-gmfl02220069d09d1
gggacattgataaaaaaagataatgaacttcctgccttataaggaaagaaagtttacccacccctcccaattttttaataaaaaaaagtttttagtttattccccagccccttaacaggatgctgaaaaccccttccatttgaggtttaaaacaggaaaggggtctgattaaaaattattcctttttaacccttccaatttttaaaccccccttgcccttttgcattggccccaataagggtaagggatcaaaccatgccggataacccgttaaaacacaaaccaaggggcaacaagctcgggggaattaacatattaatggtggcaaagcaggggcgattttcctgtccctgaatccacaaaaaattttgggccaagtccaacaacaagaacggttttttattcttc

SEQ ID NO: 4966 - DNA, 549 bp, Glycine max
  Clone ID: jC-gmfl02220069d10a1
tggactagcaacattactaaatacattcgtgtacgatatccatatgttaaagccgtaacctatggactatcacacaacagttctgctactgattacctttgtgagtgcaaccattattctcatattcattcggagattattcaaccaaacctcagaatcagaatatgcaaagcttccaccagggcctcgtccatttcctatcataggaaacatcttggaacttggcacaaatccacacatagcactcaccaaattctcaaagatttatggacctcttatgacttttaaacttggcagaataaccaccatagttatctcctctcctcaagtagccaaagaagtactacttgaaaatggtcaagtcctttctagcagaacaattccacattcagtccatgcacttgaccatcacatatactctactgtgtggctgccaccatcagctcaatggaagaaccttaggcgagtttgtgcacaaatatattctctccacaattgcttgactccactcaaatccttcgccaacaaaaggttaaagatttattggat

SEQ ID NO: 4967 - DNA, 526 bp, Glycine max
  Clone ID: jC-gmfl02220069d10d1
atataaaattaatcgcgtttgattggagtagcttgaactcgaagaggctgaaccttctttaatgttatcgcatattgctcctccatgttcatgtgttctggaattaacccatcagctagcttccattcaaagttgtgtacaagggatgctactattaaatgcattgtcctgtgagctaatggcaatcctgggcatatccttttaccagctccaaagggtatgagcttaaaatcgtgacctttaaaatcaatctcacatttcaaaaatctttcgggcataaaaattgttggattctcccaaatggttggatctcgtcccatggcccacacatcttggcaaaatgtgtgcatttttaggcacattgaagccagatatgtttaccatttcatcacacttatggggtactaaaagtggacctgtgggatgcaagcgaagagcttcctttaccactgctttgaagaatggcaactttaatgatttgtgattcttcaaaggttacaatcttttcaattggtttagataactt

SEQ ID NO: 4968 - DNA, 484 bp, Glycine max
  unsure (1)..(484): unsure at all n locations
  Clone ID: jC-gmfl02220069d11a1
ggctctttcacaccaattttcctatctcctcttcctccttctaattctcttatcttctctcccaaacatttcccaagccacctctcgtgccccaaatcgcatgttagctttggttcaaaaacaaccacttgtcctaaaataccacaaaggtccccttcttaagggcaacattacgctccatttgctatggtacggtacattcacccccacgcaacgctctatagtcatcgacttcctcgaatccctaacctccacgtcatcacctgaatccccttcagtttccacgtggtggaaaaccaccgagagctacaggggaggcccctgcaccctcgtcgtagggaaccaaatcctcgacgagaattactccctcggaaaatcactcaaaaacgacaacctcgtagctctcgcgtcgaatccgaaactaaattcggcgcccggngatcgcgtcgtccacgtcatcctcaccgctgctgacgtggccgtg

SEQ ID NO: 4969 - DNA, 373 bp, Glycine max
  unsure (1)..(373): unsure at all n locations
  Clone ID: jC-gmfl02220069d11d1
atccaaattatctattattatttattacttattaccacacataaactaacattacaataaaatacaaaaaaaatgactgtccgaggcaaacttgcaaatctctctcttagacacaacttgcaaatttctctcttctctcacacgcacacaaacccacattctatcgtcactttttttttaattttttacactttacattcatctcacacgagtgtcttgcaggtggaggtgagtgggtcccacatcgccggcagaaggaacttccggccgcgcatccccaccgcgttgtagctcacccccgtcgcgttctccgccagaacgtccccggcgtagcctggatacgnccccttcccgaaaatcccggtgcacgccg

SEQ ID NO: 4970 - DNA, 607 bp, Glycine max
  Clone ID: jC-gmfl02220069d12a1
ccctcctcttcacacattttcttagctctctccaacaatccctctcgttcacactttcagattgtgtgaagatgggggctggtggccgaactgctgttcctcctgccaacaggaagtcagaggctgaccctttgaagcgggtaccatttgaaaaacctcagtttagtctcagccagattaagaaggccattccacctcactgtttccagcgctctgttctccgctcattctcctatgttgtttatgacctcaccatagccttctgcctctattatgttgccacccattacttccacctccttcccggtcctctctctttcgtggcatggccaatctattgggctgtccagggttgcatccttactggtgtttgggtcattgcccatgagtgtggtcaccatgcattcagtgactaccagctgcttgatgatattgttggccttatcctccactccgctctcctagtcccgtacttttcatggaaatacagccatcgccgtcaccactccaacacaggttctcttgagcgagatgaagtatttgtgccaaagcagaagtccagtatcatgtggtacttctaatacccttatcatccaccaggcagagt

SEQ ID NO: 4971 - DNA, 303 bp, Glycine max
  Clone ID: jC-gmfl02220069d12d1
aaaaacagaatatgataacaacttggattcaagaactggaacaagaataagcatccccacaatcttgagaaacttagtcgacatgcactgattgcaaaacatggggcaataatcaaactgttcagagatgctatatcttattctgcaaacaaaaacgctatgctactttctagatactactaccaacatcagggttcaacaaaattattcccaataagcaagcatgatactaaacagtcacaaaggaaagtttaaaccatcccacctgacggacaagaagcccccggctacattaatcatcac

SEQ ID NO: 4972 - DNA, 356 bp, Glycine max
  Clone ID: jC-gmfl02220069e01d1
cccccacaaaaggggtttaatatttgggccataaaaagaatcccggccttccaggatgccaaaagcttttagggaacaagacccttttttttaaggggggttttaacagggggccctccaaactaaaataaagctcccgaaatgttaacttaggaacccttttgggcccaatttttatacttggcaccctttaaacccagtaccctgggggaactttgctgaaacgggaatcccttggagctttgaaaacaagaactcccggggtagcttttctagaaagggtcttatcaaaacccaacgaaatacccatgaaataaagaggggtctatgtacccccgaacaaaaatgcctaaact

SEQ ID NO: 4973 - DNA, 467 bp, Glycine max
  Clone ID: jC-gmfl02220069e02d1
gaacacacagaagaatatcagctacatgtatttcccaattcccagcactcacaagagaagtttcatacaaacaaactaaaaaatcctccgcaccgcactgttacctatcctcaatatgtcaacagcgggaatgaaaagatagattatacattaatgtcttttaaaaatggaaggatcacgtcctatcctataatacaatgccttattccaacatgctagcccattgcatacttctgagtccagctcctagcagttgtttcatacttggacctgtctgtcttgtacatatgagcaatttcaggcaccaaggggtcatctgggtttggatcggtcaatagggagcaaatggagagcaacaccttagatattgtcaatgctgggctccactgttcctttaagatatcaagacaaatactaccattgctgttgatatttgggtggaaaaacttagtcctaaatgcaacctt

SEQ ID NO: 4974 - DNA, 344 bp, Glycine max
  Clone ID: jC-gmfl02220069e03d1
ttttttttttttttttttttttttttttttttttttttttttttttttttttttttttttttttttttttttttttttttttttttttttttttcccccaagcccttttggggggggggaaaccccccggtaaaaaaaaatttttaccaacggaccggggggggtcccttatgaaagggacggaacaaacttttttcaaagggaaaacaaaacccaattttggcctttccccctaagaaaacaggtccaacgggaaaaaaatgaaaacgggaaccaagggaaaaggggggggggtcggctaacttacccccaaaaaaaaaacttttttttttatgggggggggg

SEQ ID NO: 4975 - DNA, 467 bp, Glycine max
  Clone ID: jC-gmfl02220069e04d1
gatataaatttaaactcatttgcgtgttggaaacacctcaccaagcatgcaatagtttagtagtaaatgagtgacatattttcactcatccttctcaaactctatctttatgttctgaattgtgatgcttacattctcagatcgtggtaccaatgtgaccaaaacactatcatcattttcagcatccaagtcctctaacaaatctgttattcccagtgtcaagctagttttgatcttcttgtccatgttcatgttcgaatgggaatgacccagagtcgaaaagcttcctgcaaactctgtgctctctggtccaatatcctcgacatcttcatcagtaatatagacatcaaacttcacattatcatccccatcaaactcaatcccatcaatcaccaacacttcttcctcttcctccttgtccctcttgctcctcaactgctttggccttttaactagtagggttacct

SEQ ID NO: 4976 - DNA, 509 bp, Glycine max
  Clone ID: jC-gmfl02220069e05a1
gcaacaccaacacctccaccacccatttgcaacgactcaccaaaatcgaattttgcaatcaacccatttcaattcacccttccaatcgttcaacgcacccttcaatttcgcttccgagtgattcctccccccaaattcagaattaaggttcggtctctggtggcgcaaccatgccggagatcggccaggcggcggtggctgcggcggcggatgacaccgccctgttcggaaaatacgagctgggccgcatcctcggctgcggcgccttcgccaaagtccactacgcgcgcaacgtgcaaacggggcagagcgtggccgtgaaaatcatcaacaaaaaaaaactcgccggaactggcctcgccggaaacgtgaagcgcgaaatcacgatcatgagcaagctccaccacccccacatcgtgcgccttcacgaggtcctcgccaccaagaccaaaatcttcttcattatggacttcgtacgcggccgcgagctgttcgggaaaatctcaagg

SEQ ID NO: 4977 - DNA, 484 bp, Glycine max
  unsure (1)..(484): unsure at all n locations
  Clone ID: jC-gmfl02220069e05d1
aacccaagcaattcaaatttcctttgacttcattcacaggcaaccttcgactcaggttcttgttcctgtttttcttcttgatgttgttgttcttcttcttgatgttgttgttcatcctcactactattactatacgacgtggttgcaccaccaagcaacaatggcttcaacctctcctcccacacacccctcaccgcggcgtcgcctcccctcttccttacctccaccaccgcgagctccgccgtgagccggtaaacctccaccccaatcccaaacctcccattaaatccttccaactccaccccacactccttctttcacctcacgnccatcctcggcgnncgccccgccttcttcgccgncttcaaaaccctctccggcggctcccgcgtnaccaacctctccccccactcccccccaaacatcccggacanatccaaccccgaagaaaaagatatcaaatcaaaagcgttcaaattcacca

SEQ ID NO: 4978 - DNA, 373 bp, Glycine max
  Clone ID: jC-gmfl02220069e06a1
cgggtttctatctgctgtttgtggtccatcaagaagttccaagccacggtatttgggtccagatggtgtgaaattgtgaattctcgtctctgcctgctcgacaacttcgttcgtatatgttctttttattcaagttatttattgttgtgaatgtctgggagtgaacagattcttgagtgagtatttaaactgtaagatatgggaagataaaattcaaataaagccatttatggcctatggggcgtgtaaataataccctaggaagtttgtaattatagttcatggatatttctttgcaattcttaacattgtgtttggtcagaagtgtaaacaaaaaatttgaaaaaaaaatagaaaataaagttattttatt

SEQ ID NO: 4979 - DNA, 373 bp, Glycine max
  Clone ID: jC-gmfl02220069e06d1
aataaaataactttattttctatttttttttcaaattttttgtttacacttctgaccaaacacaatgttaagaattgcaaagaaatatccatgaactataattacaaacttcctagggtattatttacacgccccataggccataaatggctttatttgaattttatcttcccatatcttacagtttaaatactcactcaagaatctgttcactcccagacattcacaacaataaataacttgaataaaaagaacatatacgaacgaagttgtcgagcaggcagagacgagaattcacaatttcacaccatctggacccaaataccgtggcttggaacttcttgatggaccacaaacagcagatagaaacccg

SEQ ID NO: 4980 - DNA, 525 bp, Glycine max
  Clone ID: jC-gmfl02220069e07a1
cttagctatttcttacctcttggcatggccattcaaatgtcttcttttgtctttgtttctcttacaattttattttgcttctcttccttggagaagagttttgcctttcaaacaacaaaggaggacacagaaagcaacaatcttcatcaatatactcatcttgttcacctcagctcactccttccttcatcttcctgcagctcttctgccaaaggtcccaaaagaaaagcatcattagaagtggtacacaaacatgggccatgctcccaactgaataatcatgatggcaaagcaaagtctacaacaccacacagtgagattctgaaccaagacaaagaaagggttaagtacattaactcaaggatctcaaagaacttgggccaagatagtagtgtgagtgaattggactcagttacactaccagccaagtctggtagccttattgggtctgggaattactttgtggctgctggtcttggaacacccaagagggactttgcactcatctttgacactggcagtgat

SEQ ID NO: 4981 - DNA, 396 bp, Glycine max
  Clone ID: jC-gmfl02220069e07d1
aaaccaaaaggaggacctttaatttggtttttttcaacaaacttttttttaaaaccgggggcgggggtcctttttttttccccccttacaatgggccaaggggaggccaccggcggggggggggggaaaatatccccccccccttttttttttggggcccaaacttttttttttttaaccccccccttggggggtcccttttttttttaggggccgggggccccccccttgggaaaaagggggcccccctttttttggaaggcccggggcccaaaaagaggggtttttttttcccccccccaaagggttgggttaattttaaatgtgggggggccccagaacaaaaccaaattttttcccccccaacaaaaaaccaaacctttttgggtttggggg

SEQ ID NO: 4982 - DNA, 135 bp, Glycine max
  Clone ID: jC-gmfl02220069e08a1
cgaccttattttttacattatcttttaaatcataggttctcaataaacacattgacctaaagcgctacatctacaacatacagggaggacaatacttgagcccgatctatcacccaagatcttgaaagtcaattt

SEQ ID NO: 4983 - DNA, 151 bp, Glycine max
  Clone ID: jC-gmfl02220069e08d1
gtggttcttgttgtcttattttttcttctgtctttaaattagtttcaaaataaggggtctttctgattttttgcaatctatatttttctatttaattttttaaattcgtaatttttattttgcgcatatataaatattaaatttattatta

SEQ ID NO: 4984 - DNA, 566 bp, Glycine max
  unsure (1)..(566): unsure at all n locations
  Clone ID: jC-gmfl02220069e09a1
ctttgatagtttgattagctctaataaggttaaggaccagagagagaaagagaaataagaagaaaaacacaagatgggttattggaagtctaaggttcttcccaagatcaagaaggttttcgagaagaataagcaccaagaaagctgctgctgctgaggccaccaagtcctttgatgagtcaaaggaggaatacaacaaagcctttgaagaaaagaagactgaacttcaaaccaaagttgttgaaatatatgaggcttcatcaactgaaatcaagagtttggttaaagaacccaaggaagctggtttgaagaagaactccacagaagtccagaagttcctagaagagctggttaaaattgatttccctggatcaaaggcggcatctgaagcatcttcaaagtttggaccagccttggcttcaggttcagttntctttgtgtttgagaaggtgtccactntcattgctacagaagaaaaagaagttgaagcccctcctgcagtagaaactaaaacagaagaagaaacagtagtgtngtcaaagagagggagacagtggttgaagaag

SEQ ID NO: 4985 - DNA, 415 bp, Glycine max
  Clone ID: jC-gmfl02220069e09d1
gaaccaaactaaacgtcacaattccttgactgaaaaatgaataatattacaaaacgattcatcataaaaacattaattgacatgcatatcaatcaccaaatctgcaacaatatcaaactaagcagcacaaaaccaattttacacaggaataaaagaataagggaatggtatgtgacaattttggactatttgcaaactaaaaatgcccgtatatgatcttctgcatcttcatgaagcagctacatatatatagcttctgttcaaaacgaaattttcaaggctttgggggttctgctggttcaacaggtttttcttcctctttagcagcagtctcagcttgtttttcttccacttttttctcatcacttgcctcgcctgcttggggattttcctcttcctttttttcttcttcaac

SEQ ID NO: 4986 - DNA, 612 bp, Glycine max
  Clone ID: jC-gmfl02220069e10a1
gttgatttgtacaagtttgatccatgggttcttccaggtaaggcagtgtttggagagaaggagtggtacttttttagcccaagagacaggaagtacccgaatggttcacgaccaaacagagtcgcgggttctgggtattggaaagcaactggaacagacaagatcatcaccactgaaggtagaaaagttggcataaaaaaagcacttgttttctacattggcaaagcacccaaaggctccaaaaccaattggatcatgcacgagtatcgccttctcgattcttcccgcaaacacaacctcggaaccgcaaagcttgatgattgggttctatgtcgtatctataagaagaactcaagttcacaaaggttgaggctaattttttggctatggaatgcagcaatgggtcatcaccttcttcatcgtcccacgtggatgacatgctgggatcgttgccggagataaatgaccggtgcttcaccctgccacgagtgaactcactcagaacaatgcaccagcaggatgagaaattcgggtctcgaacatgggatccggtttttctcgatcggttacttgaccagaaaacccaagaatgggaatatgatgcatgacttt

SEQ ID NO: 4987 - DNA, 434 bp, Glycine max
  Clone ID: jC-gmfl02220069e10d1
agcaaaggggggacatattttcattacatgttaatcaggttgtctacaaggatgcatgggacactagccaaataaaaataccaatatctaaagttctaaactaaactttggaaaatagttgctatgtattaatgctttgaagcacaacgtgattcatgtttaggcaataatgtcttacaaagcaattacttttcaacatgcattgttgtggttggggggcaatcaccattgcgtcctttcttagtttcataatgggtcaaccgtcctttatcttgttctagccgaaaagtatgaccaaaattgcaatttttcctttccaagcgggaatcaataacacaaaccataacaatggtcatagaattcaaattaaactaaaatccccaattttttacacaattacactttttgatccttcactttacttcctaaccccg

SEQ ID NO: 4988 - DNA, 550 bp, Glycine max
  Clone ID: jC-gmfl02220069e11a1
aaaaagttagattccagtaatcagccagagcaggaatttctttctcaggtctccatcgtatcaaggctaaagcatgaaaacgttgtcgagcttgttaactattgtgttgatggtcctttccgtgcccttgcctacgagtatgctcctaaaggatcccttcacgatattctacatggacgcaaaggtgtcaagggtgcacaacctggtccagttctctcatgggctcagagagttaaaattgctgttggagcagccaggggacttgaatatcttcatgaaaaggcagagattcatatcatccatcgttacattaagtctagtaacatacttctttttgatgatgatgttgcaaaggttgctgattttgatttgtcaaatcaagcccctgatgcagcagcacgtcttcattctactcgtgttcttgggacctttggttatcatgctccagaatatgcaatgactggacatctcacttaaaaagtgatgtttatagctctggagttatactgctggaactcttaaacgggcgtaaaccagtggatcatacact

SEQ ID NO: 4989 - DNA, 436 bp, Glycine max
  Clone ID: jC-gmfl02220069e11d1
ggagaaaaaacctttttttgaaatagtaaagcaactagacatgtgatgtacatgacaagtaatattataaattcacttgtacacgggttattggaaaaacaaacaaacaaatccaaattaagttttcaaaccataaacttaaccatttatgataggctcttgccacctaccatcactattttttttatatcagctataacatgcttagttgagatacaaatttaataacgcaaaatatactttaatactatatgcttcaaattatgtaatactgacacgtgtcacaaggacaattggtcaacgcactccagtctgaaagaagaaatgaatgattttggaatttacatgtttttattacatcttgggtgcttcctttgagtgaacagaacgagtattcagtagaggctgtagagctttcactataatgctcatattt

SEQ ID NO: 4990 - DNA, 547 bp, Glycine max
  Clone ID: jC-gmfl02220069f01d1
gaatgaagtttaattaatacatcatgcagaatggataccatctcacaaattatgattaataagaataagaatcaaaattaaaatcaaataaactggataccaaccataaggcccgcgacctggtatacgaaactttcattacattaatgggttgttgttcatagggtgggagagaaacaactatgtacagcaacaactacaaggtgggattgttttaaaaaaaaaaaaaagcaaggtcgatatcaccctatatcacctcactcaaaaacacaattgattaaatactagggattgtataactgggcaggcatatactactaattccgggatttccaaaattggacggatactactcttttaatgccatcttatatatttgatttgaagcagtcactgataagcagcagtcagcctcgatttcatcttcaagttatgttttccaactggatggatggcttcatgacagttccttactttccatcccagaatctgaaagctatggaaatcaatctactaatcataggcgtcaggccatttctgaattgac

SEQ ID NO: 4991 - DNA, 477 bp, Glycine max
  Clone ID: jC-gmfl02220069f02d1
gacaaatcttgatatataaaattactggatatacaagtttaaatgatggcatatttcgttccaatacaaacattgatccagtaacttggaggatacaaaacaatgcgctgaattttcaagtatcgacacatgtcatttgttccctatagcttattgcacatagttgacggtgagcctttcttttttattctcctgagtcctgaccacataaagaataccaatcttgaattgatgctcctgtattctaccatgactcattttcaattcctgtttttgttacacaacacttgctttagccattcttttctggccccgagtagctagtagctcagaatcctgtacaatagcctgtgcacaaagcttcccagaaagaacagcgccttccattgaagctaaatatttttgttttgtgtaatctccagctaaatagaaaccttctaaaggagatctttgtaagggacgacaaggttcacaatt

SEQ ID NO: 4992 - DNA, 330 bp, Glycine max
  Clone ID: jC-gmfl02220069f03d1
aaaattgaactacaagtgttccttatgcttctatggataaaaataaattacaaaatctcccctttattcagtatcagaatctgggtctccatccacaatatcaggaaaatcatcttcatccgccagtgccttatcatgttccaattgaaaagcaaattcctcaaaaatattagagcctgaggttctatgccataaactactactcggagaagagaatttgaagtctttattaaccgagcttccatgtcttgattccatatgactggcttcattatgaggaatggagttgtctgaaacaatcttctcagacactttatcatcagctacatc

SEQ ID NO: 4993 - DNA, 96 bp, Glycine max
  Clone ID: jC-gmfl02220069f04d1
aaccaataaatttgagacatctacttctatagtgaaaatacggactacaaatcagtttcaaatgacaaccatcaaatttggaacatacatttaaac

SEQ ID NO: 4994 - DNA, 510 bp, Glycine max
  Clone ID: jC-gmfl02220069f05a1
agcgccaccaccattatactctctgttgctaatcatggctagcaaattggccttcacactgacatacccgcttccacttacaccaatctcttccttgtcctcctcttctgcttctcgactccaccttcttcaattcaatggccgccacatatgccttcgccctcggctatttctgttttctcccatggccacagccgatcaagacaaggttgaggaagatgctgccgttgttgatagtaaaatcctacaatattgtagcatagacaaaaaagagaagaaatcagttggtgaaatggagcaagaatttctacaggcactgcaagcattctattatgaggggaaggctattatgtcaaatgaggaatttgataatcttaaggaagaactcatgtgggaagggagcaccgttgtgatgctaagttctgatgagcaaaaatttctggaagcgtctatggcttatgtgtctggaaaaccaatcttgagcgacatgagtctgatgagttgaaactc

SEQ ID NO: 4995 - DNA, 342 bp, Glycine max
  Clone ID: jC-gmfl02220069f05d1
aaaaaaatcttttttttttttttttttttttccccccccctaaaaaaaaaaagggggccccccaaaaaaaaggcaaaagccccaaaggggcccccaaaaaccaacccctggaaaaaaaaaaggcccccaaaaaattaaaccacagggggaaaaccccccccctacaaaaaaaaaggggggcccaaaaaaccccccccaaaaaaaggggggggggaaaaggaacacacggtttcggggcccaaaaaaaaaaaaatgcccaaaacctccaacggggggggggcacattcaaaaaaaaggaaacatgccccaaaacggcaccccattaaaaccgccccccccccg

SEQ ID NO: 4996 - DNA, 581 bp, Glycine max
  Clone ID: jC-gmfl02220069f06a1
atgaatactcgaagtgtaaagttgaagaggcaatgtctaatgatagtattcacaaagcaaagttgcgagagagtattggttctgaaagagtagcacaaatcctcagaagatcaccaaggtcaagtcaaaaaagtatggacaatggtcaagcaaacactagtcaatatacagtcagaaaggatgacataaacattggccacagggatgacagtccaccagagggaaacactgctgcatttcagactattaagaggaaggtcaagacacctcagaaacatgagaaaaataattatgaaggagaggcattgaaagcccgaaagtcacctagagatttaagcaagaaaaatgctcaaggagatgcaggtgaatggacagcaggcaagaagactgataaccattcaagcaacagcaaaaatgtgaaggtcagcaatattcctcagtcagtgggagcatcatgttatggctttaagaaagaaaaatctgaagagatgtttcagtgtggccagatatgggcaatatatggtgatagggatcatatgcctgatacttatgctccaataagatgattgaatgcactccta

SEQ ID NO: 4997 - DNA, 175 bp, Glycine max
  Clone ID: jC-gmfl02220069f06d1
aacataatatctgttgtaacaaaataaaaaaacagagggaaaaaaacacgaaaaaaaaggacaagggggacaaaaaaggcaaaaacccagccaaaaggaaagagagaaccaaaaactgatgaaggaacaagccaggacaacaaagggagaagaagaaaaacagtgaggggaaaaa

SEQ ID NO: 4998 - DNA, 508 bp, Glycine max
  Clone ID: jC-gmfl02220069f07a1
actcataacacaaagcacaaagcaaagctcatccttgagttaaaaaatggcagcagcttcttccatggctctctcatccccatccttggctggcaaggccgtgaagctgggcccatcagccccagaagtgggaagggtgagcatgaggaagaccgtcaccaagcaggtctcctcaggaagcccatggtacggcccagaccgagtcaagtacttgggcccattctctggcgagcccccgtcctacctaaccggcgagttcccaggcgactacggctgggacactgctgggctttccgcagacccagaaaccttcgccaagaaccgtgaactcgaagtgatccactccaggtgggccatgctcggagccttgggctgcgtcttcccggagttgctgtcccgcaacggggtgaagttcggagaagccgtgtggttcaaggcccggtcccagatcttcagcgagggtgggctcgactacttgggcacccaagcctgatccacgctcagagca

SEQ ID NO: 4999 - DNA, 470 bp, Glycine max
  Clone ID: jC-gmfl02220069f07d1
gtaaaaagcaagtaacattaagttggattcggatacacaagataattcacattatctgaagtacttcaccaaacacaaatctaaaaactctcaaaagtcatttcgttctttgacgctcactttccggggacgaagttggtggcataggcccaggcgttgttgttgacagggtcagcaaggtgatcggcgaggttctccaatggaccctttccggtgacaatggcctgaacaaagaagccaaacatagagaacatggccaatcgtccgttcttgagttccttcaccttaagctcagcaaaagcctctgggtcatcagcaaggcccaatgggtcgaagctgccacctgggtagattgggtcagtgacctcaccgagggggccaccagcaatacggttaccttcaacggcacccattaggataacttgtgtggcccagatggcgaggatgctctgggcgtggatcaggcttgg

SEQ ID NO: 5000 - DNA, 556 bp, Glycine max
  Clone ID: jC-gmfl02220069f08a1
aatgcccactttttttcttccaacgctcctcctccttctcatagccttcgccacctctgtctccggccgccgtgacctcgtcggagactttctccggctgccctccgaaactgataacgacgacaacttcaagggcacccggtgggccgtcctcctcgccggttccaatggttactggaattacagacatcaggctgatgtttgtcacgcctatcaaatattgaggaaaggtggtctgaaagaagaaaatattattgtttttatgtatgatgacattgcattcaatggggaaaacccaaggcctggagtcatcattaacaaaccagatggaggtgatgtttataaaggagttccaaaggattacaccggcgaagatgttactgttgataacttttttgctgctttacttggaaataagtcagcactgactggtggcagtgggaaggttgtggacagtggtcctgatgatcatatatttgtatactatactgaccatggagggtctggggtgctcgggatgcctgctggtccctacttatacgctgatgatccgatg

SEQ ID NO: 5001 - DNA, 499 bp, Glycine max
  Clone ID: jC-gmfl02220069f08d1
gaataaaaacacacatcatattactatgtgttgtcatacatgcattgtaatgagtggatattccaaagcaattggtccctttatccctccttaatccttatgccgtaaatggcaccatcccttgtaaattgtaattgcttcttcagaaatagaattatacaaaggtagttgcaatatctatttgccaaactataaatgtaaagacccttcttcccaatcctagtagtgtcccaattgtatttacaaaggtgggacaagatatgtatatacaagtacaaccatgtaacataatgtaacaataatcatactttggtctttactagtgcacattacagggagttattatgcactgaaacccctttgcagagaactccagggattggaaggaatactgacacaagcttgtgctgaagcctcagccatttgttcattctttatccctacattgcagatgtttgcaaaggacctcatgtgtttcatcccgtattgagacaaggat

SEQ ID NO: 5002 - DNA, 513 bp, Glycine max
  Clone ID: jC-gmfl02220069f09a1
taacaattgaagagtgtttgacgactcagagagcacattgcattggcgacaccgcgagcgacgacggaaattgaattgctcgtgcgcgtcggtgcgtgatcgatcgaaggacgaacgatgtcggagatggcgagcccagatcccgagggactcgacggagtccgcatgacgtggaacgtgtggccccgtacgaaggttgaatcgagcaagtgcgtgatccctctggcggcgacggtggctctgatccgtccccaccctgacatcccccgcctccagtacgcccctctccgctgcaagacctgctcctccgccctcaaccctttctcccgcgtcgacttcaccgccaagatctggatctgccccttctgctaccagcgcaaccacttcccccctcactaccacgccatctccctatctacaattccctgaaccctttacccgtcttactcttcctgctagacacctgcctcatcgacgaggagattcacttcctcaaatgcgtgcttcgtcgtg

SEQ ID NO: 5003 - DNA, 401 bp, Glycine max
  Clone ID: jC-gmfl02220069f09d1
aaaagtatccatttccatagagatgagtcctatacgcttaattcacaatatacaatacaaaacagtaacaagagaatgatatcaaactcaacatgacaaaatggctttcgttactttgctacctggggaacatataaaagtaaaagaactatataaattaatccagctgaggaacccaaattttcagatctgggccaagacaaatggaaaaactgagtcaaaaatatctccctcatttgctattatgctgctgtagcagtggtgggggctcttaactcgattttctatcctttctttccgcaatacccaaacttaacaacatacttttgaaccctttattttctccacaaagaaaaatcgatcagaaccctaaagaattatgttttaggtcttccttattc

SEQ ID NO: 5004 - DNA, 553 bp, Glycine max
  unsure (1)..(553): unsure at all n locations
  Clone ID: jC-gmfl02220069f10a1
gttcttatattcaattcaggtcactggtggacacggactaagctttttgacgtgggctggtattttcaggttgataactcactgaagcttggaatgacaattaactctggtttcaacacagctttactcacctgcgcatcttgggtagagagtacaattaacacaaacaggacaagagtatttttccgcaccttcgaatcatctcattggagtggacagaatcacaattcttgcaaagtgactaaaaggccttggaagagaactaatcgcaaagagagaaacccaatttcaaatatgatcaataaagttgtcaaaagcatgagtgctccagtaacagttatgcatgttacaccaatgactgcatatagaagtgatggacacgtgggcacttggagtgaccagccatctgttcctgattgtagccattggtgcttacccggtgttcctgatatgtggaacgaaattctactctcgtatctgctaccaaaataaggagcanattagcatgagaggtaccaacatgttagaccttatatcatttaagccttatata

SEQ ID NO: 5005 - DNA, 423 bp, Glycine max
  Clone ID: jC-gmfl02220069f10d1
gtgaatgccaattatttgaaatcactatacaaacattattcatttccaatgtacatttggtaccccccggtgacgttaaaggctaacaggttaatcctgattgctgagtacaattgagtaccaagctatatatggcttaaatgatataaggtctaacatgttggtacctctcatgctaatttgctccttattttggtagcaaatacgagaggagaatttcgttccacatatcaggaacaccgggtaagcaccaatggctacaatcaggaacagatggctggtcactccaagtgcccacgtgtccatcacttatatatgcagtcattggtgtaacatgcattactgttactggagcactcatgcttttgacaactctattgatcatatttgaaattgggtttctctttttgcgattagttctct

SEQ ID NO: 5006 - DNA, 522 bp, Glycine max
  unsure (1)..(522): unsure at all n locations
  Clone ID: jC-gmfl02220069f11a1
caaaaaacagattactagaagcactatcaaaaatgtggcaacaagaggcagcttcaagagctgcaatggaaaatggaacggaggaaggacttggagactcttctgaatcagttcctgctgcttttcctcaagacacgcgaatggaggaaactcatgaacctgttaggaacaatccccttcccattgctcggcgctaccaagatcagatggttccaagcatcacttcttccttgttgagagtggaagaggaagaaacgtcttctgatcttcgaaactcagcagaagagagcagcagagctgaagtgccagtaactgcaaatgcacaacaaaatgcaggagttgcattgaacgaacggatgttgcagaccactaataggaatacacaaacccaatacaatactacgatggacctgagaaatgtagctgatgattctgcagtagaatcttcaagtggtaccaggagagaaagggatggaggcttagttccagtatggtctccaccagcttccagntactcagaac

SEQ ID NO: 5007 - DNA, 496 bp, Glycine max
  Clone ID: jC-gmfl02220069f11d1
aaataaagctcggatcataattaatatatccgccttaagtgaaagcacaaatctgagtttattagcagaccaaagatcctatgggggctctttctccctcactacacaaactatactatacagcaagttgcaaatattgtacaagaaagcaatagggactgcagatgaacttccgtatgaattgaaatttccatacacattggaggtcagctactgataaaagagtaggaaattaaaacatgtgtgtccaatgtggcttcaacaccccactttctctcaagtctcaacagaagagtggtatcgtaacttccacctccctccatctagtctaattgctttatatatgaattacccagtttgaggtagctgcttccaattcagcatttggtgagattgaggatgcctttgcaagtaagatgaactgcttgttataccattttcatctcctacaaattgttctgagtaacttggagctggtggagaccatactggaact

SEQ ID NO: 5008 - DNA, 337 bp, Glycine max
  Clone ID: jC-gmfl02220069f12a1
cccgcctccccaccggccccaggcagcgaggaaattgaattgggtgcccccgtgcccgctcctgctaatgaagtggccgttgaggagcctgttccagctgagaccaccactagcatcgcctctacccttagagtgcctgctatcattgttgtcatcgctagcttcttcgccttctaagctgctaccttttacgagcttttcttatatgtgttgtgttacaccaccttgagtgttgtgtttgtgaaatgactgtgtgttattgaatgaatgaattaacttaaaaaaaaaaaaaaaaaagaataaaaataaaaaaaaaaaaaaaataaaataagataag

SEQ ID NO: 5009 - DNA, 266 bp, Glycine max
  Clone ID: jC-gmfl02220069f12d1
caaaaacccccaggttttttaaaaacacccccccttgggggggggaccccccccccttttaaaaaagctcggaaaggggggccccttaaaaggggaaaaaacttgggatgacaacaatgtttgggggcccttttagggggggggggattcttggggggggtttagggggaaaagggtccttaaggggcctttttttataaggggggggcccgggggcccccaaataaatttcctcccttcccggggcccgggggggggggggcttt

SEQ ID NO: 5010 - DNA, 482 bp, Glycine max
  Clone ID: jC-gmfl02220069g02d1
cttaaatgatcatatgtttttttaaaagaaaaattgtaatcttgaccaatgacaattcatgttctacagtacagcccagattcctcctctcaatacttttttagcaaacattgaaccttggaacaggctacaagcttgtggacttgtggtcattaacgtctataggtgtgttgagtcaatactttcattatttacaaattccatagcggagaagtgggcggtggctgcatgtctgaaactcgttttggtcaccaaattatgtacgtgtgaattaatcaacaattaacctttgaaatgatgaaccacaatgtataatggaacctacactcgagggattagttgctgttgttagtttatgattggacttgccatttaaaaaattgggatcggtttacgaagtaacttaaccagaacggcaaaacatgatccggaaaatttccaaagatcattattggcgcttcctttgatacagcgaataacca

SEQ ID NO: 5011 - DNA, 407 bp, Glycine max
  Clone ID: jC-gmfl02220069g03d1
cgacactcaaactttcaaatactttatttgatatacttaccaacgagttaacagataaaatgccacaagaccttgaagtatcaaaaaaattgcccacctacgaacaatagatctcaatttcatttggaaaggatccataggatttgccccttaggacattcattcccagttctatattgatattagaaattttgcttcaacgccatgaaattattggaaaaaagagtctccctttcctttctcacctttttggtatgcataatcccctataatgacaaaaaaatttaacttattctatgagaacatagtatgcctaatcagttgtccaaggatcgctctctgcaatgacttcagaaggttcataaacttctggctctgaactttcttcacttgtgcttgaatcagca

SEQ ID NO: 5012 - DNA, 526 bp, Glycine max
  unsure (1)..(526): unsure at all n locations
  Clone ID: jC-gmfl02220069g04d1
gagaagtggccttcattaaaaatgtaatatgtagatacagaaccaacaaggagataagtggggaaacaagaggaaatatgtttcatggggaagtttgtgaggaagagaatgatatagaagttacagagaagagaggaggaaaaaagctttatgaacattgtggataaaattcagatatctgcttgctcagaagtaggtttcatagcagacacacactaagaggcatataactagaaatgactttcaaattttttcatccattgagatatcccactttttcgatcaaagcctggatatcagcaccgctactcccctcagttgcctcgacgatgttggggctgtccaatggcgtgacatctgaaagagggtagcttctgttattatggagttgactgattgcactgcttcccactcccttcagtatgacacttttgtgtaggccaccaagaagtccttcgtaatctgtgtcaccgcattctccaacgaacaccaccatctttgacagttcanaaccccatcgaacata

SEQ ID NO: 5013 - DNA, 580 bp, Glycine max
  Clone ID: jC-gmfl02220069g05a1
gacgccgtcgaaaccctaaacgaatccaccgagaattccaatcccaataccaattcccccgacctcgccgtcgttctcttccacccgcaccatgcggagattcaccttatcgcacagggagtcgccacgcgctgcaccaagatcgaaccctcttcaaactccagaaactccgtgtatttccgacaggtgttcgcggcgttcgtgaagcgcgtggattttaaggttgtgaagcgcgtggtgataacgagcgaggagtttcgtaggtttgtgatgtcggaagcgaggaagtcgaggatgcggtcgatcgaggagaaccagtcgcgaataatggtcgttgcgggcggtgatagtttggagaaagtgatgggtgaccgggcggtgatggagttggtgaaggacaagaaggtggcggcgtttagagagttgtgggagatggtgtgcgacgattcggaccgcgcgtgttatggacctgcggaggtggagcgtgcgcgtgagatgaaggccattgagacacttctgataaccgatgatctttatagggacgaagattgtgagacgagaaaaagtacgcgagtttgtg

SEQ ID NO: 5014 - DNA, 385 bp, Glycine max
  Clone ID: jC-gmfl02220069g05d1
ctcacacaatgcaaacaataatatttagaacacatatatacacaaacccagataattacatgctgtagcaacgacaattcacattctccctggcttcatccggagattatataatcaacaattggcgaaattaaaaagacattaattaaacatgacaaacaaataactaaaaccaatatgtacaataaatcagcacccatttacatcttcgagttcaggcaagggaaacctgagaattgccgcaacacccgtgagttgagcgagttgcggtgcataaacatgcatcgacgaatacaccaaagcctttccttcaccctctttcaccgacttcaccaaactcgcggacttttttctcgtctcaacatcttcgttcctataaagatca

SEQ ID NO: 5015 - DNA, 385 bp, Glycine max
  Clone ID: jC-gmfl02220069g06a1
gtctatgctggcgagacatgtacaaatcacttgggctgagcgcgttcattcagcgtcagaagatcgtacatcgatgggaaaagcgctatgaactaatgaggacgattgatcaatatcgagcgtggcattagtatcaatagaagaaattcatgggcttaacgagactaactcatctgcttcagacgtttcatggtttcatcacttccatttcacgttttccggatcttgacttggaataagatcatagaggctcctagatgcttggattgtacctctgggtggaggaaactttgtgtatttttaaagaattgacaagggctaatgccaatggatataagggatatgtcttatgcacctgaaagtaccagatccttaccttacccta

SEQ ID NO: 5016 - DNA, 275 bp, Glycine max
  Clone ID: jC-gmfl02220069g06d1
attacaaggacaaacattttcctgaagcccaacagtaatggttattttaagccccaattttcagaaaccttgggaaatatggctcaaaaattcaaaaatctccaaccaccttaattccctgacgtatttataaaccttgctaaaacgctgaagggggaagaaaaaagctaaccccgaacaattataaatcaaatttgccccattgtctcagctctgggggaaggtctcgccgacttcgggcccacatgtggtctattattagaggccccctttgg

SEQ ID NO: 5017 - DNA, 545 bp, Glycine max
  unsure (1)..(545): unsure at all n locations
  Clone ID: jC-gmfl02220069g07a1
cttggatccttagttctttagttctccttctcctgcgagaaacagaactttcagaagcggaatcgctcactattgatccgattccaccgtcatcggatctttctgcagccaccgtctatcgcacttcgttgccgtcattggcgccggaattctgaatgttaatgaatttgtgaagtaatgatgagtggaagagctatccaataacatgacatgaactgcaaattcttgtatacttgaaggttaagacagcttaaacaatacaaggatgttttcgttgctttatggactatggaagtacttgttcagcaagatggagcttcatgtactcattctggggattgacaaggctggcaaaacgactttgctggagaagatgaagtcggtgtactcaaatatagaaggcattcctcctgatcgaattattccaacagtgggattgaatattggtcgcattgaagtggcaaatagntaacttgtgttctgggacctaggaggtcagcctggtcttcgctcaatatgggagaaatattatgagaggcacatgc

SEQ ID NO: 5018 - DNA, 379 bp, Glycine max
  Clone ID: jC-gmfl02220069g07d1
ggggtacaacccaaggggccctttgcatatataccatatatgctccgaataccaagggcaagtacctggaacaatatgggagagcagtgcttatacaatggtacagataggaaagtaaattaatacagtcaaatagaaaccggaccaattacaatttagggttgacaaaagtatgcccggaggcagaagcaaaaaacccttcgggacaggccattattttacagattggttttacaagggatgttaaaagaaaaattgttttaaaagatactggagaggggagactgggccttttatgaaacgggtgtgttacaaattaaaccatggcgttaaatttcaagggtcagtttaatgcgacaccaagttatttttttacctt

SEQ ID NO: 5019 - DNA, 532 bp, Glycine max
  unsure (1)..(532): unsure at all n locations
  Clone ID: jC-gmfl02220069g08a1
gtgacgccacgtcaccgcaagatccattcgtttggaatcatcgttccacccaccttggttccatccatcttcaaaaagcaaagaatttgagtaatgggttttgaaattcaagtaatttgagtcgtgggttttgaaattcacgcgatttgggacgtgagtttttgaaattcgaggccatttggttgatgggtttgggaggaatctgaggaaaattttcaatgtcggagagcgatcagcgtcgtcttctcggggcttccgaggatgacgtggagtctggagggtcggaattggctttggcggtcgtcaatggcagcagtggcaacaacaacaacaacaacaaaggttttagggatttgttaaggttgtcgggtcaccgacacagtttgaagcgcattgagaaagaagaagatagagatagagacagggataggggtatagatagagatagaagagatcaaaatcggcatctccacgatgtggatcttgattcttctgctgatgtgcttggggacagtgcacctnctgaatgggc

SEQ ID NO: 5020 - DNA, 405 bp, Glycine max
  Clone ID: jC-gmfl02220069g08d1
cccatcgtattccgtagttctttgcttctcaagagttactttacacgctgcagtgtcctaaattatgcaaaagaatctcaagttatgatttagacttgtgggggttggaaatactttcttccttatccaataaccattattttggcactagaatatacatgaattatatagtctcacttttgaaggcaaccaagggagcttcttgctacaacctcactatttccttcataagagcaacaaaaaagattgactacagaattagtgcccatttgttgttttcacagccaaattgttatctgtcctattttgatgggctgtctgcctgtgattaatatctttcctgagacattgccatagtgcatcataatgaagaagaccaacaattctcctcttaatttctctact

SEQ ID NO: 5021 - DNA, 559 bp, Glycine max
  Clone ID: jC-gmfl02220069g09a1
tattgatatatgtgtgtatttcctttgggcttgaaactcaaaactataataatgggttcttcttctcctccggacactagcaagagcataaagctagagcgatacaacagctacatcaggagactcaacagcaccaaactcctcaacgcctcctccaaactcctcttccgtgccactatcttagtcgcactcatcctcgtcttcctcttcaccttcaactaccctcccctcgccccagacttcacctcccaccgccacctccactcccactcccacttcctctcctcctcctcctccttcgcctcctgggagaagcaggtccgccactcctccacccctcgccgccccaacggcctcaccgtcctcgtcaccggcgccgctggcttcgtcggcagccactgctcccttgccctcaaaaaacgcggcgacggcgttctcgggctcgacaactttaacagctactacgatccctccctgaaacgctcccgtcaggcaatgctctggaaacaccaggttttcatcgtggaaggtgacctaacgacaccccttgcttgagaag

SEQ ID NO: 5022 - DNA, 427 bp, Glycine max
  Clone ID: jC-gmfl02220069g09d1
atatataccccgatatttatattatgtataattgctacaccaacatgcatttggatccatggacacggaccaccacaataattaagaaaaaataatagtaataattgaagaaaaaacaagaaaaatgatccaaggtaggtatttgaattatttgtttttctttgtttcttgtaaaaacaaaaacaagggcatgtggtgtgaggataattaaggcttgggtacgtacgtaggtgattattcattgtcaaggtgatattccttttttagcctttgctggaggccgtaataaccgaggtaccacttgacgaacttcctgagaccggtggcgagatcggtggtgggattgtaagagaaatccctgtaggccaagctgacattggcgtgtgtgaagggaacgtcgccgtttgatggcatcttaatgacgtgc

SEQ ID NO: 5023 - DNA, 514 bp, Glycine max
  Clone ID: jC-gmfl02220069g10a1
cgactgaaaccctaaatctgaacaaagaaagctttccgcatctctcgttgcgtttcgtttcgttgaagaccagcggcgtcaccgaccggagcaacctcgcctccctcacagaacttaaaaaacccgactcttcaaatttactctacttcataccgaagctccatagtgaacaggaactcagaaacaaatgccattggatatcttaatcttgtgactgaaaaaatatataatgtctgaagaggctggatctatgttggtagtttatgatgatccctccgaccaacgctcactatctttggatgatgcaagcagcacagaggagtcacctgatgaaaccaggctctccttggaaacaacaaatgatgctattccatatattggtcaaaggtttgccactcatgatgctgcttatgaattctatagtgaatttgctaaaaggagtggcttctcaattagacgtcaccgtacagaaggaaacgatggtgttggaaaaggacttactagacgctacttt

SEQ ID NO: 5024 - DNA, 352 bp, Glycine max
  Clone ID: jC-gmfl02220069g10d1
ataaaaatagcagatatattgcaaatacaaaaatgcgtatgaacaaatttactatacatttcttgtcattcacttaacatggcattaaccaatctacagaaatttcactgccgaagttgatgctaacaaacagcttctatcacccttcaaattgtctcaatctagcatgagaaatccaataactaagctttctcataaacagtttggtgtaactcccattcattcaaccagagactaccaactcaaccatttcttgtatcctggagtcaaagattcctattgatggatgaaatatctcggccaacttgtaacgaaattggttgtctcttatgcgagacagaaggaggggtac

SEQ ID NO: 5025 - DNA, 593 bp, Glycine max
  unsure (1)..(593): unsure at all n locations
  Clone ID: jC-gmfl02220069g11a1
atgcccactttttttcttccaacgctcctcctccttctcatagccttcgccacctctgtctccggccgccgtgacctcgtcggagactttctccggctgccctccgaaactgataacgacgacaacttcaagggcacccggtgggccgtcctcctcgccggttccaatggttactggaattacagacatcaggctgatgtttgtcacgcctatcaaatattgaggaaaggtggtctgaaagaagaaaatattattgtttttatgtatgatgacattgcattcaatggggaaaacccaaggcctggagtcatcattaacaaaccagatggaggtgatgtttataaaggagttccaaaggattacaccggcgaagatgttactgttgataacttttttgctgctttacttggaaataagtcagcactgactggtggcagtgggaaggttgtggacagtggtcctgatgatcatatatttgtatactatactgaccatggaggtcctggggtgctcgggatgcctgctggtccttacttatacgcggatgatctgattgaagtctgaagaanagcatngctctggacatataaaac

SEQ ID NO: 5026 - DNA, 420 bp, Glycine max
  Clone ID: jC-gmfl02220069g11d1
aaacaataattttggcatcataaattcttccggaataattatacaaaagtgaccagggaaaacccgatctgccagttgcccactgaataaaaacacacatcatattactatgtgttgtcatacatgcattgtaatgagtggatattccaaagcaattggtccctttatccctccttaatccttatgccgtaaatggcaccatcccttgtaaattgtaattgcttcttcagaaatagaattatacaaaggtagttgcaatatctatttgccaaactataaatgtaaagacccttcttcccaatcctagtagtgtcccaattgtatttacaaaggtgggacaagatatgtatatacaagtacaaccatgtaacataatggaacaataatcatactttggtctttactagggcacattacagg

SEQ ID NO: 5027 - DNA, 586 bp, Glycine max
  unsure (1)..(586): unsure at all n locations
  Clone ID: jC-gmfl02220069g12a1
gtcttgttggtaaagaaagaaagagaagagaagaatcgaagacgaagatggaggacgcatcagcatcaaagttcattccacaccaaatcggaggggtccaaaacgacgcgcttcgattcggtctccatgggagtcaagagcgacatcgttggttctcaccctcttcaatcttcactccaatctacaaggagaatggatgaagcgatgaagaggcaatgcaaagttaacctgtacggaactgcttttcccatgaaggaggagcttgacaggcaaatcctgtccaggttccagcggcctcctggaccaattccttcttcaatgctgggtttggagactgttacaggaagtgttgatcactttggttctgaggattgtctaaatgacccccgtgagtcagagactttccggccattagacatgcatcatgggatggaagttcgccttggtctatctaagggaccagtgtacccaagtattatataattaaatttgactgttattctagtaccagaaaacagtattttgtgatcgaagcttctggtattcattaaaatggaagtgtncgagggattctcatatgtagtcg

SEQ ID NO: 5028 - DNA, 443 bp, Glycine max
  Clone ID: jC-gmfl02220069g12d1
tttttttttttttttttttttttttttttttttttttttttttttttttttttttttttttttttttttttttttttttttttttttttttttttttttttttgagggggagcggggggacccccaaaaaaaagaaggggtgtttaaaaaaaacccgggcccccctttccgggggaagccccccaaaaccccgggattttccccccccccccccggcaaaaaaaaaaaaaccccccccaaaccatatttaaaaaggggaaacgggggggaaaaaaattttaccccaagggggggggggcccaaaaaaaaggccccaggcaaaaaattgggttaaaaaaaaaaaaaacccccttttttttgggccccaaaattttttcgccccccaaggaggggaaaaccccaccccccaccccccagggggaaaaccccgccccccccctttt

SEQ ID NO: 5029 - DNA, 509 bp, Glycine max
  Clone ID: jC-gmfl02220069h01d1
aaatcagaggtttctaatcaaaacattgaactcaatagctacctctacaaaatacaggaataataagaattgagaacaatatatacacaaaaatatcagaatcaatttgttaaaaaatttagcttctacaggctgagtttagacgaaaaaagtaaatgaagaaagaaatgaaatcttggtgggttatcgatgggcaatggattattttctcaaattcattattgtagctagatgtctaggattgcttcaattccaaccccagctgatcatccttcttagtccttttctctctctatagccctcctgtagagttatcaatttgagattgatcagtttcacaaacttgtcaatcttcgtcatcagagctggcatcatcactactataatcactagtatcactttctccaaggtccaattaactggctgcacttgaataacttctggttgcttgggctgaggaatgtgaggttgtatttggtgctctgcaaatctcggtattttgagcgagt

SEQ ID NO: 5030 - DNA, 330 bp, Glycine max
  Clone ID: jC-gmfl02220069h02d1
cattcactaagactagtctctgagagactttattttgtcattttgttgcctactttcagtccttttaggaactagtattgattaataaaaataaataaggaatgaacaaaattcaatttactttttaaatacatgacttttcccaccaccatttggggatactgtataaatattatagccatacagctgcagctttcagggaaagaaaatctgaaattttgttggtataaaagcccggctgtatggagttgttagggctttgaagcatggccagtgtggtgacccctgaaagcacaagaagagttttgcaaccaccattttgtccaaaca

SEQ ID NO: 5031 - DNA, 239 bp, Glycine max
  Clone ID: jC-gmfl02220069h03d1
agacaacttcaaacatagatagcacttaaggtagatttacacatagcagatatatataaccagctattattgaagatttttaagcaacactgaaagaacttgctgcactctccacaaatcttcttgctcccttgaaccacctcttgtctccagcttgagccttgcaaatgaacagttttccatcttttacagttgctctaattatgtggtgcttgccacctttatctccatcagcagtc

SEQ ID NO: 5032 - DNA, 483 bp, Glycine max
  Clone ID: jC-gmfl02220069h04d1
gaactggggtaaaataattttttccatgaattctaaaagttggtagggacccatagcaatttttgtacgtgaaacctcgattccgttgccgcttgactgcatagacaaagagccaatttttataagcagcaactgaattcagcatggcttaaatgacgaattctttaaatgcatttgcatttaatttacaatacattcatcagcaatcacaaacaactatttaattggcatatatacattagatgcttgggaaacctatactactcataaactcaacaattgtaatgccaaatcaattgagaaagagaactatcaagccagaaccatcacaatattgcaggagaaaaaaacaatgttcgtgaaggtcatttttgctatatttaagacaatgacgttacagctagacgggactagcacagcatcagaaatgaacgtacatgacctgatgttagatatatttttaagccatgctgtacttgatcc

SEQ ID NO: 5033 - DNA, 587 bp, Glycine max
  Clone ID: jC-gmfl02220069h05a1
atcgagataactagaaacagtgtgatgaaaatgaaggaccttgttttcttcggtgctacaattttggtagcatggcaatgccatgcgtacgatatgttccctctacgaatgaacactggctatggtgcccgtactccggaggtgaaatgcgcaagttggaggcttgctgtggaagcacacaacatctttggctttgagaccattcctgaagagtgcgttgaagcaacaaaggaatacatccatggcgaacaatatagatcagactccaaaacagttaaccaacaagcttacttttatgccagagacctcgaagttcatcccaaggacacatttgcgctcagtatagatggcaccgtactctctaatattccatactacaaaaaacatggatatggggtggagaaattcaactcgaccttgcatgatgaatgggtcaacaagggcaatgcaccggcactgaccgagactcttaagaattacaacacgctggtgtctgatggcttcaagattatattctcgtcaagatgaacactggtcaaacaggccgtagcagaagcaaacttaacgaatgctggctaccacacatg

SEQ ID NO: 5034 - DNA, 393 bp, Glycine max
  Clone ID: jC-gmfl02220069h05d1
atggtcaatgggtccaaaatcttgggaaagaaggcaaaaaaaaaaaaaatactgaaaacatttaataaccgtcctgtcttcccgagcaaccggaaaggaagaagggtgagggacaaggggagccccgatcaatgataattaaaaattgacccaatagcaagatttgggggagggggccgcccccttcggacacggcgaggggtattataaaagcctacggctgaagatccccctgcgtgcccccaaccaaattggccaatatagttttccccccacacagcagtggggggccccccattcccatttggagtgtggcacccccggacatggaaacccgcttgggaatgaagaaaaacccagcccccaaaaacacattattttggggggagaacc

SEQ ID NO: 5035 - DNA, 468 bp, Glycine max
  Clone ID: jC-gmfl02220069h06a1
ggcaatcgcattgaacaagagaggatgatagatcatgatcttccttgcgtttgtgtcacttgaagaaattcaagagcagatcgagactaactcaccggtttccgacgtttcagggtttcagcacttacattgtttgattttccagatttgagttggaagaagatcaacgaggctcctagttgcttggattgttcctctgggtggtggagactttgcgtatagttaagatattgacaattcaaaatgcgcatggagagaagggataggactttgtcacatgaaagctgcagaggctcaccttaccgtagcagctctagtcgcgtgggaagatcttctcttactgagtcagaggagaatgtctaggaatggctagaagctatgcgtccagtgtgcatggatcaccctcacagtgcaggtgttcttatatgttcatccgacgagatgggatgccgtccttacatgtgcaac

SEQ ID NO: 5036 - DNA, 397 bp, Glycine max
  Clone ID: jC-gmfl02220069h06d1
tttttttttttttttttttttttttttgggaagaattttttttatgcccaacaacaaattttatttacagctcaatcgttcaaaaaccttgggaaagagggcaaaaatattaaatatacttataacatttaataaccgacatgtattcacgagcccctggaaacggttaatgctgaggaaaaaggccaaccatgatcaatgataactcaaatttgacccatttgtatgtaatgggggaggggtccgccccctccggacacaggaaggtttattcccggagcctcctgtcgaaaattcggtggcttcaaaaaaaccaaatcgggaatcaaaattttccccccaaaaagttgtagggggcccccttatacgactttggagggaagtccccctggcctgg

SEQ ID NO: 5037 - DNA, 573 bp, Glycine max
  unsure (1)..(573): unsure at all n locations
  Clone ID: jC-gmfl02220069h07a1
gggaggagcggcattaaaaatgcagatcttcgtgaaaaccctaacggggaagaccataaccctcgaggtcgaaagcagcgacaccattgacaatgtcaaggctaagattcaagacaaggaaggcaatccctccggatcagcagcgtttgattttcgccggaaagcaacttgaagatggaaggaccttggccgattacaacatccagaaggaatcaacccttcaccttgtcctcaggcttcgtggtggcatcatcgagccttccctcatggctttggctcgcaaatacaaccaggacaagatgatttgccgcaaatgctatgctcgtctgcaccctacggctgtgaactgccgtaagaagaagtgcggtcatagtaaccagctgaagcctaagaagaagatcaagtaaattctgggtgggatattgttggtctctactttcgttntgtttgtcttagaacagtgacttgtttggcatttatcgtatctggctctgattaatggtaacttgtttgagacaataggtttgaactagtcattatatcttgatgatgccatttagtcctagtcagaac

SEQ ID NO: 5038 - DNA, 421 bp, Glycine max
  Clone ID: jC-gmfl02220069h07d1
gactaagaccaaaatggcatcataaaaatataattgactagttcaaaactattgtctcaaaacaattaacattaatcaaaaccagaaacgataaataccaaacaagtcactgttctaagacaaacaaaacgaaagtagagaccaacaatatcccacccagaatttacttgatcttcttcttaggcctcaactggttactatgaccgcacttcttcttacggcagttcacagccctagggtgcagacgagcatagcatttgcggcaaatcatcttgtcctggttgtatttgcgagccaaagccatgagggaaggctcgatgatgccaccacgaagcctgaggacaaggtgaagggttgattccttctggatgttgtaatcggccaagggccttccattttcaagttgctttccggcgaaaat

SEQ ID NO: 5039 - DNA, 579 bp, Glycine max
  Clone ID: jC-gmfl02220069h08a1
gatttttctggaatgtacaaggttgggtttggactccaaagtaacaatacaacaactaatgctgtgctttgttctgtgcctaatttcactaatcaatcagttagcaatcacatgaatctagaaggctctggtcagaaaagtctttccattgatttaaagcaagtgtgggatgcctttgcgtcaactgatcaaaggatagatgatgatttgcttcaggccgcccttaagattccatctcttcatctggaggagcatgtgcctatgggtgatcacatctctggttttgttcaagattgcctcagtaaagatcttactagtcaacatatgatgaaaatgaatgttaagcatgcagaagccgatgctcaacttccatcaggtgatgacctcttcgatgttttgggcgtggatttgaaaaggagactactcaatggaaaccggaatgagttgctcgccactgattcagatgccatcacagaacatctagataaaaaggcaacacacatgaatttgcaaggtgtaggtcctaaatatagttattcagttaatgaagctatatcagaaagtggcatcttctctgga

SEQ ID NO: 5040 - DNA, 504 bp, Glycine max
  Clone ID: jC-gmfl02220069h08d1
gacacttattctaaaaggtagtattaatctagtacatcattcagcatagactaacacaaaccacgcaaagcttacattaataaaattggtatattataacagccaatatcaccactccaagaaacgtggagaaaaaaggtcataaagcttgatggtcaaacacatgacctccccccttagcaaatcctacaatatctatacatctgaatcacaccatgaacaccaatggcattactcagcaacatcaacaaaagccttatccaacttggtgaccaatggcattactcagggaaaaaaaaaatggatgcaagttatctaaagaatgcctaaagcatcagcagacactgccaaatgggccaaccacaggataagtcaccttggcaggaacaggaagaaacatgcatatacattatacaaaagcatattaatcttgagaagttcttactaactaaactcatccccctccaaactgagatgaaacagtagttagacaaagtaaattca

SEQ ID NO: 5041 - DNA, 514 bp, Glycine max
  Clone ID: jC-gmfl02220069h09a1
agcatgtcctttaccaccattctagatatcacagaactttgcagctctcttaggtttttaaaaaacaccacgcaaacagcaagatggccacttacgacagtaacatgctactaaattatgttccagtttatgtgatgctaccactcggagttgtcaatgttgacaatgttcttgaagacccagatggccttaaagaacagctcttgcagcttcaagctgcgggtgttgactgtgttatggttgatgtgcggtgggggatcatagaactgaaggggcctaagcagtatgattggagagcctacatgagttctgttcagctggttcaagagtgtggctcgacactgcaagctattctgccattgcatctatgcggtgggaacgtcagagatatagctaacatgccaattccacagtgggcgcttgacattggagaatcagatcatgatatcttatacaccaaccgctcaagaacccggaacatggaatatctaactgacggtgtagacaatgagcc

SEQ ID NO: 5042 - DNA, 450 bp, Glycine max
  Clone ID: jC-gmfl02220069h09d1
gataaaatagtttattaacttcgtgatcggaatacacacataacaagtacacgagagtactttggagatgtttaggcagtgctacttcatggcattattatcagcattgcacattacagaggctggatgctttatttatattggcagatattatttccagcagattatttaattactcatggcaccaaattgggaaatcaaccatcaactttcatgtctgtctctggaagccaggggaatggcagcgttggtttagttgcttccagaagaacctcaatgggaatctttggtgcagatggcttcaatggtgctatggcgtgagtatacttttgcgggtctgcacagggatcctgagctgcatgcatctatagcacagatttttagaatatattaaaattggatttttgcagtagatcatctgatagacgaaggtatgttactccgaacatg

SEQ ID NO: 5043 - DNA, 483 bp, Glycine max
  Clone ID: jC-gmfl02220069h10a1
cgactgtgcccattgatctggacagcgcctgctttccggatatgtagaagaacgacgtggcactcaacaccaaccacatccccgtcctgaccaacctgaacaacatcacaaggctgagtggacccgacttttcgctcgaaccttacttcatcgcgaaactccatagcgatctggatctcccagacatcagccattcgctactttatctttgtgactgttagactatctactgcttaccgatgctgtgatcaccgtttgatcggttatgagcgaaaccttggacaaggctcacaaactgtgaatgatgcaggcgcatcagaggatgcatcggaccataccatactcttgctgaatacgacagatgatgctaaaactgtctacgtctgaaggctagccgcatatgatgctgcgcatgcatgatatggggaactgacgattaagagtgactagtcaatcagacgtcctcgcacatattgtactgat

SEQ ID NO: 5044 - DNA, 296 bp, Glycine max
  Clone ID: jC-gmfl02220069h10d1
ataaaagctgcttatttgtcgcctattccaaactgcgggcgaacaaattcactatacatctcttgctattgacctagcacggtacaaaccaatttacataaattttactgccctgagccaaggtggcaaccatctgctgtcacccctgatataccaacaatctaacctgataaacacaattaccaatcttattgaacaaccgttgggtgtctgtccccttggttccaccacccactacaagtgcgccatggtatgtgatcctggaacttaaattccaattggtggcacccacattc

SEQ ID NO: 5045 - DNA, 411 bp, Glycine max
  Clone ID: jC-gmfl02220069h11d1
aaaagttaaaactactttagaccgcaaaattcaaaatccagaagtggctagttttttggttcaccaaaagcctcgtacaaaatcttaacaaatgaaaacaagtggctactcgccacaatgataaggcaaatgtaacaaaaaaaaaaaaaaccagtaatatatgatatgtgaaaaacaggtaaccgatcctaataaatgcttttaattgaagtttgcatccaatgtagatatgaagaggtatatcgagacctcttttgcaccatccaaaaaattttgccataaacagcagaagaattccttgtaatgggggtgatcatttcacagtcaagatcttgatgatagatgcagtgcccacacgatgcagtgccaccactgaatccccgttgtggcagagacccttggacttggcat

SEQ ID NO: 5046 - DNA, 541 bp, Glycine max
  unsure (1)..(541): unsure at all n locations
  Clone ID: jC-gmfl02220069h12a1
gagcacactcgtgaatcgtgatttagcatttaccacaccaaaatcaatctgcggagtcagaaagccatggatccctacaagaatcggccatcaagcgccttcaattctcccttctggactacaaattccggtgcctcccatctggaacaataactcatcgctgactgttggatctagaggtccaattctgctggaggattaccatctggtggagaagcttgcaaactttgacagggaacggatccccgaacgtgttgtccacgctcgtggagctagcgcaaagggtttctttgaagtcacgcatgacatttctcacctcacatgtgccgatttccttcgagcccctggagttcagacccccctcatcgtccgtttctccactgttatccacgagcgtggcagccccgaaaccctcagggatcccagaggttttgctgtcaaattctacaccagagagggtaacttcgaccttgtgggaaacaacttccctgtcttcttcgtccgcgatggcctcaagtntcctgacatgggtcatgccctc

SEQ ID NO: 5047 - DNA, 523 bp, Glycine max
  Clone ID: jC-gmfl02220069h12d1
aagcccaagtaaacagagaatcatggaactgtccagatcctcatccttatcacaatggacatatagtattaagtggacaagtcaagaagttgagttcatgaaataagcaatatacaatatagcaatactgtaataaaaggaccagtcctttcaaattaatactgtgccacaaacttctcacttgttcctacatctgcatctcttaaaagctagggtttccaccaccaatcttagatacttggcttcaagttcaggtgagatgctatcttttgtccaagagaacgatcagcctgagaccagtatgatatccagatgctacggatttcatgggtgacacgtgggtcagacaaagcatcaacccatcggcggacaaacctttcttgcctgtcagaaggccaagatcggtatctctccccaggttgcttgaagttgttctccttctcaatcatgcacttttcacgcttcccacctaggatacgaggaggaacggggaccttttccgcatgacggacaggatcatacc

SEQ ID NO: 5048 - DNA, 533 bp, Glycine max
  Clone ID: jC-gmfl02220070a01a1
gtggattgtgctctacactcccccccagtgatccatttcccaaaccagccctacaacaaacctgaaattaccaaagaacccaccacctccaccgcggaaaggcctcagtggaacccattccaaaaagccgcagcaaaggccctcgacatgttcgagagcgcgttgctctcacgcgagctcaaccaaccctttcccaaaaccactgacccacgcgtccaaattgccggtaacttcgcccccgttccggaacaccccgtcgaacattctctccccgttattggcacaatccccgacgccattaacggcgtctacctccgtaacggcgccaacccattgttcaagccaaaagcgggccaccacctcttcgacggcgacggaatggtccacgccgttaaattcaatgacggcaccgtcagctacgcgtgccgcttcaccgaaacgcagcgtctcatgcaggagcgcaaattgggaaaacctgtgtttcccaaggcaatcggcgaactccacgggcattccgcatcgcgaggttgatg

SEQ ID NO: 5049 - DNA, 484 bp, Glycine max
  Clone ID: jC-gmfl02220070a01d1
agccaaacagaaagcgaattcttttttaaaacaaaagaaaggaagcaagaaacagaaagcagctgagcttcatccacaaactacaagctgattcgcgaaagcatagataaatatttattattgagaagggtagaaaaggcaacaaaatgtttgttgtctgaaatgtgttttaccgtttaagcgaccaaataaaatagtccaggtggacttcaatgagcctccacaaacgtgccatggaagccatagggcactcttgaaggcagcatgacagtggcctccaacttcaaatcaagtgcattcagaatctgcaactcggactgccacgtcatctcgtcatgcacaaaagccatcacgtacccttcatcctcattcccattccctccacgtgttggcaagaagaatggctctccaccgaaccttctctctccgtactcgtgcctcttcacttccccactctccaggtccaccttcgccacccccgaca

SEQ ID NO: 5050 - DNA, 136 bp, Glycine max
  Clone ID: jC-gmfl02220070a02a1
gaacgacgagcgacttatacagatctttgacgagattggtagcgcattcataggacaaattgatctgtttcttcacccttatctccaattcccaaaccctaaaccctctgtactctaaccctaaccatctctccta

SEQ ID NO: 5051 - DNA, 243 bp, Glycine max
  Clone ID: jC-gmfl02220070a02d1
cctatatattttcatatatataggagaacgtggtaaaattttataaccttcatgccctaaatcccgaaacacaaacaaccccccacattttttcattaaaaaaacccacttacattttaaaaaaaaacaacaaattaggggtcccaaacaaaaataccccccggttaaataaacccatttaataccccaaatttacttgagcaccaaaccacaagggttccccccatgttaatcgtccctagg

SEQ ID NO: 5052 - DNA, 491 bp, Glycine max
  Clone ID: jC-gmfl02220070a03a1
gtggctttctactttctctttctagagtaggactaaactcatacactgatcatgggagtggatttaagacaagtggtggcgggtgtcctcaccctcacaatgttcgtcatgcttatacacatgatcaaaagagaccattttgatgctgttgatgataaacttcctggaacggaggatgtcagctttgaaagtacaaactttgatactactcatgttagaaagaacatcgggatttggaagggagatggtgatgagttaaaaccatgttggcttaagccatctgaagataacgtggatcagactgaggggtttgttaccttttctttaaccaatggcccggagtaccatatatctcagatagcagatgcagtgcttgttgctcgtagtcttggggcgacacttgtcatccctgacattagaggaagccaacctggtgacaagaggaactttgaggacatttacgatgtcgatgtgttcatgaaaagcatgga

SEQ ID NO: 5053 - DNA, 297 bp, Glycine max
  Clone ID: jC-gmfl02220070a03d1
aacccgggaaaaggaaaaaaaaaccccttggttctctttttttttttggggcccccgggcctgtttttttgctttttgaaaccaaaaaaaaaacgtcccccgaaacaatgaaggggctatcaattgtttcccccgctttgaaaaataaatttgggggccccccttttttaacaaactaaatttccgttcaaaaagccctgggtccctgtcaaatcacaggaacttgaattttttggggaacccccaaacaagaggcctttggccctaacactgaaattcccgaagggggcccttttg

SEQ ID NO: 5054 - DNA, 523 bp, Glycine max
  Clone ID: jC-gmfl02220070a04d1
aaactaactaatcttatattatgtagaaggttttagtattacacttgtatacatgaccaatgcacataacacgtatgctattgggctactctagtttagagaaaatttgacacaagcagcagaaaccagtaggcagaatgcaatagagaaatattacatcatcaaccgggctttaaagcttttgtgtacaaaacccaaaatcaagcactgtagcctctgtttgatggatgcaatagcccagcattgtagccttcacaggctgccaaacaagcctcttccatggaggcctcagaaacgccactgttgcaaatgttggcgaatgctcgcatgtgtttcatgccatactgagtcagtgtcccacagtgagtttcaaacacccgaaccattgattttaggcatgtccagtcatcaacaagggacgaaccaggagccctcacggattgtagaacagaagaaccttttcctggtccatacagtaaaactccaatcaattccacgctaccatctatgtgttttctatgct

SEQ ID NO: 5055 - DNA, 569 bp, Glycine max
  Clone ID: jC-gmfl02220070a05a1
ctctcttctctctgcatcgcttcaggttcttctgaaaagatgtctcgcgtgtatgttggtaacttggattcacgagtcaccgagagagatctcgaagacgaattccgtgttttcggagttattcggagtgtttgggttgcacgtagaccacctggttatgcttttattgactttgatgaccgcagagatgcacaggatgctatccgtgaattggatggtatgtttagaagaattatgttgttggaatgtaatagaattaaaatcaaaattaaaatgtgcatatatatgtatatttgctacattcttcttatctgctaatgtgttattgtttttcccccatgttttttccggttgatatgttgaagggttttcctcaactagctagttaagtcttctttttggcctatggggcaagcagatgctgctctctctttcttctacttctgccttgggctgcagtaatggttttttcttcgttgtgtcttcgtcaaagtctgctgcttgtacagtttgactacttctactactactgcatgttaagaggattaagaatgggacaccggggattt

SEQ ID NO: 5056 - DNA, 506 bp, Glycine max
  Clone ID: jC-gmfl02220070a05d1
attctgcaaagatctggaactctatttaacatactagtagcaacaaccttaacaagatcattacctgcaatgaaactacaagtattctgcaaataaattaaacacaagcttggacatagagaaactaacgaatacaatccaagagtagaaactcagggccttgcccaacaaaatagactcatacttcagtctaagcaccactatagattaacaaaatctcactattctcttaacaatcacagataccaagtgtcaaaatcaacttctgcttctgcgtcgttccctaaggccatttccattagcatatgggacctcctcacgcccacgataaggaggtgacctgctgtagctacgtccacgaggtgacaaactacggcgcctaggggaccgcccacgaggactgtaactccttcgcccataacttgggctcctacggaatctgggtggactacggctacggcgtctttctgaaccaccacgcatgcgacatttacgagcaaaatgac

SEQ ID NO: 5057 - DNA, 475 bp, Glycine max
  Clone ID: jC-gmfl02220070a06a1
gttttgctatggagattctagaagcagagaacgttctggtccttccctctgagcaacccaacaacaataggccaaagccaaaaccaaagcgtttcgtgaaaaaccaaatcccagactcaatccttaacaaccctcttctgagcgccgcaatctctgtgctcccttccaactacaacttcgaggtccacaagtgcgtctggcgcgtgctctccacgggagcaaaacgcgtggctctccagttcccggagggtctcctcatgtactctctcccactctccgacatcttcaccaccttcgccggcgtcacccactgcttcgtcctcgccgacgtcacctacggcgcttgctgcgtcgacgaccttgctgcctccgccctcggcgccgacctcctcatccactacggccacagctgcctcgttcccatcgacgccaccacaatgccctgcctctacgtcttcgtcgacataaaatcgac

SEQ ID NO: 5058 - DNA, 466 bp, Glycine max
  Clone ID: jC-gmfl02220070a06d1
ctttcgccctttttttttttttttttttgttttttggctatctcaaacaattatttttatttatggggaaccaatctaaaggccaaattagcgggggggacacaaagctatgagaaggcttaggggttttaaacaattgatagagggtttaaggacaactgggaatgttaactcaaaaaatcatttttcctttatgtccattaccagaacaattgtaaatgccatgttatataactgccatcattgttcctttcccatcctcacgctttaaaactgcaaccttgccactgccaccgaagtacatatatactttctggataacccatatgctcatcactgactttaaacaaaaaaggcctaatccaatgaagtataatatcccaaccaatgcattgttttccaacacattaatcgcatccaaaatgcctgtgagagattttccttttaagataattggtggaacaac

SEQ ID NO: 5059 - DNA, 418 bp, Glycine max
  Clone ID: jC-gmfl02220070a07a1
cgaaaccctaatttccttaatcctgttttttggaattcgacaatggagcagaagaggagcaggaggatgtacaacctgttcgtgaagcacttggacgggaaaaccctaaccctcctattcccctctccgatcctctacgcgagtttcatcaaggatcgcctctttcaactcactggaatccccgcccaccaccagcgcctcgtcaccggctgtcgccacctcaacgatgacaaatccgctatccagtgctccccgggggacggcaacatgtttccctccgtgcgcctcctcctgcgcctcaagggcggcaagggaggctttggctcgcttctccgtggcgccgccaccaaggccggcctgaagaagaccaacaatttcgacgcgtgccgcgacatgagtggccggaggctgaggcacg

SEQ ID NO: 5060 - DNA, 385 bp, Glycine max
  Clone ID: jC-gmfl02220070a07d1
aaaaaaaccccccccctttttccggggtgggggaaaaaaattttggccaaaaaccccccctttttgtcccagggggggggggattttttttttaggaggggggggtttgggcgggggggggttttaaagggggggccccccccattcccaaaaaaaaaagggaaaaatcccggggggggggggcccgggggggggccccggggacccccccccgaaaaaccccggggggaaaaaaagggggggggccaatttggggccaaagggaaaacgggcccggttaaaaaatccccccacatttttggggggccccaaagggggccccccctttcccgcaggggggcccccaaaactccgaacctttggggggggcctaaaaccccccccc

SEQ ID NO: 5061 - DNA, 212 bp, Glycine max
  Clone ID: jC-gmfl02220070a08a1
cagaagactagattcatatagatcacttgatcatcgttcatctgcttcaagaagaaacagaagtaggagtgtaagtccttatacaaggaaatcacctgtttctccaaaatgtcatagagaaacttcacctcatagaggaaggaaacagtcacgtgttgattctggctctccaagtcatcgcagaggaagtaggccttctccaaagattgatg

SEQ ID NO: 5062 - DNA, 549 bp, Glycine max
  Clone ID: jC-gmfl02220070a08d1
ccttcaaagtcctgtactccaatttgacatccctgttgttagggtcaatgtcaagagctttcttaatgtcaagttcagccaaatccaagttagtcaactgcatatgtgcttgggcccttctatagagggctttcacatttgtactctcaaggtccaacaccttagtacacaatttctctgcttctttgtagtcttttaacttcaacttgcaagcagcattgttcagattgcaggcaaccttcaaggtcttggcctgctttttctcctcctcaccaaaggaggaatcatattctatgtacttcacggccttttcatatcttttggaagctcttgcatatttactagctttaaacaagacatttccctcttctttcttcttaccagcagcttcaagtttctcttcagtgttcagatcccaggactccttctctttctcaaatgacactagctcaacttcaaaatacacggctgagttaggaggaactacagccaactcctgttgggactctgatgtaccgaaagcataatcaggtgcaatggtaacaacgc

SEQ ID NO: 5063 - DNA, 533 bp, Glycine max
  Clone ID: jC-gmfl02220070a10a1
gagtttcatagacccagaatggctttatggctcgctaccaggtgactatggttttgacccactaggactaggaaaggacccggcattcctgaaatggtatagagaagctgaactcattcatgggaggtgggcaatggctgcagttgtaggcatcttcattgggcaggcatggagtggagttccatggtttgaggctggagcagatcctaatgcaattgctcctttctcatttggctctctcttaggtacccagttgctcctaatggggtgggttgagagcaagagatgggtggacttcttcaacccagattctcagtcagtggagtgggccactccatggtcaaaaactgctgagaactttggcaactctactggtgaacaaggctaccctggaggaaaattctttgaccctttgggatttgctggagctatcaaggatggccgttacattccggatgccgacaagctagagagactgaaaatggctgagattaagcatgctaggattgctattgtggctatgctgattttct

SEQ ID NO: 5064 - DNA, 545 bp, Glycine max
  Clone ID: jC-gmfl02220070a12a1
ccatgaactttgcatctttctatcatcacatccatggccacagttgtgaagctccacgttttcccagaaagtttgaaccaacacaaaacgaggttgctcaggagaggctttggctcatgcccttcacctggggtgcttggttttggccataaaaattatgatcagttctctgtgaaagtgtgcagggcttttaggactgaggatggtggggatgtgaaggagaaaaagtttcgaaatttgaagaaaaatgaagagaaaaccaaaagggaaagtgggttttggagttccctcaagtctatcttgctgaggaatttcatggtgggttcaaaatcagatgatgagtatcgccaagctgtggtcaaggtggagggtctcctatcctcgattgccattcaaattggaaggtatattgtgactatgatgagcactggggtcatcctttcaattggatttcagatgtcaggtggagacagtcagatggatgcattaatatggtatagttggctaggaggagtaatcattgggacaatgataggtgctaacat

SEQ ID NO: 5065 - DNA, 476 bp, Glycine max
  Clone ID: jC-gmfl02220070b01a1
caggctgcgcagtgtttgaacgttgaaggagagcgtagaggcagtggttttctttttttgatttctctttgtagaatcgaatcgagttaatttttgatcgtgtgagtgtccgatcttgaaatccacaacaacaatggtgagaggattgctcaacaagctcgtctctcgctccctctcggtcgccggaaaatggcagcacaatcaactccgccgcctcaacatccacgagtaccagggtgctgaattgatgagcaaacacggagtcaacgttccgagaggcgtggctgtttcctctgttgaagaggccagaaaggtcatcaaggaccttttccctaatgaaaatgagttggtggttaagagtcaaattttagccggcggacgaggtttgggaactttcaaaagcggccttaagggatgagtgcacattgttaagactgaccaggttgaagacatagctgggaagatgcttggacaga

SEQ ID NO: 5066 - DNA, 480 bp, Glycine max
  Clone ID: jC-gmfl02220070b01d1
atcctatctttttgcgatttttttttttaatcatatgagtggtggcatgatacagaaagttttttgtgcttattcccaaactataatgctgtttctgaaagcattgataaatattttattattgagaagggaaaaaaagaaacaaaatgtttggtgtctgaaaagagaaaaaccggggaaacaaccaaggggggggggcccgcggacttgaaggggggaaaaaaaaccaaccccgcccgccatagggcacccctgaaggccccccgacgggggcctccaacttcaaaacaagcgcccccagaaacagaaaaaaggactgccacgacaaccccccctgcggggaggggggggcgccccccaaaaactgattcccccccccctctgtagaaggggggagaaaggcccctccccgaagcggcgctttcgggcggggggcgggggaaaaaaaaaaatacaggggcaataaggcccccccccccc

SEQ ID NO: 5067 - DNA, 434 bp, Glycine max
  Clone ID: jC-gmfl02220070b02a1
attaaccaataatattttagttaaaacatgtccatggccatcattaacacttttggaaacgttgatgtctatattctattattatcatcatggtttctcgtatctgctgtgtgtgtttggggacgacccgccacttttctgcaagactttgaaatcacgtggtcaaagactcatatcaggcaaattgatcaaggcagatccatccaactcattctagatcaaaactctggttgtggctttgcttccaagagtaagtacatgtttggccgtgttagcatgaagatcaagctcatacccggagactctgctggcactgtcactgcattttatatgaactctgacaccgacactgtacgtgatgagctggattctgagttcttggggaaccgtaatggtcagccttacacagttcagacaaacatttatgctcacgg

SEQ ID NO: 5068 - DNA, 516 bp, Glycine max
  Clone ID: jC-gmfl02220070b02d1
aatgttcttgaccaatcatatgttgtccttagcttatacagaaacagaggtagtcattgcacaaacaatgagatttgctacatcacaagcccaaaaatatccttcatgaatcatcacaaattcacaataatgcgcaagctttattgcaccacaaacaatgcgcactttaatacaaaggcatagtagacccagaaatagcttttgacttatcctcttctggtcgaacatagcccacgccctacatacactataatcatttgccctcttccccaaaaccaaacaaaaaaaatgttaatttcaattgatccatgtggtatggtatggggacacaataatttacccctagtcttaagttattgatgtgcattttatttcacgtgtttatatgaaagacatgaaataattgaagaggcgtaccccatgggataaactgaaataactcagttgtagtatatatagtatgatgtatttgaacagtggagaatgtaaattatatataggggtatgatatgcctg

SEQ ID NO: 5069 - DNA, 435 bp, Glycine max
  Clone ID: jC-gmfl02220070b03a1
atgtaatatatatatctacaaagatctactaggattatttaattggtgacgcttatcgtgggtgcaattgattcaatttcatttctattttattttttggtattatcctctttgatcatacacttggttcacaaatatggtggggttgatggtgctattctgtttcacctggtacttccctgaatctgttgcataagggatttcaaccagctgaggttttacgaacgggtctattccaccattggcagtgttaatttgaaaatcataggttgaattgtatgaggcatcaagtaatatatgtgatctcggacccaagtaatccatttccaaaagatgagtaagggaactagtccttggaaatttcaccaattcttgttcactggtattgtttgctggtgtaaggttgtattgggctattgggtagtcctccttttg

SEQ ID NO: 5070 - DNA, 366 bp, Glycine max
  Clone ID: jC-gmfl02220070b03d1
aggaaaaaatttcgcacgttggttagtttgactggcctataacaagtccagagggagttcccaatttggctctccctattttttcacccaatagtaaagttaccgttttgtttgggcttttcctaaaaaagggggggggtgggcattacataaacaattatttaaactggattcactcgtacatacatgctcacaaaacaaatagggggagattttttttcaaatggaaaatggcatgggaaaaataatatcttggggggcatgagggtctcatgagagaggggaacccatttttttgcagccaaccttgggagggtctaatttgctgggggaatcctgatgatgctgcaacagttgctaacaaat

SEQ ID NO: 5071 - DNA, 368 bp, Glycine max
  Clone ID: jC-gmfl02220070b04a1
aaaaaagacaacccagagagcgcgttttaataaacgctcttctctgaaaacccccatttggggtggttctttcttcttctctttcgcttcttcgatcttcgatcttcgtcgctgaaaatgagagagcgcatttcaatccacatcggccaggccgggattcaggttggaaacgcctgctgggagctttactgcctcgaacacggcattcagcctgatgggcagatgccaagtgacatgaccgccggtggaggtgatgatgctctcaacaccttcttcagtgaaactggggcaggaaagcacgtgccccgcgcgatttgttgtgatctctgagcccactgcgattgatgaggtttggactgggacatacc

SEQ ID NO: 5072 - DNA, 345 bp, Glycine max
  Clone ID: jC-gmfl02220070b04d1
cgaacccaaagtttaatacatttagggctctgggtttcaccaagcaacttcaaataaatgttttcaccacacttcacataaagctccaaaagtaccggaacaaggcaagttccacggaaagtacaacgatccacagagcacgagaagaaaaacaacacagaaagttacataatagtgcaaacttctaatcataatcctttccttaatcaccatcttcagttgcctttgcaccaacttccttataatccttctccagggcagcaagatcttcacgggcctcatagaactccctctctttcatacccttaccaacataccaatgatcaaacgccctcttggcataca

SEQ ID NO: 5073 - DNA, 431 bp, Glycine max
  unsure (1)..(431): unsure at all n locations
  Clone ID: jC-gmfl02220070b05a1
ntgtcatgtgttatgcncttgcanggntttgnaccgaagctggccattcggtttgaggttattctaagtaaaaagttaaattattatcataagttatgttgggcattagcattgtccagggttcaagcttagaggattcttgcgtgtaagcccggtaagtataaaggcattcatatgctttcaccctacaacataatgcgtttcgaagatagtttcttggttcaatgacaaatggcatactaataatcttaaacagcgatcaaagactccttcattaatgaattatggactttctcccctcaacaaatacacgtaatattaatctggtcctatgcttattctttttatgagagcttgggtgagcgttgacttattttattttggatgaaattcatttggtttacttaaatagatttaccttaggatgtttt

SEQ ID NO: 5074 - DNA, 246 bp, Glycine max
  unsure (1)..(246): unsure at all n locations
  Clone ID: jC-gmfl02220070b05d1
ttttaatgctggcatcgacgcncttttgaaattataggcgaaaagcataggagactatgtcgtcgtccggcctttctttttcttcattttacatctatttccaagtataacaattatgaaacgggatgggtcaggtttaacaatattacaaaaagttaccatctatggttacatataaaatcaaatcatacccaaatgggaggggagggaggtagattgatcatgctacataaaagggctacatat

SEQ ID NO: 5075 - DNA, 546 bp, Glycine max
  Clone ID: jC-gmfl02220070b06a1
gcgagaattggggtatattccaggttgttgattacggtgtggatcaacaactggtggccgagatgacccgtctcgccaaagagttctttgctttgccaccggacgagaagcttcgttttgatatgtccggcgccaaaaagggtggattcattgtctccagccatctccaaggggaatcggtgcaggactggagagaaatagtgacatacttttcgtacccaaaaagagagagggactattcaaggtggccagacacgccagaagggtggagatcggtgactgaggaatacagcgacaaagtaatgggtctagcttgcaagctcatggaggtgttgtccgaagcaatggggttagagaaagagggtttaagcaaagcatgtgttgacatggaccagaaggtggtggttaattactaccccaaatgccctcaacctgacctcactcttggcctgaagcgccacacggatccgggcactatcaccttgctgcttcaggaccaagtgggtggacttcaagccaccagggacaatggcaaaacatggatca

SEQ ID NO: 5076 - DNA, 549 bp, Glycine max
  unsure (1)..(549): unsure at all n locations
  Clone ID: jC-gmfl02220070b06d1
gtaacgatcatgcgagncattattattgtggcagctccagccacggccgcccttcgtttttatatatcataatttaagttttcctagtaatgaaaataaaaatatggctaacgttccatttaaatcctcatataaggacaaaaactgcatttaaaactaaatgcaacatataacattatggaggagggggcataaagagaacataaatgaattacatattatgcacgacgtttactcaaacgccatgaatttggctcatggtatctgtcataaagtggttcaattcgctcttgacgctttcgcttgctcatctttgtaggatctgccactttgaagtatcttggagccaattcaacaagccatttggggtctatgacagtgacctcacgcatatattccttagttgtcatcacaagctcatggtagatgacccagtctggttgtctctggaacaaagctgaacttggatggatatacacaggctggttctcaacaagggttctgtaaccttcctgggggtcctttctgaaacatggaaaaaaaccctgc

SEQ ID NO: 5077 - DNA, 582 bp, Glycine max
  unsure (1)..(582): unsure at all n locations
  Clone ID: jC-gmfl02220070b07a1
cgcgctgatgtagacctcgatgantttgcacgcacacgtcctaagctcggaaggcggatcgggctcattcaccttcttttttctccgttattccctctctttcttaatacaccggggtcccatggggattgcattctccttcttcaactccaacccctgctttccttttttcattgactcactccccatcttttgagagtgatgggtgtttgctaccgttgtttctacaccttcctcatcaccgccatcatcatcaccagcttcttccgccacatgccttagaattatactattcccaccctccctctttcttcaacaacaaccgttgacttcactacagtcacgtggtctttctctgaggatccaaccatggcggctggaactgtcttctgcgctgctgctactgctgcttttaaattgacaacaaccacttttgtttacaaccaaacaccctgcttacaccttctctcaacctcctttgattttctttttctctctggcctttaccctttactcggtttaagatcctatagtgaggtttggagatgttcaaggagggaaggggtgcaatgattctttttt

SEQ ID NO: 5078 - DNA, 457 bp, Glycine max
  Clone ID: jC-gmfl02220070b07d1
aaaacaaaactcaatttccataaatttattaaaaatctaaaaatgtcagaggggcgttgaaatgagctacatgctaaacatacttccttcccatctacattcctaatctcattgttcctgctatcattgataggactttttttcaagtggactgaggagttttccaatcctttggcacaggtccaaaatcatatataacttctctggggcaagaccatacaagttttatagcctccggtgttccaattcctgcacctcttgcgtcgccagcgggaccaaaccaatgattctgaggagctccggttgtccttgctcttagaccagcataagtagtaccatttactgaattgccaacaacttcctgtaaaaacaaaggatcatttgaaactacagcagccgttaaatggttatgcattctttccacagcatccaatacaactgatagttgactgttttt

SEQ ID NO: 5079 - DNA, 520 bp, Glycine max
  Clone ID: jC-gmfl02220070b08d1
aaatgtaagaatggaaatatatattttcacaactatactgacatgttgttacattatttacaaactcattatcaaaatagtgctactaagaatccaaaaaatgcgtagtaataacgcttctctggtgtgtgctaaagaaaatactaatattagtaatataacactgaatagcctataagatatgctcaaaatatggccaaaagcacaaaaagggccatcataaacgcagaagtaggttttatcttaaatgagagattaggtgacagcacaggattattagactggcttgatcttgcttcaggattcacagctatggcaggagaaatagcaggtgtatttgatcggttaataggtaaagtagagagttcatcatcataacagttagattccctccaaccaagattcatgttctcacggtcaaagactatacggtaaccagtcatgaaattttgtgctatgatattcacgttgttgcttttcaggactcccaaacaaagtatgttaataccctcaccactga

SEQ ID NO: 5080 - DNA, 315 bp, Glycine max
  unsure (1)..(315): unsure at all n locations
  Clone ID: jC-gmfl02220070b09a1
gtccgctacgagctctgangaatcgacgaaaagacctaagcgcggaagccgactcgtggttcccatctctcacttttcactcttttctcgaaacaatgaactccatagtcggtaaatcgggggtcggcctccgccagtcctcaccggaggccccacatttcgctgcccagttccgccccggcacttcccaccgtaaattccgcgttgtgtccggcaaatgcagccgctggctgaacggtcggaacctccgcgtggcggcggtgggcggaggctcggtctgaagagcccccacggtctctctggacatgggtaaga

SEQ ID NO: 5081 - DNA, 535 bp, Glycine max
  unsure (1)..(535): unsure at all n locations
  Clone ID: jC-gmfl02220070b10a1
ctttctttacaattccttctctcaataattctcctctgtttttcacaaagcaacatggctgcatacagagaacccatgaacatgaacatgagcgacagagccccggtttctccgcagcaaccacactctccgtggcattccccggttccgtacttgttcggagggttagcggcgatgttgggtctcatagccttcgctctattgatccttgcatgttcctactggaagctctcagggtacctcgaagggaacggggaaacagaacgggacctagaagctggcgaaacggagcaggaccagaaacctgcgaaaccatacgaggagaagatcttggtgatcatggccgggcaagagaagccaacattcttagcaactccgagtgtttcgagttgcagcactagcaggtcctctttcttcggcgacaacaccagcacgtgcacctgcgaggagaaccgaaaatcgcttgaaatggcacaggctgggactggngaccaccgaaccgcacactcctcgtcggattagaacccttgatcgg

SEQ ID NO: 5082 - DNA, 511 bp, Glycine max
  Clone ID: jC-gmfl02220070b11a1
ctcaaacattgtttgttgtaggaagtttaatcttgagaaatggcaggggacagcaagagcgggattctgttcatcggtgggaccggttacatcggaaaatccatcgtggaagccagcgccaaagctggccacccaactttcccttttggtgagggagtccactctctccaaccccgcaaaatcacccctcatcgacaatttcaaaggcctcggtgtcaatcttgttttaggagatctatacgatcaccaaagtttggtgagtgctataaagcaggtcgatgtggtaatttctactgtaggacacctgcagctagctgatcaagataagatcatttctgcaattaaagaagcaggaaatgttaagaagttctatccatctgagtttggaaatgatgtggaccggactcatgcagttgaaccagccaagtctgcatttgcaacaaaggccaaagttcgccgagctattgaggcttgaggaatttccttcacttatgtgtcaagcaacttcttt

SEQ ID NO: 5083 - DNA, 515 bp, Glycine max
  Clone ID: jC-gmfl02220070b12a1
ataacatctatctagtccacccctttttttttttttttttttttttttaaaaacaaaaatgctttgtactatattaaatctcagtattgtaaaggtaaacgtttgaattctaggagattaagctcctctatgcctctgtgtgtatcactcaatcagactttatcatcatctccaaataaaatacagttgaattcaaaaggctcatccatcaatggtactgctcttgaatctgtggagcatttggtcgcacaggggcaacaaattggcagtaaaatggaattggagaatcttcaatccaaggatacagttattgctgtaaatggaaaagctgcagtgtataccacagtggtggatgatgtggaaaagggcccatttgtacaggaggacaatcatgaaaatcattttttcttaaaatcatctggcagagtaacagatttaaatgaaccacttgttgggaatttatctccaccaatagaaaaagagacaaagggtctcgagcattctgggagcatgat

SEQ ID NO: 5084 - DNA, 363 bp, Glycine max
  Clone ID: jC-gmfl02220070c01a1
caaaactttcctccaaagctttcgattctctctctcgacccgcaccgatcatgcttcaaagggtggtcctccgatcccctcgcacttcaaaccccaacgctatgaaaactaagcgcgccgttgacgccggaggcgattcccccgccgacgaaccttccttcaagcggaccaacttctccggcgagaaaactacggccgaagctgatgaggagcaagccttcgatcccgagcctcacggcggcgattccaccggtctcaaactactcggtctgctccttcaatgcgcggagtgcgtcgccatggacaacctcgacttctccaacgatctactgccggtgatcgcggaactctctttgccgaacg

SEQ ID NO: 5085 - DNA, 382 bp, Glycine max
  Clone ID: jC-gmfl02220070c01d1
aaacaattaataacaaataaatcccaaaagcctagttgatggttgcaatgattcataaaagtttcaatcgggataggttatcataaaatttgccggttgccaagggggggggatcaacaaagacaaattcttccaaccaagcttgggggaaccattttttttgaccagggtttcccctttccaagggaacattcccagaaacaagttcgtttgtgcagccggtttgcccttgagcgaaacgggcccaaacccggcccgtttaaattattccccccaccttttcaactaaacctcgcgggtccttttgggcccgcccacggcccagatgttcctgatcttgcagcccaacagatgctgctcccccgggtgccttttcaggttg

SEQ ID NO: 5086 - DNA, 335 bp, Glycine max
  Clone ID: jC-gmfl02220070c02a1
gaattcctctagaagcctagttgtggtgctataaacattagatgctacgatttttctactctgccaactgctgctgtggtgcaacacttttctttaagcttttgtggttttaaaatagtctcaataatttgattatataggtgtatgatagatagaagttgttgaaggggaaaaatgtagaaatagtatctgtattttaggttatagctgttcattgtatttcagaaatcagcttttatttgtggttggttgcatatatggctccatggtgtatttatgtatggatgtatatatacgttctctcttggtatattagaaagacattaccaactagt

SEQ ID NO: 5087 - DNA, 514 bp, Glycine max
  Clone ID: jC-gmfl02220070c02d1
aacgcagaaaagataatgaatcttttatatgtgtagcattacactttcattaaattcttcaattagcctaaaaagaaaaaggaaataacagcccgagccatagattgacgaaacaaatcacgaatgtactattggacagattcgaggcaaaagtgactcgatcagtaaaaaatcaaattactaaaaaaaatccatcagaaaatctcgctacttaaggtaagcgtctcaaaatgatgtcaatttaattcaacttggctaatcacctcttagcaaaggtcctcactttacatggacattggtccagcgacaaaacttccatgataacggtcccaatatatgtcagtacatgcatgtctgaatgtcgctgttgctgcttgccccccatccaaaacgcattccatatctaagcttggaatttccccctttatggggcaaagttggcgttccaagctgaacctgagtcatgtgtctctgaacaatggccagtccatccgatctggggcgttatatcttt

SEQ ID NO: 5088 - DNA, 518 bp, Glycine max
  unsure (1)..(518): unsure at all n locations
  Clone ID: jC-gmfl02220070c03a1
ggagatgaaccaaccccgttgtttgtttggatctagtagtcttggttcgattgctattgttgctgggggaagtgataagtatggaaatgttctaaaatcagctgagttgtatgactcttcaacaggtatgtgggaacttttaccaaacatgcacgcaccgcgtagattgtgttctggtttttttatggatggcaaattctacgtgattggtggaatgtcgagtacaactgtttcattaagttgtggagaggagtatgatctcaagacaaggagttggcggaaaatagaggggatgtatccatatgttaacgtgggtgttcaggcacctccacttgtggctgttgtggataatcagctatatgcagttgagcatctaactaacatggtgaagaaatatgacaaggaaaggaacacctgnaatgaattggggaggctttcagtccgagcagattcttctaatggttgggggttggctttcaagcttgtggagagcacttttggttggggtggacaagggg

SEQ ID NO: 5089 - DNA, 409 bp, Glycine max
  Clone ID: jC-gmfl02220070c03d1
ctatgaacaaactgagcaatgaagatgagaccggtcaatctttcactaataactgcaagagtaaattaaaactctcgcaaaacattgatatcgttacaaccactgatccaagtgacccttagtttagaatacagttacacgcacaagtgctcatcacaagaccataggtcaaaacataaatggcgtgaacaatgagtcaaagcaatggcagaacaataatattaacgccaccaccacttgtaacagtgcactcatttcctctgtagtggcagaaaaattagacatagcccctgctcttcaaactctccactgcatccttgatgatttgctcaacaggagtgaattctagacctaattcaaccaggttctttgatgcatcctttccacttgctcttaacaaccctgggtg

SEQ ID NO: 5090 - DNA, 363 bp, Glycine max
  unsure (1)..(363): unsure at all n locations
  Clone ID: jC-gmfl02220070c04d1
agaataattatanattagttnatgacgtgtcattctaactncgactacagagttatatggcaaatttcctaggaaattagtcgtagaccgccctttctttttttaatttttaacatttgaggaagccacctttaacaccatggggaggggggttaattattaacacaaaccctctttaccccattaataactcacactatctcgccacgtatatactaacttaccattaacaatggtcacaactaccacaacccccacgttgcctcaaccgataaagaaaggtcaaccaaacccataatttatgcaaaaaaaacgctcaatatactccaaataagttccatctgatccatgggcctcagaggc

SEQ ID NO: 5091 - DNA, 398 bp, Glycine max
  Clone ID: jC-gmfl02220070c05a1
agctgcgtttgttccttcttcagttttgtttgattttgagtgagtgacgatgggcgcgagcgtggaccttgcccaagacggttccgacgagcaccagaagcgtccggagatctacacctacgaggccccctggcacatctacgccatgaactggagcgttcgccgtgacaagaatgtccgtctggccatcgttttcctcctggagcagtatccgaaccgcgtggagatcgttcagctcgactactccaacggtgagttccgatccgttccttccctcttctttgagcatccctacccttcctcctaattcattttcatcccctttcaggactgtcacctgctccgatcttcttgccactctcttcgactttctccgtcgtttggcacattctccgaat

SEQ ID NO: 5092 - DNA, 417 bp, Glycine max
  unsure (1)..(417): unsure at all n locations
  Clone ID: jC-gmfl02220070c05d1
agaagtctttcttgaccncattaagagttaaaggcnaaaacctagcaaactagtcggagaccgcccttttttttttttttttttttgtttctgaaaatcccattaaaatacttggggactaaggtagcattaacaaactaaggctcgctttaccccctaaaccctaatcaaaactactttcgttccaacgccagaaacttccaattttaacattggtttcaacaataaaagacacaacaatacaactgtgtgtccaaatctgaagcattcccaattatgacatgcacatacagggaacataatcagaagtgatgagttatcattaataaaatttcaaaccctaagaatcatacgcttggtggagaaagcaattgcgacccaatcatgctgcgaagacgaccaccgaagctgcttaat

SEQ ID NO: 5093 - DNA, 538 bp, Glycine max
  unsure (1)..(538): unsure at all n locations
  Clone ID: jC-gmfl02220070c06a1
atttcttcctcctcctctcaatagcccttttctcagtttgttgcttagcagcatctcaagctcccaccaccaaatcacacccctatatccttcccattaagaaagaccccgcaacaaatttgtactacacttcagttggcattggaactcctaggcacaactttgatttagtcattgatctttctggtgaaaacttatggtacgattgtgacactcattacaactcatcatcctacagacctatagcttgtggctcaaagcaatgccccgaaattggatgtgttggttgcaatggccccttcaaaccaggttgcacaaacaatacatgccctgctaatgtaatcaaccaattagccaaattcatttacagtggtggcttaggtgaggatttcatattcattcgtcaaaacanagtgtctggtttgctttctagttgtattgacaccgatgcattcccatcattctccgacgatgangtacctctattnggctttacccataacaccaaaggaatcataggcctttcaaagtcacaact

SEQ ID NO: 5094 - DNA, 228 bp, Glycine max
  Clone ID: jC-gmfl02220070c06d1
aacagatatgtctttttaacttaagatatcagtcttacataaagctaccatcagatataatccacactttaaatttgaaagcttgactactctactaagctcttgcggtgattggcaaacatgggaaaccgttttgaacaccactagactctactctatccaaagggaaaaaagatgaataagaaccaaactgctctttcattgcagcacttggggggggggggcgta

SEQ ID NO: 5095 - DNA, 555 bp, Glycine max
  Clone ID: jC-gmfl02220070c07a1
ccatgatgagcttattgccaatgctgcttacattggcactcctggaaagggtattcttgctgctgatgagtcaacagggacaattggcaagcgtttggccagcatcagtgtagagaatgttgaatccaacaggcgtgctcttagggagctgctttttaccgctcccggtgctcttaaatatctcagtggtgtcatcctctttgaggaaactctctaccagagcacagctgcaggcaagccctttgtggaagtcttgaaggaggctggtgtgcttcctggcatcaaggttgacaagggcacagttgagcttgctggcactaatggagaaaccaccactcagggtctagatggccttggtcagcgttgcgccaagtactatgaagccggtgcacgttttgccaagtggcgtgctgtgctgaagattggtcccaacgagccatctgagctggctatccatgagaatgcctatggcttggccagatacgctgtcatatgccaggagaatggcctggcttccattgttgagcctgagatccttgttgatgatctcatgac

SEQ ID NO: 5096 - DNA, 195 bp, Glycine max
  Clone ID: jC-gmfl02220070c07d1
gggaaaaaaccaggcccatttaggggggggggggaaccccaaaacctcccccaattttggaaggacatgggaaaaaaaaatccctccccaaccccaaatttaaaaacccctaaaaggccccaaggggcccttttttttcaagcccactttccggggacaaaattgggggggtaagccggggcttttttttttacc

SEQ ID NO: 5097 - DNA, 482 bp, Glycine max
  Clone ID: jC-gmfl02220070c08a1
gaaaaatagagaactcactcagcaagctgttaaatctgcattgcacgtgcttatagaaacctgtcctttggggagaaacagaatgaagatagttgaagcaggtgcagtggtggaactcattgaacttgcacttgaaaaaccagaaaagaatatgacagaactcatatttattctcttggctcatctttgttcttgtgctgatgggagagaacagtttctgcaacatgctgcaggcattgctgtggtttcaaagaggatccttagggtttcaccaaccactgatgatcgagctcttcatatattttccttggtttcgaagttctcggcctccaatgaggtcgtgcaagagatgctgagggttggtgctgtgtcaaagctttgcatggtgttgcaagcagattgtgcttcctatttgaaggaaaaagcaagaggggtacttaggttgcactcaaaaacatggaacaattcttcatgtattcaag

SEQ ID NO: 5098 - DNA, 513 bp, Glycine max
  Clone ID: jC-gmfl02220070c08d1
agcacaccagttcacgaaaccatatattaagtgcgctcattgtacatcaatatccctaaaaattaattggtgagggaaaaaatacaaaatatcaaaccacaagggttttctgcacaaaccgcccgaggttaaggaggtgtcacctaaggagtcatcaatactcaggaacgagtcttccatcctgcgattctatataaagatgccttcatgaatcccttacaaatattatcagccccaattagtaattgaataatctacactcacccaacggacaaggcagtatccccggccagcgaaaattctgaaatcaggaactgccaaaccagtcccaacttaaaatattgggaagaggggggaaactaatgttggagaaaaacgctgcatctcttcttaaaggacctggcaatggattgaatcaaagcctgtgaaacaagttaaaatgcccaccgtattactatcaactcccacactgtttagcctatctatgagtccaccatttcatcttgcaattcg

SEQ ID NO: 5099 - DNA, 278 bp, Glycine max
  Clone ID: jC-gmfl02220070c09a1
ggcgactggagcggctggagctcgagcttaataggtttgagcggctagagttaattatttggggctagtctggaacttataataatgtgcacatggatagcccggaaatccaagatcaaattgaaaaattcgcaggaggtgggaggaaagaaaggccgatctaagctttgtgggatggggagtctggaggcggatatttcaatacaaagcactatgctgttcctatagcaaaaacagggactgttgctcataatagagattaaaacacagaacagaaa

SEQ ID NO: 5100 - DNA, 413 bp, Glycine max
  Clone ID: jC-gmfl02220070c10a1
gggatacggatacggaatacgcatggtgtaatttgtaaataaaaaaaaattgacgtgcgtgtaaaaattgaggggtggataatattccgtgttattaaaatttaattaatatagagagtttttataatatggtaggattttgatataataatatatcatatgtgtaggttgttgttttagagaatagagatagagaatggccggctggctggagaatcctgtccagaactcacatcacatgagctgttctttgttttgtttatttttcagaataaatggtttactattatttcaaaaaaaaaaaaaaaagggcggccgcggcggctccacggtttccgattggggtttgatttgcggagataagtttaaggttggattggtgcaggctgttttcttctttggctgcatgattg

SEQ ID NO: 5101 - DNA, 500 bp, Glycine max
  unsure (1)..(500): unsure at all n locations
  Clone ID: jC-gmfl02220070c11a1
gtttctttttcttctatagagacacacggagagagtctcagagcaataaacacccttcaatggctaccactaaagtttacattgtttactattctacgtacggacatgttgagaagttagctgaagagattaaaaagggagctggttccgttgaaggtgtggaagcaaagctatggcaggtacctgaaacactttctgaagaggtccttgggaagatgggtgcacctccaaagagtgatgtaccgattattacacccaacgagctacctgaggctgatggcttattgcttggtttccccacaagatttggactgatggctgctcaattcaaagctttcatggatgcaactggaggcctgtggcgcacacaggcactagctggaaagcctgcaggaatcttttacagcactggttcttaaggaggtggacaagagacntactccgtgacatctattactcagcttgttcaccatgggatgatttttgtgccattggttaca

SEQ ID NO: 5102 - DNA, 569 bp, Glycine max
  Clone ID: jC-gmfl02220070c12a1
tgggttttcaccgatcaagcattgcctaatgatcttgtcaagagaggagttgctggtaaggatccatctgctccccatggagttcgacttttgatcgaggactatccttatgcttctgatgggctagagatatgggatgctatcaagtcttgggtggaagaatatgtctcattctactacaagtcagatgaggaacttcaaaaagaccccgagctccaagcttggtggaaagaacttgtagaggtgggtcatggggatttgaaggataagccatggtggcaaaagatgcaaactcgtgaagagttggttgaagcttccgctaccctcatatggattgcttcagctcttcatgctgctgttaactttggacagtatccatatggaggtttaatcctgaataggccaactattagcaggagattcatgcctgagaaagggtctcctgaatatgatgcgttagctaagaaccctgagaaggagtttttgaagactattactggcaagaaagagaccctcattgaccttacaattatagaacatttatcaaggcacgcatctgatgagttcta

SEQ ID NO: 5103 - DNA, 512 bp, Glycine max
  Clone ID: jC-gmfl02220070d01a1
aattagaggaaaaagaggctgagatttcatcaatgcacaatgctttgttggcaaaagaagaaaactccctctttccagcatctcaaatgagagatctctttgacaagatagataggatcaaaatccctattgtagagtccaaagaagatgatttggagccacatacttcagcccctatgagaaaactcttttatattattgatagtgttcctaggttgcatgatcaaataaactctctgtctcatgataaagaaaagctgcaatcaatccttgaaactagggatcttgacattaaggatctgaaggatgaagtcaaacaactcaatagaatctgtgaagactctaaaatgatcaagaatgaattgtctgagctcacctatgtattagaaaaaattatggatattctgggagctggtgaatgggttgtagataggaaatctaaaggttcgaaggaattaataccagcattggagaagcatatcattgccattctttcagaatctgaaaattca

SEQ ID NO: 5104 - DNA, 540 bp, Glycine max
  Clone ID: jC-gmfl02220070d01d1
catccttcaacttcattctcattcactgcttgagatataaataagtcatccttaaaatctttctacatttttattacattaacgttcgaaaaaattcatctacctattttctacccaccaaatcctttaatattgaagcaatcaaacaattgtaggctaatacaatggaggggcttcgattttaaagaaaaagaaggctgtcaaaaaatgagcccaaacattgaagaccagaatctctgaatccctaaaatgtgattgcagagaacaaatagtgaattgacgagactaaagaaaaacaggctaaagaagcaaaaagaaagacatgaataaaaagggacaattttatatcgataatacaatttgcagacgcacgacattcaatgttgagcagtccaggtaggtttggtcacaacttttctacaagatcgtccccagtagccatatatgcaagacaaacaaatagccaataagtcctaatcttgctctaggatgactcatgagaacccggccaccagatacccagagtccatcaatacgatc

SEQ ID NO: 5105 - DNA, 562 bp, Glycine max
  unsure (1)..(562): unsure at all n locations
  Clone ID: jC-gmfl02220070d02a1
gtgggatttggtgcactggggatccggtttgctaaacgtgccaacgatcccgctagccaaaaaccgatgcagcatcctaagcatcaacgattggcacaaaacatcaacgatttcttctccccagaggttgtgattgagttgttcaaggtttgtagctgtagctgatatgatccatcgataatctagacaatgggatacacaaattcttagatctctttttcctgataacaattctaaaaaatattggctatctctatttccctctcaatccaacaaaataaactgatgtggaaacactcaacgatggtcttttttctgtgaagtttggataccatgttgagctcaaaagatcctctacaggagtcccttctcccagctccattcatggtgatttatggcacaagttgtgaaagattacagtcgtcctgaattttgtgtggagggctcgcaaagacatcctctcggtgatgtccaatctaaaactccaagtttatcatatctgnttgaggtgtggagagacacctgaaattgtggtccatgctctcctcttttgtgagaagaa

SEQ ID NO: 5106 - DNA, 472 bp, Glycine max
  Clone ID: jC-gmfl02220070d02d1
aataaaactataaatatattcacataagtatgaatgttgagtttctacaggcaagtaaaataatttataggactaatgaaatattcaacactaccctcaatggcaaagctacagtccaagtccaatttaacgaatatataatataaataaaaaagagatagcgaagaaaaaaggattagaaagtatcgttttcctctgacttctgagaaacttctgggaatcggtcccaaacggttaaacgacgcacgtgacgtctccgcgtgccggtttcggattccctacagcactacgtatctaatctaaaatgtttcattcgattagccgtcgccgcgtgtcagttgcacaccctttgatttgtgctgtgacacggactcaaccacggcgattcctgattctcgcgatggttctggcaatccaacggctcagatttcacgtctgcagaacccacgtgatgcaggcgcagcagggtatc

SEQ ID NO: 5107 - DNA, 502 bp, Glycine max
  unsure (1)..(502): unsure at all n locations
  Clone ID: jC-gmfl02220070d03a1
gtggaaaaccaaagggaagatgggggttgtgatcgttttcctgtgggtatgcgtgttcttgctgtggatgacgacccaatttgcctcaaggtgttggagaatctccttcgcaaatgccagtatcatgttactacaactaatcaggcagttgaggcactgacaatgttgagggaaaacagaaataagtttgacctcgttatcagcgatgtgaatatgcctgacattgatggatttaagctccttgagttggtgggacttgaaatggacctacctgtcatcatgttgtcagcacacggtgatacaaagctggtgatgaagggtgttacacatggtgcatgtgactatttgctgaaacctgttcgaattgaagagttgaagaacatatggcaacatgtggttcgaagaaagaattttgatagcagggatcagaacanggcttccaatgaggagaaggctcctaattttgctgggggaggtagtcaaggcctaagatcagaaaaca

SEQ ID NO: 5108 - DNA, 458 bp, Glycine max
  Clone ID: jC-gmfl02220070d03d1
tttttgtttttttttttgagcacctagaaattttcatattacaattattttatctaaaccaaaggcaatttttatggggatacactacagattgaaaggaaaaaaagatggaacagatcagatggctaacaaaagtccataagtgaaacaacaaaatgttggccaagaaaataaatttagtagcagaacataaaaataggtgtacattaaccggtttcagagactggagcaagtttcacgattttattgctcctggattcgttctggttaagaagaaatcagttgcatgatccaacagggtaggcatcaaatcccatttctccatccaacaatgtcgactcattttgctcccttttgaccattacacccattatgtcatccaaggtcccaaaagtattctgcataaatccatcttgggacttcatttgctccaaaatgtaggcttcatttggcttcag

SEQ ID NO: 5109 - DNA, 360 bp, Glycine max
  Clone ID: jC-gmfl02220070d04a1
caagtttctcatatgatattgcaattttatcacttgttacccactatacatacaactgtggggtgctagtgggagttattgcgagctatgacatcttcttacaacacctgtatcacctgcaattgctttaggaactgttatctctctcgctcgcgctccaaaaaaattcaagggtgaagcgtattaaggcaaagccaaaaacagctgaattttcaatcgcaagaatgtagttccatgcatcacggaagccaaatagttgcaatctgcaattctgaatttctttgtaggcgagatagggaatttgaagattatctttaaaaaacaaaatgaaaatgttttaaaagaaaacctaaaagtttg

SEQ ID NO: 5110 - DNA, 300 bp, Glycine max
  Clone ID: jC-gmfl02220070d04d1
aaaagaggatcttggaattccctatctcgcctacaaagaaattcaaaattggggattgcaactattgggcttccgggatgcaaccaacaaatttttacaattgaaaatctaagctgtttttggctttgccttaatacgctccacccttgaattgaggaaaacgccagcaagagctttagctgttccaaaagcattcacaggtgaaacaggtgtttggaaaaagatgacagagctcacaatggccacaacccgttttacacagttgcccacggtgtggtgaacaggtgataccctttgcaa

SEQ ID NO: 5111 - DNA, 561 bp, Glycine max
  Clone ID: jC-gmfl02220070d05a1
gcgaaatccgttcccctatctgcttttcgagttgttgctaaagagtgatggactcaccgcccagcaatcagcacgcggtcgacggagacgccaacgacgtcgttagatccttttcccaccgcgacgacgatgaagacggcaagccccaacccctcaccggggacggcgccagtcctggaaagatattcatagggggtttagcgagagaaacgacgattgcgcaattcatcaagcactttggtaaatacggtgagataacggattccgtcatcatgaaggaccggaagaccggccagccgcgtggtttcggcttcataacttacgctgatccctccgtggttgatacagtgattgaggacactcacattatcaatggcaagcaggtggagattaagcggacgataccgaggggggctgctggctcgaactcaaaggacttccgaacgaagaagatttttgtgggtggaattccttcgactgttactgaagatgaatttagggacttctttacacgctatggagaagtcaaagatcaccaaataatgcgggaccactctacta

SEQ ID NO: 5112 - DNA, 451 bp, Glycine max
  Clone ID: jC-gmfl02220070d05d1
ctatctaaaaagtctgaagtgtatcagaattaaataaacaaagagcagtagtgacaaaggtagccattaacaaaactaagaatacaaccatctgcacaatttgcagctcatacatcaatccgatagtcatacttcaactggccgagctaaaaaattgttcggtcatctataggctggcgagagggtgctgctaataactaatgggacttaacaatatcattaacagttttccattttttagaaaataaaaatatgtagcctaaagaactgaataaccaaacaaactacaaacttgctttgatgctagaaatattagtcctagactataagtcttcgatgacatgcttctatcttccataaggatggtatcgaccagttcctgcacctgcgtatccccctctagtcccataaaatgagcctccagcaggccccccatatccaccgcctaagc

SEQ ID NO: 5113 - DNA, 555 bp, Glycine max
  Clone ID: jC-gmfl02220070d06a1
atcgattgtagtagtatttaaaaagaaagcaagagagagaagagattgttgaagctgggatgctttcggctaagcttgctgaaactggcctcgtctatgctgtattgggcagttaggcgaattcaaagatctttgaacacctccttctttattacctttttccaacacctacctcttctttctctttctccctctcacacactcgtcctaggtttgattttcccttccttctcccaatactcctccattattttattcgaaacaccaaaccaacactctagcttcgttacttgcccttttctctgcccagctacatgcttgtgtaagaactaataagccagctgaagaatgtgggatctgaatgactcccccgatcagagaaaggactacgagtctgaaggctgttcttcttctctgtatgatgataaaggcaagagggtggcatctgtttccaattcaagctcctctgcggtggtccgtgaagatggatcggaagaagaagacagtgaaagaggtggaagcagaacattggataacaagaaaacccaacaaata

SEQ ID NO: 5114 - DNA, 397 bp, Glycine max
  Clone ID: jC-gmfl02220070d06d1
aggaaaaaatttcccacgttggttagtttgactggcctataacaaggccagagggggttcccaatttggctctccctattctttcacccaatagtaaagttaccgttttgtttgggcttttcctaaaaaagggggggggtggacctaacataaaccattatttaaactggattcactcgtacatacatgctcacaaaacaaatagggggagattttttttcaaatggaaaatggcctggtaaaaataatatcttggggggcatgagggtctcatgagaaaggggaacccatttttctggagcccaccttgggagggtctaatttgctgggggaatcctgatgatgccgccacagttgcttacaaatggggaggccccgcttgttcccttgtttttta

SEQ ID NO: 5115 - DNA, 533 bp, Glycine max
  unsure (1)..(533): unsure at all n locations
  Clone ID: jC-gmfl02220070d07a1
ggaactaacaacaacacaaggccatcatcatggcagctgcttctcctatggcgagccaactcaagtccaccttcactaaaactcttgtagctcccaagggcctctctgcctcttcaccactccacctcctgccttctaagaggcaatttagcttcactgttagggccatccaatcagaaaagccaacctatcaagtgattcaaccaatcaacggtgatcccttcattggaagccttgaaaccccagttacatccagccccttgattgcatggtacttatcgaacctccccgcatacaggaccgcagtgagcccactactaagagggatcgaggtgggcctggcccatggctaccttctggtgggcccattcgtgaaggccgggcctctgaggaacaccgagatcgccgggcaagcaggctctctcgccgctggtgggcttgtggtgatcctcagccttngcctcacaatctatgggatttcatcttttaacgaaggagaccnaatcactgccccgtcactgaccttgacgggc

SEQ ID NO: 5116 - DNA, 538 bp, Glycine max
  Clone ID: jC-gmfl02220070d07d1
gaaggccagaacaggagagagagaatttaacattgtaacatgttgagagtcatacaatacatcatttacatccatctctattgcacaaataaggatccatttccacccattgtccattcatagagaatgaataacaacaaaaagtaaacaaagataataagcactttcttcacttgatgtagtaaggaaggtccaagacgtagaggaggaagtaggcccaaataacacccgaaatgcctccgaagaagaagcctccggtgaacttggcccacccatcagcagtttggagctgatcgggctccttcttgcggcccgtcaaggtcagtgacggggcagtggatgggtctccttcgttaaaagatgaaatcccatagattgtgaggcaaaggctgaggatcaccacaagcccaccagcggcgagagagcctgcttgcccggcgatctcggtgttcctcagaggcccggccttcacgaatgggcccaccagaaggtagccatgggcccagcccacctcgatccctctagtagtgggctcact

SEQ ID NO: 5117 - DNA, 336 bp, Glycine max
  unsure (1)..(336): unsure at all n locations
  Clone ID: jC-gmfl02220070d08a1
agtgctgcgatccctcagcnggnttncacggaaaggcccangctnggtaggccgcttgaggtctcgcaactgcatatattaatgattacaattcatcgctagctagagctgtgtcagaactggtgcaagaagcacatcatgaagcccctgcttggctctcacggtatgctgctcgatcttcttttggtggaggcaggaaccggcgatcaggcggtcgatttggtagtcgagactttcgaagagagggctctttcagtagaggttcttctgattactacagtgcgggaaacagcagtggcggtggatatggaggctctggtgggtatgctggtggag

SEQ ID NO: 5118 - DNA, 243 bp, Glycine max
  Clone ID: jC-gmfl02220070d08d1
acacgtatcaccccccaaaacgacaaaaacaattggtctactcaaatctacaaaaaatttgacacaaaccaacacaacccaataatcaaactgccatacagaaatatgacatcaatcaaccggacccaaaaccatttgtgcacaaaacccaaaatcaaacactgtaccctctgatggatggatgcaaaaccccaccattaaaaaggggagaaccccccaaacaagcctcttccatggaggcct

SEQ ID NO: 5119 - DNA, 377 bp, Glycine max
  Clone ID: jC-gmfl02220070d09a1
ggcaggcggagccagatgttggctatttcgaggaggaggacatcctgctgaaggccaaccaccacttctacagcttgaaggccaagttctccaacacctacaccatcaaggtggagcacgatcatcggttccgcgacttcaggtccatcctgggtagagtctggctgctcactgagctcgacccctacgacgtgcacggcgtcaccaaatgctgcgatctaactgcggacgagttccgtcgccagtgcctcgggctggagccgatccggtttccggcgcacgcccataatgcgcccatcctgggcaccaaggatctcctcagggtattttattggcgagaccgacgagccgtcactaacgtcaaggaccaacgggcg

SEQ ID NO: 5120 - DNA, 460 bp, Glycine max
  Clone ID: jC-gmfl02220070d10a1
tccaaaagggtcagattgtcacaagttttgctgttattggtgacaccattggagaccctctagaggatacatctggaccttcacttaacatccttattaagctcatggcggttgagtctcttgtgtttgctcccttctttgctacacatggggggctactctttaagatcttaaaggatttgattgaaaaagagtatcgtccatcatttttttacatcgacagaacaaggaaaagccgtcctttaccaatgccttctcgtttttgcgttagtctttaactcatctgtcatgtcaattccattgtgtttgaaaccttttcctcccccacctttgaaacaaagtatattttgtctcatgttagtttaagacaactttgattaggctgagtctgttgcgaaaatttttcttgtatgatgacgatgatgtttaccatctctttcccggggtcaattttttaaat

SEQ ID NO: 5121 - DNA, 443 bp, Glycine max
  unsure (1)..(443): unsure at all n locations
  Clone ID: jC-gmfl02220070d11a1
nggcgacgagactgcatgccattacgnagctggccatagcggtggaggcggttcgagcgaaaccctaatttctttaatcctttttttggaattcgacaatggagcagggggggagctgggggatgttcaacctgttcgtgacgcactaggacgggaaaaccctaaccctcctattcctcaatccgaggcggtatgcaagtggcaccgaagctttactactttaaagtggtgtacttctttgacagagaggctgcgcaagaccttaccatcatgaaaataaaggatggcatgtccactttgtgcaaccattacttcatcaacctgtggccggttccggcgatcggattccggtcgacccttaatcaagtgcaatgattgtggagcacggttcattgaggccaagtgcaacaaaaccctatatgagtggctagccctgaaggatt

SEQ ID NO: 5122 - DNA, 588 bp, Glycine max
  Clone ID: jC-gmfl02220070d12a1
ctggtgcacagtaacagtgtcacctgaaaattttggacatggatctcctccaaaatgtcttgaagaaactctcagtggaagctatttgttcctgatcattttaacctcagaaaataaatagattaaactctccagattgatttttcccaccactattcatttcaatacagttcttttgggtcaaccaaagtctacacttctgaatctgatcaacacgagcattattattttggctttaccaaggtgaagttgcagaaaacacaacacaccatatggttgaaagcctgtaaagattgctgagatgattgtggatatgtgtatatacttgtgttctgcatgttatacagaggtgaaaggtgatgatttgcttggtgcactatgagacgatactgaattgagtccatgtgctagtgttttagacttaggtgtggaagcctcttgcttcctgtaatattagttttcccttgtaagctgcattcatagtgatttagtttctttcttcctgtaagaaacttctcaagatgataaagatcagattcagtcattttggtttcgttatttcatgcattgtggcctttggttctaaaa

SEQ ID NO: 5123 - DNA, 561 bp, Glycine max
  Clone ID: jC-gmfl02220070e01a1
tatctctctattattctcgttttcaatatgcagatcttcgtcaaaaccctaaccggtaaaacgattacgctagaggtcgagtcctccgacacaatcgataacgtgaaagctaaaatccaagacaaggaaggcattccaccggatcagcagcgtttgatcttcgccggtaaacaactcgaagacggcagaactctcgccgattacaatatccagaaagaatcgacgctccacctcgtcctccgccttcgcggtggcatgcaaatcttcgtcaaaaccctaaccggtaaaacgattacgctagaggtcgagtcctctgacaccatcgataacgtgaaagctaagatccaggacaaggaaggcattccaccagaccagcagcgcttgatcttcgccggaaaacagctcgaagacggcagaaccctcgccgattacaatattcagaaagaatcgacgcttcatctggtgcttcgactccgcggagggatgcagatcttcgtgaagacgctcaccgggaaaactattactctggaggtggagagttctgatacgatcgataacgtg

SEQ ID NO: 5124 - DNA, 477 bp, Glycine max
  Clone ID: jC-gmfl02220070e01d1
gctattacaaaacgaagaaactattattggaattcattcaaattgaagtgcacatgattaataagattcaaccaaactagagaaggccaccacggagcctaaggacaacatagacatagaaattttgttatatcatacacattcaaggaagagaaaatctcaatagcaagattcaactgaaactagaaatcgccaccacggagcctaagaacaaggggaagcgtggattccttctgaatattgtaatcggcgagagtgcgtccgtcttcgagctgcttcccagcgaagataagacgctgctgatccggtggaatcccttccttatcctgaatcttcgccttcacgttatcgatcgtatcagaactctccacctccagagtaatagttttcccggtgagcgtcttcacgaagatctgcatccctccgcggagtcgaagcaccagatgaagcgtcgattctttctgaatattgtaatcg

SEQ ID NO: 5125 - DNA, 403 bp, Glycine max
  Clone ID: jC-gmfl02220070e02a1
tatctctctattattctcgttttcaatatgcagatcttcgtcaaaaccctaaccggtaaaacgattacgctagaggtcgagtcctccgacacaatcgataacgtgaaagctaaaatccaagacaaggaaggcattccaccggatcagcagcgttagatcttcgccggtaaacaactcgaagacggcagaactctcgccgattacaatatccagaaagaatcgacgctccacctcgttctccgacttcgcggtggcatgcaaatcttcgtcaaaaccctaaccggtaaaacgattacgctagaggtcgagtcctctgacaccatcgataacgtgaaagctaagatccaggacaaggaatgcattccaccagaccagcagcgcttgatcttcgccgggaaacagc

SEQ ID NO: 5126 - DNA, 519 bp, Glycine max
  Clone ID: jC-gmfl02220070e02d1
cattatagcctgtttttcaaaaatcaaccacatatatgaatatatcccagtttcttcccaatcaaattataccaagcactaattcttgtttcagatcataaggatccaagtattggggttaactttaacctcagcatgagccaaacctcctctgcaaagtatcctttgaatacattctaaacagtcacaatctcaaagtctgcatgctgagaacaattgcggaagtaggctgttatatggtcaaggttgttgatgaagattttatatggttgatccaactccaaagttcaatgacttcaatttagtagaaggcaaacatgctggcttcacaagggctgacgctccacaagtaaccttaactgtacagaaggatagtttaacagcttctgcattatgatgtccctgtaacatattgatcaaaccatgtaaagtctcctcttttttccttcgacgacatttttccaatcgatcatgtggttcatgtatatcaatgaccaagccatccatagaaggaagccg

SEQ ID NO: 5127 - DNA, 581 bp, Glycine max
  Clone ID: jC-gmfl02220070e03a1
attttatcaatgtagtgccatgttgccaagctgtttaaatagagatttgtgaatgttcattgatcaatgctttagaaaactttgttatgcttctagcagataatctggaggcaaatagattacggtgtggtaagcttggcaaagaccctactgttgaaactagctttctacctgacaggagtgctgaggattcttgttcagtgagcgagaggctgaggagcaagctgagcgtgaaaggctgcgcaaacagtggcttcgtgagcaggagcaaattcgaaatgagcctcttgaaatcacatacagctattgggatggaactggccacaggcgtgtgatccaggtacgcaagggtgacagcataggagagtttcttcgagcagttcaacagcaacttgctcctgaattccgagagattcgaacaacatcagtagaaaatttgttatacgtgaaagaagaccttatcattcctcatgtattagcttttaattcaaaaactctgtgtgcaacttgctatcttggttgtgtgtgtataagctatgttaacattattttaaccaaaggatatctgctaacttatttac

SEQ ID NO: 5128 - DNA, 418 bp, Glycine max
  Clone ID: jC-gmfl02220070e03d1
gcatgtaataaagggatcatgggatatatcatagcataggtatttcatacattgttcttttgaggagcacatgcagcaattcagtcttactacatgattctctttatttagaaaacaaagttttaccaattaaacaaacttatcagctaggctttgcaccttagacaaactgattaaggtactcatccacagggatgtatttcacatcaggatatagagctgaagcttccactccaaaagaagactcaatttcaaagttagtatgatcccccttaacataagaagagtggttaattgacaggttcacattcacgggtggggcggactccttaatttgcttcaggagttgtttttttggaacataaattctttgaagagttctaccaatctttccctcccagagagtaacaagctcatt

SEQ ID NO: 5129 - DNA, 526 bp, Glycine max
  Clone ID: jC-gmfl02220070e04a1
gctagtctcagtttagttagcaaacaaccccacaggccacatccaaaggttcatttcaatatggcaatcttgtcaagttttgctcctttgaccattcttagtttagtcttgttagtggttggaatcattgtgtctggggttgaagctaggccaagagcattctttgtgtttggagattcacttgttgacaatggaaataacaattacttggccaccacggcacgtgccgatgctcctccttatgggattgattaccctccaactcatagaccaactggtcgtttctccaatggctacaacattcctgatcttatcagtcagagacttggtgcagagtcaacattgccatacttgagtccagaattaagaggagataagctactagttggtgccaatttcgcttcagctggaattggaatccttaatgacactggagttcagtttgtaaacgtgatcagaatgtatagacagctagaatattttaaggagtatcaaaaccgagtgagtgctataattggagcttcag

SEQ ID NO: 5130 - DNA, 430 bp, Glycine max
  Clone ID: jC-gmfl02220070e04d1
aacatataactttccttacaattaataaactaaaacatgtagacagagaaatgtcatgaactagcaaggaaggtgaatacaattaattttgttctaggaaatttgggtttgtttatcttcatgtgtttgcgtccaacgctaagatggtgctaaggttcattgggttcatgtaggctttagaacctgacataatttcctccacaatgagcctattggccttttcagatggatggaatgcatcccaaaatgcatactgctctctgttggagcaaaggttggagagtgctgtgcatagcccaagtccattgtaaggtccttgcccacagcaagctacttgtgatgtaacaaatccaaattgttgggggttagtaacgaagtcgttgtgagcttttcctgtgtttgcagcaatgataacgtcacttccaatttt

SEQ ID NO: 5131 - DNA, 544 bp, Glycine max
  Clone ID: jC-gmfl02220070e05a1
atctgaagtgtgtgtagagttaacaagaccagagagagagacgaagccgaacgaaacataaataaaaccttgctcttttttcacgccctagctcattttcttctccgttctcttctctctgttcctcactcactcgcatttattcaccatgactaagcaacaagctaattggtctccatacgataacaacggaggatcatgtgttgcaattgctggagcagattactgcgtcatcgccgcggatacgaggatgtccaccggttacaatatcctcactcgcgattactccaaaatctcccaactggcggagaagtgtgttatggcttcttctggttttcaagctgatgtcaaagctttgcagaaggttttgtctgctaggcatttgatttatcagcatcaacacaacaaacaaatgagctgccctgcgatggctcagttgctctcaaacactctttattacaaacgcttctttccttattatgctttcaatgttttgggtggccttgacaatgaaggaaagggatgtgtcttcacatatgatgct

SEQ ID NO: 5132 - DNA, 445 bp, Glycine max
  unsure (1)..(445): unsure at all n locations
  Clone ID: jC-gmfl02220070e05d1
tgaaatgcatngcatncgattcnctggtatgtaattaattngccgagatgcctagctcactagccggcctccgccctttttattctctcttttacattctgtatcacttcttcattaaacctaagggatttggggatacttttaatacatttaccggcaatcccccatttatttatcctagttcctcgctttcttcttgatgacgctgtcctttctttttgatagaaaataacacccttactactattactatactacgtggtttcaccaccaatcaacaatggttttaacctcttctcccacacactcctctacacgcttcgttcgcctcccctcctttttacactccaaccaccgtttagctttcgttcgtagagtccgttataacctttcacacccaaatctccataatctcaccatttaaattctctttcccaacttccca

SEQ ID NO: 5133 - DNA, 459 bp, Glycine max
  Clone ID: jC-gmfl02220070e06a1
gatcttcttgacatcgactccattgttgctgccataaagggttgttccggcgtaatccacggtgcatgttctaacatcattggtcaagtcgaagatcccgagaaacagatattggaaccggcgataaaaggaacggctaatgtgttgaaggcggcgaaggaagcaggggtggagcgcgtggtggcgacttcatcgatttcgtcgattatgccaagtcctaattggccagctgataagattaagggagaagagtgttggacggaccctgaatactgcaagcaaaaggggttgtattatctcattgcacagactctagcagagaaagcgggttgggactttgcgaaggagacaggttttgatgttgtcatgataaaccctggtacagcattggggcctctgcttcctccagaatcaatttaagcatggttgtgcttgttagtgttctcaaagggggcaaag

SEQ ID NO: 5134 - DNA, 538 bp, Glycine max
  Clone ID: jC-gmfl02220070e06d1
acagaaattgatgtattcattgaacaaataatgagatttgctacatcacaagcccaaaaatatccttcatgaatcatcacaataatgcgcaagctttattacaccacaaacaatgcgcacttaaatacacaggcacagtaaacccagagatagcttttgacttattctcttctggtcgaacatagccctcgccccacatacaccagaatcatttgccctctcccccaaaacaaaacaagtgttaatttcaatttatccatgtggtatggtatggggacataataatttacccctagttttattgatgtacattttatttcacgtgtttatatgaaagacttgaaataattgaagagacgtaccacatgggataaattgaaattaactcagcagaagcaaatagattactctagtatatatagtatgatgtttttttttttccgataaaatatagtatgatatgtttttgaacagtggacaatgcaaattatatataggggtattcctggactagaataattgaagtgacatgaaattt

SEQ ID NO: 5135 - DNA, 480 bp, Glycine max
  unsure (1)..(480): unsure at all n locations
  Clone ID: jC-gmfl02220070e07a1
ggtcaacctctggtttgacccttctgcggattttcacacttatactattatgtggaatcatcatcatatcgtgttctacgttgatgattttcccattagagtgtacaagaacagtgagggaaagggaatcccatacccaacaatgcaagcaatgggagtgtattcaacattgtgggaggctgataattgggcaacaagaggggggttggagaaaattgattggagtaaggcacctttttatgcatattacaaggactttgacattgaagggtgcccagtgccaggacctgccaactgtgcctctaaccaaagtaattggtgggaaggggctgcataccaagctcttaatgccattgaagcccgaaggtacaggtgggttcgtctcaaccatatcatctatgattactgccaagataagtcaaggttctcagtgaccccacagagtgccttgccgcatttaaacncttaattcaagtcact

SEQ ID NO: 5136 - DNA, 372 bp, Glycine max
  Clone ID: jC-gmfl02220070e07d1
ttccttccttttttttttttttctctgtatttttccattctttttttttctttttgggggtccgggtaaaaactagttccgatttccactttaacccatgggacaataaaaaaccctttgtactccccctttttcttctctctttcccccttaggcggggacctttattgcgccctacctttggccctctccctaacaaaggcatggtggccccacaattattctaaaacttgtcctcttttggttgtacccagggcacttccctacataaactaacctttttgttttaatacaaaaaaccccccttggataactaaatttccatgggcccattggaaatccggtgaaagagtccttttttttttgctagat

SEQ ID NO: 5137 - DNA, 509 bp, Glycine max
  unsure (1)..(509): unsure at all n locations
  Clone ID: jC-gmfl02220070e08a1
ctctctctcacttgggtacgtatgttgtgttcttcattttccaattgcatgtgatctctcatttctcaattcaatttctcccctttccctcttccccttaatctgtgaggaaaagggaattatgggttctctttatttcagttcaatttttccttttagtgttaaaaatattacctttattattattattattattgtgtggagattgattcatgtaatttgttgaagggttgaagatgagaatttgtggagcaggtatggtttgatattagatttcctttaatttatttggtggacttatttcctgcatgtttctgcacccaattctattaacaattcttggtcatgtgagtttggtttatttttatgtgattctggggcaattctcaatttatgtaaagcattggagcaaggaggttgcacattaggccagctgtttgcatgaaaaaatatgaatttatntattggcaccaatcttgacccaatacggatatccattcatttgttgg

SEQ ID NO: 5138 - DNA, 491 bp, Glycine max
  unsure (1)..(491): unsure at all n locations
  Clone ID: jC-gmfl02220070e09a1
agatcatagtatgnccctcgangangttgcacggaaagagggcgnaagtctnggaaaggcctctacgagcgaataaaccgtacctgttatttgctcgctatcttnaatactatggaaatcgactgtgcagtgaggcactcgtggggctttttctattgcccccaatccccgctggcggactccgtaccagaaagattctctggcacctagtttactatcaatgctcgagcagttttgtggctcatcgccgtctttcaggctggcgatgtcttaatacaatcatatcacaatttcatcacagactttgagacgaaactcaaccttcttaagcttgcacattttgctgccacagattctcggcagtattttgaaaaagaagctgctgttggctaacttggaggggtgatttacaaacttcaagacactttggagcagcgcatagataaaacctatcttttacatttagatgtcaatagccattttcatgcttg

SEQ ID NO: 5139 - DNA, 271 bp, Glycine max
  Clone ID: jC-gmfl02220070e11a1
gaatatgtgtgctgagaattgaatgtttttattggttttaacaatgtagagaggaacccgttgttgattgaggaaggtggtttttgactttcggttcttttggttcttttggttcttttggagttgtcggtggtggttttggagtgttgccgaaatgaatgattctactgtgaagacttggccatcacggagaagaaggtgcatcagcttaaacctggtggctgcgttggcattctctttcaccttattgattggaagaggcaactctcca

SEQ ID NO: 5140 - DNA, 565 bp, Glycine max
  unsure (1)..(565): unsure at all n locations
  Clone ID: jC-gmfl02220070e12a1
ctcgagccgaatcggctcgagaaaagattcaggatcaggaattaatccactagatatcccaaagatattcactaagtttgcacaaaaccaatcgttaacaacaagaaatcctgctggaagtggacttggcctggcaatttgtaggagggttgtaaatcttatggaaggacatatttgggttgaaagcgaaggtattgataaaggatgtacagtcacttttattgtaaaacttggaatcccagaccgatcaaatgaatttaagctaccttttgtacctaaagtaccgggaaatcatggatctacaaactttgctgggctcaaagttcttgtcacggatgacaatggggttagcaggacagtaacaaagggacttcttatgcatttaggatgtgatgtcaccacagcaagctcaagtgaagaatgtctgcgtgttgtttctctggaacatgaagtggtcttcatggatgtctgtgcagggctagatggttatgaactagcantccgtatacatgaaaagttactaaacatcaagattgaccactaatagttgctcttactggaaaca

SEQ ID NO: 5141 - DNA, 518 bp, Glycine max
  unsure (1)..(518): unsure at all n locations
  Clone ID: jC-gmfl02220070f01a1
acagaataagaaagagaggaagccgtagattccaacgctttctctctgagtcacacacacacacacattgcagcaacaacaacaaccacacccgattccatgagtcgctacgatcccaatcccttcgacgaagaaccggtcgaggttaatcccttcgcggatggagcagctaaaggaaaaggctcagggcaatcaagttatagtggaggtgcattttatactactaacactggaagtgttccctcctcaaactcaaggctctcaccccttccaccagagccttatgatcgtggggcaactattgacatccccctaaataatgcaaaggacgcaaaagcaaaggagaaggaacttcaagctaaagaggctgaattgaaaagaagggaacaggaactaaaacgaagggaagatgctatagcacgaagctgaatagttatagaggagaaaaattggccaccttttttcccatcattcatcatgacattgcanaggaaataccagtacatcttcaaaggatc

SEQ ID NO: 5142 - DNA, 484 bp, Glycine max
  Clone ID: jC-gmfl02220070f01d1
ggtaaggggctatctcaaacaatgatttctatatatgcacaactaagcttctatcttaattaggtgggttgacacaaacctaggaaaacgcatcccagtattaaacaaagagtaaagtttgtaaggagaactggtaatggtaactcaagaaatcatttttcgggtatatccattaggaaaacaattgtaagtgccatgttatagagctgccatcattgtccctctcgcagcctcacgctttaaaactgcagccttgccactgccacggaagtacatatatacttgctgtataacccagatgctcagcactgactcgagacagaaaaggccaaatccaatgaagtagaatatcccaaccaatgcattgtctcccaacacatcaatcgcagccaaaatgcctgtgagagattttcctttgaagataattggtggagcaactgcagctaaaatgcaaaaggcaatgtgcaacatgtaaagcaagaag

SEQ ID NO: 5143 - DNA, 559 bp, Glycine max
  unsure (1)..(559): unsure at all n locations
  Clone ID: jC-gmfl02220070f02a1
ggcaattttagctgcatctggaaagttttctctgtgctcctcctcctttgtcatcaacctacccactgtatcttatctacttttccgtgcactgcttcactacatctatgttggctggacccagattccccaggaacaactcggttctttgagggatttaagtctacagtttgaagtgacaccactggtgaagcagtgtgaagagactatggaacggtttaagctagataagaagttgtttgacacgggcaagaatgtggagttaacatatccatctatccgacctcattgctcaactttgccctcacttcctgtcagcactcagcaactgaaacaattgaaattaacaggccagtacagtgatgtaaacatctacattgagggttatgggctcattgcacgagctcataaaattgttcttagcttatggagtatccnctctgctcggatgttcacaaatggaatgagtgaaagcatgtccctcgaggctactttaagggatgtcccaccggaagctttcaaggcctatgctaactttttatatgatgggcaattgaat

SEQ ID NO: 5144 - DNA, 212 bp, Glycine max
  Clone ID: jC-gmfl02220070f02d1
catcaatctttggagaaggcctacttcctctgcgatgacttggagagccagaatcaacacgtgactgtttccttcctctatgaggtgaagtttctctatgacattttggagaaacaggtgatttccttgtataaggacttacactcctacttctgtttcttcttgaagcagatgaacgatgatcaagtgatctatctgaatctcgtcttctg

SEQ ID NO: 5145 - DNA, 591 bp, Glycine max
  unsure (1)..(591): unsure at all n locations
  Clone ID: jC-gmfl02220070f03a1
gaagggaagactaaaactaaaaccccactctctttttccgagtcttccagtgaaagaaaggcagcgatggaagaagacttcgacatccccggcggcgaggaaatggatctcggcgaagacgaggtcggcgaggagagggagatcggctctggcggcctcaagaagaagctcctcaaggaaggtcaaggctgggaaacccccgaagtcggtgacgaagtccaagttcattacacggggactttgctcgacgggactaagttcgattcgagccgcgacagggattctcccttcagcttcacgctcggacaagggcaagtaattaaaggatgggatgaaggtattaaaaccatgaagaaaggtgaaaatgctattttcaccatccctcccgagctagcttatggtgaatctggttcccctcctactattcctcctaatgctacactccaatttgatgttgagctgctgtcatggactagtgtaaaggacatatgncaggatggcggtatatntaagaagataattactgagggggagaaatgggagaaccctaaggatcctgatgaagtattgggtaagtatgaaagtcatcta

SEQ ID NO: 5146 - DNA, 497 bp, Glycine max
  Clone ID: jC-gmfl02220070f03d1
gaaaatagtaacaattgacaaattcttgttattgacaataacattgtattttgaggatacatcattatgacaaatgacaacacaatagtattgaacccaagtgttgattactttctctctctctctcattctctctctctaattaacatcttattctgttggaaattatgaactggaaactggacatatgacgcacataactcttttgcttgcttaagtatatagaaacatgaaatggtagatgtatagagatctcactgagatgatcccttaagcttcttagcaatgccagcaaagtacttcccttgatgaaaagcttgagccaattctaactcagttggttgtctggaaccatccccggcataggtacctgcaccataaggggatccacccttcacattctccatctcaaacatcccagcacaaatgtgtaaccaatgggcacaaaaatcatcccatggtgaacaagctgagtaatagatgtcaacggagtagtc

SEQ ID NO: 5147 - DNA, 411 bp, Glycine max
  Clone ID: jC-gmfl02220070f04a1
gtgatctcacttggactcagtgtgaaccatgtgctcgttcttgctacaagcaacaagatgctatctttgatccatcaaagtctacatcatattccaatattacatgcacatctacgctttgcacccagctctctactgctacagggaatgagccgggatgttcagcctccacaaaagcatgcatatacggcatccagtacggtgacagttcgttctccgttggctacttcagccgcgagcggctctccgtgaccgccaccgacatcgtcgacaacttcctcttcggttgcggccaaaacaaccagggcctctttggtggctccgccggcctcatcggcctcggccgccaccccatctccttcgtccaacaaaccgccgccgtatatcgtaaaatctcttcttactgcctcc

SEQ ID NO: 5148 - DNA, 364 bp, Glycine max
  Clone ID: jC-gmfl02220070f04d1
ccaacaaacttttatttaaaacccgggcccggttcccatttttttttttccccccttccatttgtccaatggcaagcaaccccccgggtggggagaaatattttcccccccccttttttttttgggccccaaacttttttttttttaatcccccccttttgggttcccttttttttcaatggccccgggtcccccccctttgcaataaagggaccccccttttttttgaagcccctaaccccataaaaatggatttttctttaaccaccccaaagcatttgttaaatttaaaaaactgggggcccccagccccaaacccattttttccccccccaaaattaaacaaaacctttttggtttttgg

SEQ ID NO: 5149 - DNA, 428 bp, Glycine max
  Clone ID: jC-gmfl02220070f05a1
gttttaacccatttgttttgctttatctttttcacttttcagatcctttttcgctcaattctgagcagaaaacttatatccttgtctgaggttaacttttttcatcggtaatcccctccctccctacggatcgtgtcttttctttccctcattacattcctttaaagttcaaaccactcctccaaccgcaccctttttcttgtaggacacaacagacaacaaccagagcaagaagaaccagtttttgtttgtgtgtctatttcagctgccaaatatggataggagcgggcaaataccagcgtttgggaactgggattacgcgaacgagttgccaatcactcagtacttcgagagtgcgagacaagctggttaagttcgtacagttccttctccggcgaaagtgacccttacgtgcgtgcagatcgaga

SEQ ID NO: 5150 - DNA, 493 bp, Glycine max
  Clone ID: jC-gmfl02220070f05d1
agatgcaagtatttatacgagttggcgatattataaatgtataatgcagatacaaggtgaatgcatccaagattagagcataaaatttgaaacttctcaagggagaaatctggctgtacaggacaatgattcaagttgtctccctagtgtacattattttgcttacaagccaagagcaccaaggggtgtcttgccctggccagcctcaaagtagaaaatcagcatagccaacatagcaatcctagcatgcttaatctcagccaatttcagtctctctagcttgtcggcatccggaatgtaaacgccatccttgatagctccagcaaatcccaaagggtcaaagaattttcctccagggtagccttgttcaccagtagagttgccaaagttctcagcagtttttgaccatggagtggcccactccactgactgagaatctgggttgaagatgtccacccattttttgctttaacccaccccatttggagcaact

SEQ ID NO: 5151 - DNA, 363 bp, Glycine max
  Clone ID: jC-gmfl02220070f06a1
ctaaaattatagggctaaggctatcaagttcaaaggcaatggaatttctcaggtgccctgtttctgcatttttattcccagcgttttgctttattattttctttatcttctttccttggaaagaacaaaactatgctacacacttccctcctcctttggtcctttccactattatcaaagacttaaacaaccacacaaatattataacctctccctctccctctccctctccctctccttcactacaaccaccacctctcctcccacttgagcttctttccaattttactcctgcaaatgaaagctacaataacactactgttttaagtagcactattatgaaatatccaagtttggagaaaa

SEQ ID NO: 5152 - DNA, 335 bp, Glycine max
  Clone ID: jC-gmfl02220070f06d1
actagttggtaatgtctttctaatataccaagagagaacgtatatatacatccatacataaatacaccatggagccatatatgcaaccaaccacaaataaaagctgatttctgaaatacaatgaacagctataacctaaaatacagatactatttctacatttttccccttcaacaacttctatctatcatacacctatataatcaaattattgagactattttaaaaccacaaaagcttaaagaaaagtgttgcaccacagcagcagttggcagagtagaaaaatcgtagcatctaatgtttatagcaccacaactaggcttctagaggaattc

SEQ ID NO: 5153 - DNA, 438 bp, Glycine max
  Clone ID: jC-gmfl02220070f07a1
gggaaagttgttagaaatcaaccaaaaataaagcaataaacaaaagagtatgggttcttagtcaaattagtagtcatttgataagtatgggagacataaaaatttatagaaatcacttaaataaaagatgattaactctccccccccccccccaaaaaaaaaaaaacagacatgcacttggacatgttgaaattttaagggtgttttataacactggctgaaattccatactgagcttttttttgttgaaaaatttgagaactgaatttctagtaagaattgaatttggagctttggaaatgatcctcatttgacatcttgaaagtgtattgaaggaaatccggaaagtattgtcatttaaaaaatgaatgatgatgtgttgaagaggctgcagaagaatataacttagtccatgaactaaatggttatatctttttt

SEQ ID NO: 5154 - DNA, 526 bp, Glycine max
  Clone ID: jC-gmfl02220070f07d1
aaacaatgaaaatccttcatttattggtgtacatatttggctaaagaagataatagaacatatctctgtgtaagcctactcagtaatctcaaatgcaatttataattatggaccaggaaagtgagaaatacatccaaataaaccatgttaaaaaagaaagaaaccaaattctgagctagggaaagctatcccagcaacaattaactctcagtaaatgaggtgattgaacatggaggcacccttcaaggctaagtcagattggggatatcaacattctctgttgagtcaatctaaaatcatctcaacaacccataacagcacaattatacacgaacaccccgacatgctccttcacgccaagtacctgccaatctatggtgccattgctgatccctgacttaggacaccatgaactcagcacaatagcttcaccttctggacccctttgtccacccacaaccaaaagttgctctccacaagccttgaaagccaacccccaaccattagaagaatctgctcggactgg

SEQ ID NO: 5155 - DNA, 458 bp, Glycine max
  unsure (1)..(458): unsure at all n locations
  Clone ID: jC-gmfl02220070f08a1
gtgctgtgagaaatttatagagagagaaagagagatgtgtttggtttgtggaataattggtgacttgaatcgttgaatgagatattattgagtttgattcagaaatgaacaaagacgaaagcgataggaacgaaaagaaagcgcaagatattaagctttggggagttttcatcttcggattaatcggcgccaccgtcactgctttctccctgtccaggtcgcaggcaaaaggaggcagctctttccgaacagcatttcaagaagaagcatggaagaggtacaataagcgattgcaagaggagtatgaagaggagatggagagggtggaacgaataagacgtatgcaaagtgtgtttaatagagaaagggataagcttagaagaaactacgagagctggaaggaaaatggtgccggtgcacatcatcaacatttncaaagagatgattggtattggaag

SEQ ID NO: 5156 - DNA, 390 bp, Glycine max
  Clone ID: jC-gmfl02220070f09a1
gttctagatcgcgagctgccgcccttttttttttttttttttttttttttttggtttttacggaaatatgaaattttacttggctaattaaaacgataccaaaaacaaaacacaagccaagtgaaagtgagaaaaaataaaaatcaaagagcataatgtcagggatcattcacaagattggggagaccctccatgtgggagggcacaagaaggaggaggagcataagggtgagcaccatgctggagaatacaaaggggagcaccatggtgaacacagtagtgagtccaaaggagagcatcatggtgaacacaaagctggagagtaccatggggagcacaagccagagcacaaagaggtgttcctagacaaagtcaaggacaagatccatg

SEQ ID NO: 5157 - DNA, 261 bp, Glycine max
  Clone ID: jC-gmfl02220070f10a1
atttaagctcacaccgtaacacatttttaccatactaaattctgaaacccttttctcaagggtgaggcttaggcatatacctacctcttcttcctcctccgaccagggcccaacacaaacgcaccattgggctcgatctctgggcgacccaatgtcatggagggatccccttacaactacatcacgcttcgatcgacccaccatggtccttcccccaatgctcgtattcgacttcttcgtcatggacgccattctcgcctg

SEQ ID NO: 5158 - DNA, 409 bp, Glycine max
  Clone ID: jC-gmfl02220070f11a1
aaaaaaaatcacagaattttcgcagtccaagaagacacgcatcccaaaccgttttgatttggaacgtgtcacgctctaaatttgcatggcatattgtctttaactgagtcaatttcgcttaataaaacctctcttcactcctctgctttaccaacccaaccccctgttcctgtgtgtgtgagtgaccgagtgagtttgtttttctcagctgatatatatggcgcttgatcgctccattataagcaaaacgacgtggtacagcgtcgtattatggatgatggtggtgctggtgagagtgcacggtgcagccgcgaggccgaaccggaaggagtgggactcagtcataaagttaccgactgaaccggtggatgctgactcggatgaagtgggaacacgatgggcggttctc

SEQ ID NO: 5159 - DNA, 577 bp, Glycine max
  Clone ID: jC-gmfl02220070f12a1
atttggttctgaagtagaagttacttaatttgtgcctttttctactctattgtattttgaatacaaagaatttagaagcttggaagttctacgtttattttcatgtattaggcttgcgaagagtaaaaaaaagtgagtgtgttctgagatacaatgtagcggtgtttgcaggtcatgccattggggcaaaggctgcaattcctagaatgtttccaaatatgtttccactggttataagtcagagaaagtcacaaacagaaggctgattgcagtcatgaaattgtctcttgacaagtctgcccaaggagaaagaatttctgacataagcaagaatggtcatattgcttcctacaggttaatgactttgtgtgcttatcagacattgcttatgttagtgaacaagtgttgatgatggagaaaacaattcttaggaagcttgaatagtacttaacagttccaacatcctatgtcttacttggtttggtatatcaaaggctccactccacctgttaaagagtgtaccctaggaatgagccctttcgggacaagcacttttgagcactatactggttacact

SEQ ID NO: 5160 - DNA, 482 bp, Glycine max
  Clone ID: jC-gmfl02220070g01a1
aatcgaataggtactaactatttcgtgctgtgagtgagtgtgaggattgttgaatcgaatcgcgaaactcttacttacacccctctctgtttttctattcacaagggttttgaaagatggcggttgaaaatcccgaggatggattgaagaagctggaatacttgtcgctggtgtcgaaggtgtgcaccgagttggagtcccacaccggcaccggcgacaaggttcttgcggagttcatcactgagttgggtcgatcatcggagaatgttgaggaattcgacgagaaattgaaagagaatggcgcggagatgccggattactttgtgcgaacgctcctcaccatcatccacgccattctccctccgaagccgatggattcgaagaaggagaaagacagtgtcaacggcaagaccaccaagttcaaggctctggccatcgcggacgacagggacccggccaaggagcttcaaaaggagttagaa

SEQ ID NO: 5161 - DNA, 516 bp, Glycine max
  Clone ID: jC-gmfl02220070g01d1
cctagtaatgaaaataaaaatatgtctaactttccatttaaatcctcatataaggacaaaaactgcatttaaaactaaatgcaacatataacattatccaagacattgcataaagagaacatagatgaattacatattatgcacgacgtttactcaaacgccatgaatttggctcatggtatctgtcataaagtggttcaattcgctcttgacgctttcgcttgctcatctttgtaggatctgccactttgaagtatcttggagccaattcaacaagccatttggggtctatgacagtgacctcacgcatatattccttagttgtcatcacaagctcatggtagatgacccagtctggttgtctctggaacagagctgaacttggatggatatacacaggctggttctcacaagggttctgtaaccttcctgggggtcctttctagaagcatggaaaaagaaccctgcagtgatagccttcctgactttggtgaattttttcccgcacttacaaca

SEQ ID NO: 5162 - DNA, 605 bp, Glycine max
  unsure (1)..(605): unsure at all n locations
  Clone ID: jC-gmfl02220070g02a1
atcttgctgagagaagaaagctagaagacttgacaatcggcccagtcctcacatgtacgactggtatgatgctagaacacaagaataaattgcttgagataccaggatcaaagctgctctttgggggtagtcctctagagaaccattcaattccacctatttatggtgccattaaaccaacagctgtctatgttcctctcgaggaaattatgaaggataagaattttgatcttgtaacaaaagaaatatttggaccctttcaggttatcacggactacaaaaacagtcaactatcagttgtattggatgctgtggaaagaatgcataaccatttaacggctgctgtagtttcaaatgatcctttgtttttacaggaagttgttggcaattcagtaaatggtactacttatgctggtctaagagcaaggacaaccggagctcctcagaatcattggtttggtcccgctggcgacgctagaggtgcaggaatcggaacaccgganggctataaactngtatggtctngccacagagaagttatatatgattctggacctgtgccaaagatggcaaacttctcagtcacttgaaaaaagtcctatcat

SEQ ID NO: 5163 - DNA, 435 bp, Glycine max
  Clone ID: jC-gmfl02220070g02d1
tttcgtccttttttctaaatgttttaacgtttttatatatttacacaactatactgggatgttgtgacattttttacaaactcaccatcaaaatcgcgctactaataatccaaaaaatgtcctatcaaataaccgcttctcttggtgttgtgctaaacaaaatactaatattagtaatataacactgaatagcctataatatatgctcaaaatatggccaaaagcacaaaaagggccatcataaacgcacaagtaggttttatcttaaatgagagattacgtgacagcacatgattattatactggcttgatcttgcttcaagatccacagctatggcaggagaaatatcacgtgtatttgatcggttaatatgttaagtagagagattatcctcataacacttagattcccttcaaccaaaaatcatgttctca

SEQ ID NO: 5164 - DNA, 515 bp, Glycine max
  Clone ID: jC-gmfl02220070g03a1
cggaaccttctcagttctcacacaacataaacacatacaagaacagagcaatatatctatctatttctctgttctgttgtctcagcaaaacaaataataaaatcctctcgtagctaccttcaacaactcttgttcatggcgtgtcaccgttggctctgtatatcactgttgctgctgctgctgctgagtttagcttcgcagagttgccacgctctccattcgttcgggttcgacattcaccaccgtttctccgatcccgtgaaagagattctcggcgttcatgatttacccgacaagggaactcgacaatactatgttgctatggcccacagagaccgaatattccggggccggagactcgccgccggttaccactcgcctctcacttttatcccctccaacgagacttatcagattgaagcctttggattcttgcattttgccaatgtttctgttgggactccaccattatcgtttctggtggcattggatactggcagtgactttgtctggta

SEQ ID NO: 5165 - DNA, 456 bp, Glycine max
  unsure (1)..(456): unsure at all n locations
  Clone ID: jC-gmfl02220070g03d1
aacaatcacgccatgtcacatctacatttatggggaggcttgcttgactttaaaacaataaattatgtattacaaactgcaagttttccttgctcacagattcttcatattaaaaagaaaatttatccattaacaaatatttaatgcgtgtttgggtattcgacgaaccaacattggtgaaaactgaagttcgcaaaagcatctccatcattccttttgcggtaatatacggttgaccatagaatttaaaattgcaatttttgctaacaagattaacggaaagtcaaacatgctttttatctcattaaaacttaatcattctcatgcacaagaccaattatcttgagctcagatttaagcttcaccattttattcttcggaaaaaacatggttagaaacttgccaataacaccattctccatagaacctttgggcattnggttcaccaaaacaacc

SEQ ID NO: 5166 - DNA, 554 bp, Glycine max
  Clone ID: jC-gmfl02220070g04a1
tagacatgtcatctccatctagacaatcaaaatctagaaacttaactttgaatgaggattctgttaatcattcaacaaaagcttctgtgtccaaaatttcatctccggcatctctgagttccttggcttcaaagtctatatcttacaaagaagtggctttagcaccaccaggaactgttttaaagccattgttggaaaaggctgacatggaaagggttaatgctggagatgagatatgctgcaatcctgctgtgacatcaataagtgaaggtagttgccaaagttccataactaatacagtttgtcagcatgatgaaacagaggaaactcatgaaaatgaacctcaacaagaaagttctggatcggaacttgagaaggtttctgatcaggcaaaatctacagcagaaacaaatggcagtaagctttcagctgcggccaaacctttcaatccaggaatgttgtccatgtctcaccatttaaattcagcttccttcacaagcatgtatgatacagatgttagtcaaggcatgcacgtggagactgtgcttccccct

SEQ ID NO: 5167 - DNA, 552 bp, Glycine max
  Clone ID: jC-gmfl02220070g04d1
aaaaatgaagttgtcaatcagctttttattgataaaacaaaatttccaagtatcagaacaaaacttactatataatagagaataaacaaatcccgaatgcacttattatatcgacaaaaaacaaaatgaattgaatgaccaaaaattctaggccatgaagttataaactattaacaatatgatgtccagagcttcggccagacaaacactcagatgtagagacaatatccgttatttatttcataactctattcaacgaactgaagcacaaatggactgttggttgtacaattctgtgactccatttgtgatcttctgcctgtttttcctcctcttcgagacaactataaacccttcaccatctccattctttttttcagtaacacctaatttctcttgctcatcactatcactggaatgaggcactgtcttattcttttcttcatttccatacataatgtttatgacagcactgtctttggctatttcatcagaacaactttccaagatctcaatttttccttcaccatccttagactcatccacagaatc

SEQ ID NO: 5168 - DNA, 614 bp, Glycine max
  unsure (1)..(614): unsure at all n locations
  Clone ID: jC-gmfl02220070g05a1
ngcgacgcatgagcactgttatgacgtttgatgcacacgacccaagctcggaagttttctcgaggtttaatgcacacatttttaggtttttttatgaaacgacactattatcatgaggacgaaggggatattttaactttatgctttcatatgctctatgaaataactgatagttttcataaagcatgttaacgtagaaagttacagtaagcattgtaaattaagagattagtccttagcttctggctgaggatatcctaggtcgacctaaaaaaaataactgataattttcgggcatgtgcagatataggaagaactataaacgtgtcagcatacaagctataaagaattgggctcgccaaatcttacaaggtcttgtttatctacattgtcatgatccacctgtgatccatagggacctcaaatgtgataacatatttgtcaatggtcatcttggacaagtaaaaattggtgacctgagactggctgcaattcttcacggttcccaattagcacatagtgttataggacctcctttggttcaataagtgttgcacacttaatttcagtactaagaaactgttctatttttattgccaataaaattttctctt

SEQ ID NO: 5169 - DNA, 468 bp, Glycine max
  Clone ID: jC-gmfl02220070g05d1
gaaacagcaagggctcaattccacctcaaagaatttacattcccggaataatgtacagacgagaactgaaagagaagaagaagaaaagaaaaaagaaaagagaattcccatatcaccaccaattgttgaacatgcaacctagagagacacccgggtgtcacgagctttgctttttcacgaaagcaacctggctacaaaacaaaaccccccaacaggtggccatgtttggcccgatcaagggttctaatccgacgaggagtgtgcggtttcggtggtcccagtcccagcctgtgccatttcaagcgattttcggttctcctcgcaggtgcacgtgctggtgttgtcgccgaaggaagaggacctgctagtgctgcaactcgaaacactcggagttgctaagaatgttggcttctcttgcccggccatgatcaccaagatcttctcctcgtatggtttcgcaggtttctg

SEQ ID NO: 5170 - DNA, 299 bp, Glycine max
  Clone ID: jC-gmfl02220070g06a1
aagacattgaccgtgtgtgcaggggtctacctaaaagactacgccagcagaggctaacctataatggcttagacctgacagtggcctcatacaagagtaataggctagagataataaatctctcgcttgatccttgcctgagattgatacttgtgcaaagctaaacctcgatacaagattttgaggtcaaacaggcgataaaaaaaatatctaagcttgcctaatctccaaaagtgacaagacttaaatgaagtgcttatgtgtcttactaggactaatgaatgtagaatcgagttggg

SEQ ID NO: 5171 - DNA, 412 bp, Glycine max
  Clone ID: jC-gmfl02220070g06d1
cttggggaaggggggcctttttaccaaaaaaagggttgggccaacggccttccctttttttttttaaaacccaattttggggggaccccccccaattttaactaacccatagctaaaacctttaaaaggccccccgccccaagttgaaaaaagttgttgcccattcaatttaaaaatacccccggaaaaaaaaagttgctgaaataccccaagggcccaccaaaaagccccccattttggtttttaaaaacccccccagggggggtcccgttccccccccggattggggcctccatttttcctttgatgaacccctaaaacggtttttcccacttataaaccccttttttggaacgggataaactttcggtggcaatccccccttattcagggaactgcccttttcaaaggg

SEQ ID NO: 5172 - DNA, 432 bp, Glycine max
  Clone ID: jC-gmfl02220070g07a1
cgcctccgcggagtctcagagatcaattcccacgccctttctcaccaaaacctatcaactcgtcgacgaccaatccatcgacgacgttatttcctggaacgacgacgggtcaacgtttatcgtctggaaccctaccgttttcgccagagacttgcttcctaaatttttcaaacacaataatttctctagcttcgttcgccaactcaacacttacggattcaggaaagttgtgcctgatcggtgggagttctcgaacgattatttccgccgaggcgagaagcggcttctttgcgaaattcagcggcggaagatctcatcgccggcgccgtctccgactgcgccgacgacggttacagtggccgatgccgtgaccgcgataccgatcatatcgccgtcgaactcttgcgaggagcaagtgatatcgtcgaactc

SEQ ID NO: 5173 - DNA, 536 bp, Glycine max
  Clone ID: jC-gmfl02220070g07d1
gagcaccaagaaacattcatattacaattattttatctaaaccaaagacaatttttatggggatacactacagattgaaaggaaaaaaagatggaacagatcagatggctaacaaaagtccataagtgaaacaacaaaatgttggccaagaaaataaatttagtagcagaacataaaaataggtgtacattaatcggtttcagagactggagcaagtttcacgattttattgctcctggattcgttctggttaagaagaaatcagttgcatgatccaacagggtaggcatcaaatcccatttctccatccaacaatgtcgactcattttgctcccttttgaccattacacccattatgtcatccaaggtcccaaaagtattctgcataaatccatcttgggacttcatttgctccaaaatgtaggcttcatttggcttcagtcgaatgtctgaagagaatttctcaacttcagtgcaccggctgattgatggggatgctccatttagttggccaaccaaagatgatgcatcaactc

SEQ ID NO: 5174 - DNA, 386 bp, Glycine max
  Clone ID: jC-gmfl02220070g08a1
catacgtaatacccaatttttggagttttacacagccgatttgcatagaccaaggctcatctggtgccgaacaaaggctttttgggcgagcattcgtcttcaccagaaagaggataatggtggctcgtgaagacatatatggtggggaggaagtttgtcttggccaaccagaccctgtggtgtcgcagattgcacggttgcaaatccaacttacagtaaaggattaggaactgcctacttgccagagcgtagaaatggccttcctggcatcttatgctcaaaaggacagggccctagactagctgatgaatgaagtccgcaaggtgcatgataaacttagacttaccgtggatcatttcaacatttgctagcaatttaggaacctg

SEQ ID NO: 5175 - DNA, 404 bp, Glycine max
  Clone ID: jC-gmfl02220070g09a1
gcgatggagaaggaatcttgtagctttgacgacccttcttcgttcacgcttggggtgttggggccttccggcctttcaccttcacaggtttctgtggcattcagcgacgcctacgaccggatcccccactctgacgtcatcttggtgaacacgatttccgagatatggaagcagaggagtcagaagaacaattcgctcttcaatgggaagaagttcaggtatggagggtgtgttttgcatgccaaagatggatccgaccatgaatgtgaaccgcatttatgcctccatctaggtttgacagattacaggacttttgtggggacaaatttaagtcctttgtgggaaaggttcctggtttcatcagaagatgattctgttctttgtaagcacaccttccattcact

SEQ ID NO: 5176 - DNA, 541 bp, Glycine max
  unsure (1)..(541): unsure at all n locations
  Clone ID: jC-gmfl02220070g10a1
atccagcactactacgacctgttagttgccatcaagactttgatgtttccacgagcatcaagcccatcaagctgattcactgaagattccgcaacagagagtagaaaagatggcgcggttgatcacagtggtgtggtgcgcggtggcggtgctactgtgcgccgcggcgggcgcgtcgtgggtggaggaggcggcgaacccgatacgaatggtggcgggggtggaggcggaggtggttcgggtgatagggcagtgccggcgcgcgctgaagtttgctaggttcatgagcaggttcgggaagagttaccgaagcgaggaagagatgagggagaggtacgagatattctcgcaaaacctcaggttcatccgctcccacaacangaaccgcttgccctacactctctctgttaatcattttgctgattggacttgggaggagttcaaaagacacagactaggcgctgcccaaaattgctctgccactcttaacgggcaccacaagctcactgatgctgttcttcctcccacgaaagactggagg

SEQ ID NO: 5177 - DNA, 580 bp, Glycine max
  unsure (1)..(580): unsure at all n locations
  Clone ID: jC-gmfl02220070g11a1
ctcgagccgctttccttgaaaagcttaagaagaaggggttcgaggttctctacatggttgatgctattgacgagtatgctgttggtcagcttaaggaatttgagggaaagaagttggtctctgctactaaggaaggcctgaaacttgacgagagcgaagacgaaaagaaaaagaaggaagaattgaaggagaaatttgagggtctctgccatgtgatcaaggatgtgttgggtgacaaggtggagaaagttgtggtgtctgatcgtgttgtggattctccttgctgtctcgtgactggtgaatatgggtggacagccaacatggaaaggattatgaaagcacaggcattgagggacagcagcatggctggatacatgtcgagcaagaagaccatggagattaaccctgagaaccccatcatggatgaactgaggaagcgagctgatgctgacaagaatgacaaatctgtgaaggatctcgttctcctactctttgagactgctcttctaacttctgggttcagncctgatgatcccaacactttcngtaacagggattacaggatgctgaagcttggact

SEQ ID NO: 5178 - DNA, 581 bp, Glycine max
  unsure (1)..(581): unsure at all n locations
  Clone ID: jC-gmfl02220070g12a1
catggaggtcttcacaagcatcctatcatctttaccgtacaagtgggaatttctgcccatctgatcatgtgactatgttgatggatgatttgttgagtctctcgttgcatagctatgaaactgtccgcctgcttgctgggaaatctctagtgaagctgatcaagagatggccatctatgatttcaaaatgtgttatcactcttacccataacttgcaggataccaatgccaaggaatatgcagtgttggggtcctgttcagtccttgcctcacaaacagtactcaagcatttgacaacggatccaaagtcattctcttcatttatcttggcaattctttcaagttcgcatcatgaatccttgaaagctcagaaagcaattaatgagctttttgtgaagtacaacattcaattttctggagtatctagaagctttttcaggatctcagacaaagaaaatcatactggtgggctggggttctcagatttggtttctcagattggctccatgagttttgattctactggcttgcattggaggtataactngatggctaatagagtgctgctcctgctggctttg

SEQ ID NO: 5179 - DNA, 536 bp, Glycine max
  unsure (1)..(536): unsure at all n locations
  Clone ID: jC-gmfl02220070h01a1
tgagaaaagaattggcaacattccaggtattgaggttggatatcagttctattctcgtgctgaaatggttgcagttggctttcatagccactggttaaatggcattgattatatgggccagagctatgccaaagcgtgcagctatgaacttccagttgctgttgccattgttatttcgggcatgtatgaggatgatctggataatgctgaggatgttgtgtacactggtcaaggtgggcataatctgactggtgataagcgtcaaattcgggatcaaaagttggagcgtggtaacctggctctcaagaactgtgctgagcaatgtgtgcctgttagagtcattcgtggtcacgaatcttcaagcagctacactggtaaagtatacacatatgatggcttgtacaggttgtcaattattgggcagagaagggaatatctggatttacagtctacaagtttagacttangaggctcgaagggcaacctacattaaccacaaatcaggtatattttacttatggacgtgtaccttaaac

SEQ ID NO: 5180 - DNA, 466 bp, Glycine max
  Clone ID: jC-gmfl02220070h02a1
cagaaagcaagctcatcctagagttttaaaaatggcagcagcctcctccatggctctctcttccccatccttggctggcaaggccgtgaagctgggcccatcagcccccgaagtcgggagggtcagcatgaggaagaccgtcaccaagcaggcctcctccggaagcccatggtacggcccagaccgcgtcaagtacttgggcccattctctggcgagcccccgtcctacctcactggcgagttcccaggtgactacggctgggacactgctgggctttcggccgacccagaaaccttcgccagaaaccgtgagctcgaagtgatccactccaggtgggccatgctcggggccttgggctgcgtcttccccgaactgttgtcccgcaacggggtcaagtttggagaagctgtgtggttcaaggccgggtcccagatcttcagcgagggtgggctggactacttgggc

SEQ ID NO: 5181 - DNA, 461 bp, Glycine max
  Clone ID: jC-gmfl02220070h02d1
gatacagacaatagattgtaataaaggctgaaaaaatgaagggtgaaaaaagaacccaggaatttcttttagaacaaaaaatagaattggagcttctattagtatcaatcacctatggaatctggttaacaaatacacttgaatacatggagaattgtcccatgtttttgagtgcaacctaagtacccctcttgctttttccttcaaataggaagcacaatctgcttgcaacaccatgcaaagctgggacacagcaccaaccctcagcatctcttgcacgacctcattggaggccgtgaacttcgaaaccaaggaaaatatatgaagagctcgatcatcagtggttggtgaaaccctaaggatcctctttgaaaccacagcaatgcctgcagcatgttgcagaaactgttctgtcccatcagcacaagaacaaagatgagccaagagaataatatgagttc

SEQ ID NO: 5182 - DNA, 502 bp, Glycine max
  unsure (1)..(502): unsure at all n locations
  Clone ID: jC-gmfl02220070h03a1
gaacaagttgtttgagtttatgcatgagacacatcctggagttcaggatatggcctgtgacacatttctgaaaatagtccagaagtgcaagcgaaaatttgtaatcacccaggttggggaaaacgagccatttgtgtctgagcttctgacaggccttcccatcactattgcagatcttgaaccccatcagatacattccttctatgaatctgttggtcacatgattcaggcagagtctgatgcacagaagagagatgaatatcttcagcggttgatggagctcccaaatcagaaatggatggaaattattgggcaggcacatcaaaatgttgattttttgaaggatcaggatgtaatccggacagttcttaatataatgcagacgaatacaagtgttgcaacttctttagggacatatttcttgccccaaatctcgttgatctttttggacatgtngaatgtgtacagaatgtacagtgagcttatttcanagagtattaca

SEQ ID NO: 5183 - DNA, 382 bp, Glycine max
  Clone ID: jC-gmfl02220070h03d1
agggcaagggactgtattttgtccactaattcaaagagccccaaaaaaaagcccccattagaaataacataatcctatttggacaaaaaatacacccttgatagatcacatatctcaccagagaaaggaattttagaaggatatcctatgatcagctgaatggaattttagaagtaaatggtgcccctgcttgcaacctgcaggtcttgaacaacttcatcaaccgaaatttgaagtatatccccatctatatcaacacccgcctcaaatgcttaaatgtcaaagtgagtccatttccccaaggagtgggtcatttcccattctattattttatgaggcaccatcccaaccatagataaccacttgttgatctccctcttca

SEQ ID NO: 5184 - DNA, 554 bp, Glycine max
  Clone ID: jC-gmfl02220070h04a1
tccagtgaaagaaaggcagcgatggaagaagacttcgacatccccggcggcgaggaaatggatctcggcgaagacgaggtcggcgaggagagggagatcggctctggcggcctcaagaagaagctcctcaaggaaggtcaaggctgggaaacccccgaagtcggtgacgaagtccaagttcattacacggggactttgctcgacgggactaagttcgattcgagccgcgacagggattctcccttcagcttcacgctcggacaagggcaagtaattaaaggatgggatgaaggtattaaaaccatgaagaaaggtgaaaatgctattttcaccatccctcccgagctagcttatggtgaatctggttcccctcctactattcctcctaatgctacactccaatttgatgttgagctgctgtcatggactagtgtaaaggacatatgcaaggatggcggtatatttaagaagataattactgagggggagaaatgggagaaaccctaggatcctgatgaagtattggttaagtatgaagttcatctagaaaatgg

SEQ ID NO: 5185 - DNA, 387 bp, Glycine max
  Clone ID: jC-gmfl02220070h04d1
ggacccaaacaattccattttttatagtacctctcaaacaaatcattatagttcatggggatatataattaagtcaattttgttaatattccataataaataccaaatgaatgtccatcaaattttcctagggcccaaaccatacagggaagatcaacccccaaaaaaacggggactaaacagattcgggtcccatattggatgacatctaaatttagttggcaaccccggattcaataccgggggtacttcgaagctggtttattgctatcaggaaccaatctttggcatcttggggatcatatttccataaaatggcgcctcctttttattattctttttcaccttttccttaaaagtcctgtactccaatttgacatccctgtt

SEQ ID NO: 5186 - DNA, 449 bp, Glycine max
  Clone ID: jC-gmfl02220070h05a1
tgggttttcaccgatcaagcattgcctaatgatcttgtcaagagaggagttgctgttaaggatccatctgctccccatggagttcgacttttgatcgaggactatccttatgcttctgatgggctagagatatgggatgctatcaagtcttgggtggaagaatatgtctcattctactacaagtcagatgaggaacttcaaaaagaccccgagctccaagcttggtggaaagaacttgtagaggtgggtcatggggatttgaaggataagccatggtggcaaaagatgcaaactcgtgaagagttgggtgaagcttccgctaccctcatatggattgcttcagctcttcatgctgctgttaactttggacagtatccatatggaggtttaatcctgaataggccaactattagcaggagattcatgcctgagaaagggtctcctgaata

SEQ ID NO: 5187 - DNA, 461 bp, Glycine max
  Clone ID: jC-gmfl02220070h05d1
aatccttagaaaacatgtatcaatattttcccactctacaaaatttgacaaaaaacaaaacaaaggaaaggagagaagttccacgcataagcatcaatcaaatgatcaaagctaaacatgtaaaagatcagaaacaatcaataaaaagaagctaccaaactaccatcaagcaagtccagcttccagtccaccaaatgtatcatagagaggttggtttagagtctcgggaagattaaacgcaaacatccctcccactatcccacatgctgcaaacaccgcaaacggcaaataccctcccaaaacgaccacaaacggcgccaatatcgctcccatttgcgccgcttgagtagtacacccgagcgcggcgttcctcaccactgtcggaaacagctccgccgtgtaaataaacagcaaattataagtccccgccatcccaaatattcccaaaacaccacacacca

SEQ ID NO: 5188 - DNA, 382 bp, Glycine max
  Clone ID: jC-gmfl02220070h06a1
atggtataaatacgcatacaccatgttttttatctagggacacgcttaaaggagttaccacggactgttataatttggtcactactactagcggctgcacatattgtgatattacatgaagaaagtacatacttagccatctacctttgaggtgtgacatcagatctatggcttgtgcctaagacactttatgcagaggtacttggtaagatggtcgctccttccaatagagttgcacctgttataacacccaacgagctacctgaaagctgatggcttattgctcgtgttccccaaagaaactagactgaggggttggcaatacaaaactttgatagatgcatctgtatgtctgtggcgcacacaggcactagctggtaag

SEQ ID NO: 5189 - DNA, 477 bp, Glycine max
  Clone ID: jC-gmfl02220070h06d1
gctatcacaaaacgaagaaactattattggaattcattcaaattgaagtgcacatgattaataagattcaaccaaactagagaaggccaccacggagcctaaggacaacatagacatagaaattttgttatatcatacacattcaaggaagagaaaatctcaatagcaagattcaactgaaactagaaatcgccaccacggagcctaagaacaaggggaagcggggattccttctgaatattgtaatcggcgagagtgcgtccgtcttcgagctgcttcccagcgaagataagacgctgctgatccggaggaatcccttccttatcctgaatcttcgccttcacgttatcgatcgtatcagaactctccacctccagagtaatagttttcccggtgagcgtcttcacgaagatctgcatccctccgcggagtcgaagcaccagatgaagcgtcgattctttctgaatattgtaatcg

SEQ ID NO: 5190 - DNA, 485 bp, Glycine max
  unsure (1)..(485): unsure at all n locations
  Clone ID: jC-gmfl02220070h07a1
ggaaaacataagtgtgactttggtcgtagcaaatgcgtggtaccaaaaagatgcaattaaactattgaattggaagctgagttagtagtaatttgagagagagagagagactcatccacttcttccatttccacgccttcttcattcacacaacacaacataacacaaaaagctctccctagtatctagagacagaatttccaacacactcgcttctcagagcgcgtgcccttcaaacatgatcatcatccacttcttcctaggacctgtctcagattcttcatagaggagtactgctgctgatcactggatctttcaaatttggaatggtttgatgggaaacatgagttgcagcttcaaccagactgattcagttgagtgctgtgaagctgaaattcagaaggctgattctcaggaatctggtcctcccttgaagaagtcanaaactgaaattctggcctctcaaatgtagataactgtgaaat

SEQ ID NO: 5191 - DNA, 584 bp, Glycine max
  Clone ID: jC-gmfl02220070h07d1
gacacgaaatccactgtaatatagatctgactaattgtccatgttgtctgtaatgaataacagaaacacaaaacctagtcattctaaacactgaaatgactaacaatagcataattatcaccaaggcgtacaaacgcatgaccaaattaaatgtcaatacaggaaatgctaatgcaaattatttggcagcctcaaatcaatccccgtggatagtataacgttcccatttcttcgttggatcatatatctcccatcttgaagcaggaaatatatgcttgttcttttcataccaatgcctttctacaaccttcccagcatgagactcatccttctctatagtggcatcagcaattgttcgtacatcctcatgcacatcaaaatgaaaaagcggtccacttttgcctctagctttgttcacaattagctcatagaagctatgttgctgtaatacacatggaaacaggtaaataagttagcagatatcctttggttaaaataatgttaacatagcttatacacacacaaacaagatagcgagttgcacacagagtttctgaaattaaaagctaatacatgaggaatga

SEQ ID NO: 5192 - DNA, 66 bp, Glycine max
  Clone ID: jC-gmfl02220070h08a1
tttacaaatacatgaatttgtaccctaaaagacatgcaatatcaaattggttcccccacttcccct

SEQ ID NO: 5193 - DNA, 539 bp, Glycine max
  Clone ID: jC-gmfl02220070h10a1
gatcttcttgacatcgactccattgttgctgccataaagggttgttccggcgtaatccaccgtgcatgttctaacatcattggtcaagtcgaagatcccgagaaacagatattggaaccggcgataaaaggaacggttaatgtgttgaaggcgaccatggctgaacgacaggctagtggggctgcgtactaatacaacggaggatcatgtgctgcaattgctggagcagatgactggattatcggcgaagagtctaggatggccaccggatacagtatgctcactcgcgagtactacaaaatctcccaactggcggagaagtgtgttgtttgggactttgcgaaggagacaggttgtgatgttgtatgatagaccctggtacagcgttgggccctttgcttcctccaagaatcaattcaagcatggctgtgcttgatagtgttctcaaagggggcaaagagacctacgaggacttctttttgggaacgggctacttcaaagacataacattggcacatattttgggacttgagaacatt

SEQ ID NO: 5194 - DNA, 476 bp, Glycine max
  Clone ID: jC-gmfl02220070h11a1
accatgtccactctttccactcagaacgtcaccgtcacccacaaaacgcagcaacctttgcagattgcaaagcgcttagagaaatttcagacaacaatcttcactcaaatgagcttgcttgccatcaaacatggggccataaaccttggtcaaggctttcccaactttgatggtccagaatttgtaaaggaagcagcgattcaggcaatcagggatgggaaaaatcagtatgcccggggttatggagttccagacctgaacattgccattgctgagagatttaagaaagatactggacttgtggtagaccctgaaaaggaaattactgtcacatctggatgcacagaagcaattgctgcaactatgataggattaataaatcctggtgatgaggttattatgtttgctcctttttatgattcttatgaggccactttgtccatggctggtgcaaaagtaaaaggcatcactttgcg

SEQ ID NO: 5195 - DNA, 528 bp, Glycine max
  Clone ID: jC-gmfl02220070h12a1
catggaggtcttcacaagcatcttatcatctttaccgtacaagtgggaatttctgcccatctgatcatgtgactatgttgatggatgatttgttgagtctctcgttgcatagctatgaaactgtccgcctgcttgctgggaaatctctagtgaagctgatcaagagatggccatctatgatttcaaaatgtgttatcactcttacccataacttgcaggataccaatgccaaggaatatgcagtgttggggtcctgttcagtccttgcctcacaaacagtactcaagcatttgacaacggatccaaagtcattctcttcatttatcttggcaattctttcaagttcgcatcatgaatccttgaaagctcagaaagcaattaatgagctttttgtgaagtacaacattcaattttctggagtatctagaagcctcttcaggatctcagacaaagaaaatcatactggtgggctggggctctcagatttggcttctcagactggctccatgagttctgattctactggct

SEQ ID NO: 5196 - DNA, 590 bp, Glycine max
  unsure (1)..(590): unsure at all n locations
  Clone ID: jC-gmfl02220071a01a1
agatgtagttccagattcagaganatcagtttaannnnnttnntcnctntnnnnnctnntntntntnntttttttttnttttttttttttttttttttttttnttntttttntgnnttttactagctcccctgggggctcactggtccgtttcattgtaatatttgctttatggtacagaaccatggctttggccaagttgccaccaaacgcttcatcagttccagcagttttagcgtttggagattccatcgtggacccaggcaacaacaacaacataaaaacattgatcaagtgcaacttcccaccttatggaaaggattttcagggaggaaacccaacgggtcgattttgcaatggaaaaattccttctgacttaatagttgaacaattgggtattaaggagtatttgcctgcatatttggatccgaatctcaaatctagtgatcttgttaccggcgtctgctttgcctccggtgcttcaggatacgatcctttgacacccaaaataacgtcagttctatcgttatctactcaactagacatgttcagggaatacataagaaagctgaaaggcattgctggagagag

SEQ ID NO: 5197 - DNA, 562 bp, Glycine max
  Clone ID: jC-gmfl02220071a01d1
ccaaccagtaaaatcatcaaaaatcatatttaaacacctgaatacaacaacatacatccactttaaaggtaaatatttcacacgggaaaaatgtggaacgtctgtgagatggatcgatgcctgtgaacattgaaatctacaaaaagtaccgaacaatcacaccaaaactcgacaaatcaaaatactcattgtcttcgttgacatcaacataactaataattgatattacttcccgtaggcaaacttaatcgagctcaaaacaatcgatctatgtacttttcaagaacataatttacgagctttctgtaaactccttctgttggatgataactatcccaaaagacatattccgaagcattggaacaagtggcatccaaagggttgcataacactgcaacctctagtttgcctgtgccacagcaacctctgtccataactttatagccatatttttggtagttttcaatgatatcgagcagaggggtgtaaacatcaatgtaaactatcctggtatcggacaagttgtgaccgagggaatcaagttcctttgaagtttggaatt

SEQ ID NO: 5198 - DNA, 695 bp, Glycine max
  unsure (1)..(695): unsure at all n locations
  Clone ID: jC-gmfl02220071a02a1
gctgaacatgcgctcngcagaccaatgaaaaattaaaccaaaaaaccaaaaaaaanaaaaaaaaaaaaaaaaaaaaaaaaaatttaaaaaattaaaaaaaaaaaaaaaaaaaaaagggganaaggggaaaaaaaaaagaagaaaggaatgacataaacaaggatctgaaaactgatccaaaagatgaatatctgcaattattgagggcagccattaagtgcttgacttaccctgagaaatattttgcaaaagtcttgaggctggctataaacaagctaggaactgatgaaggggcccttactagagtggtgacaaccagagctgaggttgatttgcagcgaattgctgaggaataccaaagaagaaacagcattcctctggaccgcgcaatagccagtgacacttctggagactatcagagcattctccttgcactggttggacatgaggattaagttttctttcttaatctgttcagttgtcatgggattgcttgctaggctatttgcttttcctcttatcatgaatgtgatattgctatggatctctggacagaggaattcagtggcttgctgttaacgcttgctatgaggggtataaattatcatgcctgttcagaataatatgttttgatgtccaaaattcagcatagcactcacatcttattaagatcaatattgtttagataataaata

SEQ ID NO: 5199 - DNA, 455 bp, Glycine max
  Clone ID: jC-gmfl02220071a02d1
aacagtagtaaaagacgcagcaaatattttattattctaaaacatataattgatccttaataaagatgtgaagtgctatgtcttgaattttcgacattcaaaacatattattctgaaacagcatgataatttatacccctcataagcagcgttaacagcaagccactgaattcctctgtccagagatccatagcaatatcacattcatgataagaggaaaagcaaatagcctaacaagcaatcccatgacaactgaacagattaagaaagaaaacttaatcctcatgtccaaccagtgcaaggagaatgctctgatagtctccagaagtgtcactggctattgcgcggtccagaggaatgctgtttcttctttggtattcctcagcaattcgctgcaaatcaacctcagctctggttgtcaccactctagtaagggccccttcatcagttcctag

SEQ ID NO: 5200 - DNA, 557 bp, Glycine max
  Clone ID: jC-gmfl02220071a03a1
tttgattttggattgttttctgctcgatttcgtttaaggagataagtggggttgggagtttttgctattatttattgttattttttttggtgttttagagaattgagttgatggggggtaacaattctaaggaggataataacaattggaggcagaattcatctgtgcgttcaagttcctctgcgtcttcttggggttcatatcctgacccccaatcaggttatggtcacgggggttacgcgtatgagccacaacagccttcttatcctacacagcagccgtattatgcccaaccgccgccgccgccgccaaactatggcaatgaacctcagcctcatgctagcggcagagtggccggccacagaaatgagaagcggttagacaggaaatactcgagaatcacagattactacaactccatagatgaggtgactgaggctcttgcacgtgcaggccttgagtcttcaaatcttattcttggtattgatttcactaagagcaatgagtggacaggaaagcattcatttaacagaaaaagtttgcatcacattgggaat

SEQ ID NO: 5201 - DNA, 411 bp, Glycine max
  Clone ID: jC-gmfl02220071a03d1
aacaaaccaaacaaattcttgttcacatttgttcgggtggggtttgaagaatttttttacaagtccaaaccaaataaaaccaaataatttaattggtttggatatttttttgttgtaccattttttcatcaatagacacagctgatctaacgtttgtatacaaccagagaaggttaaaaaaatcaaagaattttagcttacacaacaaaataattaattcacaacggaagaggccgcctagtaaagcttaattctggtgttaatggggcttctacagatgggacacgactgaagatcttgtccacattcacaacatgtctgatgtccacatccgaaggccatgtcttttgaattggtcagacatatggggcaaagctgattgtcatatgaggaacttggggcaagaggagc

SEQ ID NO: 5202 - DNA, 457 bp, Glycine max
  Clone ID: jC-gmfl02220071a04a1
ttctgattcgtcaaacggacaaaggaagtgaaagggtttagggtgtgacctgagatcaacatgttgcggaggcttctctcttctcacctcaaaaccctagccgccaccgcttcttcttccactccccgatctgcttccgccgccgccagattcgccgctctctctcgctcctcccgctacttctcaacccagtccgaggatgctactgccatcaaaaagaaggttgaggatgtaatgccaatcgctactggtcacgagcgcgaggagcttcaggctgagctcgagggaaggaatattcttgaaatagaccatcccgaaagtccattcggcacgaaggaagcacctgctgttgtcaaatcttactatgataaaaggatagtcggatgcccaggaggtgaaggtgaagatgagcatgatgttgtctgggtttggctggagaaagacaagccccacgaat

SEQ ID NO: 5203 - DNA, 542 bp, Glycine max
  Clone ID: jC-gmfl02220071a04d1
aaaaaatcgtcaagttctatcaattatttcacaatgcacaaaacattgtctaacagaattggtagctcaagcaaatgagcatcctgcgttcaaataatcgcataaactttctagctcaaaagttgcaacacaacaaggtatagacaaatcaaaatcaaacataggccacaggattttgaaaggccagagtgtattctaaacaatgtctctccatctttccagaatttattccagatttaattgaaggattgcaatcaatggtgatcatcatcgccatgcccatcgggtgatccaccaggtcctaccacttcaagaacaaaatactgtgcgcacactggacattcgtggggcttgtctttctccagccaaaaccagacaacatcatgctcatcctcaccttcacctcctgggcatccgactatccttttatcatagtaagatttgacaacagcaggtgcttccttcgtgccgaatggaccttcgggatggtctatttcaagatattccttccctcgagctcagcctgaagctcctcgcgctcg

SEQ ID NO: 5204 - DNA, 450 bp, Glycine max
  Clone ID: jC-gmfl02220071a05a1
tggtaattcatgtaataaaattcaatttcagttactaagatgaaactaattggaaaactcagaactacaccgaaagtatttaaaaaagtgaatctaattgtcagcgtctaagatttgatggccttgtttctggggtgtcttagaaggtgatgtaactgtgcagggaaaaacagtatctctataatcgtgccaattgttgtcccaattgtcgttgtgattgtacttttcattgttggagtctgcttcctacgtaagagggcaagcaagaagtataacacttttgtccaggattcaattgtggatgatcttaccgatgtggagtccttgcaatttgatttggctacaattgaagctgccacgaatggattctcggatgagaacaagattggccaaggtggatttggtgtggtttataagggtatcctccttaacagacaggagatagctgtg

SEQ ID NO: 5205 - DNA, 474 bp, Glycine max
  Clone ID: jC-gmfl02220071a05d1
aatctggtctctcccggggcatcatgttttagctactgtatgtgttcatccaagaagtatttgacagaattcttttaactattaatatttacaatatatatgcactaggattgtataacagcaacaccatggtttgacacatttaaacatatcctggattggtcaaagaaaacatgaaaacaatcctttagcgagggtatatgtctgtaatggatacttcattcacagaccatggaattgaacaagtggtagactgatcagagtcaagcccttggtttagcctgttaggatttcttccgcgcagaaaagatgctggttgtcgtggcattgacaaggtaactgaataactgttcagcataagtgcaatggtggccatcgaaggtctgtcagatggattttcctgaacacataataaaccaatatggatgcatctgtttacttcatttcttgaataagaacctctcagagttggat

SEQ ID NO: 5206 - DNA, 539 bp, Glycine max
  Clone ID: jC-gmfl02220071a06a1
agaacagggactcattctcttttcagcggcactctcggtggctttcatgttctcggggtgagttgtcaagatgtacacatcgaggaagaaaattcacaaggataaggatgctgagccaactgaatttgaggaatcagttggacaggcattgcttgatctagaaaataccaacaatgagctgaaaagtgatctgaaagatttatacataaactcagctgtccaaattgatgtttctggcaaccgaaaggctgtggttatccatgtcccctacagactaaggaaaggattccggaagattcatgtcaggcttgtgagagaacttgagaaaaagtttagtggaaaagatgtaatcttgattgccaccaggaggatagtaaggccaccaaagaaaggttctgctgttcagcgcccccgcaccagaacactcactgctgtacatgaggcaatgctggaagatattgtattgcctgctgagattgttggaaagcgtgttaggtataaaattgatggctccaagattatgaaggtctttttggacc

SEQ ID NO: 5207 - DNA, 562 bp, Glycine max
  Clone ID: jC-gmfl02220071a06d1
aaaaatacggattcataggatgttaaaatcttaaaaatacggattcataggatgttacaagaaaatatatcaaattctacattgataaaccaggacacagtattttctataagtaactaaagaaaatccagaattaaagccaacttaacaaaaccagcatccaccatatgtaattcaggaagaaattcaaagctaacaaatagaacctaagcctcggtagtaggatactcaaacacgacacctttgcctgaaagtttcctgtatactgcagcaaaagtctccaacttgtactcggtattgtttcgctccttggggtccaaaaagaccttcataatcttggaaccatcaattttatacctaacacgctttccaacaatctcagcaggcaatacaatatcttccagcattgcctcatgtacagcagtgagtgttctggtgcgggggcgctgaacagcagaacctttctttggtggccttactatcctcctggtggcaatcaagattacatcttttacactaaactttttctcaagttctctcacaagcctgacatgaatctttc

SEQ ID NO: 5208 - DNA, 637 bp, Glycine max
  Clone ID: jC-gmfl02220071a07a1
gggttacttcagctttacattttttgaagaattgatcaatgggcaagtctgtagttgagaagctactttggatggcaattgtgtgcttggtgctgggtgtaatttccattactcccaaggcccaagcagcagtgacatgcaaccaggtggtgagcaacctcaccccatgcatttcttatgtgctcaatggtggcaaaaccgtgcctggcccttgctgcaatgggatcaagaccctctttaacctcgctcactccacaccagaccgccaaaccgtttgcaagtgcataaagaacgctgttagtgcgttccattatggcaagtccaatgtggaccgtgctgctgctcttcctaagcagtgtggggttaacattccttaccagatcagcccttccaccgactgtaccagagtgcagtgaggttaatgatatatggagcggtaactcgagaagagaaggatatacaatatatagctagtgtgtgaataagtggctggctatacgtaggccacacattacattaatgactggtggctgcctattattacatccatcaactagtcttgttattgagtcattggaatttttttatttgaagattcaaaattatattaagaattataaaattatgtttttattca

SEQ ID NO: 5209 - DNA, 448 bp, Glycine max
  Clone ID: jC-gmfl02220071a07d1
cttgtataaccgcttatttagcattttaatccttcccttccaattcataacaagctgacaaaagaaacaccaacaggcaacatgtatggatacatgacttaaaagggtgtttaatggaattggttgaataaaatacataaattattataaatctttaatattatttttgattcttacaaataaaaaaaatacaataactcaataacaagactagttgatggatgtaataataagcagccaccagtcattaatgtaatgtgtggcctacgtatagccagccacttattcacacactagctatatattgtatatccttctcttctcgagttaccgctccatatatcattaacctcactgcactctggtacagtcggtggaagggctgatctggtaaggaatggtaaccccacactgcttaggaagagcagcagcacggtccacattggac

SEQ ID NO: 5210 - DNA, 630 bp, Glycine max
  Clone ID: jC-gmfl02220071a08a1
gggttacttcagcttccacatatcttgaagaattgatcaatgggcaagtctgtagttgagaagctactttggatggcaattgtgtgcttggtgctgggtgtaatttccattactcccaaggcccaagcagcagtgacatgcaaccaggtggtgagcaacctcaccccatgcatttcttatgtgctcaatggtggcaaaaccgtgcctggcccttgctgcaatgggatcaagaccctctttaacctcgctcactccacaccagaccgccaaaccgtttgcaagtgcataaagaacgctgttagtgcgttccattatggcaagtccaatgtggaccgtgctgctgctcttcctaagcagtgtggggttaacattccttaccagatcagcccttccaccgactgtaccagagtgcagtgaggttaatgatatatggagcggtaactcgagaagagaaggatatacaatatatagctagtgtgtgaataagtggctggctatacgtacgccacacattacaattatgactggcggctgcttattattacattcaatcaactagtctggtattgagttattgattttttttattggaagaatcacaataatttaaagattatataattatgattt

SEQ ID NO: 5211 - DNA, 422 bp, Glycine max
  Clone ID: jC-gmfl02220071a08d1
cttgtataaccgcttatttagcattttaatccttcccttccaattcataacaagctgacaaaagaaacaccaacaggcaacatgtatggatacatgacttaaaagggtgtttaatggaattggttgaataaaatacataaattattataaatctttaatattatttttgattcttacaaataaaaaaaatacaataactcattaacaagactagttgatggatgtaataataagcagccaccagtcattaatgtaatgtgtggcctacgtatagccagccacttattcacacactagctatatattgtatatccttctcttctcgagttaccgctccatatatcattaacctcactgcactcttgtacagtcggtggaagggctgatctgttaaggaatgttaaccccacactgcttatgaa

SEQ ID NO: 5212 - DNA, 323 bp, Glycine max
  Clone ID: jC-gmfl02220071a09d1
tttttctcttgttatgatgacaactttgcagaatctttattgatgtctcaattcatatagcgctatgcactgggattaccaccttcaatgtatacaatcctggaccctaaacataaactaatatttattccatatggagcgtagcgttctaacaaggtttgttgcatgtaacatacatcatccctaaatagtctacacactcctaaaccctgactttcaaatctcctacaactgactgcaattctttataatcttgcaatacactattttcatttcagcctcacaaaatgtactcatgtgccaacaattaatactggtctttg

SEQ ID NO: 5213 - DNA, 556 bp, Glycine max
  unsure (1)..(556): unsure at all n locations
  Clone ID: jC-gmfl02220071a10a1
cccacacacagaacaagaacaactacaggaagaaggagaaagaaaaaaaaaaattccgtgattgcattttcagaggagaggataacaattgaggtgtggtgaagaatttgttggagtgaggggggtcccacctacccttcacattcattatcttcttcatcagagtctctttttaatcctcttctctattctgcaccatcccaagtattgtcctttgccttggttccattgtttttgtgaatcttgagggtcttgtgtgggcctcttgctgcttaagttccaactagctagatctactttattctagctacacaccaattatatatacataagatttggagattctgcacaccaattatatacatcagaatctcttattatatagactcatcttccatctttttttttcttccatttttcaattccatttctaggtgctataaaacctgttatcagatcttggttgccccacttccatttcttgctgtgttgntgttcccctcctcataaggaccattgtataatacaaattcttcattcttcatttgatgacagc

SEQ ID NO: 5214 - DNA, 437 bp, Glycine max
  Clone ID: jC-gmfl02220071a10d1
gagaaaatcagagatttttatcattctatatattgtggaatgaatattctacgccatcagtgcataaatgagtaatttacatttattgaaatcacaagctaaacttaaccatgaaaaaaaatgggataaataaaacggggaaagtaaataggtagcctcaaacgctcatttggttgaatgagaatcctatacccttttttctccaatgcagaagaacctgcctctgccaatgcttaataagaatactagtcttgacataatgctaagtggaaaattagatctgattagtccaagacttcagaaggccaaatgcttttccaaatggaaatctcagtctcactcttaatctttctgattcctccataaaaaccatctgcttcatttccttcctctctatgatctcttctacttatagttggtttcccccaacgcgagtc

SEQ ID NO: 5215 - DNA, 539 bp, Glycine max
  Clone ID: jC-gmfl02220071a11a1
tttctctctcaaaaccctaaccctaaccccaatccccagagtctggaagcctctccaatggcgtaccagacccccgatcaagattcaggttccgatccgaagaccccaacgcgcctctacaacccctacaaggatctcgaagtccccattcgcaacctctaccagctcccaacctccccggagtacctcttcgtcgaggaggcccgccgcaagcgccgatcctggggcgagaacctcaccttctacaccggctgcggctacctctccggcgctgtcggtggcgccgcctccggcctcgtcggcggcgttaaatccttcgagtccggcgacaccgccaagctccgcgtcaaccgcgtcctcaactcctccggccacgccggccgcgcctggggcaaccgcctcggcgtcatcggcctcctttacgccggcatcgagagcgggatcgaggcaacgagggacaccgacgacgtctggaacagcgtcgcggcgggacttcgcaccggcgcgctgtatcgtgcagcgagaggggtgcgttcggc

SEQ ID NO: 5216 - DNA, 446 bp, Glycine max
  Clone ID: jC-gmfl02220071a11d1
ccagcattaaagccgtcccaattattcatgcaagatgtttcgacaaattacattaaaaaggttagtcattatcaagctgaaaaaaaaatgcataataataaaaccaattgtttgcaacagcaacgctgccacatgctggtataataatgcttatacctaacaatcgctcaaaattgatagtaaccccccaaaaaaaggaagaaaaaaattaagcgctcacacaaagttttgttctcatcatataggcacgtagcgtttcaaagcctgcttcgccgtgacagcgactccaaccacgacgccgccgacggcgcccgttaccgccgccgaacgcacccctttggctgcacgatacagcgcgccggtgccgagtcccgccgcgacgctgttccaaacgtcgtcggtgtccctcgttgccttgatcccgttctcgatgccggcgtaaagga

SEQ ID NO: 5217 - DNA, 607 bp, Glycine max
  unsure (1)..(607): unsure at all n locations
  Clone ID: jC-gmfl02220071a12a1
tattcatcaaactcatcaaaatgaatctgtaccactcctccaccaccaccaccaccaccaccatcttcaccgtcatattcctcctccttgcaatattattcactctcacaccccacaaggccaacggtgccacgtgtcaccctgaggaagaagcgggcctgttgggcttcaaatccggtatccgatccgacccgtccggcctgctcagtaactggatatcgggtacggactgctgcacatggaccggagtagaatgccactataacagcacccgggtccaaagattattcttaacgggtcaaaaacccgaaaccatcttatcgggtaccatctcacccaccctctcaaaactcaaactcctcgatggactctacctcataaacctcatcaacatttcgggtcccttcccaaattttcttttccaacttccaaatctccaatttatctatctagaaaacaacaatctctcgggtcgaatacccgataacatcggtaaccttacccgattagatgtactcagtttaactggtaaccggttcatcggacccgtaccgagttcaataaccaagtngactcagctcactcagctcaaactcggtaacaattt

SEQ ID NO: 5218 - DNA, 490 bp, Glycine max
  Clone ID: jC-gmfl02220071a12d1
aaagtaaatatatatagtatatattgaaagttaaaattacaatttacttattaaattacataattattggaaaacttagcagtaaaaggaaattaaacacttgaaatcatcaacaacaaagcttactacacttatgctttgttgcagggtggcaaaggagaaccacagagacaatcatttccaacaaaagcacttgccggaaacttattcttgggaagctgaccacaaagatggttatagctaacattcaacttctcaagcccaacaacactgtttggaaccttcccaaacacccaattacgagacaaatccaaaaacttaaacctctccccaaaccttaacttccccaaatcaaacttcaacttgttccccgaagcccaaaaccccaccaaatactcagtactattcaccaacccaattgcactccctgaaatttcattccccgaaagatcaataaaatcatagaaataagtctccgaaggcttaaaat

SEQ ID NO: 5219 - DNA, 612 bp, Glycine max
  unsure (1)..(612): unsure at all n locations
  Clone ID: jC-gmfl02220071b01a1
gccataatcatgcatgggacaggactcagtattccagatgctatgactgtcgccctgannnncntcnnntnnnnntngnctcnctcgctcnncnnnccccctcttctttttctcttctttttcttcttctcttttcccttccttctcgggccccgtggccctctcttcaatgattccgtacaatgccataacacaaggatctgaaaactgatccaaaagatgaatatctgcaattattgagggcagccattaagtgcttgacttaccctgagaaatattttgcaaaagtcttgaggctggctataaacaagctaggaactgatgaaggggcccttactagagtggtgacaaccagagctgaggttgatttgcagcgaattgctgaggaataccaaagaagaaacagcattcctctggaccgcgcaatagccagtgacacttctggagactatcagagcattctccttgcactggttggacatgaggattaagttctctttcttaatctgttcagttgtcatgggattgcttgttaagctatttgcttttcctcttatcatgaatgtgatattgctatggatctctggacagaggaattcaatggcttgctgt

SEQ ID NO: 5220 - DNA, 558 bp, Glycine max
  Clone ID: jC-gmfl02220071b01d1
aacagtagtaaaagacgcagcttatattttattattctaaaacatataattgatccttaataaagatgtgaagtgctatgtcttgaattttcgacattcaaaacatattattctgaaacagcatgataatttatacccctcataagcagcgttaacagcaagccactgaattcctctgtccagagatccatagcaatatcacattcatgataagaggaaaagcaaatagcctaacaagcaatcccatgacaactgaacagattaagaaagaaaacttaatcctcatgtccaaccagtgcaaggagaatgctctgatagtctccagaagtgtcactggctattgcgcggtccagaggaatgctgtttcttctttggtattcctcagcaattcgctgcaaatcaacctcagctctggttgtcaccactctagtaagggccccttcatcagttcctagcttgtttatagccagcctcaagacttttgcaaaatatttttcagggtaagtcaagcacttaatggctgccctcatatatgcagatattcatcttttgatcagt

SEQ ID NO: 5221 - DNA, 651 bp, Glycine max
  unsure (1)..(651): unsure at all n locations
  Clone ID: jC-gmfl02220071b02a1
gctctatcgctgcgatagactcganaccgttnnnnnttnnnncnnnnnnncnnnnnnttnnnntnnnnntnnnnncnntnnnnccgnntttcnaaacttggcaagagtggtggcactccaacagaaccaactatctttctctaccttagcttcctctctttctgacttcagtggaaccagacttcaaactcaacttcagttcaagagaaagcaatgccatccaaaagggtctttctacgtctccgcatcgagcaccaagaaaatcctaataatgggaggcaccaggtttattggtgtgtttttgtctaggctccttgtcaaagagggtcaccaggtgactttattcacaagaggtaaagcgcctgtcactcaacagttgccaggtgaatcagacagtgattatgctgatttttcttccaagatcttgcatttgaaaggagacaggaaggacttcgactttgtaaaatccagtctctcagcagagggatttgatgttgattatgacatacatggacgcgaggcagatgaagttgaacccatactggatgctctgcctaatctggagcagtttatttactgctcttctgcccgtgtctatctcaaatctgatctattacctcacgcagagactgatgcagctgatcctaagag

SEQ ID NO: 5222 - DNA, 527 bp, Glycine max
  Clone ID: jC-gmfl02220071b02d1
gaacgaaaagctcatgaatatttcacgacttcataatgtagcaaatccgaacagcttttctaaatacaagtgaaatacttaaaattgaaatagaaaagtttatacgctaacaagactcttgccaagaattatgtcatctgttgagaaatcagcctctttccgatatgttcctctaccaaagtccaggttgtacgagtctgctagaccctctacaagtccaaattcaggttccaatccaagcacgctctttgctttctcaactgatgcaaagaaatgctggtcacggaatggaaatgatttctttttcccaaaatcaaaatctttagggttgtagtgaatgatctctggctctgggaacccaccagccttagcacatgctcttgctaatccatcaaatgtgacatacttatctcccgagatgttgaatacttccttgctggccttctcattaccaagaacctggataaaagcttttgccaaatccttaacatgaccaagttgggttatctgtattcctgagccgggga

SEQ ID NO: 5223 - DNA, 631 bp, Glycine max
  unsure (1)..(631): unsure at all n locations
  Clone ID: jC-gmfl02220071b03a1
caagggtactccacagacaagagaaagaaagaaaaccccatttaaagcttttttctttttgtactgtgcacatcacaagaagaacaaagatgggtttttgaaccatcacatgataaaagagagagaaacaaaaaaagaaatagggatattggagaaaaacaagaagtagctgcgcaagtggaagaagaagaagatgaaggaggagaatgaatgaggtgaggcgtgttgttattcttgttgttgttgctgaaatgggtctgttgaacacaagtgcatgtatttgaccactagtgtgttaaagctcagatctttgtcttttgttctcccacctggtattttgagtccttccttaactgaaacccattttgttggtgtttttttttggggtattgctgaatttttcttgtaccaacttgttggggttgatttagatgaaggccgtgcccctaccctatcaggaatttagagggaacggngtgctagattttgcttctggtgctgctgctgctgtttcagattcgttgctacttccacagcangagcaatttctgcaaggtggaacccccaaagggaaaacttttgctatgtgggcattgacccttttctgttttgaccggataggaaaacagca

SEQ ID NO: 5224 - DNA, 519 bp, Glycine max
  Clone ID: jC-gmfl02220071b03d1
gacatcaaacaaagcctcaactttacagggtaattagtgttactttcttgtaaaacatacaagaaaagcccataaatttaggcaattaaaacaggacaaaatgcataaatagaatgctcatgtttataataatacacttcatatcagggctcataaattgccattgctaattaatatgttcacttccttaactgaaaataataaatcctaaaaacagacaattagcatagaaccatagccaaggcaaattcaagcaagaaagatcaatagaagcggtaagttatgtagcaccttcgaatatagaattaattggtcgttcaaaggtgcagaatggctctgcttagcatctccaagttgaaactgagatgagatccttcctttgccagcaaagaacaagggaagactgcctcttctcaacatggaaccccttgctaggagtcctctgcaccaaacactcagcctgggattctgtaaagttactaaatgtcaatggtgaaaacccagatgacaagagaaggt

SEQ ID NO: 5225 - DNA, 551 bp, Glycine max
  Clone ID: jC-gmfl02220071b04a1
cctcttaaaaaatgaaaattttagaatattcgctttgccactgaaactttattgtagatgtagtccaaatgaaagatttggaggttttgtttgttccaatagtacatttgtctctaatcccgtacgtttaaaacctctcaaagaaaaaatatcgttgttgctaaatatttttttatcttgttttgtttgtgttggatcgacagtatctgaatgaagctagttggaattggagattgatgaagataatcatgacagtgtgtcatgtgtacgacaaggagcaaaactatgttgccttcgacgaactcgcccctgaagattcacgtccaattacatttttgaaggaaaccatgcctgattatgcttaattaggttcaagctggcttttttctcatatgaaattttttatgtatcaaattacgttcgtatggcattcattttctttttacattttcgatcttgcttagtaatatagttctatttctcatatcatgtattacgagaaaattgcttgctgctctcaaagtcacgtatagagtaattaattatattac

SEQ ID NO: 5226 - DNA, 352 bp, Glycine max
  Clone ID: jC-gmfl02220071b04d1
ctatggagtttttctgggtttattttttacctttttttcttctatctccttattcctttatcttaactttttgcgcccacaacacccgccgacacggcccaaaacaaaaaaccccccacccgtcaaaccaaaacccccccgcgcaaaaaacccacccatacctcattcacacaaaaaaaccccaccgagggaaccccccccacaaaaccccccaccgggaaaaaaaaaaaaacccccccacccccaaccccctagaccacccccccctttctctcccctcccccaaaaaaaaaaaacaattctttcaccaaaacacggggcgaagggaaaaaaaaataataccccccccccc

SEQ ID NO: 5227 - DNA, 678 bp, Glycine max
  unsure (1)..(678): unsure at all n locations
  Clone ID: jC-gmfl02220071b05a1
tgtcttgctcggtcgatacgaatcantnanccnttnnnnnnntnnnncnnnnnnnnnnnnnnnnnnnnnnnnnnnnnnnnnnnnnnnnnnnnnntttnnnnntttttntttttttttttttttttggtttttggtntttttttttttttttgtttttttgttcattgagcagatgtcaggtctgaagcatctagtacatggagcaaagcagcatcacaatgtgaaaaatgtatatgtatggcatgcactagctggttattggggtggagtgaagccagcagcaaccggcatggaacattatgacactgccttggcatatccagtgcagtcaccaggcgtgctaggaaaccaaccagacattgtcatggacagcttggctgtacatggccttggcctagtgcacccaaagaaggttttcaatttctacaacgagctccatgcttacttagcttcttgtggagtagatggagtgaaggttgatgtgcagaacattattgagacccttggtgcgggacatggtggccgagtgtcacttactcgcagctatcatcacgcgcttgaggcttccattgctagcaattttactgataacggatgcattgcgtgtatgtgtcacaacactgatgggacttatagtgctaagcagacttgtattgtgagagcttnctgatgatttta

SEQ ID NO: 5228 - DNA, 363 bp, Glycine max
  Clone ID: jC-gmfl02220071b05d1
atcccaaaaaacagatgggaactttttatttaaagaaacaaaccttgttccctcctcggggagaaaacaaaattctctttttatccctccaattggagccctaccaccagtttaaaccaaattacctgctccaccaaaagggcttccccaccccatgactactacaacatgccttggttagcttttaggatcaacaaccctttttttcccctacatgaaactaaaactgggggggttaaaaaaaacctcccccctttttttttgcctggctccaacaattccctcaagggttaattacaacaaaaccctttttctgatacaacaatgctttaaacaccaagttttaaaaagggctcaaacttg

SEQ ID NO: 5229 - DNA, 641 bp, Glycine max
  unsure (1)..(641): unsure at all n locations
  Clone ID: jC-gmfl02220071b06a1
cggcgactcgctcgagacagttaatgattncnccgcacgcccacgaagcacggaacacggctcgaggtctctctaatcactttatcatttttcaaaaaccctaacccgcgcgcgtgctcacttgtcatccctctctcttcttcttcttcttctttatcgtggccgccatggattccgaggtgcagcaatcgcaagtcgccgccatcctcggcgcggatccctcccccttcgagacgttgatctcgcacctcatgtcctcctccaacgagcaacgctcccacgcggaggccctgtttaacctctgcaagcaaaccgatcccgatagcctctccttgaagctcgcgcacctactccactcctcgccgcacgaggaggcgcgtgccatgtccgccatgctcctccggaaacagctcacgcgcgacgactcctacctctggccgcgcctctcccctcacacgcagtcttgcctcaaatcgctccttctctcctcgattcagaaggagaacatcaaatccatctccaagaagctctgcgacaccatctacgaactcgcctacggtattttacccgacaacgcctggccggagcttcttcctttcatgttccagtgtgtttcctccgattcccctaagcttcaggaa

SEQ ID NO: 5230 - DNA, 490 bp, Glycine max
  Clone ID: jC-gmfl02220071b06d1
gtctgcaaacttaataaataaatagcattaaaatttcatatggtacaacttcatgctgtctgataaggaaataaaaccaatacaataggccaaaactgcaagaattgccccacagacaaccctatattctcacgcaatatggtaagaaaaaacaattgaggaatagaacgagaagctcccacgccacaattccctaacctcctcttttggactcaatcgcactattaacactcataatatacacattctagagaaagttccctttccaatcacaattgactctgcattctcaaaactgatatagaacaccatgcaagaatgaatgatggaaaccatcttatggcaaaaagaatgggtacaaatatagagaccaccaaactggaaaaagcttgttcccaaaaagagcaagacaccaactgccaagccagatgctatgaagaaatgaaggatttgcagcaaaagcatgacaactatgtagaaaggatagatt

SEQ ID NO: 5231 - DNA, 470 bp, Glycine max
  Clone ID: jC-gmfl02220071b07a1
gcaggcaggtaagacagttttggaatttcaagctatggagcacaacgctagcgttgtcctggcttatgctcacttacgagaccggactgcgcataagtttgttgatgagctatttataaagagacgagatccattcccctcttactctgcttccttcgtagattgaaagataatatacctgcatggccaccaagcggatgctaagagaactcacggacctctggaaagaccccttaacctattgcagatccggttccgtatcggaacatatgaaccattgggcagcaactaaaatggatcccccatatagcccttgtggagtgggtgtatgtctagctagctattaatatacctccacatgatccatgcaagccacccaaggtattgacctaatgatgcccaagacaatgactactattctgaacttgattacatatacttgacgaatattgaacctcattgtgtctata

SEQ ID NO: 5232 - DNA, 334 bp, Glycine max
  Clone ID: jC-gmfl02220071b07d1
agaccatacaaagacagctaacgcatacatacccggacaacacgctcacatagccggcggccgccctttttttttttttatttttttttttttttttttttttttttttttttaatatttctttttatgggccattttggttttttttatcattttaaatccatttatataattaacaaaaaaaaataaaaacaaaaaaaaaaccaatataaaaaaaaaaaaaaatccaaaaaaaatatacaaacaaataaacaaatcaacaaactaaaaaaacacaaaacaaaaacaaaaaccttacaaaaaacaaaaaaaccacaaacaacaacaaaaacaa

SEQ ID NO: 5233 - DNA, 605 bp, Glycine max
  unsure (1)..(605): unsure at all n locations
  Clone ID: jC-gmfl02220071b08a1
gctatctcttgtgtcgattgatcagtattccgtagnnnnnntnnnncngcannnncncnnnnnnnnnnnnnnnnnntnnnnnnnnnntnnnnttttnnnttttttnnnntttttttggtttttactggcccaatggtnataattgcatttcttgccatcgcacacctaattcttactggggaggatcagcttcaggggaagaagacgtccaaacttccaaggtttcgcctatggacatttcctgtgcttgtgaagggaccatttggggttgtttctgccacagagcttattgggattgtcctcgttttgttgtatgttatctgggctctctatgcttacactgtgagggcgcttgattttatctctgaatttgatgtgtcgtcctttagagacaagagcataatcatgttcaaagttatgggacttcgcacgggcgcaattgggttaatgtgtttgactttcctatttatcccagtttcaaggggatctgttcttctccgctatatagatatcccttttgaacacgccacangatatcatgtatggctgggacatcttacaatggtgatttttactgtccacggactcctctatgttgctgcatg

SEQ ID NO: 5234 - DNA, 509 bp, Glycine max
  unsure (1)..(509): unsure at all n locations
  Clone ID: jC-gmfl02220071b08d1
aaatatacaaggaagctaaaattgcatataaaatatgtctagtgataatgtatatattcacataaggagtaaaattatatcatcccgcttagaattagaacccttctaaggactataggctattatagcaccaatgctacaaagggtcctagaatttgattactgcaatatacaatacacattatatatatgcttttttttagtgaatgcatgtcttccatcttccttttggggaactagagatcaaagctgtgactgtggaaatggaagatgggatgatggcgttgtcttgtcatactgtgtgacctgatttcttcagcaacacttgtctgaagtgttgaagggccacaaactatgatacccacatcaacaaggccccatttctctgacattgattcataaatttctttaaagtctggcctggaaccataacgaatgacagttgacttagcaatactaacttgacttggagcctcgngagtcaaagagccattctgatgaatcttatc

SEQ ID NO: 5235 - DNA, 623 bp, Glycine max
  unsure (1)..(623): unsure at all n locations
  Clone ID: jC-gmfl02220071b09a1
gctcggcatgtgcgaccgatcagtatacagtgaatgattccncgtgacaagccacggagctnggtattacgttggagcgaggagctggttttgaccatttttgcagaatatggcacagaaaattgagacttgggggagaaaaaattgaaggaaatgagaatactagaaaatgtcgaattgactgcagaatttgcagatatactggttaagtccaaagaggccattgatattcctagtgaggagcagcaaagttctgaacaagcagaagcagaagacgaaaaagatgatgatgaagtggaagcagttgctaaaaagaatggaacagatgaaagttccattgaggatgagaaagaagagttgcctgagccagtaccagaaccaccaaaattggttcgtatggcaaatttgtgtgttgtgggtggtcatgcagtgaatggggttgcagagatacatagtgaaattgtaaaagatgatgttttcaatgcattttataagttgtggcccgagaagttccaaaacaaaacaaatggtgtgacaccaaggagatggatcaggttctgcaatccagatctgagtaaaatataaccgagtggataggtactgaggatcgggtcctaaatact

SEQ ID NO: 5236 - DNA, 236 bp, Glycine max
  Clone ID: jC-gmfl02220071b09d1
ggattattctttttgtctatttcttttttacaaacccaaacccattgggttatattctttaaaagaaaaggtttcactcaacccccagcgaacgcccataaacgattttctacacaaaaacggaagaaattttggccattcgacccccccaaaaagggggctcttccccaaaattttattcttatctgtggcacggaaaaataactctaaacgcgaacccaaaaaaccagggggcc

SEQ ID NO: 5237 - DNA, 600 bp, Glycine max
  unsure (1)..(600): unsure at all n locations
  Clone ID: jC-gmfl02220071b10a1
gattaaatgctcttgctggaaaatctatgaagtctggttctgctgttggaccttggaactacaccaatgctgaatcgttaatacgatacacagtcagaaagaagtacaccattcatggttgggaacttggcaatgaattgtgtggaagtggaattggagcaagtgttgcagcagatcaatatgcttctgatgttgctgctttaagaaacatagttgaaaatgcatatagagggattgaacctaagccactagtcattgcacctggaggcttctttgactcggattggttcaaggaatttataagcaaatctggtaaatctgcagacgtgatcacccaccacatttataaccttgggccaggagttgatgaccacctaactgaaaaaattcttgacccttcctatctggatggagaggctaacacattcagcagcctcaaaggtatacttcaaagttcatcaacctcagtaaaatcatgggttggtgaggcaggaggggcttacaatagtggccatcatcttgtgtctgatgcanttgtctacagcttctggtatttggaccagcttggcatgtcagctggttatgacaccagaacatact

SEQ ID NO: 5238 - DNA, 481 bp, Glycine max
  Clone ID: jC-gmfl02220071b10d1
aattgaaaacagaattgtcctgtattctattatcgcttattttatcaaccaccaagtgaaaccaattttcagtttcacctagtgccactgagctagcttagctgcaggccgaaagaagaacatttggtatatgagcaaatacaatagatagaggaccaactattattggctttcttgagtttacatatagaggctctaaaggaggaatttcaccagctgagtttacacttaacatttttccatttagcaacatagtttggctatgtaaattcctgtctggtgcagttaaatggtactctcttctggctggttcacccactctacggtatggtaacttgttaaattttaaggccacattgacttgaacagtggtgctgttgtccaagttgagcactagtattgtgatccctttggattcctttgcacaatgtgcataagttcttatcttctttggcccatagaaggttgttaagaggacacg

SEQ ID NO: 5239 - DNA, 555 bp, Glycine max
  Clone ID: jC-gmfl02220071b11a1
ctcctccccacaccctcctccgaaccttcccccaaaaaaccaccccccaaaagaacctccaccaaagaccggcacacgaaggtcgacggtcgcggtcgtcgaattcgaatgccggctctctgcgccgctagggtgttccagctcacgcgtgagctgggacacaagtctgacggcgagaccatcgagtggctcctccaacaggcggagccatccgtcattgctgccaccggcaccggcactatccccgctaacttcacctccctcaacatctccctccgcagctccggctcatccatgtccgttccctcccaactacgatccagctacttccacaactcaaacttctccctccaacctagaagaagcctattcctagaaaacaccaacactccttccacaacaacaacactccttcatttccaatccaacaacaacaacgccatcttccaacccaagcacgaattgcgcgaatcttcatcactagacttgtcctcagagaacaacaacgaagagggttattttggaagaataagaagacccttggagcaagaccta

SEQ ID NO: 5240 - DNA, 447 bp, Glycine max
  Clone ID: jC-gmfl02220071b11d1
ggtatggaagtgaatcgttttctttctcttctcaacataaaaagcataaaattaattacaaatcaaaaggctttcgggaaaaaaaaaagagaagaaaagaaaagccaattgcacaaacaatgatgataagatatcgcgtcgtgaaataaagccaaataatatccaactgttaaatagggtcatatatctctcaagccctaaaaaaaaaacctctcttctctcttcttccatcatccaccacccaccccttcccaacatattaaccacaccaaattaagaaataaaaaaaaatttctcttttcatcaaaataaacaaaactcagttccgtagggaaaataataatcaaaccttacgtcatgacgttgtgttaaaacaccaaactactacaccatgtggaatcaatcatcgaagaacacgttgattgaataattcgttgataattcatt

SEQ ID NO: 5241 - DNA, 533 bp, Glycine max
  Clone ID: jC-gmfl02220071b12a1
gcgttttagctctaagctctctcatctcactaacccacacaacaccgccgcgccgtcactcctgcgaggttgccgcggcgtcgtttgacggtggcacctgggtcctaaccatctcctctctaaagcagagttgaatttctctgggggactcgccgtccctgtctcaatctcgcatcattgtcgtcgccgtcaccgtcacggaggatgctggaacagcgtctaatggcgtccctttctcaatctcacaatatggcactccctttctaaacgcacgcgtttgctgctcttcgtccggcaaggtaagtgatgatggcgagactggctcctcctttcagtatctttagacaatcccattactggcgcccacttctctcttctcacaacgccaaacgcaccctaacagctgctactaacttctccatcacctcattagctcgaacgcccaaatcacgagacgaaggaacaaccaccatcgttaagctttcgagcaaagccagaagaaaagccttctatgagtctccagaaggagtctt

SEQ ID NO: 5242 - DNA, 409 bp, Glycine max
  Clone ID: jC-gmfl02220071b12d1
aaaactgaaggggccaaaattggtgaatgaatcctggccatacatccatgtctggaacccaagggcccaaataatcatcactaaccccaaatttattttcaggaaaagttttttagcccaagctgcccaacaaggctattctattttgggtccataggggggttccagaggcaaactaaagggtaggtaaagctaaattggacccagtttcgaccctgggaacaatcagctcctaaaaaaacttaatgccccttgacaaaagttcttgagcaaaatccatgggacaaattagcttccccaataagaaactcccccaagccatttgacccatgctggtaaaattttactttaaagcattatttctgaaaaccgggagcaatatcagctattaaataaaatttaaagattt

SEQ ID NO: 5243 - DNA, 590 bp, Glycine max
  unsure (1)..(590): unsure at all n locations
  Clone ID: jC-gmfl02220071c01a1
tgctcatcgtgcggcgtcagatcgaanaccgatganngatanaccaaaanagcaaaaaaataaaaaaaagaaaggagaaggangatggagattgaggagttttatactacctattaggattagtcttcgctttgggctccccctccaacggcttcatcggtaaacatttcttcggcctcaaggacatcccttcatcctcctacgactacagctacttcctctaccaatgggccttcgccatcgccgccgccggcatcaccagcggaagcatcgccgaacgcacacagttcgtggcctatctcatctactcctccttcctcaccggcttcgtctatccggtggtctcccactggttctggtccccagacggctgggcctctgcctttaagatcaccgaccggctattttccaccggcgtaatagacttcgccggttccggcgtagtccacatggtcggcggaatagccggcctatggggagcgctgatcgaaagcccaagaatgggacgtttcgatcatgcaagacgagctgtggccttgcgaggccacagcgcgtccttagtagtcctgggaaccttcttgctntggttc

SEQ ID NO: 5244 - DNA, 546 bp, Glycine max
  Clone ID: jC-gmfl02220071c01d1
ataaaaactacttccatatatttacattagacataatgaaaaagtttaacataaaagtctcaaattaaggaaaagaaaaaaaaactatatgcctcacggccaaacagtagtatttctactatataccaatcttcttccttcttttttggtgaaaactacaaaaataaatcccacaaatttccattttccacagccatctgtcatttccaggaccaacatgccttagtcaacaaccaccccccacagaaacgtacgcatcttccaccagaatctttaacttccagcatccaccaatgcacgaccaatgacaattacaaatcaaaatccctaattgcccatcatcataaaaagaaaaatctacgaaaaaagaagacccaagacaaataaaaaaaaaagaagtaaaaagtcatgagtatcaaccggagttggatctaacagaagtaacaagtaaccaaggtttgaatccttacaaggaatatgtatccaaatttaatgtttgactaatgagacatgcatatgggaaaaaaagatcattcatcagtggtg

SEQ ID NO: 5245 - DNA, 557 bp, Glycine max
  unsure (1)..(557): unsure at all n locations
  Clone ID: jC-gmfl02220071c02a1
gctctacatgctgactgcatcgcatgcagtgaangataanncnnaaaanctanaaanaanaanaaaaaaaaaacttatgcatgttcactttgtggcttatcgtaacagtgatcctcaactaggagacttgagtgagagcgagttcttgtatgagcaggttaaatcaattaaaaagattgcagagtatgtgactcaactgagattagttggacagggtcatggtgtgtggcactttgatcaaaggcttcttcatgatgaagatctataatctttgaacagcctctgttttctatacatatggccctatgtgaagttatcaccgtgtcgttctgaccgtagtaatagtgaataagtgtgttgctctgtttgtagcaatagtgaatagtgaataagtgttcctctcctaggtgataaaaatgtagggaactttgtgcttgtattatagctgatggtagaatggtagcagtagtattattatgtgcaatctcatatatgagggtaccatgtaatcatatgattagaaattacatatgacgtccgggtaagaaaactatata

SEQ ID NO: 5246 - DNA, 479 bp, Glycine max
  Clone ID: jC-gmfl02220071c02d1
aaccgaacgtttttttttatttctaataaaatgatggggtggtacaaacatatatgagattgcacataataatactactactaccattctaccaacaactataatacaaggacaaagttccctacatttttatcacctaagagaggaacacttattcactattcactattgctacaaacagaacaacacacttattcactattactacaaacagaacaacacggtgataacttcacataggaccatatgtatagaaaacagaggctgttcaaagattatagatcttcatcatgaagaagcctttgatcaaagtgccacacaccatgaccctttccaactaatctcagttgagacacatactgtgcaatgtttttaattgatttaacctgctcatacaagaactcgctctcaatgaagtctgctagttgaggatcattgttacgatctgccacactgtgaacatgcaaaagtttctccta

SEQ ID NO: 5247 - DNA, 563 bp, Glycine max
  Clone ID: jC-gmfl02220071c03a1
gatgcatatggatcttggagcataaccactgctgctgaacgaagcaaattactgaggaaatggtatgatttgctaatggtacataaagaagaacttgcacagcttataaccttggagcaggggaaacctcttaaagagtctgtgggtgagatagtctatggggctggctttattgagtttgcagctgaggaggcaaaacgtatatatggggatatagttcctgcacctttttctgatcggcgattatttgttctaaagcagcctgtaggggttgtaggtgcaattacaccttggaactttccccttgctatgattactcgaaaggttggtccagcccttgcatgtggctgtacagtggtcataaagccctctgaacttacacctctcactgctttagctgcagtggaactctccattcaagctggaataccaccgggtgtcgtgaacgtggtaatgggaaatgctcctgatattggggacgctttacttgcaagtccacaggtaaggaagatcacattcacaggctcgacagcagttgggaagaaattgatggctggttcagc

SEQ ID NO: 5248 - DNA, 465 bp, Glycine max
  Clone ID: jC-gmfl02220071c03d1
actaacctcgtacctttcacagtgcattttttaatggggtaaaaatctgggaaaaataaagagaatgaaaaaggaaagcaaaaagaaccaaacagaaaaatgaggaggccctttgcaagccagcacttatttgtatacaacacgggagcagctatatgcatattcttcaactaagaaacgcaaggtgactcctccctattttgcttggcactggctcgggcttcattctttggtcatgtttccgaagcacacatacttgatctctaaagattcatccatcccatatttggagccttctcttccaaggccagactgtttaaaaccaccaaatggagccacctcagttgaaattactcctttattaacacccactaatccatattcaagagccttagaaacacgccatgatcagtggatactgtttgtaaatacatatgaacccaaacctgcgttagtgtcattagc

SEQ ID NO: 5249 - DNA, 552 bp, Glycine max
  unsure (1)..(552): unsure at all n locations
  Clone ID: jC-gmfl02220071c04a1
gcaagatcttggtgaatgcatgttggctggtcaacaaccctgcacactggaagaagccagaggagttccggcctgagaggttcttcgaggaggagtcgcttgttgaagccaatggcaatgactttaggtaccttccctttggtgttggcagaagaagctgccctggaatcattcttgcattgccaattcttggcatcactttgggacgtttggtccaaaactttgagctcttgcctccccctggccagtcacagattgacactagtgagaaaggagggcaatttagcttgcacatactcaagcattccaccattgtggcaaagccaaggtcattttagactccaccacatgatcatgatcatatgatcaatccccttaattntttcttttttcttttcccttttctttactctgtattgtatcaatgcttgaaaatggggttgttccaaaaatgtcatatatacttggcctgctaatgggtattgaaatctctgaacttgaagtgatgcatcggtttgagatggtttctaataaacctacacttttgtctct

SEQ ID NO: 5250 - DNA, 458 bp, Glycine max
  Clone ID: jC-gmfl02220071c04d1
agagacaaatgtgtaggtttattagaaaaccatctcaaaaccgggcatcacttcaagttcagagatttacaatacccattagcaggccaaatatatatgacatttttggaacaaccccattttcaagcattgatacaatacagagtaaagaaaagggaaaagaaaaaagaaaaaattaaggggattgatcatatgatcatgatcatgtggtggagtctaaaatgaccttggctttgccacaatggtggaatgcttgagtatgtgcaagctaaattgccctcctttctcactagtgtcaatctgtgactggccagggggaggcaagagctcaaagtttaggaccaaacgtcccaaagtgatgccaagaattggcaatgcaggaatgatttcaaggcagctttttttgccaacacccaagggaaggtacctaaagttattgccattggctttaacaagcg

SEQ ID NO: 5251 - DNA, 535 bp, Glycine max
  unsure (1)..(535): unsure at all n locations
  Clone ID: jC-gmfl02220071c06a1
tgacacttcatcggacctgaatcgatcagtattacagttaannngattttntccataaaataccataaaaaaaagtgggaaanaaactatgttactcatatattaaatatttttttttaattattttgaaacagatgaaatattaatataatataataagtggatctacctgggacaattttctatactttcttttactcatcacccatattacatacacttaactctatccttctttaacgaaaagaaaacaagatgaatagctcccaccaagattagttacactactttgatgaatgctttcgcatactcgggtcagccgaaacttgctcacagagtgttaaacgagatggacagttaccctcgattcaacgtggatttgatcgcatggaacatgattagatgaaggatattgcagattgcgattgcatgcataggctaataaagtgatccacaagatgaacgaaagtggatttcaccctgatctgagcacttatggcagattagccaacggaattgcataggcaacgaaacc

SEQ ID NO: 5252 - DNA, 438 bp, Glycine max
  Clone ID: jC-gmfl02220071c06d1
aaaattacaagtcatcgaaattatacattgatttcatacctgggaaacctgagctttaattactaaacgactttgcagatgtagagtacaataggcactttttttagttaactaaacatttatttgtacattgtcaattagaagaggcctttctcatacttgactatgtcatgaccagctattaaagggggagcaactaaaccgaatcataggtattgccatacccttccatagggcttaaccgccactcacttacatcctaatctgaattatgcctacccatccaaaacttaaacgcctcagcagccctttacctctctactcttgcgtcttgtgtagcccttgaagcctgcttactagtaaacattcttgaatgcattttcacatggattctagctaactcggtcctggtgggaggcatcccattttacttcatgc

SEQ ID NO: 5253 - DNA, 452 bp, Glycine max
  Clone ID: jC-gmfl02220071c07a1
gaaatatctctttcatagaacggagaaagacacgatgcaggaagcgacgaaggtgataataatcggtgccggaacttctggtatcgccaccgccggttgcttaacgaagcaatcaataccttacataatgctcgagagagaagactgtttcgcttcgctgtggcagaaatacacctacgatcgtctacaccttcattcgaggaagcaagtttgcgagttaccgcacttaccgtttcccaagtcttaccctcactacgtgcctcggaagcagctcatagactacttgggaaactacgttaaccactttgagatcaagcctctgtaccagcgtgcagtggagttggtggagtatgatggatggaaagggatttggagagcgaacgctcagaatagtagatctggtgagcttgacgaatacgctggaaagtacctggtcgtggccagtggctaaa

SEQ ID NO: 5254 - DNA, 535 bp, Glycine max
  Clone ID: jC-gmfl02220071c07d1
aaaacaacatacctaattcatatccccaaaagaagaaagtgtcatgtacatactgtttctgcaaccaataatagataatagatcattacatgacacaaattccttctctttcttcttgaggaattaacgaggcaatatcatttgctactaattgggcatccatgttagctccaaagaaaccccttcttgacagcccaacacaatacaaaccatttcgacctttccaatgatttgggaaactgttttttggaaagccatcctcatttagaagatcatcaccccccttaagccacttttgagttgatctcttgaagcctgtacagaaaacaattgagtcgaatgtgtacgatttgccatcctggaacaaaacttcattacctcttatactctttatttcagctggcaacacctacataacatataatagaattaatcaacctcagctcatacgtctcttcagttgaaatttttttttcttaacctcttaattttaaccaatcagctgaaatttattttgttaaccttttaattttaa

SEQ ID NO: 5255 - DNA, 586 bp, Glycine max
  Clone ID: jC-gmfl02220071c08a1
actgaaagcactcagtagggtttgcggtttcagagtttgtgacgcacgcatccatggccaccaccaccaacgccgccgcagccccgccgcgccagctctcccagaaggaagccgacatccagatgatgttagccgccgacgtccacctcggcaccaaaaactgcgacttccaaatggaacgttacatcttcaagcgccgcaacgacgggatttacattattaaccttgggaagacatgggagaagcttcagttagcagctagggttattgctgcaattgagaaccctcaggatatcattgttcaatccgcaaggccttatggtcaaagagcggttctgaagtttgctcagtacactggtgctcatgctattgctggaaggcacactcccggtaccttcaccaatcagcttcagacttcgttcagtgagcctcgtctccttatcctcactgatccatgaacagatcaccagcctattaaggaagctgctcttgtgaatattcccaccatcgctttctgtgacactgattcgcctatgaggtatgtggacattggaattcctgccaaacacacgggaaacacagcatt

SEQ ID NO: 5256 - DNA, 270 bp, Glycine max
  Clone ID: jC-gmfl02220071c08d1
gataaaataaaaaaaaataaaacaaatataaaaaaaaaaaaaaaaaaaaaaaaaaaaaaaaaacaaaaaaaaaaaaaaaaaccaacaaaaaaaaaaaaaaaaaaaagacaaaaaaaagcaaaagcaacctaaaaacacaaaaagcaaatcagaaccacaaacaaagaaacaaaaaaacaaccccaaagaaagaaacaaaaaaacccaaagtgtaaaaatagaaaaaccaaaaacaaaaaaaaaaataaacccaacccccaaagaaccccc

SEQ ID NO: 5257 - DNA, 613 bp, Glycine max
  unsure (1)..(613): unsure at all n locations
  Clone ID: jC-gmfl02220071c09a1
tgccttctcatgtgcacatccgatcagcatatcgttggnatgttcnctcggcactccctcgtaatgcaggaattctgctcgagtttcgttattctcttattcatttttctcttctgaataatccagatctgtttctggggttttctccgtcacgcttttcgtgaccggatctgtatggatttgatccagatctacacgccgatggtggctttggccgggtctttcatagatctggtgcgtagaggctcagatctacggtaccgaggtacaacagagaatcgatgacaagaacgcagatccgacggtagatccagccgattccgcttgttcgatcgctacagacccctgtatcggatcattaagcagcgtgtctcgcgcgttctacacgtgttgccgatctcggatgttgtaaaattagtttatgatgtgaagctatggagtggaaaatatgtggatgtaggagatttcgggatgaatggcctcaaaacgctttgtcgtttgtggctattgagtcctgagtgatcttgtcatccgacctttgccatgacaggtgcgcttgcatggcaggtcaaaaaatgttaataaaaaaaggtttattggtttggggagagat

SEQ ID NO: 5258 - DNA, 524 bp, Glycine max
  Clone ID: jC-gmfl02220071c09d1
gtcatagcagatttcatatagcgtcttcacattgatattccaatcatcgccagaagatttacaatgttaatgacctaattctgcattacaaatgttgtcgcccgaatctgaacttcttacaagtagataattgtacaattatacaaagcccccgcaatacaaatggcccatcttatttggatacaagtaaccggagtttaccaaatcaagtaagatgaaaaagggaacaatttacatgacaattacaacagtatagcttcacaatttctataaacagtaaaattatgcataaggaagtcgcagcaggcagctaatatgaaatgaagacaattattaataaattccttggctcgatttattttcactatgaataacgtgatattagattcatgaggatattatacctaccagaatattgatgaactccacctagcatcttctgccaatatgattgccagaactacatattaatattaattacatgaccagcttattaatgtactagaatatgtcatgaatactct

SEQ ID NO: 5259 - DNA, 567 bp, Glycine max
  unsure (1)..(567): unsure at all n locations
  Clone ID: jC-gmfl02220071c10a1
atggaggctacttcagcagccactgttccgacaaccttctacatgtccccttctcaatctcacttgtccaacttcggaatgtgttacggtgtcggagaaaatggtaacttccattctccacttacggttatgcctctcaagtctgatgggtcactttgtatcttggaagctctcaaaagatcacaaacgcaagtgatggtgccaacttcgtctccgaaattggaggactttctaggtggtgcaactatgggaactcacgaatatggaagccacgagagaggtttgagcctagacagcatctattataactcccaaaacgcagaggctcaacccaacagagaccttctttcacaacccttcaggcaacaaggtcatatgagtgtccaaacacacccttattactcaggccttgcttgccatggtttatatcaagcaccgttggaggaagaaacaacaaaggaaacgcacgtgtcggattgcagctccctaatgcctcanatgacagaaggcttgaaaaactgggtggctccaacaagggagtttttcactcaccagcaggttttggag

SEQ ID NO: 5260 - DNA, 465 bp, Glycine max
  Clone ID: jC-gmfl02220071c10d1
aaacttaggaaatcaaattagaaataaaagatgaaggaaaaaagtaaattttagttacataacataacatgaaaaatggaccgtgcctatctccatttaagtatcagtccaagaagcaaaaactggcaagtgagacaaagagatagcaggagaaggcctcatttgaaccgttggtgagggtagccaagaggtaacactggtaccaatggggttcacaatctttgtttccattggaggcattgggaacagaagcgagggaccccttttctcaggactagcctctcttgagctgcttaaacttgtcaccagcgatgacgtgtttgaaaaatgagtcccaattttgctagactcgtccagcatattatgctgcccagaacccaccgaatcaatcccaataagatcttgtagggccatagaaaatgcactgtttctgtaatttccacagttcattattttttggtcact

SEQ ID NO: 5261 - DNA, 595 bp, Glycine max
  Clone ID: jC-gmfl02220071c11a1
gaaaatgtggaagagaacgggttttgaagaagaagcagttcaattgatcaactcagatttcagggacctaagtctagctgctaatagactcgcccatcatgccatcaaacttggtggcattggctttggagcctcttttttcggattgtttgctgccattgctgctatttatctgttgattttggatcgtacaaactggaaaacaaatattctcacagcactactcattccatacattttcttcagcttgccttcattaattttcgacgtcttcaggggagagcttggaaaatggattgctgcagttgctgttgtattacgccttttccttccaagacacttccctgattggctggaattgcctggtgctctgattcttcttatcgttgtagctccttctctaattgcaagcacctttagagacaacattgttggggtggtagtgtgcctcatcattgcatgttatttgctgcaagaacacattcgggcttctggtggtttcagaaactccttcactaaagctcacggcatatcaaattccattggcataatacttctgttgtttatcccatctgggcgctggtgtcatactttt

SEQ ID NO: 5262 - DNA, 496 bp, Glycine max
  Clone ID: jC-gmfl02220071c11d1
agcaacaaatgtaaatttatattatatcccacaggtaaaaatacaacgatttcccaaatcatacatgatttatgaatacacgacagctagaaagacaccacatcaatcctcttcatcttttgttttctacattctatgaaaccagaggacttaaactgagattttattccactttttaacacatgctaactttaggtcttaggacaaacatgaatcacaaaacaatggccgggtgtttatagatatcaagttgcaacaaatgaatgatacagaagacacttggtttaattctcacatatcaaccaagtccaaatggtggtgcctaaaaaagtatgaccaccagcgcccagatgggataaaccaacagaagtattatgccaatggaatttgatatgccgtgagctttagtgaaggagtttctgaaaccaccagaagcccgaatgtgttcttgcagcaaataacatgcaatgatgaggcacactaccaccccaacaat

SEQ ID NO: 5263 - DNA, 577 bp, Glycine max
  Clone ID: jC-gmfl02220071c12a1
gaaaatgtggaagagaacgggttttgaagaagaagcagttcaattgatcaactcagatttcagggacctaagtctagctgctaatagactcgcccatcatgccatcaaacttggtggcattggctttggagcctcttttttcggattgtttgctgccattgctgctatttatctgttgattttggatcgtacaaactggaaaacaaatattctcacagcactactcattccatacattttcttcagcttgccttcattaattttcgacgtcttcaggggagagcttggaaaatggattgctgcagttgctgttgtattacgccttttccttccaagacactttcctgattggctggaattgcctggtgctctgattcttcttatcgatgtagctccttctctaattgcaagcacctttagagacaacattgttggggtggtagtgcgcctcatcattgcatgttatttgctgcaagaacacattcgggcttctggtggtttcagaaactacttcactaaagctcacggcatattaaattgcagtggcataatacttctgttggtttatcccatctgg

SEQ ID NO: 5264 - DNA, 496 bp, Glycine max
  Clone ID: jC-gmfl02220071c12d1
agcaacaaatgtaaatttatattatatcccacaggtaaaaatacaacgatttcccaaatcatacatgatttatgaatacacgacagctagaaagacaccacatcaatcctcttcatcttttggtttctacattctatgaaaccagaggacttaaactgagattttattccactttttaacacatgctaactttaggtcttaggacaaacatgaatcacaaaacaatggccgggtgtttatagatatcaagttgcaacaaatgaatgatacagaagacacttggtttaattctcacatatcaaccaagtccaaatggtggtgcctaaaaaagtatgaccaccagcgcccagatgggataaaccaacagaagtattatgccaatggaatttgatatgccgtgagctttagtgaaagagtttctgaaaccaccagaagcccgaatgtgttcttgcagcaaatatcatgcaatgatgaggcacactaccaccccacaatg

SEQ ID NO: 5265 - DNA, 564 bp, Glycine max
  unsure (1)..(564): unsure at all n locations
  Clone ID: jC-gmfl02220071d01a1
tgcacatctccatgtgtctatcaactcgcatatcagttaannggttanatcttaaanacgcaatatttaaaaaaaaatatgtatattattttattttttttatatttatttataattattttttttaggggtatttggtaataatatttaatttatattattattattttttattttacatggtaaggatcaattctgaaccaaatatgggaatctaattttacacctcagaaaatcatcagaggtttaggtccttggggtcctgatatggtcctcaagtataccagtgccaggtttgttacatatacaactggggaaacgctgacagaatctgaatcgagattactgacagattatgtttaccatactttagcagccaaagctagtggcgagctgtgcttaaaatatatattttcatttggaggactcccgaggtcacctcttcttcacagtgcttcagagtggaaagtgcctaccaccttcatatatggctttcaggactggatgaattatgaaggagcccaagaagcacgcatacaaatgaaggttccatgtgaaatcctt

SEQ ID NO: 5266 - DNA, 484 bp, Glycine max
  Clone ID: jC-gmfl02220071d01d1
cagtattgaaatttatattagacgtcattattttttgaattgccattacaagttacaattgcaaattccatttaagcatgaataggacatggcttgaataaataaaggagtttaatttgtaaaagaaatatataatcatagacagcattacacaagattatactctatgcagaggttagcccttcaggaagggattcactgtctggatcaggcctaagaaaccttttacaagcataaaacactgctgaatggaagccacttgggttgtcaatgaacacaaagtgcccggcctggggaaccctaaggatttcacatggaaccttcatttgtttgcgtgcttcttgggctccttcataattcatccagtcctgaaaaccatatatgaaggtggtaggcaccttccacctctgaagcactgtgaagaagaggtgacctcgggagtcctccaaatgaaaatatatattttaagcacagctcgccacta

SEQ ID NO: 5267 - DNA, 637 bp, Glycine max
  unsure (1)..(637): unsure at all n locations
  Clone ID: jC-gmfl02220071d02a1
gcttattcatgctgacgtcagatcgaataccaatnananataaaacanaaaaaccaanaaaaaaaattaaaaaaaaaaacaaaataaaacattctnagctttanaataacttgattctggtgggacctgctggattctcatcagaatcagaaagaattacaaagttcttatcaacatggaaaggatcaatcctgaaccacatatgggaatctaattgtacacctcagaaaatcatcagaggtttaggtccttggggtcctgatatggtcctcaagtataccagtgccaggtttgttacatatacaactggggaaacgctgacagaatctgaatcgagattactgacagattatgtttaccatactttagcagccaaagctagtggcgagctgtgcttaaaatatatattctcatttggaggactcccgaggtcacctcttcttcacagtgcttcagagtggaaggtgcctaccaccttcatatatggttttcaggactggatgaattatgaaagagcccatgatgcacgcaaacagatgaaggttccatgtgaaatccttagggttccccaggccgtgcactctgtgttcattgacaacccaagtggctatcattcagcagtgttttatgcttgtag

SEQ ID NO: 5268 - DNA, 419 bp, Glycine max
  Clone ID: jC-gmfl02220071d02d1
cagtaatgaaatttatattagacgtcattattttttgaattgccattacaagttacaattgcaaattccatttaagcatgaataggacatggcttgaataaataaaggagtttaatttgtaaaagaaatatataatcatagacagcatttcacaagattatactctatgcagaggttagcccttcaggaagggattcactgtctggatcaggcctaagaaaccttttacaagcataaaacactgatgaatggaagccacttgggttgtcaatgaacactaagtgccaggcctggggaaccctaaggagttcacatggaaccttcatttgtttgcgtgcttcttgggctccttcataattaatccagtcctgaaaaccatatatgaaggcgggaggcaccttccactctgaaacactggg

SEQ ID NO: 5269 - DNA, 562 bp, Glycine max
  Clone ID: jC-gmfl02220071d03a1
tctctctcctctgtcttataactttacctttctatcctcatggagtagtaaagaagtaactaatcaaccacaaacctaaacaaccccttttgcctaaagctccttccttttctccaatggcaacctgggttttatcagaatgtggcttaaggcctcttccaccagtgtttccacggtcaacaagacccatttcgtgccaaaaaccttcaaagtctagatttttaagcacaaacaagggtgtgccagatctgaatctccaagcaagagggttaacatgctgtagttttagggatagaaagtgggaattgggagtgagtgctccactgaaagttgccaccaatgaaggagaggaagaagagagaaccaatggggctaataatggggttggcgaggaagtttcagaatttgaccctagtgcaccaccacccttcaaattggcagatattagagctgccattcctaaacactgttgggtgaaggacccttggacgtccatgagttatgttgctagagatgtcattgtggtttttgggttggctgctgctgcagcttatctcaacaa

SEQ ID NO: 5270 - DNA, 471 bp, Glycine max
  Clone ID: jC-gmfl02220071d03d1
gctacaattctattcaattactatcattcaacattggtgtttgagtttgagcaaaaaattgtaattaaatcgatgaagacagcacacccttcatcaagaatgaacaatttacagattccttgtttttcaatgagagcacattacatatacaccctgatcatgctttaaaatgcactcggttacaatatcaaatttgtcatgcattcattcgctcatgagcaattcaactagtagactcaatgagagtacacaatcttcaaagttcagaaattgtgtcatatgcagcataattctgaggcctctctgttgtcttcaagaggaaaaaatggatgatttactgtgatgtggaagagctactaagtgtagggtctgtttgatagtatacaatatcgccactgtcactgacaaaatggtctttcttcatgcttcttaacaattctccaatgaagtaaattggaagaggactagact

SEQ ID NO: 5271 - DNA, 483 bp, Glycine max
  unsure (1)..(483): unsure at all n locations
  Clone ID: jC-gmfl02220071d04a1
tggttgtatccagtggaggcttcaacctacgaacttgtccttataatcactcgctctcctacgcttcttctttctctctccactcccattccacaccccacactcttctcctctatttaacaacgcccgaaaaaaaattagggttttcaatttggggaaataaaaatagggggaaatattctggagagagtgtgtagaaaatatggttgtcgatgatatgacgctgtgcatcatcgtcggctatggaggttcctcttcttctcgtttctccgatgcttatcccaaaaggggtttgatggaggggagatatagtggggattgatatgtgcaaggtgtttaagcggcntgctcctgctgatcgtgcttcctgggatggccatattgcacgaaccagctttaaaactcatgcaccagacgagctagcctgggcgattcttgtctaacttctatgtccatggagtttcaccaccccttcacgctctt

SEQ ID NO: 5272 - DNA, 479 bp, Glycine max
  Clone ID: jC-gmfl02220071d04d1
attccaaaggtatgatttggtaatttcttataaatgatgagaactagctgttcaatactgcttacaatcaaaagcataatacagatgcaccggaacaaaaagaaccagggcagtcagtgagctaaaattgctagagacaaacataagagacacaattctattgcaaataacactgtatggtacaaagttagaaaaacaatgacatacgaaccataccggaatccctaacaaatttttttaagtgcctatctcaagttaacttgagatcattccctcccagatgagggcggaggcaaacccggacttcatgctcttttggtcccacgcgatgttttggcaccaggatctcaagcactgatcctggcccatcgtagtatgcttctatgttggcatcttcaggaattcgagttgaaagagggatttctcggacgaactctccaggggggcagtgctctgacgatggatctgtaagcttgaat

SEQ ID NO: 5273 - DNA, 620 bp, Glycine max
  unsure (1)..(620): unsure at all n locations
  Clone ID: jC-gmfl02220071d05a1
cattgctgtatttcctactcagcattaccagtaaannggnatataaaccgagaaaagggccaagaagagatacatggtgaagaatagagtaagaaaaggtaatcatatttttatttgtccttattcaattcatatatactatctttccctgggctcacgggtgctctattttattgcacatatccctctttatggaacagcaccatggcatattcactggttggcgtacagcataatcaatacccacaaggacgtagatgtcaaacaatccaaggttcatactactaaaaacacaaagccaaatattgactctgacaatgtagcgtcctcctcctcaactaacaatgctgacaaaactggtggatttaatacgaatatgccaatgaaacagcaaggggaaaagaaacctgctgcacagcctcatgcatccaggactgttcttgaagagaatatagtactaagtgttgcattggagggatcaaagaggacacttcccattgatgaagagattgacaatgtgacatctcgagaagcaaaggaaatggctgcattgcacggtggaaatggatctccaaggctccagatggaaaagacaactagttattataagcagcgagttc

SEQ ID NO: 5274 - DNA, 493 bp, Glycine max
  Clone ID: jC-gmfl02220071d05d1
gatgaaagccattttccatatattgctgaaacagcaaaaaatgaagagatatgacaatacagctcgagtcctttgtaaaaggggtgtgacacatggaagtgataatacatacaacttcctaagggtgggaaactggttcaaagcagtgtactgttggacttggaacatagctttcaaacaactaatgatgtgtttggaaaaccgttgtaatcccgttgaacaaacatttcccactttccaatgtacaaaagtagaaacaagagtggtgttggattggggttgcattggacgtaactgcaatgcaaacacgagctaactagtcgaactcgctgcttataataactagttgtcattttcatctggagcctttggagatccatttccaccctgtaatgcatccatttcctttgcctctcgagatgctacattgttaattttcttatcaatgggaagtgtcctttttgatccttcaatgcacacctaatactatatt

SEQ ID NO: 5275 - DNA, 584 bp, Glycine max
  unsure (1)..(584): unsure at all n locations
  Clone ID: jC-gmfl02220071d06a1
cgtggctacggctctganacatgtgnnnnnttnnnccnnnnnnnnnnnnnnnnnnnnnnnnnnnnnnnnnnnnnnnnnnnnnntttnnnnnttnnnnnnnnnnnnnnnntnnnnntnggnnttntggggnnttttttgtgtgtgtgtgtgtgcttgttgcctctccatttccaaaacaccaacaccaccctctctcttctctttccgccaccctctttcccattcaacccacgcttccaaaaccaccaccagccctcctccttccttcgaattccagctattcatccctccggggattgaacccgacgaggtcgatgactccacggtccttcccggctccaacatcgccgtcggaccctacgccggccattcccacatcaaggacgtccagttcgtaaagagtagcgcccggttcgtaaagagtagcgcccgcgccagggattgcccaaaagacaaccgacctgaattcgccgttcttggtcgctccaacgtcggaaaatcctccctcatcaattccctcgtccgcaagaaagagattgctctcacttctaagaaaccagggaagacgcagctcatcaatcact

SEQ ID NO: 5276 - DNA, 473 bp, Glycine max
  Clone ID: jC-gmfl02220071d06d1
ctcaaacatgcgcacacttggcaacattattattcgagcctttaaaaatacatcaaagcatttacaatgtttacatattgcaaaaagattagttttgctccagaaaatcttaaatgccaaagcaatggtaccccaaaatatgtattctggcaactacggataaataaagccagcacgatactatatcccagttgaaagcatacaacatttcctgggatgttttatccccatttgcatataacgtgaccattaaccctaatactcagggtcagtatgtggaaattcattatccagaaacaactcaaacttgattcccaagtaagttgtatatgttgttgcagttcaagaagaacaaagatcctgaatcctgatcaaagatccagctgaaatatttcaaggctcaacccaacccatagctctttcacatgactcttccatatagttgcatcttttacaagttcaactttgaccct

SEQ ID NO: 5277 - DNA, 453 bp, Glycine max
  Clone ID: jC-gmfl02220071d07a1
ggcgtgcccatcatatctacgggctgcactgtgcactgcttgctggtgatttacaaaattgcttttaaaaatgacattttctgatcaaaagagtgtaccagaggaaatcataaaaagagcagcagctgtgttggatgccatttcaaataataaccatgttgagcggttatgcaatgagaacgtctctgctcaagatcgtcaatacaaggatgccatggagaaattgttggaatttgatattgacaaaggcgacttaaaacttttctttgaggatgtattttctctagttcttaatgcttcgtgactgaactgaagtcttctgttggtggttttcgtaggcattattgagacgccatttgtgatcatatgacatttgtttcaagatgagttgcatacctatcgaattctattgtattgagcaatccttttatggagaactaattgaaaaagaga

SEQ ID NO: 5278 - DNA, 398 bp, Glycine max
  Clone ID: jC-gmfl02220071d07d1
caattagttctccataaggggattgctgaatacaatataattcgataggtatgcaactcatcttgtaacaaatgtcatatgatcacaaatggcgtttcaataatgcctacgaaaaccaccaactgaagacttcatttcagacacgaagcatttagaactagagaaaatacatcctcaaagaaaagttttaagtcgcctttgtcaatatcaaattccaacaatttctccatggcatccttgtattgacgatcttgagcatagacgttctcattgcataaccgctcaacatggttattatttgaaatggcatccaacacagctgctgctctttttatgaattcctctggtacacttttttgatcagaaaaaggcatttttaaaagcaattttgtaaatta

SEQ ID NO: 5279 - DNA, 297 bp, Glycine max
  Clone ID: jC-gmfl02220071d09d1
aacagggacatttttttgaattcgaaaggttgggaaatttaatagctctgaaaaaatgcgttaaacaatcataatcaaaccccgatcatggtaaaacaactaaaagcgcttttaatccaactaaaacgggtgccacataagcagctgcttagtatctgactgatttagcaacctcgaaagattgtgccacatttttcttaggcgtacctactttaatgccctgtccagaattcacgatatgtttccccatacctgcttttctcacagtgtcatttatccgatcagtgctgaaccctt

SEQ ID NO: 5280 - DNA, 573 bp, Glycine max
  Clone ID: jC-gmfl02220071d10a1
ctattattctatctatctattgtttcgttccatctcacaaaaagaaaagaaaaatgaaaatgaaaatgaaaatgaaaatttcaagttcctgaaagagagagagagaaagttgaggacttaaatagtttcagttcctgaattccattagatctcttgcattttgtaaacagttttcatcggaaagttcgttacttgatcgtagtttgttccctcggatcgttgctcgaatgttgtttttttagtgacaaaagaatctggtgtatttatgcttctggttattggatgagctgtatgttttaactatggtgttgaagaagagggtagattatggatttaatggctttcgagttcctgttatacctaaagctcctagatctgccagaaggagggttgctttcaacaaagcagttgacgatggtcaagtttgcgctattgaactactggcatctttagctggccaattgttgcaagagagtgaaagttctgcttccagcaatgcgtctgaaggatatcatcaacctgccttcagccaaggtgtaattgagcaagatatacaagatgaagttaaaccat

SEQ ID NO: 5281 - DNA, 284 bp, Glycine max
  Clone ID: jC-gmfl02220071d10d1
attcttgcctgcattcataaatattaaataatctaagcaaaaatcaaagaatggcacaagtgacagtgtgaacaccctcattggggcaaatcattcccaaaagccaaccctgcaagcaattactgggcacaaataaaataaagtaagaaaattacaagaaaaagcatcgaatccacaagcacaaaatctgttctcccaagatcctgtcacaacgaccctcccattctcaccatcatcacaactgaatggactaccataacctttaacacagacaaagtctgctc

SEQ ID NO: 5282 - DNA, 315 bp, Glycine max
  Clone ID: jC-gmfl02220071d11a1
atctaaagtcactttggggagccattgatgagtgtgccttcccactcacatggaccaaaccgggacaaaggcagaaaaactgggcatagggcacggaggtctgcggcaccaaactgtacgagcgatcgaaatccgcgaagggactctctattactgaagttcagagtcaaccgaatgagatatgaatgaatcagaaccatgcagcattgataggaacaatgttcaacacactactgtggcttacgctgataaccaaaccgggtctgcggctggagatcccgacagtagacatgatcctttaagagagctccgaca

SEQ ID NO: 5283 - DNA, 343 bp, Glycine max
  Clone ID: jC-gmfl02220071d11d1
ggcacggaggaagcaacagtgacagacctaataagcattagggtcaacattatatataccaacatttatccataaacactattaacagctgattggtctcagcgcatgacagcctgtagacatatgacacagttccatcgatctactctttcttgactaacctgggaatatacacgtgctgcctgcagatcctattgtgagcccaaagggctgctaaggtgctacaccgagactgacacatatagaattatgtatgactcggctcagctgaaacagaagatgtatactaacagctcgttatgatgatacgctttccgagcatgccgaccactcgcggaagctt

SEQ ID NO: 5284 - DNA, 601 bp, Glycine max
  unsure (1)..(601): unsure at all n locations
  Clone ID: jC-gmfl02220071d12a1
gctcattttcacaaacttggtttttgttcttccaacaacccaaatctcaaacctctccctctctctctcttgtgattctctttctttctctctcttcaaacttggacagtttatggcagcagctagattgtcggggcatgaattgtccgatctgtgtcttgggaaaccgccgctcaggtccctctccgtccgcgacaccgtagccgacgccctcgccgccttgaagaggatcgacgacacctacgtcagcgtctggaactgtaaccactctttcattcgaaaacaacaacctcaaattaaatcccaggaacagctccaatgctgctgcacctgcatcggtaaggtttgcatggtcgacatcatctgcttcctctccaaaccccaaaacctctcttcaccttccgccgcctttctttccccaatctccgctctcctccacgacaactccgccgtnctcgtccgccaccttccacccaccgncagtttactggaggctatagatgttatgcacgatggggtgcagaacctggtgataccaatacanatccagtttggatcttttgacctcaacancgtgcaccacaatgacaacaccacctac

SEQ ID NO: 5285 - DNA, 549 bp, Glycine max
  Clone ID: jC-gmfl02220071d12d1
atggaaattaaactctttaagattttttcctttgaaaactaaattacatgatggaacatcttgggaggccaaatttaagcaaaagaaaatcacgggtaggtaaacaaaaagcaaaattgatttgtgcctaggcacaaatccgtgctatctacttcatatctcgattcttcgacaaagccaaaagagatcatttgcaagcggatttttattacaacaaattagctgaagtggtagcatatagtagtcgttatctgcatcatcatcatcatcatgtaatgtagtagttttaaagtaactgttagcacatggatttgaggtggtctctgaaaaccttcaacattccttggaaagtaacaatccccgtcaaggttccatcctcttccacaacccacacgtaactcacacgatgtgccaatgcttgaatcatcacagcaactaaagagctccaacggtagcaaacaatggcttcagaccttctcccaacccttgcagagtaccctccaagcttccaattcttcccagagcaaaactcttcatcagaagaacaac

SEQ ID NO: 5286 - DNA, 652 bp, Glycine max
  unsure (1)..(652): unsure at all n locations
  Clone ID: jC-gmfl02220071e01a1
gcgtcatcgatcgattcagtaaaagataaagcganaaaccaaaaaaaaaaaagggagagaggaaaaaggagaaaagttttaaaatttacagtagaacctgagattttaacggtatcagattctgatattggaatatcaggatctggtgccaaatacacttatgatagatttcctgcaaatatcagaacagaagaacaagaagaaaagaggaaacagattcttgcagcagttagtaatgcttttgagtactcaggaaggcatactcctagtaaggatcctttagcagatagtcttagtccagacgagagagctgctgaaagggatcgcatggtgctagatattcaggttaagctgcagggtttatggctgcggcttcttaaactgggagcaacagatgatcctctctcatcctttgaatatggaacgatactcgctctgattgaatctgatgcagaggggattggcggtagtggatttgttgaatgtataagagagcatatacattcgggttgggactgtcatctcactgaagaacagtttattgcagtgaaagaattgcttaaaacagctattaatcgcgcaacatcacgtaatgactggttgaccattagagatgctcttgaagttcttctgaatgttaagatagatatat

SEQ ID NO: 5287 - DNA, 454 bp, Glycine max
  Clone ID: jC-gmfl02220071e01d1
aactaatctatccacactaataaaatttgttcttcgtagcagtatgtacattcagaatacagaaacctctaaccacaaaattacaagtgttcgcaagttggactcatcagacatatctttgcacatttttatatactataaggaaaataaacaaaaaataatggagataacccctcctcttcattaagtaccttgtctttcacctttaaaattgttacaatttacaaacgtgaaaatgcatttaacgattgaactcaaatattaatagttgcatcccacagccttataagcccgttgcgaccaccgctgcatatccttttcctttccaagtctgaagcaacacaccttaccatagcaactgttttctgtggtgttctgtaaagctgccaaccagccatcttggacccagtgccagataaaccaccaagtctttcttggggccggtgaaagagcg

SEQ ID NO: 5288 - DNA, 513 bp, Glycine max
  unsure (1)..(513): unsure at all n locations
  Clone ID: jC-gmfl02220071e02a1
acactctaatccccatcaatcagcanacagatcaggattaaacaaaaagtcaataaataaaaggaacaaatcaaaaaaaaaacaaatatttaaaattttgaaaaacaaaaaaaacaccccggcacctctttaatacttcttaccctaattcccccaataaacacaacctttctgacacatatatatgcatccgtttcatttacagcccaacatggaaatttccaaaggctttttctagatcttacccgatttcaagcccgactagattttccttctggtttcaaatttctttcaactacgactgatttaacacaataccttctcaattctcaaaagcccaacatggatgctgttcaagctattatacccaatgctacactatcacttcaacaccagatcgatcataccgtcacttttagaattgctttcaacattacagttgatctgaagaaccctgattggccgatacatgcaccggaaccagtattagctttggaaaatgcattgcaagta

SEQ ID NO: 5289 - DNA, 384 bp, Glycine max
  Clone ID: jC-gmfl02220071e02d1
attatcttatatttgcgttactttggggttttttttactatacacacctcaaatgcactttacctatacaagtttgggaactagactactgaatagtctggaagtggaatcgcaacaagcgttgcaacaaatcaaaatgcaaacgatgaaactgcaaaaagaatcatagcgcaaaatgcatatagagggatagaacctaaacctctacttaattgacctgcaagctctttagaatagaactggtataaggaattgataaacaaacctgggtaatccgcacacgcgatcacccaccacatttataaccttgggccaagacttgagcaccacctaactgaaaaaatgcttgacccttcctatctggaaggagaggctaacacattc

SEQ ID NO: 5290 - DNA, 534 bp, Glycine max
  Clone ID: jC-gmfl02220071e04a1
tatcttgtaggtttctagctcctcagagaaatcaaaggtcaagacagggcagcagcagtattccttctcccattcacgtcgacccaatcattctttacatggtgctcatccgaacttagatatacagaaaattagttctggtaattcccttagtgtcaatacttcccgagagtggaatggtgtctcttcagctgcaaaggacaacttaagtcccaatagtagagttgtgcttagtccagttggtgccactagatccacttctctatctgctccttctaggaacttaggtaacaattcaaccccttctgcatggataacattggagaagaggcctacttttcctatccagagcaggaatgatttcttcaagaatctttcaaggaagagttccttggaaaaaccttgctctgatggtttgtctattgacatgtcttgtgccttggagaaatctgaagccagcatgaggaatgtctctagttgtcccattctggagtctagagatgcttctttagtggatacctctggtttgaacat

SEQ ID NO: 5291 - DNA, 571 bp, Glycine max
  Clone ID: jC-gmfl02220071e04d1
aagagaaaaaagaactctcatactctatttcttcttttttgtttcactgtatactattctactagcagggtcctattaaacaacaggaagttcatctttggtatcttcattttctcctcatgctcagaaattatatccagcatgattatttcactagttcttagtaaagagtctatgctttgcctgtatattagtagcttttttctgatagagctttccaattaaccaaaaggaaaatctccttatctaacagccaccttcgcctaattttaacactcatgcccctaaagagatatatttaaagcacattttttgtctcatcactttcatattccaaatcctgcaatatcataattcttaattctaaacataactcatggagctccaacacattccccagcattcaagtcaagtggctgagtaatgaataatgtttttgacgtatatgttggagaatatttgatcacagtttcaatttcatgtacttctcatagaagtcttgtatctcctcttcagtgaggccttcatcatattctccagcacttttctcccacccaagcgaacgtaaaaa

SEQ ID NO: 5292 - DNA, 598 bp, Glycine max
  unsure (1)..(598): unsure at all n locations
  Clone ID: jC-gmfl02220071e05a1
tgtatatccagttgccttcgactcgtagacatgtgaaaanataaancggaaaaaccacgaaagataggaattagggtggaggagagaacttaaattgcgggttttagtgacacaaatctagggagcactactctaggagctctattagattcttcaaaacatgaccatgcatcgcgagtcttgggcttttgtcttcggcgttatgggcaacatcatctcctttggagtgttccttgctccattgccaaccttttaccaaatctacaagaagaaatccactgaagggttccagtcacttccttatgttgttgcactgttcagtgcaatgctttggatttactatgctttcgtcaaaagggaagctgccctccttctcattaccattaacacatttggaattgctgtggagtcaatttaccttgcaatcttcctactttatgccccaaggaagcctaggcttacaaccatcaagcttcttctcttactgaatgtgtttgggtttggagccatgcttctatcaactctctacctgtcaaagggagcaaagcgtcttgctatcataggatggacttgccttgtttcaacatcagtgtctttg

SEQ ID NO: 5293 - DNA, 499 bp, Glycine max
  Clone ID: jC-gmfl02220071e05d1
actaaagtaattcattttcattacccgaacattaattacgagggcaagggaaaagtgaattgaaatgagtttgactgggggatacaccgagagaagagaatatactacgttacacgtagtagtacaatatgagagtgatatgggccaaattaagagagactaagtgttgtggccaacagttacatctacccgaacaggcaaattaaaaccacacctttacattaatcgaactaaattaacacttataccaaatactacttactattcttgcattgtagatatgagtaatattagatgtgacctcactcagtaaagtaattgaagtttaggttattccctttttttaacttttcttgtcattgatcccttgtttctccacattcatataatctcaatggtgatattcaaactttgccaacagcaccagcagtagctgcgtgattcggttccattgttcccattttcccacgacaatgatgtggccattcaattcttgagc

SEQ ID NO: 5294 - DNA, 571 bp, Glycine max
  Clone ID: jC-gmfl02220071e06a1
ctcgcaagcaaaaagaaagaattccaggcgaggagaaagatggaggggaaggagcaggatgtgtcgttgggagcgaacaagttccccgagagacagccgattgggacggcggcgcagagccaagacgacggcaaggactaccaggagccggcgccggcgccgctggttgacccgacggagtttacgtcatggtcgttttacagagcagggatagcagagtttgtggccacttttctgtttctctacatcaccgtcttaaccgttatgggagtcgccggggctaagtctaagtgtagtaccgttgggattcaaggaatcgcttgggccttcggtggcatgatcttcgccctcgtttactgcaccgctggcatctcagggggacacataaacccggcggtgacatttgggctgtttttggcgaggaagttgtcgttgcccagggcgattttctacatcgtgatgcaatgctcgggtgctatttgtggcgctggcgtggtgaaggttttcgaggggaaaacaaatacggtgcgttgatggtgtgccaacttttgtgccctgctacaccagggtg

SEQ ID NO: 5295 - DNA, 456 bp, Glycine max
  Clone ID: jC-gmfl02220071e06d1
tcggcggccgcccttttttttttttttttttttttttttttttttttttttttttttttttttatatgactctgggggtatttttgattttgcaaattaaattacacaatcacagccgtacattacacatgagttgggccttttccaacttaaaagcagaggataacattggcccatgacgcgacacatgcaccacctaataatcataattttacatttttacatacaaaatacaaagactttaatttttaaaaagaagaaaagagattaaccgatcattttaatgaaatgaaaccaaaacccacaaacattggcttgatttttggtggtgttgttgttcccaacttgattaagcatgaaccgtttgattgaatcacttggacttgaagggaatggccctgattaccacctggtggtaaaatgctgcaagagctgcaccgatgaatgggcccaccc

SEQ ID NO: 5296 - DNA, 594 bp, Glycine max
  unsure (1)..(594): unsure at all n locations
  Clone ID: jC-gmfl02220071e07a1
gtgaagagtgaagagtgaagagtgaagtaacaaaacaaaaagagcggagggaaagtcgtgggaacgaagaagccaacaaagacaaatcaaggtgaaaaggaaaaagcccttatgcttttttgagtttgtttctcaccagcttgagttgtttagaagctcatcttaagcattgtggcagacctgagtgagcattttttgagtggaaaatatgagctacagtggctcctcaatgagttctggtagtggatcttctagaaggacatttgagtttggaaggacccatgtggtcagacctaaagggaaacaccaggcaactatagtttggctacatggccttggtgataatggctcaagctggtcccaactcttggaaactcttcctcttccaaatattaaatggatttgcccaactgctcctacacggcctgtagccttatttggtggatntccttgcactgcttggtttgatgctggggagatttcagaagatgctcctagtgatttggaggggttagatgcttctgcagcacacgtttgccatctttngtcaacagagccttcaaatattcaactggtattgggggcttcagtatg

SEQ ID NO: 5297 - DNA, 547 bp, Glycine max
  Clone ID: jC-gmfl02220071e07d1
acccaccaacaaccataggttttttctgttcatatatctataatgaaatcataggcaatatttataaatatgacttactaaaatttgactttatttagacagaatatgaatacagaaagcaacatactacatatccatgcccgaatgaaataaacaaaatttgctggatgtgaaggaaactatccatgtccttccaccaaagcattcccaaatcccaaagcaataaagatagtgagtgacccttggattcaaaaacatttatttagtaccatgagaatataagagagagaacaaagcggctatgccatttaccaatataccccactacaccacaccactatgtattctatagcccctctttcattgcctaaaactaaggttttataatctgaccttgttgagctttatttctctagttcaaccgaaacccctccagtcccaaatttgcagttagccacctgcaaacttcatcagtctcttcagggactgtatagtgacccaccccattgtagctcctaaatataagattctggaatcctgatgaact

SEQ ID NO: 5298 - DNA, 536 bp, Glycine max
  Clone ID: jC-gmfl02220071e08a1
gttcttagttctggggacccagtttgctggaggagtgtttctgggaactgcaatgatgcattttctcagcgacgctaatgaaaccttcggggacttaactcgcaaggagtaccccttcgcgttcatgctcgcgtgtgcagggtacttgatgaccctgctcgctgatgctgtcatttcctcggttttgaagaatacggggcgtgaccaaccgcgtgatgctgaggatgtccaagttcaaggggctgatgtgagcaaagtaagtaacaacagtgttagatctcagtcacaacaccggagccattctatttctagctctgatcatcatcacttagcaaaccctgcacttggatctgtccgttcgcttggagacaccattttattgattgttgccctttgtgcacattctgtgtttgagggcttagcaattggagttgctgagaccaaagcaaatgcatggaaagccttatggacaatctgtctgcacaagatatttgcagccattgccatgggaattgctctcctcagaatgatttcta

SEQ ID NO: 5299 - DNA, 491 bp, Glycine max
  Clone ID: jC-gmfl02220071e08d1
aaataacagcatagcttctattataaatcatgtctacagacaaactattgatctataaattcatttctatagctttgtatatatttcttctccgttcccctttgcctataatgatttaggctaccctccatgtgaactacccttcttcccaagacttttataagtcctcttaattctcaatacatgctcatcttttctatcatttgaggcaaatttctgtcatcttttctaccttataaatgattgacgaaatcatttctgacaagaatatccaaataccaaatctgacctaggaactaccacaactttttctgtaatgtacgtattcattatcaaaaagataaaaaaaagaaaaagaaaaagattctgcaaatgctgtaaagagaagttatcttggaacaaccttaggtgtcccaaatcatcacaaccgctatcactcccacacccaacatcacggcatgaaacttgaaataggctgagtcaacctttgt

SEQ ID NO: 5300 - DNA, 510 bp, Glycine max
  unsure (1)..(510): unsure at all n locations
  Clone ID: jC-gmfl02220071e09a1
taggagaacactaacatgcatttattcaaacaactcctcagttagtttcatttcatggctaactattcccaccctcatatctgccaatgtctgagtcacttgctgaccctccggcaacattttccggtcataattgccggaaaccgccgcaagaccggccaagagttggtggaggaagtgttgtccttggcacaaggcctgctccaccttggactcacatctggccaagtggttgccatctctgctttcaatagtgataggtatctggagtggttattagccattgcatttgttggaggaatagctgctcctctgaactatcgctggagttttgaagaggcaagattagcaatggctgcagtgaagcctgtgttgttagtgattgatgagagcagttacacatggtactcaaaactccagcaaaatgatgttccatctctgaagtggcatattttgttggattccccttcctcagattttctaagnggaacgtgttaactccagaaatgc

SEQ ID NO: 5301 - DNA, 486 bp, Glycine max
  Clone ID: jC-gmfl02220071e09d1
gtactcaattaatgtgtcactcaataaattgattagcattttcacatgaagccgtatatatgaggaatcatagcaatacagtggtttaaggggcattggagctatgatatattcaaagattactatgtaaagattgtagttgagacataacttcctttctgacttgatctctttttattttccctattgtagtgagtggaaatggctttctccatacaataaacatttttggtatcttaaacctgcttaaatgattttctatacagtattgctgaatattctttctagataggagaaactcttcatttgaagcagacaactgctctgaccattgccaattttctcttagttggatacatgctgctaccatctctgtcaggtgagcatctgggattcccacaacaacaacacttgcaatccctggatgttgctgtagaattgcctcaacctcttcagggtaaatgttctccccaccactcttgattc

SEQ ID NO: 5302 - DNA, 439 bp, Glycine max
  Clone ID: jC-gmfl02220071e10a1
acctttcttttttttgttttttaacaaagttttattctagttctgctagatcctagggggaatccagggagaatagacctgacatcaagaacagaaatcaaaattatagataattgacaaatattactttaaagccaacgcctcgattacctcaattgctacaccaattgaagattcatattatgatgtggttaaacttgttaggccaggaacagatattgctattctatccattaacaaataacaggcccgttattgcgcacgaatttttttcaaagactgctgcatataaaactcaagcccgaattctgactttgcttatgactcaatgagagaactttgctactaacttgtcaacatgggtaacgatatcatctaccctgggcccgctggaaactcttttgtgaaccatccttgacaagaactgatgaacaacttc

SEQ ID NO: 5303 - DNA, 542 bp, Glycine max
  Clone ID: jC-gmfl02220071e11a1
aaaacatctcaatgggttcttcttttattacaacatcgcccgcaaccatgaccatggctgcgatcgtgctcctgttcacggtctttgccgtttcctccgccctagacatgtcgataatctcgtacgacagcgcccacgcggacaaggccgtcacgttgcgcaccgaggaggagctgatgtccatgtacgagcagtggctcgtgaagcacgggaaggtgtacaacgcgctcggcgagaaggagaagcgcttccagatcttcaaggacaacctgcgattcatcgacgaccacaactccgcggaggaccgaacctacaagctcggactgaaccggttcgctgatctcaccaacgaggaatacagggccaagtacttgggaaccaagatcgatcccaaccggaggctcggaaagaccccgagcaaccgctacgcgccacgtgtcggcgacaaattgcctgattccgttgattggaggaaggaaggtgctgttcctactgtcaaagaccaaggaggctgcgggagctgttgagcattctcagcaatc

SEQ ID NO: 5304 - DNA, 490 bp, Glycine max
  Clone ID: jC-gmfl02220071e11d1
gaattccacattgtaagcaaattaaaatagcatgtgaatatgggacaaatccaaatattgctgctgcattgtcacataatctacagaaccttgaaaactaacagcaatcaaatatgttcgccatttggaatttgaatacaaatacagtgcatcgataatataaccctatgtacagagccaatgtctgactgaaatttgatacagaacattatctattttgtatcataataaaatggtaaagatctttatgttacgtgcagcattatgtgaagaagggggaagtgcatccagctggtgctttagcccttcgacttcccttttacttcatcattggctccttctgcacgttcacatttccttaaactgcttaagcactgctgaccttgttcttacgtccgaaggtccaatggggtttcgctggagtacgccttaatgccttcactcccaaggggttgttcttgctcctgagacaagttccagcgtaagtgtt

SEQ ID NO: 5305 - DNA, 570 bp, Glycine max
  Clone ID: jC-gmfl02220071e12a1
gaaaatcactgaattttccgtgctgttttctccccactgacacaagttgtagttttttaagagtatattatgtacctaaaggatttcagattttgagttcatgagagcaatgtaaaagtgaagttctgaactgttaacaagtttggaaaactttgtgcagtgcagtgtgttaagatggaagctatgttcatcttcagaagcagtcatggaaaccagaaattgaagatttgaagtgatttcttcttagaaatcagaatactagaaaatactagcacagaaataatgtgggatttcctcctttttttacatgagttttgtctcatttaggagaaaaaaatgcaagttctgcatatttcatgcagcaatttttgaacttgtcctcgtattctagattctgcacgtttagacaatcagaaatcctgagccaatccatggcttttcattggttattttaatttgttgtgtcctcaggttctttaaatatcagcattatttatagaaccaaatgatgaatttcctgggtatagcctttcccataaccatatgctttatcgcttttgtgatatcgaa

SEQ ID NO: 5306 - DNA, 346 bp, Glycine max
  Clone ID: jC-gmfl02220071e12d1
atagggcaccaagggccattttttataaaaatatcccaattctacttattaattacaacccttctaatgactataggacattactattacctatgctacaaatggtcctaaaattagattactgcaatatacaatacacattatatatatgctatattgtaatgaatgcatgtatatcaatctttcttttggggaactagagatcaaatccataactgtagaaatggaatatggaataatagcaactctatattcataccgagagacctgatttcttcaataacaacatcgcctgaaactatacaatggcccacaaactatgatacccacatcaacaacgccccca

SEQ ID NO: 5307 - DNA, 434 bp, Glycine max
  Clone ID: jC-gmfl02220071f01d1
ccccccgaattaaaaaaaaaaaattttccgcccccaaaaaaaaaaattttcccccaaaaaaaaaaaaaaacccgaaaaaaaaccctttaaaaaaaagttaaaagggcccggaaaaaaaaacccgggggcccgttttttggaaacctttggaaaaaaaaaaaaaaaaaaacccccccccttttttttggcccaaaaaaaaaccccaagtttaaaggctcaatttgggaaacccctaaaaccaaaagggggcccctaaaaaaaaaaaaaaaaactcccccccccggggggaattccccaaaggggggggaaaaaaaaaaattttcccatccgggggggccaaaaaaaagggggcccccaaaattggggggggggggaaacccttcaaaaaaccttttttttggaaaaataatagggggggggaaaaaaaagccccc

SEQ ID NO: 5308 - DNA, 703 bp, Glycine max
  unsure (1)..(703): unsure at all n locations
  Clone ID: jC-gmfl02220071f02a1
tgccatttctacatgatcatgcgtctgatgcagtatagcatattaanntggtttaanancataaanaagcataaaaaatataaatttaatatattatatatacttatacttattttttttcttttttttatttttttatctactattttggggtacctggttttcctcaaccaccatgggagattctaatcggatttcggttcaccgtgttctcggcgaaggcttagttgctgatgtggtgttgtggaagaattggcgtggagcggttgcggtgctcgtatctgccaccacattgtggtacctcttcgagcgtgccggttacaatttcttgtccttcgtcgccaatgtcgtgttgcttctcgtcgctattctctttttctgggccaaagctgctaaccttctcaatagacctattactcctgttcccgatctggccatgtcggaggaaactattgccagggttgctgatgcactgcatatttggttgaatcgagccttgtctgttgcacatgacatagcgattgagaggaatctgctgctttgcctccaggttgatggtgtattgtgggtaatatcttacattggcagtttgctcaactttttgactttgatctatatctgtgttcttcttagcttgtctttccctgtattgtatgacaaataccaggaccaatttgatggcctgctaagtgtgatacatggg

SEQ ID NO: 5309 - DNA, 319 bp, Glycine max
  Clone ID: jC-gmfl02220071f02d1
acttgtccccttcattatttgggttgtactgcttctcaatgagctgctgtgaccccaaaacatggcaaccgccatgctccagcttacggaaaggacctatgacgaatgctggggtcacttcggtaactcggcagcactcacacatatctcacgctccagggccggtgccaacttcatatacagacattggtggagtctttttgcggcgcaactctgtgaacaaacgcgattggtagccacgagagaggttagagcctatacagcgtctattataactcccagaacgctgaggctcagcccaccagagagctctcttcac

SEQ ID NO: 5310 - DNA, 540 bp, Glycine max
  unsure (1)..(540): unsure at all n locations
  Clone ID: jC-gmfl02220071f03a1
tatcttgtaggtttctagctcctcagagaaatcaaaggtcaagacagggcagcagcagtattccttctcccattcacgtcgacccaatcattctttacatggtgctcatccgaacttagatatacagaaaattagttctggtaattcccttagtgtcaatacttcccgagagtggaatggtgtctcttcagctgcaaaggacaacttaagtcccaatagtagagttgcgcttagtccagttggtgccactagatccacttctctatctgctccttctaagaacttaggtaacaattcaaccccttctgcatggataacattggagaagaggcctacttttcctatccagagcaggaatgatttcttcaagaatctttcaaggaagagttccttggaaaaaccttgttctgatgctttgtctattgacatgtcttgtgccttggagaattctgaagccagcatgaagaatgtctctagttgtcccattctggagtctagagatgcttcnttagtggatacctctggtttgacatgttgact

SEQ ID NO: 5311 - DNA, 489 bp, Glycine max
  Clone ID: jC-gmfl02220071f03d1
aagagaaaaaagaactctcatactctatttcttcttttttgtttcactgtatactattctactagcagggtcctattaaacaacaggaagttcatctttggtatcttcattttctcctcatgctcagaaattatatccagcatgattatttcactagttcttagtaaagagtctatgctttgcctgtatattagtagcttttttctgatagagctttccaattaaccaaaaggaaaatctccttatctaacagccaccttcgcctaattttaacactcatgcccctaaagagatatatttaaagcacattttttgtctcatcactttcatattccaaatcctgcaatatcataattcttaattctaaacataactcatggagctccaacacatcccccagcattcaagtcaagtggctgagtaatgaataatgtttttgacgtatatgttggagaatatttgatcacagtttcaatttcatgtacttct

SEQ ID NO: 5312 - DNA, 640 bp, Glycine max
  Clone ID: jC-gmfl02220071f04a1
caaaaggccttcgttgaggaggtcatggagcttgtggagctcactccgttaagtggagcacttagtgggtgataccatgagaaatgcatggactgacgactgagcaacacacaaagattgactatagctgttgaataggtcgcccaatccttttatagtctttatggatgaacccacttctggattggatgcccgggctgcagcaattgtgatgagaactgtgaggaatatagtgaatactgggcgaacaattgtgtgcacgatccatcagcctagcatagacatatttgaatcctttgatgagcttctgttcatgaaaaggggaggagagctcatttatgctggtccacttggccgtaaaccttgcgaacttattagttatttcgaggcaatcgaaggagttccaaagatcaggtccggatataaccctgatacgtggatgctggaggctacttcttcagttgagaaaacagactgtgagtggactttgcagaaatttaccgaaaatcaagtttatatcaatataacctacagtggttgaaggttgagcagccttgtggaattcacaagaatgctttttccacaagtatgccggcatctttgagcagtactacttgttatggagcaaatctttgtactg

SEQ ID NO: 5313 - DNA, 444 bp, Glycine max
  Clone ID: jC-gmfl02220071f04d1
gtcattaccaaccagtaatctgatttcatgggtaacagaggccctataaaccaatagtacgtcactttacaacaatttgtccctgaattatgtaaaacaaaaataatttggataatgtattcttattagtttacaaaccctaaaagcacactagggctatgctataatcatatcgctatacagatggcacgcttatttttatgaggtatcgaagatccaacatacaatttggtttcaatgtctctagtggctagcgagtcttatcccattatctcctttggaaattgatggatttaattgcaaaggcaaatataattgcaaaaaatatgcagaagccagccaccataacagcagttacgcacaagaaatcatgcctgtgcccaaacacgtgattgagatacctcttttataagcatcgagttttctttatagagcttccctaaa

SEQ ID NO: 5314 - DNA, 541 bp, Glycine max
  Clone ID: jC-gmfl02220071f05a1
ctcgcaagcaaaattaaagaatttcaggcgaggagaaagatggaggggaaggagcaggatgtgtcgttgggagcgaacaagttccccgagagacagccgattgggacggcggcgcagagccaagacgacggcaaggactaccaggagccggcgccggcgccgctggttgacccgacggagtttacgtcatggtcgttttacagagcagggatagcagagtttgtggccacttttctgtttctctacatcaccgtcttaaccgttatgggagtcgccggggctaagtctaagtgtagtaccgttgggattcaaggaatcgcttgggccttcggtggcatgatcttcgccctcgtttactgcaccgctggcatctcagggggacacataaacccggcggtgacatttgggctgtttttggcgaggaagttgtcgttgcccagggcgattttctacatcgtgatgcaatgcttgggtgctatttgtggcgctggcgtggtgaacggtttcgaggggaaaacatatacggtgcgttgaatggtgg

SEQ ID NO: 5315 - DNA, 419 bp, Glycine max
  Clone ID: jC-gmfl02220071f05d1
aaatgactctggggttatttttgattttgcaaattaaattacacaatcacagccgtacattacacatgagttgggccttttccaacttaaaagccgaggataacattggcccatgacgcgacacatgccccacctaataatcataattttacatctttacatacaaaatacaaagacttttttttttaaaaagaagaaaagagataaaccgatcattttaatgaaatgaaaccaaaacccacaaacattggcttgatttttggtggtggtgttggccccaacttgattaaacatgaaccgtttgattgaatcacttggacttgaagggaatggccctgattacaacctggtggtaaagtgctgcaagaactgcaccgatgaatggtcccacccaaaagatccagtgttcatcccaacca

SEQ ID NO: 5316 - DNA, 518 bp, Glycine max
  Clone ID: jC-gmfl02220071f06a1
ctcgcaagcaaaattaaagaattccaggcgaggagaaagatggaggggaaggagcaggatgtgtcgttgggagcgaacaagttccccgagagacagccgattgggacggcggcgcagagccaagacgacggcaaggactaccaggagccggcgccggcgccgctggttgacccgacggagtttacgtcatggtcgttttacagagcagggatagcagagtttgtggccacttttctgtttctctacatcaccgtcttaaccgttatgggagtcgccggggctaagtctaagtgtagtaccgttgggattcaaggaatcgcttgggccttcggtggcatgatcttcgccctcgtttactgcaccgctggcatctcagggggacacataaacccggcggtgacatttgggctgtttttggcgaggaagttgtcgttgcccagggcgattttctacatcgtgatgcaatgcttgggtgctatatgtggcgctggcgtggtgaagggtttcgaggggaaaac

SEQ ID NO: 5317 - DNA, 393 bp, Glycine max
  Clone ID: jC-gmfl02220071f06d1
atatgactctggggttatttttgattttgcaaattaaattacacaatcacagccgtacattacacatgagttgggccttttccaacttaaaagccgaggataacattggcccatgacgcgacacatgcaccacctaataatcataattttacatttttacatacaaaatacaaagactttaatttttaaaaagaagaaaagagataaacagatcatcttaatgaaatgaaaccaaaacccacaaacattggcttgatttttgttggtgttgttgttcccaacttgattaagcatgaaccgtttgattgaatcacttggacttgaagggaatggccctgattaccacctggtggtaaagtgctgcaagagctgcaccgatgaatggtcccaccc

SEQ ID NO: 5318 - DNA, 611 bp, Glycine max
  Clone ID: jC-gmfl02220071f07a1
gttcttctcttcctcactccttttttcaaacctcgaaaccaaacaagggttttcttctctttccccccctcctgattctccattttccctctatctcacactccaattttctcctccttttcatattgcttttcttctctgattctcaccaaaaccattttttcgtcttctgtattcaagttccctggaattctcaattcgggggcgtgttcgtttctacacatgtttggatgaagagacgcaacaggaccctatgtgttgttgttctccggtaccgatgattgtttatggctgaaagctgctgacttggttactgggttctgctgacccaagcggtcgaagaagggtagggggaggaatcggagtgatcgctgaaaaagtggggtttagggtttttggcggggtctgctcaaatggcttatgcactggagttgctgagaccacagctatgcattgacagccttatggacaatctggctgcccaagatatttgcagccattgccattggaattgctctcctagaaaggtccctaccgctcccttgtgcgtgtgcatcctttcttttgcttttggccttccagtccaattgttgcccttggattttttggtt

SEQ ID NO: 5319 - DNA, 429 bp, Glycine max
  Clone ID: jC-gmfl02220071f07d1
gcgctgactgtcctttgttctttttttttttttttttcacttaaaggatatgatatgacaatttctcttctctgtttaacaaataaaaacgttgaaagtttaatacatttgaccatgataaaatttgtaaggaaaaaaatatatcaaacatgagacatagaagaagaaaaacttcacaatttttttgacagaatgctaattggatacggacaatcctaagaactgtgtttttgaacaataacacttgaatgtgaatctgcttttacaatgtccaaggcactagctatttttaggatactaaacatattcgaggggaacctatttagagcacactattagtatacacttaacggaaacatagcctcttcaaatattatactgcttgcatattcattggctggaatccatagcctttgattcatcttaacc

SEQ ID NO: 5320 - DNA, 576 bp, Glycine max
  unsure (1)..(576): unsure at all n locations
  Clone ID: jC-gmfl02220071f08a1
cacaattcctacacatttctactctttagtttctccaattttctttctcaattctgaacaatggccactacaacacaacttcacttaccccctggattcagattccatccaacagatgaagaactcgtcatccactacctttgtcgcaaatgcgcttcgcaacatatcgcggttcccataatcgccgaaattgatctgtacaagtacgacccttgggaccttccaggaatggctttgtacggagagaaagagtggtattttttcacgccgagggaccgcaagtacccgaacggttcgcggccgaaccggtccgcgggaaccgggtactggaaggcaaccggagcggataaaccagttggtaaaccgaaaccggttgggatcaagaaagcgttggtttttacgctgganaagcgcccaagggagagaaaactaactggatcatgcacgagtatcgtcttgcagacgtggatcgttccgttcgcaaaaagaacagcttaaggctggatgactgggtgctgtgccgaatttacaacatgaaaggtgcaatttgaaaagcaacaacctaccaccaccgag

SEQ ID NO: 5321 - DNA, 287 bp, Glycine max
  Clone ID: jC-gmfl02220071f08d1
ctcttgtctattattaaatttgcaacagaccccttatcccaaccaaaaaacaaccaacacgaaaaatttcccaccgggacatacttaaccccaacaaggggcggccattttaaacaaacgcgtacccaaacaataacaaataaatccgcccctgctcaaacacagaccaaggctgtgggtccccccagtcacctttaaaattccacggggaacccccccagagcatactatttttagacacccaccggaaacatagcctcctcaaaaaggcccctgcttgcaaaacc

SEQ ID NO: 5322 - DNA, 349 bp, Glycine max
  Clone ID: jC-gmfl02220071f09a1
gaggacaacactaacatgcattgatttaaacaacttctcagctagcccaatttgatggatcagtattaccaccgtcatatctgccaatgtctgaatcacttgctgaccctccggcaacattttgcggatataattgccagaaaccgtcgcaagaccgaccaatagttggcggaggaagtgtgagccttgtgacaaaggctgttccaccttggacataaatatgaccaagtggttgccatggatgctttcaatactgacaggcgactggagggggaattaaccactgcagttagtagaaggaatagctgattcttggaactatcgttggagatttgaggaggcacgatta

SEQ ID NO: 5323 - DNA, 427 bp, Glycine max
  Clone ID: jC-gmfl02220071f09d1
gtactcaatcattgtgtccctcaataaatggcttagcattttcacatggggccgtttctaagaggaatcatagcagtacaatgggtcaaggagcataggcgctatattgtgtacacagattaccacgctgagatcgcacttgagacataactgcctttcagactcgatctctgtttatgacgcgtaatgtagtgaggggaaatggctcccttcatgcagtaaacatcactggtcacaccaacctggttaagtgatagtctgttcagtattgctgaatatgcccattagagaggagaaactgctcaatggtagcagacaactgctctgcccattgccaaggatgtcctagtgggacacatgctgctaccatctctgccaggggcgcatgtgggattgccactactactgcactggctattcccggatg

SEQ ID NO: 5324 - DNA, 239 bp, Glycine max
  Clone ID: jC-gmfl02220071f10a1
gcggacaacactaacatgcatttatttaaacaacttctcacatagcctcattttatggctgactattcccagcgtcatatctgccaatgtctgagacacttgctgaccctccaagctacatatttcgaacaatgaatgtcgtaaaccgacgtaggacacttcaagagttgatggaggaagtgttacccttggctcaaagcctgctacatcttggacttacatgaggccaagtttttgcc

SEQ ID NO: 5325 - DNA, 410 bp, Glycine max
  Clone ID: jC-gmfl02220071f10d1
gtactcaattaatgtgtcactcaataaattgattagcattttcacatgaagccgtatatatgaggaatcatagcaatacagaggtttaaggggcattggagctatgatatattcaaagattactatgtaaagattgtagttgagacataacttcctttctgacttgatctctctttattttccctattgtagtgagtggaaatggctttgtccatacagtaaacatttttggaatcttaaacctgcttaaatgattttctatacagtattgctgaatattctctctagataggagaaactcttcatttgaagcagacaactgctctgaccattgccaattttctcttagatggatacatgctgctaccatctctgtcaggcgagcatctgggattcccacaacaacaaca

SEQ ID NO: 5326 - DNA, 578 bp, Glycine max
  Clone ID: jC-gmfl02220071f11a1
atcggaattctcccaccaccaccccttggtggcgcgcctcaacaacggcgccttcgggtgctgcccggcttccgtgatcgccgtgcagcgcgagtggcagatgaagaacctccggcaaccggaccacttctacttcaacgacctcaagaagggactccttcactcccgcaccatcatcaagaacctcgtcaacgccgaacacgtggacgagatctccctcgtcgacaacgcctccaccgccaccgccatcgtcctccagcaagccgcctgggccttccaggaagcaaaattccagaaaggcgacgtggtcctcgtgctccactacgcctacggcgccgtcaagaaagccatcgaggcctacgtggtgcgcgccggaggcaccgttatcgaagtccccctccccttccccgtcacctccaacgacgacgtagtcaacgaattccgaatagcccttgagaggggcaagtcccgaggcaacagaattcgcttagcggttatcgaccacgtgacttccatgcccagcgtggtcatccccgtttaggacttggttaaaatctgcagagaggagggtgtggagc

SEQ ID NO: 5327 - DNA, 401 bp, Glycine max
  Clone ID: jC-gmfl02220071f11d1
gaaacaacaaggggccactcaaatacttggatttatagaccatgaaattttcaacagaccgggcaaaatagcgcaatcagcaaagggcaaactcaacatttgcaaatagtatcccacatataaaatgggccaatttgttattggggagttaattaaaactaagagcagagcataggctaccccaatttcaagccgaaagaagagccccagtaaacccattttgcacaagttgattaaccggattcctgaacttataatagtcctcaaccttgttggaaacctgacgagaaattcgggcatacgcagtaacagagcccttttccccaccacgaaaataaattgggacttcaacattaaattcatccctcaaacgggtcctaagcttttgagcctcagaggca

SEQ ID NO: 5328 - DNA, 222 bp, Glycine max
  Clone ID: jC-gmfl02220071f12a1
agcaccctgctaacgccatcatcttttgtcggcgcgtcgaacctacgcatgctattgatgctgacctgattatgggagctctcaactatactggtgtgtatagaccaatgtatggcaaccgcaccactattactttggccacgttacaacaggactcatacagtctcgcactattagaaggagcctgggctgcatcgaacacttggacgagatctgcctcgc

SEQ ID NO: 5329 - DNA, 334 bp, Glycine max
  Clone ID: jC-gmfl02220071f12d1
aaacaacaaatgtccacttaaatacttggatatatagacggggaaagggtcaacaaaccgggcaaaatacccccatcaaaaaaaagggaactcaacatttgcaaaaagtcccccacatataaaatggaccaataagttattggggagcaaattaaaactaagagcagagcattggctaccccaatttcaagcccaaagaagagcacaagggaacccatctggcacaagttgataaaccggattcctgaacttataatagacctcaaccctgttggaaacccgacaagaaattcgcgcatacccaataacagaggcccccttccccaccacaaaa

SEQ ID NO: 5330 - DNA, 544 bp, Glycine max
  Clone ID: jC-gmfl02220071g01a1
agaagcaataagatgaaaatgatagtgcttgttttgtttgttgctacagttttggtagcatatgaatgccatggctcagactaccagaagttccctctccaaatgaaaactgggtttggtgggcaatacagcaatgaggtggcatgtgccagttggaggcttggcgtggaagcaaacaacgtagtcaagtggcaaactgttcctgcagcttgcggagagtacatagctgactacgttctaggagaccaatatagatcagattccaaaacagttaaccaacaagcttatttctatgctaaatccctcaaactcaccaacaaagatgtctttgtcttggacgttgacgacactactctctctaatctccagtattttgctaaccatggatttggtgtggaaccacacaatacgacggcgtttaagaactgggttcttgatggcgaggcattcgcactgccagagactcttaaaatgtacaacaaactgttggctctcggcatcaagattgtattcttatcagaaagaccactgagtctaggggatg

SEQ ID NO: 5331 - DNA, 506 bp, Glycine max
  unsure (1)..(506): unsure at all n locations
  Clone ID: jC-gmfl02220071g01d1
aatggaacaagagctcataattcatgaaagcctcgaaaagggaaaacaacattgttcagtgcccctacatgactaagtaataatactcaggatcttatttcatagaaattaaggagcaacttagaggcttgatttgagagcttaatcatagtacaagggattaggcagcttaaaagtcctagtccctttgttgcttcccaggaggtcactccattggtctccaacgtttccaatgattctgtatccctccttctccagcttctctctctcagctgatttgtattcaaatgataacttaccagagtactcagatggatccctgagaattaacttctcccatgtgttgaatccaacctcctttaagttcttggctgttacatcccctagactcagtggtctttctgataagaatacaatcttgatgccgagagccaacagtttgttgtacattntaagagtctctggcagtgcgaatgcctcgccatcaagaacccagntcttaaacg

SEQ ID NO: 5332 - DNA, 550 bp, Glycine max
  Clone ID: jC-gmfl02220071g02a1
agcagaagaaggcaaagatagtggcagagctccaagctgtgaagcacaacagtggcaagtcctacaatcagttagcggaggagactggactcaccaacgtctatgttgctcagcttctcaggagacaggctcagctcaatccccaaactgcccctctacttcgggcagcgctgcccgacctgccccaagaccttgtttctgagatgatgagaccccctttgaggtcttatgaccctaatctcatccaagaccccactgtctataggttgaatgaagctgttatgcattttggggagagcatcaaagaaataatcaatgaggagtttggtgatgggatcatgtcagcaatagatttctactgctcggttgataaaattaaaggagtagatgggaaggatcgtgtggtattgacatttgatgggaaatatttgccacattcagaacagaaatctgagcacatggtttcaagaacaaggccactgggaaaacagtgagtatcttcattggaggaccaactacgcaatcttcaacaccagtctacctgcacatg

SEQ ID NO: 5333 - DNA, 542 bp, Glycine max
  Clone ID: jC-gmfl02220071g02d1
acaatacaagcttctccatcttataattaactggcattaaaatacatggtgcaagtgtcatgaaatatccaaagccataaaacattgtataaatatgcatggccaactactttttattatttataaatcttaaacacttttatttttctcttccaatgtttttctatagacaacacaaaatagcactgatcaaatacaacttgtggttgttacagatcaatgataattcatgtgcaggtagactggtgttgaagattgcgtagttggtcctccaatgaagatactcactgttttcccagtggccttgttcttgaaaccatgtgctcagatttctgttctgaatgtggcaaatatttcccatcaaatgtcaataccacacgatccttcccatctactcctttaattttatcaaccgagcagtagaaatctattgctgacatgatcccatcaccaaactcctcattgattatttctttgatgctctccccaaaatgcataacagcttcattcaacctatagacagtggggtcttggatgaaata

SEQ ID NO: 5334 - DNA, 665 bp, Glycine max
  unsure (1)..(665): unsure at all n locations
  Clone ID: jC-gmfl02220071g03a1
tgttactctgcgcagtcagatcagtatacagttatngnntnnnncnnnnnnccnnnnnnnnnnnnnnnngnnnnnnnnngnnnnnnnnnntttnnnnnttgacacctgatttcagttctttttcttctcaataattattatttgtatttgtaaacacacactatcaaagcaaatggggtgctcattctccgggttgaacgcactttacgactccgtgaacggcggaggtgatgtttggatcaacgagaaccgtttccgcatcgtgcgccagctcggagaaggtggcttcgcctacgtctacctcgtcaaggaggctcccgacgactccgccgccgctggcctcgccaagaagctcaaaggctcctctcatctctccgatgatggaacttatgctatgaaaaaggtcctcattcagaacaatgaacagctggagttggtcagggaggagatccgtgtttcatcactgttcaatcatcccaatctgctcccgcttcttgagcatgcaatcatttctgtcaagcctacccatgaaacatcttggaaccatgaagcatatttattggttccagttcatttggatggaacattgctagacaattgccaaataatgaaagccaagaaagaattctattccaccctagatgtgcttcaaatatttcgtcagc

SEQ ID NO: 5335 - DNA, 567 bp, Glycine max
  Clone ID: jC-gmfl02220071g03d1
aaataaatgatattccatttatgctgataaattctgaagacacagggagattggccatttcataaattacaagaaacaaaattatgtagaaatgacaaacaatactttaaagccaacgcccgactacctagactaccaccaaaatcgaagatacatataaatatatggttaactccgtcaggcgaggaattgctattgcttttctatccattaacatataactggacggcaaatgcacacgaatttttttaaacgactgcaacataaaaatctcaagccccacttctcacttccatagtaactcattgagagaacttcgcaactaacttgtcaacatggataatgatatcatctatcctgggccgcatggaagccgttggctgaagcatccatgacacgaactgatgaagagcttctggatatggaggcttgggtcctgctggccatttgacctgtgcatttacaatagccaattgcaggcttccaccagactctccaagtgcatattcaaatggagataccccatacattattgcatataatgtgcatcctagcgaccaaatgtca

SEQ ID NO: 5336 - DNA, 556 bp, Glycine max
  unsure (1)..(556): unsure at all n locations
  Clone ID: jC-gmfl02220071g04a1
cttttgaagattgtattacatgggctaggctaaagtttgaagattattttgctaaccgagtaaagcaattaatttatacttttcccgaagatgctgcaactagtactggagctcctttctggtctgcaccaaaacggttcccctcatccactgcaattctcatcctctgatctgggtcatcttctgtttttgatggcagcttctatattacgagcagaaacatttggtattcctattcctgactgggtgaagcatcctaagaagttggctgaagctgttgatagagtgatagtacctgactttcagcctaagaaagatgcgaaaatagtgacagatgaaaaggccaccagtctctcatctgcgtctatagatgatgcagctgtgattaatgatttaatcgtcaagttagaggggtgccggacaaagctgcaaccagagttcaggatgaaaccagttcagtttgagaaggatgatgatacaaactaccatatggacctgatagctgggcttgcaacatganggcacggtactacagcattcctgaagtgacaagctg

SEQ ID NO: 5337 - DNA, 347 bp, Glycine max
  Clone ID: jC-gmfl02220071g04d1
aacaaacaaggaacgaaagttgcttttcaattcatatatgaaaggggatatgggcaacaggggccccttgggggtaccccttttgaatatgaagctgggagggccaacattttttggtttttaaactaaaaataagtctcggccccccctggtggggcgaccaccacccccttaacggaaatagggggttttttgggggatggcaatggcattatcctcatcatcctcacaggcaacaacaacatccaagtgaccacggtaagaaggtttttccaccttggcccctttcctaaccaaaaccaccatttttttggccatgcgttttctgtgcctagggaacatgcttt

SEQ ID NO: 5338 - DNA, 634 bp, Glycine max
  unsure (1)..(634): unsure at all n locations
  Clone ID: jC-gmfl02220071g05a1
tcttatacagccttctcaatcagtaaacaataangggtannggcgaaagaccaaaagaagaaaaagaagaaaaagaaaaaaaaaaaaaaaatttttaaaatttaagtatattaaatattattaaaaattgggtaatttgattttattattaaaatattataatatataatatatatatataatatatctaaatcagatgacattaatataaaaaaatttggcggaggtgcagatataacacaggctttgacaaaagcttgggaagaggcatgcgcagcaacaagtgcaagcaaaattgtgattcctggtgggtcatacaagatggaagcagttgatttaaaaggtccttgcatggctcccattgaaattcagtttgatggcacacttcaagcaccggctgacccgaatgcactcgacggggctgatgaatggctcaaagtacaacatgttaacttttttaccttatcaggtaaaagtgtttttgatggtcaacgtgcaactgcttggaaacaaaatgattgtggaactaacaagaattgcaagaaacgttccaagaattttngtttcaatttccctgacaattctatggtctcggacataacttctaaagatgcaaaaactttcatgtaaatgt

SEQ ID NO: 5339 - DNA, 366 bp, Glycine max
  Clone ID: jC-gmfl02220071g05d1
aggaaaaaaaaagggaatcttatatatgctcttgcacaagggtttcgtattgaataaatgcccttaaacattgacaacgtaagtatatacaaatgcttattcactatagacttcaaataggcctcattctcaccttacatatttacaaaaaaaaaatctggtcaaggagaatgtgtcaacccaagtcttttaagctggacatgggcaagcaggagcttttcctgtaactatgggcttgacattagcacatttagcaactattggagctccattgaatgtaaaaacaacgttatttaattccacatcctcacatgggacacccttgctacatataaaagacactccttccttggtttttgaagggcc

SEQ ID NO: 5340 - DNA, 622 bp, Glycine max
  unsure (1)..(622): unsure at all n locations
  Clone ID: jC-gmfl02220071g06a1
tgtctttttctggtgggtcacgtcgnagagcagtgaannnntnnnncnnaanaacaaaaaaaaanaaaaaaaaaaaaaaaaaaaaaaaaaaatanaaaatttannaaaaaaaaaaaaaaataaaaanaaatagganaanaattaatgttttattcttattgctagctatttctagtacaactcaatcggttgacattaatataaaaaaatttggcggaggtgcagatataacacaggctttgacaaaagcttgggaagaggcatgcgcagcaacaagtgcaagcaaaattgtgattcctggtgggtcatacaagatggaagcagttgatttaaaaggtccttgcatggctcccattgaaattcagtttgatggcacacttcaagcaccggctgacccgaatgcactcgacggggctgatgaatggctcaaagtacaacatgttaacttttttaccttatcaggtaaaggtgtttttgatggtcaaggtgcaactgcttggaaacaaaatgattgtggaactaacaagaattgcaaganacgttccaagaattttggtttcaatttcctggacaattctatggttcgggacataacttctaaggattagcaaaactttcatgt

SEQ ID NO: 5341 - DNA, 409 bp, Glycine max
  Clone ID: jC-gmfl02220071g06d1
agtaaatagaaaggcaatcttatatatgctcttgcacaaggctttcgtattgaataaatgcccttaaacattgacaacgtaagtatatacaaatgcttattcactatagacttcaaatagtcctcatcctcaccttacatatctacaaaagaaaaatctggtcaaggagaatgtgtcaacccaagtcttttaagctgtacatgtgcaagcaggagcttttcctggaactatgggcttgacattagcacatttagcaactattggagctccattgaatgtaagagcaacgttatttagttccacattctcacatggtacacccttgctacatataagagtcactccttccttgggttttgaagtgccctgaatattcttgaaggtaaccttgcttatctttatttttgat

SEQ ID NO: 5342 - DNA, 449 bp, Glycine max
  Clone ID: jC-gmfl02220071g07a1
gattaaaaggccggacttatggttgccatttactttcttggtagtagattgatgagctttttcgtgaaagtgtgttctgagccagcgtcactcactattttcatttttttaaaatattgtatgttacgtgcttgtacctttgagtcttcataatttccatgtttttttactttaggtttgaggtctctccaagttattagcatgtaatatctcctgccattgttgtttatcttatataaaaatcttttgcagatttatgttgttgcatgagaataattgatgaaacaaatcaccaaatcgccatggctgttaacatttttgaggaaaatgtagaaagacttccccgtgttgctgctgttggggatgtaattgtgctttgttgtgttgaggaatttctgatagtaacctctgtatgtagagatatgtctgtttgctgcggttttctggtc

SEQ ID NO: 5343 - DNA, 400 bp, Glycine max
  Clone ID: jC-gmfl02220071g07d1
gggaaaaaacatattaaaaccctgacatatggcccagaaaaccttttttaccaaaatttacccttggaaaaaaaactggccatttaatttggccatttacatttaaactaccggttttaaaagccctggaagaaaacaaaaaatgggtttccaggaattttatgggcatgagcgccttttatttttttaacccaaatataaatggattttttagggtacctataaacacggcctaccccaaattggctttaaaaaaatggcatggattccccaatattttgggggcaaaaattttaaagggtctactggtccaaacctcaattttggggacccaaaatggcttgggacaaacccaaacccctgggggattttctggagcatcctttaccccatttacccc

SEQ ID NO: 5344 - DNA, 559 bp, Glycine max
  unsure (1)..(559): unsure at all n locations
  Clone ID: jC-gmfl02220071g08a1
gattaaaaggccggacttatggctgccatttactttcttggtagtagattgatgagctttttcgtgaaagtgtgttctgagccagcgtcactcactattttcatttttttaaaatattgtatgttacgtgcttgtacctttgagtcttcataatttccatgtttttttactttaggtttgaggtctctccaagttattagcatgtaatatctcctgccattgttgtttatcttatataaaaatcttttgcagatttatgttgttgcatgagaataattgatgaaacaaatcaccaaatcgccatggctgttaacatttttgaggaaaatgtagaaagacttccccgtgttgctgctgttggggatgtaattgtgctttgttgtgttgaggtatttctgatagtaacctctgtatgtagagatatgtttgtttgctgtggttttctggtcctttcttgactctcggtttttntttttttttatatatacatgtttctcataataaagacttaaaagagactttaacattgaccactcaatgtatatgcattcataggcag

SEQ ID NO: 5345 - DNA, 283 bp, Glycine max
  Clone ID: jC-gmfl02220071g08d1
gggaaaaatcattttaaaaacttggcatatggacctgaaaaccttttttaccaaaaatttcccttggaaaaaaaactggacatttaaattggccatttacatttaaaccaccggttttaaaaaccctggaaaaaaacaaaaaatgggtttccaggatttttttggccctgagcccattttatttttttaaccaaaaaataaggggattttctagggtacccataaacacgttctaccccatattggctttaaaaaaaaggcatgggactccccacattttggg

SEQ ID NO: 5346 - DNA, 376 bp, Glycine max
  Clone ID: jC-gmfl02220071g09a1
gattttcgtggagtggaacagaggggaacttgagagtttcttgattgaaattaccgccgatatttttaaagtgaaagatgaagatggtgaagggtttttggtggataagattttggataagactgggatgaaggggaccgggaaatggacggtgcagcaggcggcagagctttcgatagccgcgcccacgattgcggcgtcgttggattgccggtacttgagtgggttgaaggaggagagggagagtgccgcggcggtgctgaaggaagcggggttgagtgatgaattggggagggtaaatgtgagtggggtggatcagaagaaagttgattgaatggggcgatcaaaggtgcagaatggctctgcttatcatctt

SEQ ID NO: 5347 - DNA, 411 bp, Glycine max
  Clone ID: jC-gmfl02220071g09d1
aatgatattcaatgatgaatccaaccaattgcaaaactattacagcacatgtatcagtctcttgggatatctaaaagtaagttaatcattaaaaaaaatgttcatgataaccacttattcaccatacttctacccaacatcaatgataggggtttcaagctccatactccaaaggattactcggtcacttttgcagatcgaaattgttccttagtcctaccataatacacaggctccttgcctgaaaaagtgatgaaattccagccaaaagcagatcctccaactacatatgtcccttgtgtctgagtttcttcaaccagctgcttctggaagccaggagctggtggagtgagcttaatttcagatggccgtgcaaatgatttctctacttgactctgcttgccatgttga

SEQ ID NO: 5348 - DNA, 586 bp, Glycine max
  unsure (1)..(586): unsure at all n locations
  Clone ID: jC-gmfl02220071g10a1
cccggcagcagagcctgggaaagctgattgggaattggcattggtagagactgctagcaatttgtcaaagcagaaggcagctttaggtggtgggttggatcctctattgttgactggtatgtatgatcaaggaatggtgaagcagcatgtcagcactacccaactgagtggtgggagtgcaagcagtgtggcattgccgggaccagggaagactccggttttggctctccccgccccagatggatctgtgcagccggttaatcaggatccatttgctgcatcgctgagtgttccaccaccatcctatgtgcaaatggctgatatggagaagaagcagcacttgcttgtgcaggagcagcaggtgtggcatcagtatgcaagggatgggatgcaaggtcaatctagcttggccaaactgaatggcgctggatactatgccggaggtcctatgcccatgatgccttatgggatgcccccagttaatggaatgggaccttcaaccgggtattatcacactccttactgataccccttttcacttttttctttgngtcatatctataggtcgtttcgtttattttttact

SEQ ID NO: 5349 - DNA, 371 bp, Glycine max
  Clone ID: jC-gmfl02220071g11a1
cgaggaaggcctggcttggtttggttgtttttaacacgcccgtgaagtgttgaggatttaagaccgtacagaacattgttttacctaaatggcagtgtaagcgaatgagcattctgtgtacaaataatcgataaactatctagctcaaaggtgggaacacaacttggtatctacctattgaaaatactcataggccacaggattttgaaaggcctgagtgcatattaaacaatgactgtccatcttttctgaatttattccagatttaattgaaggattgcaaacaatggtgatcatcattgacatgcccatcgggtgatacaccaggtcctaccacttgatgaacaaagtactgctcgcacactggacat

SEQ ID NO: 5350 - DNA, 160 bp, Glycine max
  Clone ID: jC-gmfl02220071g11d1
aaaaaataaaaattttatttcctaataatataaaccaccaaaaacatggaaacccaaaataagtaaaatgaaaaccaccgccaaaaaaaaccaacaaaaaaaaaaaacccacctaaaggcaaaaaaaaatactgtgacgaaaaaaccccacctggataaa

SEQ ID NO: 5351 - DNA, 305 bp, Glycine max
  Clone ID: jC-gmfl02220071g12a1
ctcgagccgcaaatttatagcgtgtttcgtgaaggaggctccatggccacagaaggagaaggctttgttgcgtagctaattggcaatgtcttaaattgttttaatgttttcctgctacttttcttttgcttattcaaaatggaattctagctttgaggtcaaaatactcttactcttacggctgataactaggttgcaattgcaggacaataaggcctcatttgtcaggccagtgtttgttttttcaagtttagaagcagcccttacatcttacgaatttattcatatttttattttcatatggt

SEQ ID NO: 5352 - DNA, 305 bp, Glycine max
  Clone ID: jC-gmfl02220071g12d1
accatatgaaaataaaaatatgaataaattcgtaagatgtaagggctgcttctaaacttgaaaaaacaaacactggcctgacaaatgaggccttattgtcctgcaattgcaacctagttatcagccgtaagagtaagagtattttgacctcaaagctagaattccattttgaataagcaaaagaaaagtagcaggaaaacattaaaacaatttaagacattgccaattagctacgcaacaaagccttctccttctgtggccatggagcctccttcacgaaacacgctataaatttgcggctcgag

SEQ ID NO: 5353 - DNA, 637 bp, Glycine max
  unsure (1)..(637): unsure at all n locations
  Clone ID: jC-gmfl02220071h01a1
gaattctggtgatcgactgaaacntnnnnnntnncnnnnnncnnnnnnnnnnnnnnnnnnnnnnnnnnnnnnnttttnnnntttnnnnntnntttgtttttttttntggcgnttaatgcgtaagttataatgtttctgacaaacatgattgtttaatcctgttattatcgatgatactttaaatattgtttagacgattcaatagtatatttttggagacctttttatgaagttcatgcaagttgttagaaaattcctttctacaattagaatttgaaatggtaatagttgttattccttatagtgcttattctatgggagaaccaaattctcatctgtggctactgacttgttgaattttgggcagactaacatagcatgtaaatgaatagatgacaaaagaatgcaatttcttgtaaggatattatcctatcacactatcttccgcttaggacaatattcttcagatgaaactttaaatattcttatcttcagatgatattgtcctatgacttgttggatttcttgtaaagatgatacttcaaatatttttcagatggattcaatagcaaaattctggtggtttgcatatgaagttcatgaaagttgttagaaaattcttttctactattagaat

SEQ ID NO: 5354 - DNA, 478 bp, Glycine max
  Clone ID: jC-gmfl02220071h01d1
agtagcaaacagtccttatcgcttgaggtttgtataaacctgaatttttgcagaacagattgactttggtgagagatcttatctcaaaaaatcaacattaggaaaaagaatagtcctattgtgaactgtaagatacctcccctactttctttcttttttacattggtaggaaaaacacccatttttgcaaacaatataattagtccaccaacataatcattaatcaaagaatatatcctacactagctatatattatattatgtgcaatgatttagctcacttcactgctgtattgttggggtttctgaacctttttgctggataaagttagatttgaacatcaacacgggttctgatgggcttgagcttaattcctaaactctctggggagaggagttctggtgctatgcatgaatggctagtggggcttgctggatttgaaccgttgcttgatgaggaagcagcatgtgtttgtct

SEQ ID NO: 5355 - DNA, 523 bp, Glycine max
  unsure (1)..(523): unsure at all n locations
  Clone ID: jC-gmfl02220071h02a1
gtggagaccagcttgttccatattatgctgacattcttggagccattttgccttgtatagcagataaagaagagaaaattagagttgttgctcgtgaaaccaatgaagagctacgtgccctcaaggcagatccagctgaagcgtttgatgtaggagcaatcctctccattgccaggaggcaattatctagtgaattggaggctactcgaattgaagctttgcactggatatccacccttttaaacaattatcgtactgaggttttgcaatttctgaatgacatatttgacactctgctcaaggcactttcagatccatctgatgaggttgttcttgtagttcttgatgttcatgcatgcattgcaaaagactctcagcactttcggcaacttgttgtcttcctggtgcacaatttccgggtagacaattcccttttggagaagcgtggtcctttgataattcgtcgactntgtgtgcttttgaatgctgagagagtctaccgtgaactttctacaatactgga

SEQ ID NO: 5356 - DNA, 560 bp, Glycine max
  unsure (1)..(560): unsure at all n locations
  Clone ID: jC-gmfl02220071h02d1
gccagctaccgganccgtctcgattattcccggtcgacgcgctcacctagtcgcggccgccctttttttttttttttttttttttttttttttttcttttttttttttttttgggttttttttgggttttttattttttttttttaaaaaaaacccaaaacccccatataaaaaaaaaaaaccacccaaaaccccaccggcaaaaacaccaaccacagccgcccaaaaaaaaaaaaaagccccaccaaaaaaaaaaaaccccccccccccccccggggaacaaaaaaaaaaaaaacccccccggggggggggtgtctcttccccccccaaaaaaaaaaacccccccccccccccccccgtgggggggcaaaaaacccccccccccccccccccgcgcgaaaaaaaaaaacaataaacccaaaaaatcccccccccaaaaggggggggcccacaaaaaaaacccccccgggggggggaaaaaaaaaaaacttccccccccccccccctccagaaaaagaaagggccaccaacaacaacccccccccccacagggggggggg

SEQ ID NO: 5357 - DNA, 477 bp, Glycine max
  Clone ID: jC-gmfl02220071h03a1
gcgaaatcaggtctacgaaaattacctttttgacacctgattccagttctttttcttctcaataattattatttgcattagtcaacacacactatcaaagcaaacggggtgctcattctccgggttgaacgcactctacgactccgtgaacggctgaggtgatgtctggatcaacgagaaccgtttccgcatcgtgcgccagctcggagaaggtggcttcgcctacgtctacctcgtcaaggaggctcccgacgactccagcgccgctggcctcgtcatgaagctcaaatgctcctctcatctctccgatgatggaactgatgctatgaaacaggtcctcattcagaacactgaacagctggagttggtcacggaggagatccgcgtgacatcactgctcaatcatcccaatctgctcccgcttcttgagcatgcaatcatttctgtcaagcctacccatgaaacatcttggaacca

SEQ ID NO: 5358 - DNA, 530 bp, Glycine max
  unsure (1)..(530): unsure at all n locations
  Clone ID: jC-gmfl02220071h03d1
aaataaatgatattccatttatgctgataaattctgaagacacagggagattggccatttcataaattacaagaaacaaaattatgtaaaaatgacaaacaatactttaaagccaacgcccgactacctagactaccaccaaaatcgaagatccatataaatatatggttaactccgtcaggcgaggaattgctattgcttttctatccattaacatataactggacggcaaatgcacacgaatttttttaaacgactgcaacataaaaatctcaagccccacttctcacttgcatagtaactcattgagagaacttcgcaactaacttgtcaacatggataatgatatcatctatcctgggccgcatggaagccgttggctgaagcatccatgacacgaactgatgaagagcttctggatatggaggcttgggtcctgctggccatttgacctgtgcatttacaatagccaattgcaggcttccaccagactctncaagtgcatattcaaatggagataccccatacat

SEQ ID NO: 5359 - DNA, 633 bp, Glycine max
  unsure (1)..(633): unsure at all n locations
  Clone ID: jC-gmfl02220071h04a1
tgtattacatgtgtagtcagtcagcataccaatgaanaataaaccaaaaaaccnanaaaaaaaaaaaaaaaaaaaaaaaaaaaaaaaaattttaaaaatttaaaanntnaaatnaanattctattattatatatggcttcttcaccttcctcagaaaacaaaaacctagagggagtagctggtggtgccggagagaaacccattccacttggtgagaacgttctgcagaagcatgctgcattctttgacttgaataaagatggtgtcatctacccatgggagacttttaaagggttgcgtgaaatcgggactggggttttgctgtccgttggaggtgctattttcatcaatgtgtttctcagtcagagtactcgtcccggaaagtttccatctatactttttccaattgaaattaaaaatatccaacgcggcaaacacggcagtgacactggagtctacgatactgaaggaaggtttgtaccttcaaaatttgaagaaatttttaacaagcatgcacatacacatccaaatgctttgacatatgatgagttaacggagatgataaaggcaaatagagagcctaaagatttctcaggaaagattggtagtgtggttgaaatgaaaattctttac

SEQ ID NO: 5360 - DNA, 500 bp, Glycine max
  Clone ID: jC-gmfl02220071h04d1
ataaaattgtattctttattttactgtatacgtgcttttcggatgaattcaaacatgatagatgacacataagtttgacttgacatatacattattgatgaacataaaaataaacagacactttgaatattgtgactaacttactagcatataaattcataaaaataaccaattttgctgagatcgacaagtaacttcttcttttcacatacgtgtctgaaaaatattactacttctctttgcctgaagagtgttgttttttcagttgttcaaataaacttccatcgtaaacacctcggattgtttctttctgcagtaatccactcttatctttagcaagtttgtaaagaattttccattcaaccacactaccaatccttcctgagaaatctttaggctctctatttgcctttatcatctccgttaactcatcatatgtcaaagcatttggatgtgtatgtgcatgcttgttaaaaatttcttaaattttgaggtacaaa

SEQ ID NO: 5361 - DNA, 601 bp, Glycine max
  unsure (1)..(601): unsure at all n locations
  Clone ID: jC-gmfl02220071h05a1
atgcgtgcgtcagatcagaanatcagatacnnggtntaaaanccanattgnaagctnatgnacgataaagtgtgnagattaattattggtattgtgttatatgttttttatgatttcttatgtatgtatttttttattatatagggtgttatggaattttttttaattattgtttgggtttgtgaggagagcttgggtgctgctctgaacgcaaattttcaagatagctatgggtgttgtatatttttttgtgaagaagaattagtgagcataatgttttctgaaagattgggggcagacgaatctcattgtcaagatttacagagtttgagtgtgtcaaagcgacttgtgaggagtgttagccagaagtggaggaagaagagtaacaggaattctggggaagaagctgacgatgtaaatggagtttctttaagatgcttaaatctgtatggacgaagtgggggctgcaaggtaggtgctgacactggtgatgattttggcgattcaagcagtagaaggagatctagtgccagtgacgaaggaaagggatataagccgatttgtggcccagacgaaactgctgtggattgcttttcatatg

SEQ ID NO: 5362 - DNA, 507 bp, Glycine max
  Clone ID: jC-gmfl02220071h05d1
ttttttttttttttttttttttttttttttttttttttttttttttttttttggttttttttttttttttttattttttttttttttttttttttttttgatttgttatatttttttttggggaaaaaaaattttatggggggggggaaaaatgtaaaaaaagaggggcgtgaaaaaaaaaaaactgcgaaactggcttcaaaaaaatcccccttccaaattatttggggaaaaaaaaaaagggggtttcccgggtgggggggccccaaaaaaaaggggggggacactaaaatttttggtggaaacacccccccccgaagggtctctgggggggcgaccccccccagatttggtatcacacaaaaaaacccccctcgaaaaaaaaaaaagaccccggaaaaaatgaggcccggggggctcttttcccccccgaaaaaagggggaaaacccccactcccggccatcttttttgtccaatccccccccaaaaaattgtgttttttttac

SEQ ID NO: 5363 - DNA, 618 bp, Glycine max
  unsure (1)..(618): unsure at all n locations
  Clone ID: jC-gmfl02220071h06a1
tggtcataatcgaagactttaanggtaaaacaaaaagcnannaaaaaaggaaaaaagaggnaagaaaaaaaattttaaaattttaaaaaaangaaaagaataaaaatgggaatttttgttatttttatttaatattaacatgatgacccttagatcacagccaccatggagtgattctccggttacacaatccacgaacctcactcttcactttccgttgatgctcaggctctgcagaaccagatagatgagcttgcagcgttttctgactctcctgctccatcagtaacaagggtcttgtatactgacaaggatgttttaggtcgcaggtatgtaaaaacccagatggaacttgctggtctatctgtgagagaggatgctgttggtaacatatttggtcgttgggatggcgttgaacctgagcttgctgcagttgcaacaggttcgcacattgatgctataccttactctggaaaatatgatggagttattggtgttttaggtgctattgaagccatcagagtcccgaaaaggtctggttttaaacctagaagatcattgcacgtcatattattcacatcagaagaaccaacacgctttggaatangtagcttggga

SEQ ID NO: 5364 - DNA, 368 bp, Glycine max
  Clone ID: jC-gmfl02220071h06d1
aaacactccgatgaaataaaattcaccgttgtgactccttccacaggcagttatcattttactcctgtaaaaagtggttcttatagaaccacttttcaaattgtatggttcaacccctcattctgatagattgaagggggtatatccaaaatttgaaatgatttaatcagtaggctgtaacagaagtaaattacatgtccttttcctacaaaagttcacatgaactcactacagaagatgttagtgactggacaatttggctagggtgagtgttaatacttttacaccatttgacatatcttgaatggtggcaaactcttcaggcttatggctgtaccctttgtaacatggaatgaaaatcatgccca

SEQ ID NO: 5365 - DNA, 552 bp, Glycine max
  Clone ID: jC-gmfl02220071h07a1
gaacgatttgatggtttggaatgcatttcccaagcaacgagtcttcggttcgaaaccagcagagagagagagaacttcaactgagggtgagagtgacacaaatctagggagcactactctaaaagttctattagattcttcaaaacatgaccatgcatcgcgagtcttgggcttttgtcttcggcgttatgggcaacatcatctcctttggagtgttccttgctccattgccaaccttttaccaaatctacaagaagaaatccactgaagggttccagtcacttccttatgttgttgcactgttcagtgcaatgctttggatttactatgctttcgtcaaaagggaagctgccctccttctcattaccattaacacatttggaattgttgtggagtcaatttaccttgcaatcttcctactttatgccccaaggaagcctaggcttacaaccatcaagcttcttctcttactgaatgtgtttgggtttggagccatgcttctatcaactctctacctgtcaaagggagcacagcgtcttgctatcataggat

SEQ ID NO: 5366 - DNA, 507 bp, Glycine max
  Clone ID: jC-gmfl02220071h07d1
gtcattgatcccttgtttctccacattcatataatctcaatggtgatattcaaactttgccaacagcaccagcagtagctgcgtgattcggttccattgttcccatcttcccaacgtcaatgatgtggccattcaattcttgagccttcactggctcctctagtgccactggggtggcgtttctgtacatcaaatacatccccatctgaattatgccgaagacaaacccaagtgtgtttggaagagcaacgtaataatccctgaggagaaggccatagaagaaccacataacagcattgatggttaaaaacattgacaaagtaaatggcatgtattccacgctcctcgtctttatgacacgcctaataatgaagagaggcgcagcaaagacactgatgttgaaaacaaggcaaatccatcctatgatagcaagacgctttgctccctttgacaggtagagagttgatagaagcatggctccaaacccaaacacattcagtaagagaa

SEQ ID NO: 5367 - DNA, 562 bp, Glycine max
  Clone ID: jC-gmfl02220071h08a1
ttcctctttctcttccaatctcatttctcaagatcggcttcgctgcttcctcaggaattatgtcttttgtgcggaattatcaagcagaagattgtagtttacatagtggttactggtccacctttgatggaaacaactttggcaacagcaataggaaaagaagcaggaacaattattataacaggaactgtaacatttacaatgacaaccggacaaaatttggggaccatggttgcaactttaatttttacacagctgatcatgctaattatgttagatatgatgctgttccatcatctttgaaaaggagaaaatattcagtgcctgcttggcaagaaagccagcaatactatgttccacccatggtccatgacaatatcccttcatcctataatttccaaggtcctcctacaagatctgatggtgatgcctctacatcagctagctgcaagcgtgattgctctatttttgaagatgataagcctgtcttcatgtctagggacgaaattgatagacactctccatcaagaaaagatggtattgatgtacatcatgagacaca

SEQ ID NO: 5368 - DNA, 238 bp, Glycine max
  Clone ID: jC-gmfl02220071h08d1
aaaaataaaaccccaacaattttattaaggaaaatcctttacaatttcagcacatataccccggcatgaatataattttgcccgctttaagaatttttcgccacaaacaagggggtagggctcaacaaagcccaaaccaacaattataacagttttagggggattaatttcccccagaaaggaaattaacgtaataggcaacacatggggggcacgttcatgggggtcattttataag

SEQ ID NO: 5369 - DNA, 587 bp, Glycine max
  unsure (1)..(587): unsure at all n locations
  Clone ID: jC-gmfl02220071h09a1
gcctgttactctggttataatcaagtagattccgtcatcatgaaccaatcgtcaatagaccgtggattctttcggtctctgtttttccgttcatatagagatgaagagaagaagatgggaaccctggtcaaagaagattttggccgtcctgatagagctaacaccatgggaatgagacatggttcttatgataagctggatgatgatggtcttgccccaccaggcacacgagtatctggtgaggatgttatcattggaaagaccaccccaatatctcaggaggaggcacagggacaagctntacgttacacaaggcgtgatcacagcataagcttacgtcacagtgaaactggaattgttgatcaagttttgctgaccacaaatgctgatggattgagatttgtgaaagtaagagtgagatctgttcgtataccacagattggtgataaattcagtagtagacatggtcagaaggggacagttggtatgacctatacacaagaagacatgccctggactgtggaagggcatacccctgatattattgcaatccacatgctattccttctcgaatgacaattggtcag

SEQ ID NO: 5370 - DNA, 439 bp, Glycine max
  Clone ID: jC-gmfl02220071h09d1
aaatggaaaactcacaaatcaactttgtcaaataaattctctcatttcactatattgtacaagaattgaacttaaaattgccagagtctcgagttacaagtaccatataccatagctctcaagcattgcaactaaatttaaataatccaattcgggtgacctccccctaaaccaacaaaaggatttccaaaattggagctggaattctcggttgattgggtataagacctttcacagcatttaagacggggctcactagaattacgcgacagaaacttctgctaacccatctctgcttagtgaataagaaacaagctctcggaattgaaaaacttccattatatatacagtgctcggtcggtaacattagtcgcttggaatgagcacccttgaatagagaaaacgcagcgggaaacatcaataatgaaggtatcaaagc

SEQ ID NO: 5371 - DNA, 552 bp, Glycine max
  Clone ID: jC-gmfl02220071h10a1
atttgagggtggtgttgatgcaggagagcatgcctccattgagcttgcattgttgaacatgggtcttctacacagagctgtaaagagaaactgtaggcctatggtagaactactgttaagatttgttccagttaaaacctcagatggtgcagacagtgaaatgaagcaagttgccgaagcccctgacagattcttatttagacctgatactgtcgggccagctgggttgactcctcttcatgttgcagcaagtatgagtggctcagagaatgtgttggatgcattaaccaatgatccacgaatggtgggaattgaagcatggaaaagtgcccgggacagtacaggtttgacccctaacgaccatgcttgccttaggggctattactcttacattcaactagtccagaacaagaccaacaaaaaaggtgaaagacaacatttggttgatatccctggaactgttgtagatagtaacacaacgcagaagcaatcagatggaaataggacatgtagagtttcaagcttaaagactgagaagattgaaccacagca

SEQ ID NO: 5372 - DNA, 504 bp, Glycine max
  Clone ID: jC-gmfl02220071h10d1
gaaccgtaaatatcttgtatttattgattaattaatacaaggcaatttcctcaaattgcttaaaactgttatggcgttatccctattatcacatatataatggcctaatagcattgaccccatatttaacaggttcacaggtttcataatcaagattctgttctgaacaggtgaagtgtcaacctcgggttttccccatatatattgatgacagctactattactatggatgtataacatgtctatactctaaacccaaaatctaagacttacccagtttctaaaataatatattaagaaaaggtggaagcttacagcagaaaacacctgatatacaacattacattgccccatactctaatgattcccagttgaaaggctggaagacataataaactctaggtgagcttttgaagagcatagctacacagacacacacaactgctatggtcaccatggagagcatgactggcctataaaccattgctgttttcatgccaccat

SEQ ID NO: 5373 - DNA, 567 bp, Glycine max
  unsure (1)..(567): unsure at all n locations
  Clone ID: jC-gmfl02220071h11a1
tcttgataagataaaactatcctcaaaagcgcacagatatagattacaatgctattacactgaacaaggttggttagatgacatattcaatatatcgcaatattggagatctctaaagtacaatcagccaaactgttggcttgaaaattggttaagaagagaaattcaagctcttatccaggaggaggatgttgacatcattttgcaccatatccttgctgtggtcaaagcagcattatggactaggagagagcagaagtcacacatgaatgcacctgaaaagaaacaggaggagttcaagatgtcagtctctgaagccgcaaggccttttctggcagcaagaacggacagatttgtatatgagattcaactatttcttgcttcgggaatgaatattgaagcttatgatgctgcttacatacaacggttaggttggagctcacctggggtaaacactgaggtttctcatagtgaattggttgatcgctcaactgtgattccatacatgcacctatttgatggtgactttgatgaaaatgangtagattcttggtctgtttttctcat

SEQ ID NO: 5374 - DNA, 386 bp, Glycine max
  Clone ID: jC-gmfl02220071h11d1
aaccaatataatatgatattgataacaaacatatgttaaacaactttacacccttgggtggagaatttgcaacttctgcagtagctggaaagaatcaatagcactcattggtgtgtgagcaaatttctcctatacaattcattcgggtagcaattacagcaaatacatgagaaaaacagaacaaagaatctactcattttcatcaaagtcaccatcaaataggtgcatgtatggaatcacagttgagcgatcaaccaattcactatgagaaacctcagtgtttaccccaggtgagctccaacctaaccgttgtatgtaagcagcatcataagcttcaatattcattcccgaagcaagaaatagttgaatctcatatacaaatctgt

SEQ ID NO: 5375 - DNA, 623 bp, Glycine max
  Clone ID: jC-gmfl02220071h12a1
catttttctttccttttctttttactaacatcattattctactttgttgtatctgagctgctgaacttcagagtgtggcagcagatcctgctcttcttcttcaccatcagacttgtgctggaaatgggattggtgacagtacctccttgattccagaatcctccagaagaccaagcctctcctctctgcaaataccagcgttgtcagtggaaaatgcattatcttcttttaacaagacagatggtcctatattgatatcaagtccaggttccagtagaggactgcccccaaggccaaattcagccagagtcatcaagtccactatgaaaactttactctctgaaaggagctttagggctaagaattcttcaatggatagtgaaaggacagttctcattattcctgatggctcaccatcagatggtcctgtggataataagccttcgacttcgcggtccctttctcttaacaagattttgttctcttcctcaacaaaagcagcacattcattgccggttactccaactgcaaattcaggtccagagaatgtacatggaagacatctagggtgtgattctgatttaagtaaaatgaaagtaaatcagcacatgacttcgatcagt

SEQ ID NO: 5376 - DNA, 506 bp, Glycine max
  Clone ID: jC-gmfl02220071h12d1
atgtccgattcaagaaatagtcaattatcttcaaattattatagtacaaatcttgatgcaagaatctaatgataaaaaatacatgacaaccatatatattgtaagcatataaacgccctcaaccccctttcaaaaaatattcaacaaaaacattcctatcctgtattcgcagtttacatattgctgctcatgatggattcattcattcctcatatattttggttcacaccaaattggaaaggccaaatctttgtagtttctaaactataaacaaataagagaccaaaaaatgcttcatgtttgcaaaatactggtgttcaactattgctggaggagctactgtcactgttgttgcagcctttgcagttggtgacactgtcattgatgtttttgctactgcagtgcatgatcacggcgctgctgccgtgccgtagaagattgaatctgtcttcttggtttccatctaacatactctgttagcagcgtattcaagctgattgcaatcc

SEQ ID NO: 5377 - DNA, 362 bp, Glycine max
  Clone ID: jC-gmfl02220072a01a1
cttgcacatcgtttctttgttgcccagggatctaaacttcaatgagcatacaagttgtatcgactggccagagcatcaaagagccacgcctatcactatagatacaggctgatatcattcaaagaaatctggcgtgcactgggctaaagataagagatccgttacatcatcgatcaagctattcacagggtctgcatgggttgtcctgacaaactcatctgctgagactcatgtttgggatactgataatccttctagaactctccttatgtattacacaaattttctttcatcccctgagggacacatacatacagacattggaaaacataaggtctatcataacacaaccattaatcatg

SEQ ID NO: 5378 - DNA, 359 bp, Glycine max
  Clone ID: jC-gmfl02220072a02a1
cattgttgtaagttgttgattactatggcctgtataattcgatattctaacctcatgagcggaatgagatcggccgtgtatgagcgatcttggctggtataggcatgggtgctgtcatcgaatgcatgttgacaactactgcctcttgcgatgatgagcggcaacacgatcgtgtcgagatcatggtcaacgatgcagatctacagaactactccatcctacgtggctctgaccgtcacactactgatgatcggtagatacggcgacataaccgactcgatatgaaccctgccaacaccgtaatgaatgctatgctgtaagactggaaggcgtattctcgtagcatcagtacacggtga

SEQ ID NO: 5379 - DNA, 547 bp, Glycine max
  Clone ID: jC-gmfl02220072a02d1
gagtgagctgaccgaggaatttgccgtgctacatgtgtgcacgtccgcctgcttggggggggggggggggggggggggggggggggggggaagggagcgaaagccggaggatggaggggcccatagtgtactacctacacagttctctttaaactttttaaggaacaatcgtgggagggccccagaaagaagttatagagtaaacgaggtaataagaatataaagaccaagtatcaaaggacacaaccaaaagaaaaagaaaaaagaaaaaaaaacgacggcagcagcggcaaggaaggaaccctaaaatataatttgagaagtccagtttagctaacgcaatagctgccggctagtcgttagacccgaatgcgacctagtaccctattgtgttggcaacaatggccaagaagtgcgcccattccatttactactggtccgctgataatacgatgcacgtcgaggcaaaattcgctaccccggcggctagttcttaccaattgccactgcacgcccctatgtgttcagcagcgtcctcctctaggga

SEQ ID NO: 5380 - DNA, 219 bp, Glycine max
  Clone ID: jC-gmfl02220072a03a1
ctctacgacaacctcctttctctctatctctagctcggatgagtgctctctctaactccagtagtagccacggcaattccttcctcaagatgcccgccatcaagtttaccaagctcttcatcaatggagattttgctgattccatatcaggaaggacatttgagactatagaccccagaaaagaagaggtaattgcaagagttagtgagggaaataaag

SEQ ID NO: 5381 - DNA, 581 bp, Glycine max
  unsure (1)..(581): unsure at all n locations
  Clone ID: jC-gmfl02220072a03d1
cgcatcgacggttgccgggnagagtttgccgtgctagcatgtgtggagtgccacctgcttggggggggggggggggggggggggggagagggaacggaataatcgccgaagaaaataaacgaagtagaagaagataacacataaggtatataggagaaccaaggaaacgcgaagggaggttaaagcaaaacatgtatagggcgctgtatcgaccacataggtaatgaggtaaacttaaccacaaggagcaagaccgcggataatacagggaatggcgaacgatggcgcaacccttgcgaagtttaaagtgtggttaaagttctgtagtggagatttgttaaaaccaatagtatgtttgatccgaaaagactacggcagttaaataagcttgctatcaagccattggcatagacgcgggctacgagttaaaggtggccggataaggttgctgctgaccttagatggccgaggcggactatggggaaggctggttgttagccgtggaaatggtagtactctgacgatacccttaaagagggtagtttcgctgaggactagcgttgttgggataggccacaaaa

SEQ ID NO: 5382 - DNA, 521 bp, Glycine max
  Clone ID: jC-gmfl02220072a04a1
cggccccccaaaatcttcccatagatctggattgacttcaacaaatactagtaacaagggcagacattcctctcctcttccgtctccaccagatcattttgctgcttcatcctctccaatgggagctgtaaatatgtctaagagctttgaggatgctgtgccagcacaaatgacaggcaaacaagatactaatgctgtttctgagaaagaaatccctaccaggacaaacaatgctatgaggaacacaccaggaggcaagggaaaaaatgggtctaaaccagtagatttgcagggcatgctaatttctcttttaaaggataaacctaatggaatgactttgaaggccttggagaaagctgctggagacccacttccaaattccatgaagaaaattgagccaattataaaaaaaattgcataataccaggctccaggatggtatatcttgaaaccaggatgggatttagaaagcttaataaacctcagactgaaagtggaagttctcctgatgactatcacag

SEQ ID NO: 5383 - DNA, 610 bp, Glycine max
  Clone ID: jC-gmfl02220072a04d1
cgtgcgtgtcggggatttgccgtgctacatgtgtggagtgccgccttcttgggggggggggggggacgcggcgttaaaggatgcccaaaattacaagggataaacctgcaacagcctgggttgcaagtgcaacggctgggtaagcaacctgggatgggacgaagagtgcaaggttgagttgtacaacgcgggctgggcggggttaatacgggaaagcaattgggggcggtaaaggctgggctaatagcacgggtagtgccacgccatgtatccaaggtatttaatgttaacgttcaaactgtgtgggcaacccacagattgtctttaggacggataccccaggtagtaaaattaaggtcaggcggcgttggaccgcagcggtttaacgcgcatgcgcgatgggcgtccttggttgggaagggattaattagggtattggcgggggccgaagaacaagttagccagacgcatgcgggatggctaggatgattagtttgccaaggttgccccatggggggtgtaagcctagcaagagtggtaggtaaccaagtgtgatgacagggagtgcgtgctatacaacagctggtatcgcgagcaaacgttgggttgc

SEQ ID NO: 5384 - DNA, 525 bp, Glycine max
  unsure (1)..(525): unsure at all n locations
  Clone ID: jC-gmfl02220072a05a1
ctcaccctcctcttcacacattttctgtgcgctctaacaaacattctcgttcacactttcagattgtgtgaagatgggggcgggtggccgaactgatgttcctcctgccaacaggaagtcagaggttgaccctttgaagcgggtgccatttgaaaaacctccatttagtctcagccaaatcaagaaggtcattccacctcactgtttccagcgttctgttttccgctcattctcctatgttgtttacgacctcaccatagccttctgcctctattatgttgccacccattacttccacctccttcccagccctctctctttcttggcatggccaatctactgggctgtccaaggttgcatccttactggagtttgggtcattgcccatgagtgtggccaccatgcattcagtgactaccagttgcttgatgatattgttggcctagtcctacactccggtctcctagtcccatacttttcatggaaatacagtcatcgncgttaccacttcaacactgtttctct

SEQ ID NO: 5385 - DNA, 535 bp, Glycine max
  Clone ID: jC-gmfl02220072a05d1
gatgctgtcagggatttgccgtctacatgtgtaggagtgcctacctctttggggggggggggggggggggggggggggggggggggggggctaagaagtaaatgcggtaaacacctgagagtggaggtgcgaaataaaattctgggctaatgcgtgacagatggatgattaatagtacccggtaataaaaggaggtttaagaactaattagcaggtgaaatacgtataacccaaacggtaaacaacttgtcctgataggaagtagtataatggaggcggccgttaaaagatattgggctgtgtccgatgggcagtgcctgttatagaaagatatgtggggcttgggtgttataggcttggcataaagccacgtgtagtaaattcagaagatgtgtttaaaagcccggggaggcttgggcgacttgttaggctagcagaagcgcctaggcgccacaataacgcagcgctgatagcaagcgtgccaagaggagccaaaattggcggtaccaggttagaagtgtgagttatgcggctg

SEQ ID NO: 5386 - DNA, 426 bp, Glycine max
  Clone ID: jC-gmfl02220072a06a1
ctaggatgctgtgatttttggcctctcaagatgagaatgactggccggtgattgatcccttgccatcttatggcagagggagggacacactaagcggaaagaggagctatctaataattggatccatcctcactgatgtactcatatctgaggacaatggcacattagatggacaaggtgatctgtggtggcaaaaattccgcaagggggagctcacagatacccggccttacctgacggaaatcatgtactcagataatgtacaaatatccaatctcactttggttaattatacatcgtggaatgtacatactatatacagcagcaaccttgatagtcaaggaatcacaattcttgctcctgtgacatccccaaatacagatggaatcaaccctgactcttgcacaaacacacgaattgaggact

SEQ ID NO: 5387 - DNA, 506 bp, Glycine max
  Clone ID: jC-gmfl02220072a06d1
atgcgatcaggaatttgccgctttacatgtgtaggagtgccgcctgcttggggggggggggggggggggggggggaaaacggaaaataagctagcaggctagggagcaggtacccggttaggagatgaatataatgtgtgggaggaagcataaagataaagataggtacttatgttaaagatagcatggagctagatataatgcagaaaccaagtgccggttggtaagggtatagggagggaaaattaccaatactatggaactaattagacccgttggacagacacagatgctgcccaatgttgtgcaaacgtaagtttgatgcatgacaaccagacactaaactcgaacctaggggagtgcctttagactccgggagcaagcgtgtagtgggccgtggtgtgagaactggtggggtaagtgtggtaactggtgggttaaattgtggaaagcttgtgaagccattcctagtacaacgttacgacgtgttattagtgagtgcttta

SEQ ID NO: 5388 - DNA, 480 bp, Glycine max
  Clone ID: jC-gmfl02220072a07a1
cttggacccagatcttcttctcttctccctctataaacaaaacatgggttttccccctctacaatcccaaaacagatcaaccgttctcttctctcagcaatgcctggaagcttaaggaatctgtcactttctcccaaaatcttctccttcaccttgcttctctcattaaactcccttctctttttcccatgttgctactcccttgatgagcaaggccaagctcttatagcatggaaaaacagtttaaacatcacttcagatgtgttagcatcatggaacccttcagcctcaagcccatgcaactggtttggggtgtattgcaactcacaaggagaagtgatagagataagcctgaagtcagtgaacttgcaaggctcattgccttcaaattttcaacctctaaggtccttgaagattcttgtcctctcatcaaccaacctcacaggaagtataccaaaagagattggagactatgtagag

SEQ ID NO: 5389 - DNA, 574 bp, Glycine max
  Clone ID: jC-gmfl02220072a07d1
ctatcagggatttgccctggctactcgttggactaccacctgcttggggggggggggggggggggggggggggggggggggggggggggggggggggggatagcagaagagaaggagagggagagggagggagagaaaagaaaagataaccctaatacttgtagagaacacctgtttagagcacgccctacgacaaatcaaaaaaatagccccagaagtatttaaaggaacccaactgatttaagaaccctaggccggtatgtgtataggagaatttttaaagggagggaggacccaagaatttatgtaatacccaacagaaagaatacaataggaaaatttcaaccatggagagtgtttgtatggtagtggcccgtgtagttgtatgttactactagggtaaaagacattgcccacagcgatgcctagtatacttggcaataaagcaggcccatataatgccattattgatgttaactgtggtagactgttgggcattataccacgagttgggcagcgttaacccaaagggcgcaacgggggtcttagctagcgtaagcgctaaaccaataca

SEQ ID NO: 5390 - DNA, 604 bp, Glycine max
  Clone ID: jC-gmfl02220072a08a1
tagatagtggctatcgatctatgtctagaaatgtaccaggtgcctgtcacaatgtaaatcaggtcggggtgtgggtgtggtaagggtatttggaggactagactagaggtagggtttgggtggcaagtcggtggaatgctcacaccccagagtacacaacggcaggccttgtttaggaagaatacagtgcaagcagtgcagccacgtgaaaccgcccaacaacaacgtcgtgacgacgaacgttgggggcgatcaactgttgtgtcaggatagtaggcaacatcggtcattatatccgccaagtaacaacggtacagtgctgctggatgttaatgctagttctaacttagttgcacaggtttgaccgtcgcgcaccatcgactttttggacgttgctagtgctgagagggggtgacgtgtggtgtggtgttgggggtggcagggtggttggctttggggcagtgtgtgattgatatactaacatgggcaggtgggagcacgtaacagcctgcctgttatgaggccgggtcaaactgagcaaaaaacatggctcagagtaggggggcaatagccgcgctggctgcatttgcaaacaagaccttgt

SEQ ID NO: 5391 - DNA, 576 bp, Glycine max
  Clone ID: jC-gmfl02220072a08d1
ttatcagcaatttggccgtttacatcgttggagtgccacctgcttggggggggggggggggggggggggggggggggggggggggggggggggggggggatcccagaagcgaaggagagggagagggagggagggaaaagaaaagataaccctaatacctgtagggaacacctgtttagagcacggcctacggcaaatcaaaaaaatagcgccaggagtatataaaggaacccaactgatataagaaccgtaggccggtatggggataggagaatttttaaagggagggaggacccaagaatttatggaataccaaacaggaagaatacaataggaaaattacaacgatggagagtgtttgtatggtagtggtccgtgtagttgtatgttactactagggtacaagacattgcccacagcgatgcctaggatacttggcaataaagcaggccgatataatgccattattgatgttaactggggtagaccgttggggattatacgacgagttgggcagcgttaacccaaaggccggaaccggggtcttagctagcgaaagccctaaactagtacaaa

SEQ ID NO: 5392 - DNA, 587 bp, Glycine max
  Clone ID: jC-gmfl02220072a09a1
gagtgacgacggacggtatctctccaaatgtaccaggtactgtacacaaacaaacaattgaataatcttagatcgggttgaatttagtcgctcaccgtttgtcattgttctataattttaatgttaacccctgcgcttgcgtcttcgtcgtggttatctgtagcgtccaatttcatagttatctcttcgtcggttgctgttactctttcttctgttgctacgtccttgtcttatgtggtaactactcagtcgccgtcttccatcttggttctcagcacctcgcctgttcctctaaccccaatgctaacaattcttctactaacactcgtattcagcaccatcgccatcactgtaaacttgctagtcacggccctggtccaggtcaggttgtttttcacaatcactgtcagtaatcttgtgttcagatgggctttctgtgtccttgtgatgatcttcgtaataactctgataataatgtttgtcgtattaaaattatcttcgttgttgttggtcgtcgtgatcaggctcatactacgttggttttttatcctacgttgtatgttcgtagtggtattattccgcagaat

SEQ ID NO: 5393 - DNA, 527 bp, Glycine max
  Clone ID: jC-gmfl02220072a09d1
ggatgcttgccggcgagtttgccgtgtctacactgtgtgcacgtccgcctgcttgggggggggggggggggggggggggggggggggaaaggcgatcgaacgtgactagagagtagagagcgcatacagaagatgagaagacaatacagtgattggcctggacgtagtataggccataacgatacgataaaataacctctgcttcatacttttctagcgaagcgaagagactgaaggaatgaatgacgggccggttcgtataaggcccgccggaatgacccgttctgtgtccgggccgttccggtcagccccaagtcagcgtagggagaagaagattaagtatataggctggtgaggggagcctggatcgggcataatttgctggtggtagggctggtttaagcatatagtgcaatgggcatctattccataactaatgattgcactttatgcttgtacttgtcgtggtattcgtgcacccggagtattccgccgcaacagcctccaagccccatgcttcgcccccc

SEQ ID NO: 5394 - DNA, 605 bp, Glycine max
  Clone ID: jC-gmfl02220072a10a1
taataatggcgtcgatctatggctagtaatgtaccaggtaccgtgcacgcataacacacagcagcagtgaatcgcaaccaagtcattagccgctccttcctccaccaccacctctcctcccgccgcgccaatgttaatcgccattgccgccgttttaagggttatatctttactcgtgagggtgagaccgttaagcctctttttaatgggggtcatcctaaccggagcaaccacctatgcattaaccgctgccgctttggtgatttaagcctgccctcctgttgctcacagcatcatccgtctcgtcacaggcatgctcatccgtacccccgctggggtcgccaccttcatatgcctcttcgtagtcatcagggtcctcagggtctgtttatttggcactgttcgtactggagttttcttcgccaggaggtataaccaagactagttgagttttgcggccgcggataccgaatatagggtaaagcgccaccccgggtttgcccacggccgagctaatagtagcgactacagccacttgtgccgtgctatggtagtaagatagccgtacagcgcctgtcgcctgaccagcggggtaggttattagg

SEQ ID NO: 5395 - DNA, 577 bp, Glycine max
  Clone ID: jC-gmfl02220072a10d1
atgacaaatgagggtgccaggagatttgccgtgctagcatgtgtggacgtcctcctgcttgggggggggggggggaagagtaaagtaatgccgcagaaacggtcgggatcgggatacaggagaaaaagggataatatggaagcgacgttagagaaaatgcaaaccacgtttaggaatacggctagattcgggcgtaaaactagtcatacagaataaaccgatcaccccaaacaaaattttattgacaaataggcgcctcggttagagcctggcaacctaagcaggtggtaaagcgtagataacaaagttggaaatactggtagagccgtacctgcaacactgagccttatacagacctgtttagtaggccggcactggccaaggagcaaacagacttttgtcgagctaaggttattaccgtttagcaagaggccttggttttaattaaacgtactagtagccaggccaacttgacgttactgacgcagattaaccgggccatatggcaaacgagcacttttatcaattactctggggacagtcccagctacggtgacagacgtaacagttcagtgta

SEQ ID NO: 5396 - DNA, 585 bp, Glycine max
  Clone ID: jC-gmfl02220072a11a1
agtacggtgtcgatctatgctagcaatgtaccaggtgcctgtgcacggtcgtgcaagggtgacgtaggcactgtagtagtagtacagctacaaggccacggtggaaccaaaacataacgactggcccaacaagttggttcccattgtgaggatagctggtcaaacaatagggcaccttgggtggagcggactatgctttacgggcgccgcagcggtatgccgccccatactgtgcccaaagttaaagcggtcgcttagctggagagtgtgtacgtaatttacccaggaacagtaggcggaacacactagcagtgtgccggtgtgagcttgtgggcttaggtaaaacgccaataacgggtaatgcaccagtgacggcacggcatacacagacacaactaaaatggatcatacatgtcctcaggaaccgtaggtgtgcagcggcagaagactttacaagtgggctgcctggggacgcctaataataagcgatagctgggagagcatgggggatgaaaggataccgggtgtggcattgtatgcgtgacgcaccatcgattgcgtggagctgtgctgcgcttagggtaa

SEQ ID NO: 5397 - DNA, 525 bp, Glycine max
  Clone ID: jC-gmfl02220072a12a1
gtgcgagaccgcaccgtgctatcgatctatctctaggcaacgtaccaggtacctgtcacagagcaagaatttttgggggtgggtgttagatttggggctgggtgggagttaagacgaacaatggtttatcacgcctgggaatgccgtgccgtgccgtgccgtccatatataaaaagaggacgagccacaaacacacggggcgcaacaagccacactggacaggcttgttccgcgggtcgggttatttcatgcagcaccactgccagggctacgatggcaactctaaccgtggtgttgctttgtgcttacttgtgagtaggttgcaccggcagcgggctaacgtgcagttggcccagggcttaccgcagggccactaacacacagatggtgggactattaaacaccttaaagagtttaatccaaagtctgtgaatacacttataaaggtcccggaggccaacctaatgcctggccatagataaaggcggatggtaaaacccaattaacggcgccgcagcaacaaca

SEQ ID NO: 5398 - DNA, 477 bp, Glycine max
  Clone ID: jC-gmfl02220072a12d1
catctagtgcgccaggtaattcgcggagtaggatgtgaggacgtctacctgcttgggggggggggggggggcaaatgggggaaagcaccgactaggggagcatgacaaaccaacgaactacgcgcctaggagtaaaaaaaccggaaaggcaaccaaaagccccacgttaggatatatgctgatgagtacgattaggtgtgctacctgatttgggaatgaagcttccgtgtaggcccacccagctggttgggtaataacgccggcagcagcagggtacccaaacccaaacacaaggaaaaagaaaaaaatgaccacagaagtaatgggggaaccaaccgccagctacatggccggcggaaccagttcggtgaagatgagaacccaacctctgccactgatgcagtgtgggagccgtagcggtagtgcaggtagcagtagcgcgaaggttgagggtgcttggccaggaccaagtaagtg

SEQ ID NO: 5399 - DNA, 501 bp, Glycine max
  Clone ID: jC-gmfl02220072b01a1
atttgggattgtgctatcaaaccttgaagtaataaacatagttgctccagcaccaaaaaggtccttggcagccaaattgttagtcaaccatgctgttcgggcttggaaatataagcatggtttcaaggctgatgattgctcatccatatgcttgatctcgaagattagcctgctataaccctatcctgatccaaagttagtgggaacaatagacatcccttgtagcacctgcatttttcataatcttgacatgtaaatactgatattgtagatatggccatagtatggtggaatcacaaagaagaatgggatgctcttggatggttctacagagcctactttgaatcatacattgcaatcacctcagtacctctaggagggcagaagctgatcactaactcagccagaatcttcccgaatccaaggtctagtgctactaacacgttaacaatcgtagggcctgaagattttgctattgcataatcccagaatatagcaatt

SEQ ID NO: 5400 - DNA, 519 bp, Glycine max
  Clone ID: jC-gmfl02220072b01d1
agatcgcgttgccgggaggtttgccgtgctagcatgtgtgcacgtcctccttcttgggggggggggggggggggggggggggggggggggggggggggggggggaaggaaactaaaagcaggaaagggtgcagatgtaaagttctagttaaaaaagcgtaataagatatttttttaaaagatagaggaggcctggtctgcgaatttcatgtacaaaaactttaaggggatgtaaaacaggtagtagtagtcgtaccaacccctgcatgactactgctaacaactgtactggtcgcggcggctgccctactgaaagtaagggcaatggtgcccccacttaagcttccacaggttataaacgctaacggaccagtattgctaacgggttgccttaaagacaccaaacctggtgtcaaaggccacagctgtggtctgcaaagtttagaagatgctaaaggtggtggttgcgccaacccaattgctgggcttggtatggcttgcggtggcatagtaattggcg

SEQ ID NO: 5401 - DNA, 144 bp, Glycine max
  Clone ID: jC-gmfl02220072b02a1
ctatttgatagttatatctgtattcatgttggtttatctcgaccttcttacaggtgatgagctttggtcagagtacttccgttacactgatatcgctactggtatgctgtgagatgttgatgtgaagtgtgtcggcaactgagc

SEQ ID NO: 5402 - DNA, 656 bp, Glycine max
  Clone ID: jC-gmfl02220072b02d1
cgctcgacctgaccagccgatttaccgtgctacatgtgtgcagtgccaccttcttggggggggggggggggggggaagagagaaagtaggggaagggtaggggagagtagggagagagggtgaggggatgaagggagaaggaaagggtagaaaggaaggataaaaaaaaaaaggcgaaaggaaggggaagagttagaggtgaaaaaaaacaaagcgggcaaaggcgtaagtgttgggcctaagaataataaaaatagtactaagccattagaggtggcctactcatggggcacaacccggcagaagactgtcagtggccggacttacctcagacttcagaataagtgtcgggtggcgatcattttgaagtaggagagtagacaaatatatggtggttggcgtaaagaaagataatgtgctgctgggtcgatatagtgtcggttttgttgtgctaaagaaggttgtaacaatatccggaagggctggcgtggtgcttattaggctgacgcttagctgaattactgtaggacagaatatagaagtatgcaggtggcatatacatatgacagggtgacgttgacaagtgaaaagggtatgaaggagaaggcaggcaatgcaactggctgctagcgtatccagttaacacgcgcacacaa

SEQ ID NO: 5403 - DNA, 535 bp, Glycine max
  unsure (1)..(535): unsure at all n locations
  Clone ID: jC-gmfl02220072b03a1
gcagtgtggtctctctcactccaactccaaccacagagacaacaaatacaacaacgttgtttccatgacaatggaatctgcgcttacagcttctaactggaaccgttctttgattcggattcgccacactaagccacgcttcggtgcaattcgccccacagcaatacggtgctccatcaactcgtatcgcttgtccaacctcactccctctgagcttcagagcctcaagagccgaccccgcatcgatttctcttccattttcggtgttgttaatcctattgtcgatgatgttcacaaaagaggggatgctgcggttaaagaatacacttcaaagtttgataaagttgaattggataagatagttgaggttgtctcggagctccctgaccctgtgcttgaaccgcctattaaggaaagctttgatgtcgcctatgataatanttatgcatttcatgctgctcagaagtcattcgagaaaaagtgtgagaacatgaaaggagtccaatgcatgagagttgcatgaagtattaactct

SEQ ID NO: 5404 - DNA, 596 bp, Glycine max
  Clone ID: jC-gmfl02220072b03d1
cggatgacgttgccgaggggtttgccgtgctacactgttgtacgtccgcctgcttgggggggggggggggactaaagatagtccagctaggaggttaaacagtattcataaaggacctatggcgagagcgggcggaggatacaagagcaagttagaggcggatagcaatggcaaagcctaatggtgactgatgaagattattgaaagtgaccgaagtgtcttaactaaagccgttgacatggcttaaaaatgaacactgacgactggataacacagaaacacaataagcacggcaactagtagtgtagtggcaaattgcttgcctggtgagcgatgcaacgtgtaaccgaatgctgtctggcgccctggtaaccttggtaatggtacttagccggctgatagagcctttaacttggtggacattggttgtgcacacacatgctatacggagcgatggtaccaaccacgttaagcatatattattagataggtggctagaattcgaacgaccaaccatagccgggcgtttatggctagaagtattaatatgtgtaccacgttaacctttggaacaatatacaattgctaggtgtaag

SEQ ID NO: 5405 - DNA, 512 bp, Glycine max
  Clone ID: jC-gmfl02220072b04a1
gtgatttcagtgagtgatcggtgttcacttgatctcatcataatcgtcagcgtcaattgaagaagatgccgatcagaaacatcgccgtcggaaggcctgaagaggcgactcaccccgacacgttgaaggcggctttggctgagttcatctcaaccttcatcttcgtgttcgccggctcaggctccggcatcgcctacaacaagctcaccgacaacggcgctgccacccctgccggcctcatctccgcctccatcgcccatgcattcgccctcttcgtcgccgtctccgtcggcgcctacatctccggcggccacgtcaaccccgccgtcaccttcggcgccttcgtcggcggcaacatcaccttcctccgcggcatcgtctacgtcatcgcccagctcctcggctccatcgtcgccttccttctcctggccttcgtcaaccgcttcactggttcagctttcggactctccgctggagttggagttggcaacgccttggtgttggagatcgtg

SEQ ID NO: 5406 - DNA, 517 bp, Glycine max
  Clone ID: jC-gmfl02220072b04d1
ggagtcagcccggtttggcgaattaagatgtgtaggagtgccgcctgcttgggggcggggggggaggggtaggggttttgggggacgacgtacgccgcccaactgccgtcacccgcgcctgcagaaacataattgtcgaaataaccttactcaggttattattcagcacacctttcctttacgacagttacgccggccgttaccgttactgtatcatactacctttaaagcgtatactccccggtagccttctgttacacaaccttttatttaataaaagcggactcttcataagcaaattaagcctcagcccactaagaaggtttaaaggatttggtggccccgtaagcctacggctcgacattcgcggtattacattcaagcgtagtatcagtgttaatattaacctcggcttaatggtaatgttactccacacgttcaagctgccaatacgccagctccgcatcaagcttagcaacacccaactcatcagccacttcagcactgccctcagcat

SEQ ID NO: 5407 - DNA, 495 bp, Glycine max
  Clone ID: jC-gmfl02220072b05a1
gtaaaaaggaaaggggaaggaagcaaggcaaggaaggagagtggatcgattcctcagcagcaccagacatttataaaagctctttcccttccctcaaatcgctcatactcttccaatcttttttttttttttttttttacctttctccctcgctcaataattcaaaacaaaaaagaagaagaagaaggttttcgcgatggcatcgaaacggatcttgaaggaactcaaggatctccagaaggatcctcctacctcttgcagcgccggccctgttgctgaagacatgtttcactggcaagcaacaattatgggtcctccagacagtccttatgctggaggtgttttcctagtcactattcatttcccttcagattatcccttcaagccacccaaggttgcattcagaacaaagggatttcacccaaatataaattgcaatggaagcatttgccttgacatattgaaggagccgtggagccctgcgctaactatttc

SEQ ID NO: 5408 - DNA, 530 bp, Glycine max
  Clone ID: jC-gmfl02220072b05d1
tgacgcagtcggtgatttgccgctgtacatgtgtaggagtgccgccttgcttggggggggggggggggggggggggggggggggggggggggggcaatccggaaaaaggccactagggggcaggccccctaatagggtatgcggtgaaaggaatagggctacgataaataataccacaaatcggggctgttaggaagtggtaatgccaccccttggaggaaaaatcataaagaggtagataaccctgcagaccttgaaatatgcccacgacaaacctgtggttggatataggttataccgtatggaatttagcctagagggtgcccgttactggtgcctacggcatgtcgatggcgggtgcgtgcgtggcgatagcgccctgagggaccccattaaaccagtagtaccaggacccgtttgcaattccccataaagccgcacttatatttggggaagggctgttgtgacgtgttatgctgttggtaagagcgtaacctaaagctggttaggctgagggagagggcccgcaa

SEQ ID NO: 5409 - DNA, 296 bp, Glycine max
  Clone ID: jC-gmfl02220072b06a1
gttgggttcttcttgttttcaaccttaattatcaattttatttacttcttattttggttatttattttttgctaataatttgattgttggaattgtcaatggtggaccctttgagccaaagtgttcatatttgaagttaaatcttttcaccaattggactgagactgcttacagtttcagaatttgtcagaaaaagcttgtcccgattgcatttttgttcctgtacgtactcttattgatacggatggcagcaccattggcatgtgtcgttgggagtggttcatctcatacagagt

SEQ ID NO: 5410 - DNA, 585 bp, Glycine max
  Clone ID: jC-gmfl02220072b06d1
gttatcgagagaatcttgccgctgctagcatgtgtaggactaccaccttcttgggggggggggggggggggggggggggggggggggggggggggggggggggggggggcggggggggggggggggggggggggggggggggaaatataaagggaataactttggtagaaatattagggcccacacccattttaagctttttaaaaatttttcccaaaactcccggggaaaacttcaaaaaaaaaaacccaggggacctttaataacccctgaaaccgcaaattaagttttttggagaaccccccctaaacccaagttttgttgggaaaaaaaaaaatttttcccccccccaaattccccaaaaaatgcccttttcctttttagggttaatttagcccccccttctttaatgcccccccccccctttgaaaaaaaaaaacttaccccccccaaaatttttcctcccccccaataaaaacttgggtaaaattggggaaagccccccttgtggggccttttcaaaaaaatagcgggttttattccctttggaatttaaaccccccgcccctttttttgcgacccccc

SEQ ID NO: 5411 - DNA, 289 bp, Glycine max
  Clone ID: jC-gmfl02220072b07a1
gttgggttcttcttgttttcaaccttaattatcaattttatttacttcttattttttttatttattttttgctaataatttgattgttggaattgtcaatggtggaccctttgagccaaagtgttcatatttgaagttaaatctttccaccaattggactgagactgcttacagtttcagaatttgtcagaaaaagcttgtcccgattgcatttttgttcctgtacgtactcttattgatacggatggcagcaccattggcatgtgttgttgggagtggttcatccata

SEQ ID NO: 5412 - DNA, 409 bp, Glycine max
  Clone ID: jC-gmfl02220072b07d1
caggtcggcggtttggcgtggtacatcgttggagtgccgcctgcttgggggggggggggggggggggggggggggattaaaataataagcgtggcaggtacagacgcactaatggcgatattagtagagggaaagagctcggggatatgggggcggggtaacaccatgaagataggacaccaaaatagacaaacaaaccaacgtgggaggggtgtgtgagataagggcgatttttatcgcagcaatggattaatggctaattaaatgcaatgtgatttttagaggaatggggggaacaaccttaaaaaaaaaaaaagctgtaggcatagcataccatattaaaggctaaaaggcactaaaggggcaacacaaaaataaatttgggcctgaaagggaaatgtggaacttg

SEQ ID NO: 5413 - DNA, 658 bp, Glycine max
  Clone ID: jC-gmfl02220072b08a1
agtatggttgattattgtagaaatgtaccaggtacctgtcactggcgtggaaggctagatagcgagagtaaaattgggcttggtcttttagtggtgttcttcggagtccgaagtcttcttcttaactgtcttccaagtgtgtttatcaggcagattctgtgtgtgttgcatgtattgtttgtaggcagtggtgttcagccctgaaacggctatccattagagctgtggtgatcggagagtccctcacggcttacttggttgaagggtgagccctaaaagttagggcaagtgacttacaggcagcaagcctgccatgagctgttgagttgtgtaggccctttgctggggcacaagctagctaaagagagacagcacgattgccacaactcgatggggggccggccggaggtaggcgtaaggctacattgactaagtgccctaccgtggctaccggtgccaaacacagcccaaacgtgaagcaacgtaaacaaagagttaaagtggctatcagccggtaaggtaagacgccaacaatagccgatgcttggaaagcaacgtatagtacgagagctgcctaaaaaagcaagcccgcaattaatactaattagcgtaaaacaatacgtacgaaatatgcagaaacgcaacaaccgcaagccac

SEQ ID NO: 5414 - DNA, 557 bp, Glycine max
  Clone ID: jC-gmfl02220072b08d1
ctatgggggatttgccgtggtacatgtgtggagtgccgcctgcttggggggggggggggggggggggggggggggggaataaacccaacatggggttaaggctgacgaaaaaagttacagagaagccgggctagagaaatagacgataagcgcagccgaaatagaaaacgacggttataaatggcggagttttaggattaatggggtgcacgcgcaagcgcccggagctgttatatacgggtaacagaaaaacaggatggtaaatggcgtgcggcttgattagtacccaggctagagagtataaggccggcgcacccctcaagcaacccgaaagtatattgcaaagagtttgggtgtgttacggctaagatagtgttatctgcaacagggtctagcggccacgtgttagagctgaaacgtgttgggggccgatagcccggaactatagtaagcaaagttgttgtggtaactgggggtgggcgaaggacagaagtaaatgttatgaagcgtacctaaatgacggtagtgagtgtaacgacttaacgcacgggtaaggg

SEQ ID NO: 5415 - DNA, 542 bp, Glycine max
  Clone ID: jC-gmfl02220072b09a1
agtatggtgtgactatcgtagcaatgtgccaggtgcctgtcaccaaactgtgacttaggcggcgggatgggttaggcaggcactcaaactgggcggggggtgctcagtaggggttaggcccgccaacaaacgtgtaattgggacgtcaaacactaaccagtgcacgcacgcactcagtagcgcgccgccgctcaggagtgttcatggtaggttactcccgtttcttcctcccctctactctcgcattcttcatagttgcgccttcaagggcaccaactccggtgtcaacgtctgctgccatcagcagggtcacctacccggtacacaaggtcaccagcatgtccaaagtcaccagcgtcagcagcaccatcagcaacaccaccaccacggcaacaacaacaactttgggcccggtgtgtctgttaataataacctgctggtgaacttgtgtgtgtcgccactaataatgcgcaaagtgcgccaagtaaacccctaactgcacaacgcgcttaacacaaacaacaacaattacgagtctccaa

SEQ ID NO: 5416 - DNA, 597 bp, Glycine max
  Clone ID: jC-gmfl02220072b09d1
aggcaggatgacggttgccaggaagtttgccgtgctacatgtgagcagtcctcctgcttgggggggggggggggggcaaaaagcctgccgtgtaaagtagaagtaaaggcttagaataagcaaaataattaacggaaaaatgcgaacgtaacatgcgagtttacattagagagaatagaaggcagaagttggagccatagtaaatacaaaagttttgcaaaatcaccgtgtggcacgggtatataaaccagatttgagaaaaattgagagagacgttgagatgctaggactgataacagaaagaaatgttatagagctgggaactaccggccggggtggctgcgccaggttagtattaatagtatcagtataaggtggcgactgggagggatagaaaaacccagagcaaccgcggtacaacatgttgcttagccaacctaccgtcgtcaactgttaaaccggtagacccgggttactactagttgcacagctagtggtatgcactaaacatcttaagctactagtactttagctggtagtaacaaaacaaccccgtgtaaacaatggtactgcccaggtaagcgtgctaactgttgt

SEQ ID NO: 5417 - DNA, 553 bp, Glycine max
  Clone ID: jC-gmfl02220072b10a1
agatatgcttgagctattctagcaatgtaccaggtgccgtgcaccaaccgggacaactcacaattcgtctccaaatcatccaacatctcctcctcatcaccgtcttcctctggagctgtcgtccaaaatgtagtcatccggattgtgttcacagactggttcatctcaagtgtaccttccacaacggtgataagggtcttagtgtctggtttcatcaccttacatgtggtcatcatccgtgtgattctcttcgtcagcgcgagtgtaacctatagttcgcccgggtccaacaccacacacacaaaagggctccaggcggacatgcgtacaactgcatctgccacctcgctatctatctcctctaaaatcacacctggttctgctctctccgccggtaccgctgcggtggtcactactggtactgatcatatcttagtcttccaatctgcagcctcctccaactacttctccacttgcgctcctacgtcctcctctgccaatcccaactccaacctcctccatcacaaccaggaccggacatggacactatcgc

SEQ ID NO: 5418 - DNA, 551 bp, Glycine max
  Clone ID: jC-gmfl02220072b10d1
gacgaagtgagctgccgggaagtttgccgtgctagcatgtgaggagtgcctcctgcttgggggggggggggggggacgaagggaagggtaactgtagtgtagaggggtagagattcaagaaggtcacaaacgaaacggaggagatgaggaagtaaggcaaaggaaaaggagccaaaaggaaacaaaaaaaaaagcaataaggataacgcccatttcgagcaaagggatgttaataagcaggtgtatcgcaccccaccaacgggactagccgcatgagatagcagccccagctgctgctgctgctccagctgctgctgccgcagcctcgttgggctcccgagtaatacttcggcatgtcgctcaagtataaattgcacgtggaaatggctaattcaagggttcctttagtcatctttggtaattattcctcctcttcttcgtccatggcgtaaatggcctcagcatgtgtggtagacaccaatatgtctcggttacggcagctatgtctcgttgtagctgagttagcgttaactctactattgcaggtgttt

SEQ ID NO: 5419 - DNA, 524 bp, Glycine max
  Clone ID: jC-gmfl02220072b11a1
ggatcgtgttatcgcgctatgtcgtgggaatgtgccaggtgctgtgcacaacatccgcaaaatgaataggggtaatgggaagataaggtacacgaaagcaaagccacaacaggcgcaacacacgcagcgacgcacgacgcacgcgaaataaccgggccgtgggctgctgcatcggtagtatgctaaccgggttctagggcccgggtgtgttcaggcaaaaaacgaccagcctgggatatgaaagggcgtgctgggtatggtgtattaagtgcagctaggtggccaggggggggggtgaggggaacgggctggtgttgaagcgcgagcacgccgggtccacggtatgcgagaccaagcgcgaagcccgggggagcaaacaaagtggggtgggggggcccgaaagaagtacacatttggggtaactgggactgacaggctgtcagtacaggggctgtgcccgaagatttacagtagcgcgatacggcatggtaagctgctaggggcacgcgggcagcaagatgggg

SEQ ID NO: 5420 - DNA, 514 bp, Glycine max
  unsure (1)..(514): unsure at all n locations
  Clone ID: jC-gmfl02220072b11d1
taatctggctgnccggtaatttgccgatgtcacactgttgcacgtccacctgcttgggggggggggggggggggggggggggggggggggggggggggggggggcggggggcccgggggggggggggggggggaaaaacaaatcccccacaactaccccttcctcccatttgtgggaagtaatttattttcccggaattttacccttgggggggctctaacccggttttcaccccccaaaatttgcttggggttccccagaataatttttgcaatttccaaaggccccttggccccttatttactttttggtagaagggcctaccccaatttggttggctttagattaatttttgggccaactgcggcccaaataagaaggggtttacctgtgtgtattccacataaaacaaacttgcgtggggcccttaaactttttttccccccaaaacatttccccgatggctcgtatcccattttgggctgcccggactttaacggggtgttaagctttt

SEQ ID NO: 5421 - DNA, 621 bp, Glycine max
  Clone ID: jC-gmfl02220072b12a1
gatcgagtgccgacggtatcgatctattgtaggaatgtacctaggtacctgtacactggggacactcaccgtgcaccagaggctcgcaacaagtgtttaaaacagcggccacaccatcaatgctcccaaggtggggttcccaaaccaccaagaagtattcagcgtaactggagctcgattaaacagccggacacgtcttaagggctcgggagtccagagtcgatgcaacagcaactgtaccaacttaggtcagagggtaagaaaaagggttggtccatagtgacaaggagggcgcaccgcctgtcaaactagccccagctaaagtggttgtcgttcgccacgtcataggtcaacaaccaacatcagaaacgcatgcttttccagggccacaaattggtgacactgaacccataaccacaaaaggtcaaaccgccgcggccgcagcagcggcagcatttatactggtaccaggggtggtaccgtagctacttgtcccggaacgtgaaaagcgccctcaagcagatcgtcaggcgcattaagcggcctaataaataactaagcttaaagaaccagaagcagcccctagtcgcgctaacgcagtacacgcctgtaggtcaacag

SEQ ID NO: 5422 - DNA, 298 bp, Glycine max
  Clone ID: jC-gmfl02220072b12d1
gcactctacttcacccagctaatcttaccctcctacatgtctagcactccctccttcttacccccccccccccccccccccgggcacccaccccccccccccccccccccccccccccccctccgccccccctgcccctttttataatactctatcaaatatcctttattcttaaccctccccccctcaccctctaccctcccctctcctctccaacccccccaccccccccacccctcccccccctacccccctcattcccccccaaaatccccctctccccacccccccctccccc

SEQ ID NO: 5423 - DNA, 573 bp, Glycine max
  Clone ID: jC-gmfl02220072c01a1
ggtgtttccatctcacagtgactagtctgtgctttgtagtggttgtggttggagtgcttccactctccttagatgcacaactagatccctcgttttacagagacacgtgtcccaaggttcactccattgttcgcgaagtggtgaggaacgtttccaagaaagatccccgcatgcttgccagtctcattagacttcactttcatgactgttttgttcaaggatgtgacgcatcagttttgttgaacaacactgccaccatagagagtgagcaacaagctctgccaaacaacaactctctaagaggtttggatgttgtgaacgacatcaagactgcagttgaacaggcttgccccggcgtggtttcttgtgctgatattcttacccttgcatctgaaatatcttctattctgggtggtggtcctgattggaaagttccattgggaagaagagatagtttaacagctatatcgaacccttgccaatcaaaaccttcctgctcctttcttcaaccttactcaaactaaagctgcccttgctgttcaaggtcttgacactactgaactagttgacttc

SEQ ID NO: 5424 - DNA, 458 bp, Glycine max
  Clone ID: jC-gmfl02220072c01d1
taatagtatctctcgagctaatcttcttcgctaatagcactgtgtgtacgttgctaccttctttggggggggggggggggggtaaagggacaagttgccaactttggttactgtaattaaccctagaagggaagcaaaggtgaatttagtcaggaggaaagggctagccccaaggagtcagcggagtattaaaatgcggtgtattttgggtaaaaggtaaatggagtaacggttagctggggaacggattggaccatgacattggaataaaaagaagtgaccgaaaagcacacgaaagaatggcaggtagaagcgtatggactatggaattgttgggaacctagagctaaacgagagcaagcggccagtactagtgttagtttggaacgagctagaacattaactaacgagtgagtaggtagctgtgctttaatagaagatgccaaaggtggaagtgg

SEQ ID NO: 5425 - DNA, 495 bp, Glycine max
  Clone ID: jC-gmfl02220072c02a1
cccaacaagccgacctctgcattgtccacatcgtactctccctcggattcttcgaacccgcgttcctcgtaacgctattgtttcttctcaatgcttcgatcaaaacgaagacaccgaaaaataatgacaagtgggccatcacgttcgtgctcctcacgtgcctcccctttgcgacgctccaggcattgctcatattctttgcccctttcgagaaccgagtgccggctgaaacctcggtggttctcaacgacggctacggcttcgagaccgtgctctgcgcgtacccttttctgagtagcgctctttttgctgtgtttggcgttacgtactcgacgtggttcttgttctcgtgttggagggttttgtcgcttgtcatcaacaaaggcttgaggatgaagatttacgtgctggcttggattgtgcttgttgcgattccgctgcaaattgtaacgttggggttcatcgttcggtggagcccgcaccaggaggttcacg

SEQ ID NO: 5426 - DNA, 575 bp, Glycine max
  Clone ID: jC-gmfl02220072c02d1
gagatcgacggtgccgagggatttgccgtgctacatgtgtgtagtaccaccttctttgggggggggggggggggggggggggggggggggggggggcagcacggcacacaaagcaccacgaacaactgagaggtggatggcagaaaaggacagaagttatcgacaaagcgtatcagaacagttaaccgggttctaaagaatcaaattttacataaagggtttattgtattctgggtgggtccagcagcccagaagtaaaggcagagcaataaagcataaaaatactgctattgaaaggaggaatggaggtctgcagagggttatgggtggaatgttagggttggcgtaatggtacaaggggtacaacttaagtgtgttggtaaggcagctaggggactgcacccgcgggtacgccaaaaacagttagtattaggggttatgcccatagtagtagagggagggctatgcttagagttaggctgagaagggctaaacttagggcagcggaatggctagggacgatagggggagccttgcaagtgggttggccaggggcgaagttatgcaaatacaac

SEQ ID NO: 5427 - DNA, 298 bp, Glycine max
  Clone ID: jC-gmfl02220072c03a1
cataaatttccctttaagcacttatgagaaggaacttgaagagatgaagcacatgaccaggctagaatttgtcgccaatttaagaaggaagagcagcggattttcaagaggggcatctgtgtatagaggtgtgacatgacaccatcaacatggaaggtggcaggcccgaataggaagggttgcaggaaacaagacacaccctttaggagagacccacaacatatcaatcccgcatgattatatgactatgatacaccttcagaggggtgaaaaaagaaatggaaaatataaataaata

SEQ ID NO: 5428 - DNA, 554 bp, Glycine max
  Clone ID: jC-gmfl02220072c03d1
gagtgggtgccggggatttgccgtgctagcatgtgtgcagtgctgccttcttggggggggggggggggttagggtggggggtattttgtgcaaccgcgagtagacgtagagaagtagctcccaggcagagcggcgcccgtgtgttgaaacccgcgcgtggcgggttgctaatttggttgaggtcccttgcttattggttagcggcagccgcgtggcgtatattgtgagatatacagcttttgtggcaaaagttctgctgtggttggtggaaaggcctcataaaggtggcttgccgtagcgctggtagtgtggtaacggttggtgtagaacgctggaaacccaaagggagctgtcacttcaaggttcactggatcgatctcgctagctcatcgtagactgtggtgagacgcgtattgaaaggtaaggtatgccttcgtcagggataatcgtcgcatgcccaaaatttgcctcggatttaatggaagtcttggctactatagtttttgggtcttactgcctcgaagactcaacacctttctattcagtctgtgggt

SEQ ID NO: 5429 - DNA, 471 bp, Glycine max
  Clone ID: jC-gmfl02220072c04a1
ctggaatgttactagagaagtcagtagtccatccagtagaagtgaccaatctcgcaatgaagataaatgacgataacgtatattccttaaccaatgataatgtgacaatgtcaagtgtggaggagcctaagccaaaggaatgtgatagtaaaatgttaacttcaccgtctgctagtcctttcactaaatttaccaatggtaaagaacatattaaggattgtaagactgcaaaatgttctgaaaatcagcctcatgtagcattggctccaaatttggtgcaaaagacctcctggttgagttgctgtggattgtttgaagttctgtcaagttcaaatagataatttcagaaatacaagatacaagcgtcaagcgtgagtatctcaaatgatgggtcaaacttgtgaagatttagaagaattttgtgatattctgatttagattatctactttaagcttttcaaaatatatagc

SEQ ID NO: 5430 - DNA, 584 bp, Glycine max
  Clone ID: jC-gmfl02220072c04d1
agacaatgggcgatttggccgtgctacatcgttagcagtgccacctgcttggggggggggggggggggggcaaagatgcaagatgcggcggactgataagagatggtaaataaatcgacgcagaaataaatcggcgagcgaggagatacgggccttgccggcttgctgagagaggggcaaaactggaaaccacagaagtgaaagtaaaagagtataaaaggtggtgaaagtggtataacgggcatttagtagggcacagatgtatctggcatctggcgagtggcgagggtgcaaaggagtgagggcaatggcatacaatggtaaataagttatactaatgtaattaccaccgtggggctattaaagggccacttaagctgatagcacctgcaggggtacaataggggctacgtggataagttggaagagcggtgggattaggccgaaagggacgcaaaccatgactacatccgcaacggaataggggatgagtataggttgggcctggaactgttgttatatggcataggcgtataggagtaggcccgaagcaagagatcggagtcgtagggagtggtaggctc

SEQ ID NO: 5431 - DNA, 430 bp, Glycine max
  Clone ID: jC-gmfl02220072c05a1
cattgttgtaggttgttgattactatagcctgtaaaattcgatattctaacctcgtgaggggaatgagatcggccgtgtgtgagcgagcttggctggtaaaggcatgggtcctgtcatcgaatgcaagttgacaactactgcctattgcgttgccgtgcggcatcacgatcgtgtcgagatcatggtcaacgatcagggtaacagatctaccccatcctacgtggctctgaccgtcacactacggatgatccgtgatgcggcgccaaaccaagtcgatatgtaccctgccaacaccgttatgaatgctatgcggttgattggaaggcgtatttccattgcatcagtacactgtgacttgacattgtagacgttcaaggtgattccagcccctgctgcaaaacctaggatcgtggcgaactacaggggggc

SEQ ID NO: 5432 - DNA, 460 bp, Glycine max
  Clone ID: jC-gmfl02220072c05d1
ggatcagacgacttggcgtgctacatgtgtaggagtgccaccatgcttgggggggggggggggcagctgcaatggacaggagccggtaacgacaaataccccaaaactatagcccagaaagcgcacaaaacgcaaagactaggtagattagaagcatatctgcagagggaaatggaacaacccgagggcataaaagtaacagtcattcagcacaagtggttcatggagccacggttgtaaggagcccgttacgcttcagggtatgcttactgcagccattagatggagatagcctgttatttcaagtattagtactagcttgccaaatagtgctctgagcagcccaggataaagctgtgataatgatagtaggggagatgcaaagctcgtggatgtagtaacggccggtatagtgacttaggccagacttgctctaagaccagtgctaagccgtggagga

SEQ ID NO: 5433 - DNA, 250 bp, Glycine max
  Clone ID: jC-gmfl02220072c06a1
ctcacagatcgttccattgaaatcaagggatctaaacttcaatggtcatacaagaggtatctaatggccagagcattagataaacactcctatcactatagaaccaggctgatagcattcatagaaccctggcggctactgctctaaagatgatagatccgtgaccagtaagtgctaaccattcacaaggtctacgatgggtcgccacgacaaaaccacttgctgagatatatgtttgacatacagataa

SEQ ID NO: 5434 - DNA, 497 bp, Glycine max
  Clone ID: jC-gmfl02220072c06d1
ttaccagcgatttggccgctgctacatgtgtaggagtgccgcctgcttggggggggggggggggggggggggggtggggggggggcgggggggggcaatgaggtggacctgggaaaagagcttggagacaagccccaagaaaaagggtatcttctacacgcatgatgagggataggcgggaccgtgaaaaggcttacaagtgaagaccggtatgagcacggagttgactgagggacatacgtaccgaccgtaaatgataaggccaggagtagagatactataaccagtggggtttaaaagaccaggcttaaggtattaattgttgccacgaatctcattagagcagtggtgtaagccgtttggagtaagggtccccaaaatgccagtagttggccgaaatgggtcactaaaatcgctattatgagccattagcgcagtaaaaactgctaagggtagcaacatgccagctgcaggccctcccgccaattattggagcg

SEQ ID NO: 5435 - DNA, 404 bp, Glycine max
  Clone ID: jC-gmfl02220072c07a1
tgactcatttagcttcgatcgtatcggtagaaatgtagccaagtgcctgtacaccgttaaaccgtcagggggatggcgcgtgaaacgagggtgagcgaccgagacaggtaaaagagtgctattgtcggctttggaggtactgcgtgcgtgagcggaagtgtgtagtggtgcgcttaaatactgttagcacaggtgcaggcgaggcgtgcaagaggagcaattgcaaggcagctacaaagctagaagctacaactacacacaaaacccgacaaaactggaacatagacacccaaaatgggctggagaggtgttgggggtttggtggtgagatatgcgatagagagatcgaggagcgcctgtgtgataccataaaactaatgaatacaagctggtacatagctaga

SEQ ID NO: 5436 - DNA, 515 bp, Glycine max
  Clone ID: jC-gmfl02220072c07d1
acgtgagcgagtgcgcccccaggtaacttcgccgagttacacgtgcgcctgcttgggggggggggggggggaaatacggcacaaggtacggaaaagttaactgcctagaagcttaaaacctcgggggaggatagcagaatcagaagacagactcgaaggcggagggaagctgccgttatagtgcgactacataatagaccggaaaagcccgcgagttaaacggaacggatggcgagaccaacctaatgtacctagctactggtggaattacgcggggctagcttactagtaaggtttggtaggcgtaaaagaacccgagttgttacattaccactagaagtatggcgaccctgcacgggtataactgtactgctgcctggcgtgcaggttagcgacgtgggccataaagcgccttgtaatggtatagccgacgtaccagtatcaaggtctggtaagcgcgaactggctaccataggcatccggcgcagcgagcaagtctcaacgtcaacgtgggc

SEQ ID NO: 5437 - DNA, 545 bp, Glycine max
  Clone ID: jC-gmfl02220072c08a1
tagtcggcgtgatctatcgtagaaatgtgccaggtccgtcacctagctggcgacatccgacaagctgtacgcaacgccacacctgactaacagtgtggtaaggctttcaccagcgcccggatatggcgcaaatgctcccagatggggccggctggtagcgggaggtatctgcccactacgggtggctgctggcgctgcacaagaaacacaacgtaatagggcggtcacagtcggggtttggtaaacacggtggtgagcagatattatagttgcgagggataccgcacgtggggcacaaacatagctacctgctgatccccgctgggtcgtagtggaacaatagcgggtaacaatggcaacacgcgtccctaggtcaaggatggaacgtaatactgcagaccctgaatgatggaagcattaactacctgaacaggcgcctaagcatggctatttagctactgtgaaacaacaaacagggttgttacggaccgggtaacgagcataatggctgaagccaacaaacgctttaaaggggacaaaggcac

SEQ ID NO: 5438 - DNA, 554 bp, Glycine max
  Clone ID: jC-gmfl02220072c08d1
cactagacttaacaccaatttaccctttacacgctgcctacttgggggggggggggggggccatgggggggggggggggggggggggggggggggggggggggggggcgggggggggggggggggggggggggaagggagggggggggggattccaaacaaacccccaaaacccaaaaacccccccccaaaaaaaatccctttaaatccccctttaaaaaaaaaaaaattttttttttccctttatagaaaaaaaaaaacccccaaaatttttttccccaaaaacccccaccccaaaataaatccaaaaaattttctcccttttttttttttccccccctttaacccccaaaaaaaaattaaaacataacccccaaaaaaaccccccggaaaataattttattttcccttttatagccccccccccagtacccccccccccttttagcccaaattttttcttgggaaaaatttcccccaatttgtttttccccccgaaatttccctttaaaaaaaaacccccccttttttacaagaaccccccacccctttttt

SEQ ID NO: 5439 - DNA, 595 bp, Glycine max
  Clone ID: jC-gmfl02220072c09a1
tagatatggtgtcgatctatcgttagaaatgtaccaggtacctgtcaccaaaatcacaacaaagcgagtacaaataggcttagtttgctacgatgttggcgaagatgtaggggcaggtgagttgtgcgtggcggttagtggtaacagcaaacaataaagttattaccgttgaaattttgtttaaggaggccgaattggtatagctgccccaaatgtttatagtcggtttggtaactttggcttaaaaaggagccatttagaagcggtagaaacggcccataacgtttaattcggcgacgggttgttttgcaaatgctacactgaggttgtaaaatttagcatatgagtgggctgactaccttaaaaatgtgactggtacaagatagcgtggagccaacgaacccttgactcggtgtgcacgagccatttgaggcctcgaatcgcaaaaacggcgctattatataatggtgcacgctagtaaaccgtcacagcggtctgttaggcaacaaccaacacggaccacgagggcgcaacgtatgtcaaaaactactacttgtattcgcagcgcacaagtgcaagcaataccggccccact

SEQ ID NO: 5440 - DNA, 525 bp, Glycine max
  Clone ID: jC-gmfl02220072c09d1
gcgtgagctgccgggtaatttgccgtgctacatgtgtggacgtccgcctgcttggggggggggggggggggggggggggggggggggggggggggggggggaaaaacgtaaaattgggcagggcaaaagtgcacgacaagtaagagagaaagataggaggcaggggataagcatgtacatagaaatagtgacagttagttgaaggttgctaagaacaactgtattaagttgaactacctaagggaaaaacagaaacaatgaaaagcaagggggtgaaacagaaagcaattagggcagtgggaggggagggggggtgatgtaagtcaaaccatttggagggaactgggcagaaagacctcagaacggccgagactgactaaccctggctggtggccgacgcaaaccttaaagagtgtatgtagagtgaacgtagtaccacatatattaaagccaactgtttaaggcaactaagctatgaaggcacttaaaataaccttaaagcgccgtagatttaaggcaagttta

SEQ ID NO: 5441 - DNA, 633 bp, Glycine max
  Clone ID: jC-gmfl02220072c10a1
tagttatgttgtcgatctatcttgtagccaatcgtaccaggtacctgtgcacggtgacgtgtgacacggggcacctggcaccaggttacaatcactcattggtggtcgggtgtctaaacgggaacgtagtagcccgaaccaaaacatgtatagtaataggcgtcgtaggccatagcgtcatgtgccaacgtaatgattatgccgtagggcagtgataactggccaccgaggcataactcgcgcaggcacaccggtcacaaccacctgctgcacagcaataacaccgtaggtaacgagcttgcccgctggcataactgtaacctgcactctcaaacaccaaggattaggcagaggctgggcgccaacgggcaaattattaacgatgatgctatacgtagtcagctttttccatagtcgcatgggagtaacaatagcaggatgccgattgtttacctgcaggcgctgcgttggagtaggcatgttattatgccgccggggcaactgccgagggtgaaccagccatacatgtcgcactagctgtggtggctgggtatttggccgcgcaactacagcagtgctgctgcgaatagcagccagcttatgattttcacgatgtgaactgaccgagcagca

SEQ ID NO: 5442 - DNA, 612 bp, Glycine max
  Clone ID: jC-gmfl02220072c10d1
ggagtgagttgccgggagatttgccgtgctacatgtgtggacgtctgcctgcttggggggggggggggggagaaaatggtcggagaaaggaaagctaatggaaaatagtttgtactactaaaccaaagccatgaaaatttgagactgctggcgcaaaggtcaaagagtgtacatgtggtggattagtaaaataaaaaatacgatgtagtaaaaataaatactaagcaaaaggcattattcttcagtaacaattgacggggcaaacggatcctgatagcaaagtcctacaaatggaaaaagagaatggaaataaaatattgaacatgtgctaaccagaaaatgatgagaaaccacgaattatcagcagcagtatagcgctgactaaaaggctttaaagctaagtatggtggtggcctactccttggccgcattggcctgttccaccccgtgggtggtgtaatatgtggcagcatgttcatacttatacgggcatctagcgtttgtatactaaaatcattaaccccaccagatgtacacaaacgggtaattattagccctggccggccaagtagtggaattagattgctagtattaggtggtaaaaagggccct

SEQ ID NO: 5443 - DNA, 605 bp, Glycine max
  unsure (1)..(605): unsure at all n locations
  Clone ID: jC-gmfl02220072c11a1
taggtatggcgtcgatctatcgctagaaatgtaccaggtgccgtgcaccttgcacaaaacctattaaccggggggtagcatacatccaccaacaatgtccggactactagtaggggatgtgtgcatccctaccagatagagatacgtaagactaccttgaagcgtgcaatacaggattgcgtatggcggttaaatgttaggtagtcgaagaatccgatccctagctacagattacgctagctagggccggggcctgtgcattagcagctgatggtaagctaggtaagagtgcacagagtgccaccgatcggggtgggtaggcaactgcaccagcgtaggtaccagctagggctatacgcgaggcccccatgtggcacgcgccgccactaacaaggataacgataacggaacgcgctgtatttgcaaggctaatggacggtacgaaaactagcaacggattaaataactggcagccccaaggctacatgcctgatgagtacgcgatcacaggtcgagctgcaacaccaaacacatgggngccgcatacggcagcggttacagcagtaagtcacgcagcacatcgtcggcagcattcgcacagcgtg

SEQ ID NO: 5444 - DNA, 486 bp, Glycine max
  Clone ID: jC-gmfl02220072c11d1
cgggtcgagttggccagcaggtttgccgtgctacatgtgagcacgtccgcctgcttgggggggggggggggggggggggggggggcggggggggggggggggggggccaactaaaaggggggagtttagagcgagggaattaacccagcagcaaagggctttctatagggcaacccaaaatatgtccggagccttagaatgtatgagtatctgcaaagaggatattgcctttggggtatatggtagctgagctattagttgagctagggatatggggtaagagtgcccaaaaagtaccaaggggcagtattgaaaatggtggttgggtcaggagattttactggcttcaaaaaccacaaaagtattaaccattagacccgaaactaacagagcataaaatgccaaacgggctttaatagcgggtgctagaccttaacggaaaggggttaaatgtcggcgggagccctggattgcttggggaccaaa

SEQ ID NO: 5445 - DNA, 519 bp, Glycine max
  Clone ID: jC-gmfl02220072c12a1
cgatgacgaggacggtgcgactattgctagaatgtccaggtccgtcacagcgggtgggccggaagcagagcgcagagcatggcgaggttagaaaagcggccgccggaataataataggtagatcttgggggacttaaacgatcgcaagattgaagggcaccggccaatttgcaacgcaacaccaaagaggggtgcagccttgtggttataaaaaaacgcaaaatgagggccaggctagtaaaagccgccccgtggctaggtagaataaaaaaatggggcaggcgggcgcgcgctggctcgagctagcgcgtagcgcgcgaaaccaggacacggacattggccgcgacccaacccgagctgggacgccaaggtcagttacccggaaataagtttgccaaacaaggccacgtctggcactgaaacgcagcgtgctgaaacacgcgcggacaggcgagggatagcgtggtttagggctaggggtagactttggctgggtgacgggtaggcatggagcgcggt

SEQ ID NO: 5446 - DNA, 565 bp, Glycine max
  Clone ID: jC-gmfl02220072c12d1
agaccgtgagctgccggggattggccggttacatgtgtggagtgccgcctgcttgggggggggggggggggggggggggggggggggggggggggaaggtaaaaggtggagaaacggtaggaaaatagcaataccaatacccgtgacgataacggtacgatagcgacacaacgaggactaggggtgatcaccacctgaacaaacacaacagcatataaaagttaaaataaactgttagggaacttagcttgttatgtcggctgcgttgcaggagtgccaacacactgaagttaacaaaccacaatatagaacgtaagccaatgacaaactaaccctgagcaaaagctaaagcccaacatagcgaaaggtaagggaatatatgttggagtacatagtattggactgtaactcatattaaggttgggtacccaggcgggaatttgccagtcaaggttatgaaactagatttgggttgatattaaccgtgaatgtgaagttgggatatatagcatatagctagatctagctatatataaatagataaaacgggggggcggagcaagct

SEQ ID NO: 5447 - DNA, 547 bp, Glycine max
  unsure (1)..(547): unsure at all n locations
  Clone ID: jC-gmfl02220072d01a1
attaaacccctccaactcatcctcccctttctcacagaacctcctcctcacagctccaaagccacaagcctcctccgacctccccgaaggcaccaactggcgctacagcgagttcttgaacgccgtcaagaagggtaaagtcgagcgagtcaggttcagcaaagacggttccgccctccagctaaccgccattgacggccgtcgcgcctccgttattgtccccaatgacccggacctcatcgacatcctcgccatgaacggcgtcgacatttccgtcgccgagggcgaatcccccaacagcttgttcaacatcataggcaacttgctcttccccttactcgcattcgcgggcctgttcttcctcttccgcagagcccaaggcgggcccggcgggcctggcgggctgggagggcccatggacttcgggcggaacatgtccaagttccaggatgtccccgagaccggcgtgagcttcgctgacgtggcangcgcggaccaagcgaagcttgaattacatgaggctgctgatttcttgaagaatcccgat

SEQ ID NO: 5448 - DNA, 573 bp, Glycine max
  Clone ID: jC-gmfl02220072d01d1
gaagtgcgttcccgagtagatttgccgttctacactgttgcacgtcctccttcttgggggggggggggggggggggggggggggggggggggggcagcacggcccacaaagtcccacgaacaactgagaggtggatggcagaaaaggacagaagttatcgacaaagcgtatcagaacagttaaccgggtactaaagaatcaaattttacataaagggtttattgtattctgggtgggtccagcaacccagaagtaaaggcagagcaataaagcataaaaatactgctattgaaaggaggaatggaggtctgcagagggttatgggtggaatgttagggttggcctaatggtacaaggggtacaacttaagtgtgttggtaaggcagctaggggactgcacccgcgggtacgccaaaaacagttagtattaggggttatgcccatagtagtagagggagggctatgcctagagttaggctgagaagggctaaacttagggcagcgcaatggctagggacttatagggggagccttgcaaatggtttggcgaggggccaaagttatgcaaataca

SEQ ID NO: 5449 - DNA, 529 bp, Glycine max
  Clone ID: jC-gmfl02220072d02a1
gtcaacgtggttggagttgttggaccaggaaaggaaacaataactcgtaaggtttatgaggtaattgccccaagttttcctgctcattgctttcttcctgatgtgggagaaaaaattagggaacatgggccggaatatctccaaaacatgcttgggccttatatgcttggaaattcccaggaaggagtgccatttataaggcatgagaaggttcttgcagttttggattgcattgactctctggattcgttgaaagctgctcttggacttactcctcgctttgctcctggaagtcaagtcttcattatagctccagatataactttgcttgaaaataatggaattgaaaaggtatatgaagtaaaggggttagacaagacatcggcttatcaagtgctttgcctagaggctttcagttccatgaatatgagtttcaaatacatggacatcataagccgtgctgaaacttgtgctgatggcaatccttgtgctttgaaagctattggctccagttttcgtggaaaaacaa

SEQ ID NO: 5450 - DNA, 603 bp, Glycine max
  Clone ID: jC-gmfl02220072d02d1
cgatcgagttgaccgggagatttgccgtgctacatgtgtgcacgtccgccttcttgggggggggggggggggcaatagcacaataccggtaaggggtagagcgctaagctaatagaaaacctaagctgcaagctaaggctacgtaagaagcatgagcaggtgggaacatggctgtggcggttacgctagtgcgagcggggctgcggtaaggttgataagtgaaatacaatacgggagtgggcttaagcttaagacgagtaaacgaataaaaaataacaaacaaaataaccccgtaacgagtagcagtgtagacagtcagtttgtatagtaggtaaacgagccgggaggagaaactaagaagaactgtgatatacactactaggggccacgtagacagatagaggtagtatggttatggtggcaagttattagctggcttcaatggcttagctgggttagctggcttcaatggcttagctgggttagctggcaatggattcgctttcgctgctggcaaggggttagcgcctagcgcactattagcgctagaggccttagagcaattagcccacttagcacacatagccgcactattagaactac

SEQ ID NO: 5451 - DNA, 528 bp, Glycine max
  Clone ID: jC-gmfl02220072d04a1
ccaaaatcaaatcacccaaatccacatcagaaccccattttcttcacactcagaatctttcttggtctttttcttgaattcaagtaccaaagtttgagtcttttccgactttggttgaaccccattgaaggagccgcatctgggtgttcgtgtgcatgcgggttttgccaaatctttaagcttttccccattctgctgcgacccaattgatggaactctaatgggttccttggaatcagggatctcattgaagaaagggagcttgttcggttctcagttcagcagaaaagagaagaaccctttttctcacaggttcagatcgagcttctcgaggttgctcttcaagaagctcgattacgtgcaatggatttgcacggtggtggtgttcctgtgcttggtcattgcgttccaaatgttcctgccagggtcggttttggaaaactccgatgaggggtccttggaagctgtgagaatgccgtctgataatttgctccaatatggagacattcacgattgtgcgttggacat

SEQ ID NO: 5452 - DNA, 551 bp, Glycine max
  Clone ID: jC-gmfl02220072d04d1
ctgactgtcgggaatttgccgtactacatgtgtggagtgccgccttcttgggggggggggggggaccgaagacttaaggcacgagagggggtggtggtttagaactgagaggtaaagatagtaggactgcaaatgctacgacgccagtgagggggggcacaagcaggtaatgccgctgtcgagggagtgaaaaagcgcggctggtggaagctgtgaggggcagagcgtagagggccaaaactggtaaataaagcttatgcttaggcggtgggaaaaggccccctgagggtgcaaatacttggaccgccacaaattgtacagccaacttgcacaagaggtgcaactaaacagctagagttagtaaggctggtgcaacttagaacaggtgggctgcgctggtgtttgaggcacctaagcggctaacttaacccgcagaggggtttggggcacagtatggtgaagaaaagggcgtgtacaatgtgaagaggagttgggcccaaaacaggcttaggtatttgcgtagtaatagaggggtgcagtagcccaatagt

SEQ ID NO: 5453 - DNA, 381 bp, Glycine max
  Clone ID: jC-gmfl02220072d05a1
gttgtggccttagcaatttatgttaagagaagaaagtgctgaaaagagaaagttgttatccacatgacaacgtcatcaacattacacaaggcgcagggtggtctctgcgatggcaacctctttctctccgacagcctctgtcggctccatcatcttccaaaaccctcccaaaggccttcttcttctctcccagcagcagcaacaacgctccttcgcctcttctgcatgctatgcaactctctagctccctcgcgccttcgcactttctccaagtcccctcctttccaatagggagaacaacacttgtgagggctgctactatcgaagacattgatgccgaaattgccgcaactgatatcgatgctgtattaaactactctc

SEQ ID NO: 5454 - DNA, 395 bp, Glycine max
  Clone ID: jC-gmfl02220072d05d1
agacgatgggggatttggccgctctacatgtgtaggagtgccgccttgcttgggggggggggggggggggggggggggggggggggggcttaggggggtttgagggagctaggaagcagagggggatttgcccggaaggaaagggcaccccaagcaggaatgatgataaaagcgtggatcaggaaaagtgaatgcatgtcatgaacggtaaacgaatgggccatacagtgggacaaacaaaatgaccccaaatcataggacagaatgtcccattggagcatttggtgtgtggaattggtcgaaacctagggctaaacttgtagaagcggctattattagtactagttggcaaacagctaaacgttaagtacctcgaagtgctaatctgtggtctt

SEQ ID NO: 5455 - DNA, 482 bp, Glycine max
  Clone ID: jC-gmfl02220072d06a1
gaacggcaattaatttacaatggccgtcacgaaaagcctctcaatcttcctcttcatcgcaatgagctgcgtcgccgcagctcaggcagcgaacttcaacatcacaaataactgcacctacacggtgtgggccgctgccgtgcccggcggcggcgcaaggcttaaccctggcgaatcgtggaacatcagcgtgacgaacggcacaacaggaggacgcatctggggtcgaacaaactgcaccttcgacaacgcgggacgcgggaagtgcctcaccggcgactgcgagggtgttctggagtgcaacaaaacaggtacacccccgaacacggtcgttgatttcgcgttgaaccagtataacaacctcgacttctacgacatctccctcgtcgacggtttcaacgttcccctacagctgaccccgacctacaactgcagttccgttaaatgcgccgtcgacatcatcggagagtgccccactcagc

SEQ ID NO: 5456 - DNA, 554 bp, Glycine max
  Clone ID: jC-gmfl02220072d06d1
catgccgtcagcgatttggccctgctacactgtgtaggagtgccgccttcttgggggggggggggggggggggtggggtgggggagaggcggaagggggcatagatgatctgggaccaagcttaggacaagccccgagaaaaagcgtatcttctacacccatgatgagggatagccggatccttgaaaaggggtacaagtgaagaccggtatgaggacggaggtgactggtgggcaggcgaaccgaccgtgaatgataaggccagtggtagaaatacgataaccagtggggtttaaaacaccaggcttaagatattaattgtttccgcgaaacgcattagggcaagtggtgtaaaccgcttggagtaaggggcggcacaatgccagtagttggccgaaatgggccactaaaaccgctattatgagccattagcgtagtaaaagctgttaagggtaacagcatgccagctgcagggcctcccggcatttattggtgcggatcaaaagtagcaggaagccagcccggtgcagaccttgtagcaggctgaagcattc

SEQ ID NO: 5457 - DNA, 460 bp, Glycine max
  Clone ID: jC-gmfl02220072d07a1
gatccgtggacgagcacgactaatgtccggtccgtcacctaacggcgacaccgacaagccgtacgcaacgccacacctgactaacagtgtggtaaggctttcaccagcgcccggatatggcgcaaatgctgcaagatgcggccggctggtagcgggaggtatctgcacactaccgatggctgctggcactgcacaagaaacacaacgtaatagggcagtcacagtcggggattggttacacggtggtgagcaggtattacagttgcgagcgataccgcacgtggggcacaaacatagctaccatgctgatacacagctgggtcgtagtggaacaatagcaggtaacaatgacaacacgcgtacctaggtcaaggatgcatcgtaatactgcagaccctgactgatggacgcattaactccctggacagtcgccttagcatggcgatttagctacggtgaa

SEQ ID NO: 5458 - DNA, 497 bp, Glycine max
  Clone ID: jC-gmfl02220072d07d1
catgactgtccagtaatttgccgtgtctacatgtgtgcagtaccaccttcttgggggggggggggggggcggtaggggggggggggggggggggggggggggggggggacctagagcgtcgggggaggatagcgagaatgagaagacagactggaaggcgccctcaagctacccctatagcgcaaaaacatgatataccagaaaagcccgctagttacaccgaacggaatacagaccaacctaatatacctatctactagaagcgattacccgcgacaagctaactactaagatttcaaaggccaaaaataacccgagaagtttcattaccaatataattatggcgaccctagcacccccataactgtaatgcagcctaacccccaagttagcgacctgggccataaatcgacttgtcattttatagccaaccccccagtatcaacccctggtattcgcgacatgtcttccataggcaacctatcccccaaatcaag

SEQ ID NO: 5459 - DNA, 448 bp, Glycine max
  Clone ID: jC-gmfl02220072d08a1
gcagctgagacggacggtatagctagaaatgtaccaggtgccgtgcacagagcccggatgcctaagcaaaacggaggggcataagtggaaccaataaaatgtagccatatggtgtggccgcgtgatagtaacaaacacatccaaagaaaccacagagaacgcacgcagagcaatcccccaccgcagggagagaaagccgcagcaagagcagacaacaaacacacacaaaaaggcacacgcgtaaggactgcggggcatgcgggaacgcggtagaaagtactaggttaacaaaaaacagtgggccatattgtgatgccacgtgatattaacaaacacagcacacagagcagaccgaagcgcagcgaaggcaacacacagacacccaaaggaccacgagtaagtaccggggacaatgcggaccgcgggagaaagggatatgctgggacgc

SEQ ID NO: 5460 - DNA, 555 bp, Glycine max
  Clone ID: jC-gmfl02220072d08d1
ctcggcgagtcggcgaagtttgcgagtttgccgtgctgcatgtgtggacgtcctcctgcttgggggggggggggggggggggggggggggattaaattatagagaggtgagaaggtagttggggcaccaactggcgagaaaattaaacagacgcgagctacggttgagatgttgcctgcaaaacacagaatggagaacctaaaaatgaaaaagaaagaaagaaagaagaattagactaagccagataaaaggaacttataacttatagcaacgaccggcgttaaaaacgcatgctaatgcaccttaaaatagagccttagactagcagaatacaataggtattggtattactgttaaataatgctctcagccgcttgagacttaggctaccgccaacgctagaggcaaccacaactatagatgcagataacccagtgccggctattaagtttaaggcccggctgttgggaagaatgacaagatttaaaaggcctaccaaaagagagtcaatgatgagaaggttgagaatgcgttaaagccaacgagggctgtttg

SEQ ID NO: 5461 - DNA, 623 bp, Glycine max
  Clone ID: jC-gmfl02220072d09a1
taggtatggtgtcgatctatcgctaggaatgtaccaggtgccgtgcaccggggtttagtgttgtcactggtaggcacaaactgagtaggcccggtgcgaaagtaagataggagcggaagcttggtgcttggagagcgagttagccagtaagagtggtaaccgggcgggaggtgtctgaagcatttgcggctgcaacgatccaacggccgggcgctactagggcggtactgaaggcaacgttctttagtgggtggccacttatagggatccaagcgcagacaagatagcggataacgtaataaccagatacagcagcaacgactttggcaacttgcgcaaggggccgtgctggaggcgcagctgtaatgcttattgcaaaatggaacacaaggtggcttttcgtggaggttacgaggcagcataaatagcctggagctacagcagcagcaagtactgaggcaactgcaccaacagccggtgtaattgcagtcacagtaccagtggaaattgtcagggtatcgagtaacccgggtagccagtccagcaaccgacacatcagcagcatcagcggcgtaatatagcctagggatgcaaagctacgctactgctgtggcagaggtggg

SEQ ID NO: 5462 - DNA, 331 bp, Glycine max
  Clone ID: jC-gmfl02220072d09d1
gagcggtcatcttcagccagccagtttaccctactacactgttgcacgtcctccttcttgggggggggggggggggggggggggggggggggggggggggggggggggccggggggccgaggagcgaagcaaagccatggataagtggaaacaactaccacaaaaatcaaaaaataaacatataacccattaataaaatcccccatacgatgtaccaaaaatagatactcagtaaatttcattaccccccattaacatttcacttttcaaacttatcctgatagcaaaaacctaaaaatgcacccaaaaaccccatctacaatattcccca

SEQ ID NO: 5463 - DNA, 599 bp, Glycine max
  Clone ID: jC-gmfl02220072d10d1
tgacagagtgagttgccgggcagtttgccgtgctagcatgtgtggacgtccaccttctttgggggggggggggggggaaggtgggagggagcaggaggatcggggggtgaggggtaggaaataacaccaaagaaagtgagccacctgagctagaaagagaagagtatggaggtagtattggcgtgatatatagccagtggaaggaaaagctaaaggggcaggagacgacaagaagtaaaggtgaactacaacaccgaaacggaaacggcctatacggcctcgctgttaacaacacccactccaacttaacttggcaccgacttaacgtaaaggcgactagcggcggtgttaatgcagcgctgttaaggcgcaggcaacgaaggccggcacaagaatttattataaagttaatggcccttcgatggcccgtgcagttactagttataaaatttaactaaaggatagtaggacgagatattaggcaaggtctattaagcagctgttatattatggtaggtgctactatgacagggagcgtacctatactagcctttaggtggcgacatgcaagcgtgggccggctaaactaacgcttaaag

SEQ ID NO: 5464 - DNA, 604 bp, Glycine max
  Clone ID: jC-gmfl02220072d11a1
tagttatggtgtcgatctatcgctagaaatgtgccaggtgcctgtcactaagcagtgtggttgagtctcgggtttaaataacagctgggcagcgccccagactacaatactagctgcggatagggctgctaccgtgcctggcgcaaccgtggaaattgggtgcgctaagggatgtagtaggtagctagaccctggagcattaccgccgctagcagcgccagggctacaactgcttgcgaacagggctaagccataccctgccaggacggccactacagccgtttatataggcgccggtgggacagcgtatagggagcctagcttgcttgaatagccgccgcagcctgttggtgcagcaacttcaatggggttatagccggcttatgctactacttaggaagcagtcattgacggcgggttcagagttaaccccaaagcctaggccgcggtaatgattaatgccaaagaaaccaatgttgtggcacaggcccaaaccgaccagaggcaggcaaacccaaacacgcctgtgtggccctgagccagtactgcggtacaatgcggaccagctactggttggacgccaatagtagccgggctcgcgaat

SEQ ID NO: 5465 - DNA, 527 bp, Glycine max
  Clone ID: jC-gmfl02220072d11d1
gagtcgacttgccaggtaatttgccctgctacactgttgcacgtccgccttcttgggggggggggggggggggggggggggggggggggggggggggggggggccggggggggggggggggggggggcccatggatagaaaaccgtaaaaggggttttgggagaattacccccgggattagggcatcattccccgtagagatgcaaaaagggttttccgggttaggatgggcctaaaggggaggatatccccccaaatagccgggcttggccatagcccccaaacccaaaaaggcaattttggaagggggggaaaataccatttggacccttttgtggccggcttttaaaggccgcaatatgccccttccgagcccaaaaccccgaacattcccgaaacaaaaggccctaataccccagttagccctcaaggaatcaattcccaaaatgaggcctttttatggaaagggcttagtgagaaccctagaaaccctttgcaattccctaatagcccaattaaagttgcta

SEQ ID NO: 5466 - DNA, 545 bp, Glycine max
  Clone ID: jC-gmfl02220072d12a1
catcgacgtaggacgacgtcgatctattgctaccaatgtaccaagtaccgtacctgggtgtgtgtgtgtgtgtgtgtgtgtgcaacagcctggtatctacctgtcgagtggtgtgcaggtcagttgtttggtcgacagtgtaagtcaactttgtaagggttctagtcatagtcacctgtatcgtagttaattcgcttgtattctatccagatggctgcaattctcgtcttcacgatcttattcttctcctgctgctgattatgttgtttgtgttgttgttgttccccaacaaccactgtcctcctcctcccaacagtattcagcaaggtattcccaaccctctcagtccctaccgtgcttaccgtaggccgcttcgtcgtcagcgtacaggtcatcacccgggcttgttcagtagcattctctgccaccggtgccagtatgtcgtcacctggcgcggccaacgcctctactagggcccgcaaactcggcgttcaattaggctgagccagcttattcaagcgcgtcggacagctgcctctcggtgt

SEQ ID NO: 5467 - DNA, 631 bp, Glycine max
  Clone ID: jC-gmfl02220072d12d1
caatagagttggccgggagatttgccgtgctacatgtgtggagtgctgcctgcttggggggggggggggggggggggggatctgccttagccattaccgccaatacggctacacgggggaataggaagctagttaatcggtgtaattacaaacgaaaaaagcgatagttgtggctttggggttttggaggaaagaatataatggaaaaatacccccctacgggccttatacataggcattcgacggtagtgtatacgtcctaataggaaaagccaaccaaccaagaattgcagataggggtagatttaaaaaagccaaaaggggcggcgggcctaggcttaacacggttgaaaggaggaaagggactaaggataaaaaaaaaacccaggaaaagcacaataccctgcgcgcgcaggaacatctgctacaggttggactaaggggtgtccttgggctaagcattgttgtaagattcttaattagcgaaaatcatgctgtgccaaccgtagtcgaggggttagttaatatatttgccaactgcctaatcggtgttggtaatgtaatagaggggttgcccctattacgcaacatggtactaatagccaaacctgcctggaacaagtctgcaagt

SEQ ID NO: 5468 - DNA, 418 bp, Glycine max
  Clone ID: jC-gmfl02220072e01a1
gtgagaacacagaggatagtggtgttcaacgagatggagctaattatgcacaaaacagttgatgtgaatggcataaaaatgcatgttgcatagaatggagagggcccagtggtgttgctcctccacggcttacctgatctctggtactcatggcgccatcagattctctctctgagctgcctcggataccgcgccgtcgttaccgatctccgtggctacggtgacaccgaagcaccaccttctatcagcagctacaactgcttccacatagtgggtgatctcgatgcgcttattgactctctgggtgtccaacaagtgttccttgtgactcatgactggggagccatcataggttggtatctatgcatgtttcgccctgactaagttaaggcctatgtctgcctcagtgtacctctcc

SEQ ID NO: 5469 - DNA, 526 bp, Glycine max
  Clone ID: jC-gmfl02220072e01d1
cagctcgcgttgccaggagatttaccctgctacatgtgtgcacgtccaccttctttgggggtggggggggggggggggggggggggggggggggggggggggggggcgggggggggggggggggggggggggggggaaaataaagtaaagtttgggcccaccaaccaaagcccggtgagttttatcgggttaacccccattttcccaaatttttttttcaaccctttaactggcgtttgcggtatggacatttgttttcaaaaaaaaaacaacccccccaaaaaagtttttacccccattttggaagggggaacaaaaaatttttttttcccccccaggggtagaattttgggccaataagggaaccctttttttacccctgtaaaccctttgccaaacctagggcccgtaggttgcaattgcacccgcgaacccctgctataccctttgccgataacccccggtttaaaaaaaaatccccccccttttaggggctacccgcctgaaagggaaagccctttgatgg

SEQ ID NO: 5470 - DNA, 540 bp, Glycine max
  Clone ID: jC-gmfl02220072e02a1
aatctctgacctcttcttcacatcttcctccattaatacccttccctctctctcccatggagttgatctacctactctatctggttccaacgttgtacgcgtgtttcctcatatggaagatgttggacgagagaagggacagggagtgttacatcttaaactaccaatgctacaagccccccaacgacagaatgctcggcaccgagttctgtggcaagcttatcagacgcaccgaaaacctgggccccagcgagtaccgcttcctcctcaaagccatcgtcagctccggcatcggcgaacaaacgtacgccccaagaaacatcttcgagggccgcgaggccactcccacgttgcgcgacagcatcggagaaatggaggagttctttcacgacagcattggaaaactcctcgcgaaatctaacgtctccccctacgagatcgacgtcctcgtcgtcaacatctgcatgctcgccaccgtcccttgcctctcctgtcgaatcatcaaccactacataatgcgccacgatgtcaaggtctaca

SEQ ID NO: 5471 - DNA, 604 bp, Glycine max
  Clone ID: jC-gmfl02220072e02d1
cgagtgtggtgaccaggtgatttgccgtactacatgtgagcagtgccacctgcttggggggggggggggggggggggggaggggggggggggacatcatgaaaagcgcgagggaggaggcatgtagggtgcgagtaggcggcgtaggcttggcggtacacgtgggagaacaatataagagggggaaaggttaaggggcaacgaggataggctgggccaggcggtttggaaatggccgtaggttggggataggtagaaaggttggtgcgaacgctatcgggcaattggcagagtggtcagccctaaatgggtggtgcccaaccgatagcttttaagtggtgtggtgtttgccgtgcctaatacattataaccactaccacgtatagtatggcaaaggttactaagagtacgctaacgttagccaatgggtggacttggtgggcttacggcaagccggataggccagagctacaggttacgcaaacccgtattacagagatttgctaattggctgcttagacgcataggtgtactaattagagtatcagaaggaagcggtgcaagtataccaacgctaggaacagtagacggcgtagtactagcac

SEQ ID NO: 5472 - DNA, 318 bp, Glycine max
  Clone ID: jC-gmfl02220072e03a1
ctatgatgtccgtgcacgaccttttctagttgagagtacatctgggagtcgtgatgtacagatggcgaaaattggacttcgagttcttactcgcccgttgcccaaccaattacctacggtttatcggacccttggagagaattataatgaaagggttttaccttcaatcatacatgatactttgaaagccgtggctgcccagttcattgccattctggtcattactcagcgagaggctgccagtcttgaaatccggaagattttgactgaaagggctgctaacttcaatattgccatagatgatgtgacatttactag

SEQ ID NO: 5473 - DNA, 516 bp, Glycine max
  Clone ID: jC-gmfl02220072e03d1
gtgagttcccctagctaagttcgccgtgttagcatgtgtgcagtaccaccgtctttggggggggggggggggatgcaagggagggtaggtagcgaagcgcaactagcgagggccattgtaaggaagttgggctaaaacaggtaaacccggattcggtacgacgtgaagtaacatactgagagttcaagggatcaaaatagaggtacaacagcgagttgcaaaggcagtcgggataactgaaaaataaaaacaaataaatacctgattaattatgtatgggtgcttgcctgttaaaggtagtggggcaacaggtaatactacagtagtgcaaggtaccgaaattggcgggcttctcgggcagagccgagcgctaagtgtgtcgctactggggagtggttggatgcgcagaaaactgccaggcggcctaagacttgcgttaaggacagccctatgggggctggtgtttgctctgtgcaggatacgagtggtgaggcgttgctgtacttggggtgataa

SEQ ID NO: 5474 - DNA, 166 bp, Glycine max
  Clone ID: jC-gmfl02220072e04a1
gttttgagttcacccaaaaagttatccttgcttgccttagctgctcatgcatctggtccatcttaagctgatcgactaagacatctcgcctcacctgctggaaaggatgaatattcagagtgggtgatatgcctctcagagaagtcctcttgtggtcatggctgaa

SEQ ID NO: 5475 - DNA, 610 bp, Glycine max
  Clone ID: jC-gmfl02220072e04d1
agacgagcgtagcgttgaccaggaagtttgccgtgctagcatgtgaggagtgcctcctgcttggggggggggggggggggggggggaatgctttaaggaaagccaggcaaacaggaaaggaaacggggccataagaggtcaggctgaccaagcgaaggaatagttcatggcaaccgagccgtgtgaagcgaaaaataagaaagataatgagaataactgattggggtgttataactggctaacgggaaaaggagggaacagttggcacatgacaatgaaaaatgtgaaagagggtattagcgtacagagggattgatgggagcatacagaaagtgctacctataagaaagacttataaagcagacaaagggagaaggtaccgaggtaagctgtacaaacctgggctgcaggcaatacggttattagtggtaacgttacgggtgaaaggttggagagtagttaatggcgggttacagttgactgtactgctgagccaccagcttgcaggtgttcggggcggagctgctaaaattgctaaaactgtaggtatgtgcttacgggtacgatacgtggctacggggccactacatcgtcactgggttgcaccagc

SEQ ID NO: 5476 - DNA, 569 bp, Glycine max
  Clone ID: jC-gmfl02220072e05a1
ggcatcttaccggtgaattcgagaaaaaatacgaaccgaccattggagtggaggttcacccattggatttcttcacaaactgcggaaagattcgcttctactgttgggatactgctggacaagagaagtttggtggcctcagagatggatattatatccatgggcaatgtgcgattataatgtttgatgttactgcccgtctaacatacaaaaatgtccctacctggcaccgggatctttgccgggtctgtgaaaacatcccaattgttctttgtggtaacaaggttgatgtcaagatcaggcaagtgaaggcaaagcatgttaccttccacaggaagaagaatttgcagtattatgagatttcagcgaagagcaactacaatttcgagaagcctttcctctatttggccaggaaacttgcatgtgatcctaacttgcactttgtggaatcttctgcattggctccaccagaagttcaaattgatttagctgcacagcaacaacacgaagctgagcttcttgcaactgctagtcagtccctttctgacgatgatgatgaatcttttgag

SEQ ID NO: 5477 - DNA, 563 bp, Glycine max
  Clone ID: jC-gmfl02220072e05d1
gggctctccagcaatttgccgtttacatgtgtaggagtgccgcctgcttggggggggggggggggggaaaaggtaaaagctaaagtgagaggctaaatgaggccacgagcaacacaagaaaaaacaagcataatagtataaaagggaccggtataaagtaggatgggaaaaaaacaaacaaccctaaaatattgagaacttcacaacaaaaagaaagttaagagaaaggatacaagaacaaacaaaaccacaagaacaaaatagcaggggtttttggaaaaagtcagtaatgggctagcgattggcgtgcgcggctgccactatgaaaacaaaaaagcaatacctattaaaagtggctagggcagggcacagcagcagtaaacaagatgaggggcgggggtgggaatacacgcataggcggaagggattgtaggatttgtttggtaaatcaataattatattactgccggtccgggtggtaacggcttatctttcgcgtgctccgcgttatatctaagaagggttgatactagttaatctagtccaaagacctggaagcatca

SEQ ID NO: 5478 - DNA, 542 bp, Glycine max
  Clone ID: jC-gmfl02220072e06a1
gcttgggctagtttcagatgctatatcagagaaggtagattctctcagaaaagggaagagtgaagtgattgaaaaaaaccacatactcattcttggttggagtgacaaattgggctcacttttgaagcagttagcaatagcaaataagagtattggtggtggtgttattgcggtgcttgcagaaaaagaaaaggaggaaatggaaatggacatagcaaagttggaatttgatttcatgggaacatccgtaatttgtagaagtggcagtcctcttatactggctgacctaaagaaggtttcagtttctaaggcacgtgcaatcattgtattagcttcagatgaaaatgcagatcagagtgatgcacgtgctttgagagttgttcttagcctaacaggtgtaagggagggcttatggggtcatgttgttgtggagatgagtgaccttgacaacgaacctctggtgaaacttgttggcggagaactcattgaaacagttgttgcacatgatgtaattggacgtttgatgattcagtgtgctctac

SEQ ID NO: 5479 - DNA, 517 bp, Glycine max
  Clone ID: jC-gmfl02220072e06d1
gtgaccgtcagcgatttgccgctgctacatcgttggagtaccgcctgcttggggggggggggggggggggggggggggggggggggggggggggggggggggaaaacccggaaagaaggctgagaggtgcccaggaacaaaaaactaaaactggcccctttgataaggctaaatggcccaacaatatggctttggccagaagcccaccagttcctgcacggacacagtactggtaatttgttggcaccaatgcatcccaggctaagggagcaactaaaccgcctgtggcacaatttgctaacactaatttaggaggttgggccaggttattagatagagcctagagtgaaaagggtatgcaggaatagccgacagaagcaaaaaacttcccctggtaacccagcttgaggccgtttatgaatcggccagtaacataccccgagataacctgaagaggtacaataacttgggccaccaataagtagtaattcgcaaattagatggggagggttaaatt

SEQ ID NO: 5480 - DNA, 430 bp, Glycine max
  Clone ID: jC-gmfl02220072e07a1
cgatgtgttacgatctattgtgtaactgtccaaggtcctgtcacaacaatccgacatcgattaaagggcgctaggcgacagcccacactatcgacaccccccctgagggcctatcggtgcacaagcaagcagagcccactagatgctaatccctgttcgggtgctctttataagtagcatatagtgtgggaatcaacagtttgttggtgctaactatgggtatcatgctccatagcctaagagctagtgtcaggcttggattgacaacaggtaggcatatgcgactaggttaggacctgtttcacgtcaaatagtgaccagggataaatagccgggagttaccgcttcagtaggttagaggacactaggctcggcatcgcgtttcttggcttacgaatgcgctccaaaactggaagtttgagtaaccttg

SEQ ID NO: 5481 - DNA, 495 bp, Glycine max
  Clone ID: jC-gmfl02220072e07d1
gtcatcaggcttatcccgccaagctacacgtgtaggactgccacctgcttgggggggggggggggggcgacaggggtggatgagcagagggggaggtatggattacccccaaaggggccggtagcatttgagccagttatgcggggtgattccatgttcgcgttgacagtaaacagtgcccattactctaacatacttgaaaagtgggtccaacagagatacctgatacaaagttaaatgaagacaactattagaaccttagcggactgatactaacgatgagactagtacacagttgctgagtacatttatgcgctgtggtaggaattggctccagtgtatgttgaacttaagttataagccgcaaaagttgttggcacggccaaaacatacctgtaaaactgtgtaggccacgccacaatagcttacagaagcttatttggggtagcaacatggccctgcataacacaaagctagccccgctactgctgggca

SEQ ID NO: 5482 - DNA, 566 bp, Glycine max
  Clone ID: jC-gmfl02220072e10a1
gctcagctacgccgtatctctgcgaatgtgccaggtccgtcactgggatttataaagaatgatggttatcggttaaattcggcgtgtggtcagccagtgccgttaggggcgggaagaggcaccgtgtgactgcagtggaagctttgatggatctaagtgaaacgtagatagttagatagctgtccgttgaatgtgggttaacaagccaagcggggttgagggagtattaaattattatggatagtaaactgaagaatttattaattgtgatagattaggaggtgtattagacatatgttgaatagattaaaaaatatagagcggcgacatattagacacattatattaatagtgacgggcttttagcacttaatgacagcgaaagaagctaggggctagcacgtgtggacagaacaccgcggtagctattaattataacctaaccgatataaccgaagagagccgtgggaataaattttggccatataatagcatcgcgtcaaagttggtagtatagtagagcgtggtagtataacggaaactcatttagttggcggtagacgcgt

SEQ ID NO: 5483 - DNA, 534 bp, Glycine max
  Clone ID: jC-gmfl02220072e10d1
tatctagctgcccgtgattcgcaatgtagcactgttggacttcctcctgcttggggggggggggggggggggcggggggggggtaggggggagggtggggccccaacgcccaccagtataaggagttggatagggacgtgcaagagggagggggggtagaagcccaatgcagtgtgggtgggtggttaaaggccagggtatggttacattttgagtagggtgttagtcgtaatagagggaatgtaaacccagagagggtagcaggctatggatttgaagcccagatgaagctatttttggaagccgaaaggtaagggggacttgaatgattggggaatggggcctgggcagtccattttagccgcttattgattttgaatagttacgagagcggctaataaggtaaaccttgaaggcccgtatagctagggtgccccctatgttcgaaacaaagtgtatcccagggttaggtgggcccatttaagttggagctcggtttaattagcgggcctatgctacgaggtagcgtggccc

SEQ ID NO: 5484 - DNA, 550 bp, Glycine max
  unsure (1)..(550): unsure at all n locations
  Clone ID: jC-gmfl02220072e11a1
cgatcggttgccaggaattttccgtatgtcccaagtgccgtacactgtcacttcgtacgggtattttgtggggtgtagtgtgaatagtagacgttgtacacctgacgtggttgaggagtataaataagcgtgcatacgtaacaagtgcataacaataggcacagagccaacagtaccaaaggcagtaacctgtgccaactgctgtcaccgaagccgattactagcagggtgtgcagaagcttgttatctcagtaaagggtttcccgtatgaacagcggcccacagcaagggccaatgctggtaaatagtaaaacgacccgcaattcatacgtgcgcggcccacttaggatggtgctgtactacaccggcaaatgagagaataaccgtttgttaaagccgggccggtgggatatgccaattagtcgtatgcaacagcctaaccaaaacaaccgcataaggcaggggcacttgggtaaattgagtaagctagtatgcgattgtgcgcagaataacgggtatatacaactatgcaagcaatgnngacaagtgc

SEQ ID NO: 5485 - DNA, 555 bp, Glycine max
  Clone ID: jC-gmfl02220072e11d1
atgaccgattgacttaccaggagatttgccgtgctagcatgtgagcacgtcctcctgcttgggggggggggggggggggggaaaatatggtcaagtagcattgttgcacactgagggtggcaacaagtactctataagtgcctacacggcttagagctagatagccatgaagactaaaaagctaaaagcgagcaactagaccaaacccaaaaacgcaagcagatatagtggagccagtaaaaattaaaccctaaacgtgaacgtggacaattagaagtaagaagagttaaagtagggggcaaccttttaagtggttaaaataaacgaacccggtgctacgaataccaatggaagtacaagttgtagatatggtgttagtagtacagaatgtagtaaagcagtgcagcgtaactgccgaatcaacaaggttattaagcttattaaatttgtgctacaaggcccactttgtggcacagggcggccgtataaaggttacccactagttaaaggggggcgatgtaggcctaaattatgtcactaaccctagtggtgttg

SEQ ID NO: 5486 - DNA, 593 bp, Glycine max
  Clone ID: jC-gmfl02220072e12a1
gatgagaggacggtacgactatcgctgcaatgtccaggtccgtcaccgctattatgcgcctccgggatcgcttttattataatcccagttcatcatttcaggagtaatttcccgtaccagttcaagtgccctaactgccttgtgcccacacgctggcgggggcgcctccacaaacagggctgcaaccctacaccgggcgatgagaaccacggctggcacaacacgcatgccgtgccacggcgccagcgctggcacatgaaccatcacccgtatcgtgggtagagcggccagttcaatgcgcaaaagctgaacctgggctggaattacaggcgggtagggagtaaataccaggcaatcggcggagcgcgcgctgtgtgcgtggggggagcgcggggaaggagttgggggacggcgtaagcgaaggcgcgagctaggtgagtggcgagtcgagcagtcgagtaagtaacggaaacaaaacggcacgagggaaaaaaaaaaaaaaaaaccctccttcgtcatgacgcactgtcgtcatttcgcaaggaaggttcgattccgattgctagctcgattactgggtttgagacgcacgt

SEQ ID NO: 5487 - DNA, 592 bp, Glycine max
  Clone ID: jC-gmfl02220072e12d1
caattgagttcaccaggagatttgccgtgctacatgtgagcacgtccgcctgcttgggggggggggggggggaaagatgtaatggggtgggaatggcaggcagatcagtagatcagataacagacaagctagatataaggataggcataatgaaaaaccagaaggaaaatatagaaaaaacatacacactatatatagaataatcggtaagttgcgggcagaaagcaaataagtgccggaactaaacttggactaggggtatacggtccagttaatagagcaaacatcgcatttgtcgttggacgtgtaactatagttataatgttacattacgtatgtggtgtaactaatgttggagacgataaattgtgctttggtactaaagttggtgttcttataaaaataactatgtgtttacaccttactggctttacaggtccagttgcatttcccggcagaagtcccgtcgtccagtttcggcgccgcccctatcgaaattcttatactgccgctattgtcacttcaaggttcactggatcgatctcgctagctcatcgtagactgtggtgagacgcgtattgaaaggtaaggt

SEQ ID NO: 5488 - DNA, 413 bp, Glycine max
  Clone ID: jC-gmfl02220072f01a1
aaactcaaacgaatacgttttctctttctcttcaatttcacccttattagcatagcatattcatttccctttcttgaatcgttcttaactgcgagaggggatatcagagaagttgatcggcctcccattaataacagatctgaatgatctgatggagtctaaaggcgggaagaagaagtcgtctagtagtaagtcctttttgcacgaagctcctctcgattacatcattgaagacgttcgaccacacggcggaatcaagaagttcagatctgctgcttactccaactgcatccgcaagccatcctgagattgcctaagtcgagggaagacgtagcccccttagtcctgcatctgctatatgtttctagtctcttctcttctcctttttcttgttcgcttccttgcccttttgg

SEQ ID NO: 5489 - DNA, 478 bp, Glycine max
  Clone ID: jC-gmfl02220072f01d1
ggatcgagttgaccgaggaatttaccgtgctacatgtgagcagtaccaccttcttggggggggggggggggggggggggaggggggggggggacatcatgaaaagcgcgagggaggaggcatgtagggtgcgagtaggcggcgtaggcttggcggtacacgtgggagaagaatataagaggtggaaagataagggggcagcgaggataggctgggccaggccgtttggaaatggccatagattggggataggtagaaagcttggtgcaaacgctatcggacaattggcagagtggtcagccctaaatgggtggtgcccaaccgatagcttttaagtggtgtggtgtttgccgtgcctaatacattataaccactaccacgtataggatggcaaaggttattaagagtaggctaacgatagccaatgggtggacttggtgggcttacggcaagcccgataggccagagctacaggttac

SEQ ID NO: 5490 - DNA, 497 bp, Glycine max
  Clone ID: jC-gmfl02220072f02a1
gcacaaagcgggttactgtctgttcaagctaccatctctctctctctttcttagtgcctccttgccagaagttaaaatggcccaagaaactttcctattcacatctgaatcagtgaacgaggggcaccctgacaagctctgtgaccagatctccgatgctgcgctcgatgcatgcttggagcaggaccctgacagcaaggttgcctgtgaaacctgcaccaagaccaacatggtgatggttttcggagagatcacaaccaaggccaacgtggactatgagaagattgtgcgtgacacatgcaggaacattggttttgtctctgatgatgctggtcttgatgctgacaactgcaaggtcctcgtcaacattgagcaacagagtcctgatattgctcaaggtgtgcacggccacctcacaaagaggcctgatgagattggtgctggtgaccaaggtcatatgttcggctatgccactgacgagactcccgagctcatgc

SEQ ID NO: 5491 - DNA, 632 bp, Glycine max
  unsure (1)..(632): unsure at all n locations
  Clone ID: jC-gmfl02220072f02d1
cgcttcggcctgccagccggtttgccgctgctacatgtgtagtagtaccgccttcttgggggggggggggggcccacgcaactagactggtgttaggacagctaaatggtagataggtggaaggcaggcacggagttcacaaaggcgaccaatagcgacaacagttagcgcacattataggtggaccaacgccgccgcaatgagcgctgcggaaattgtttggtaagataggacccgtgctttggcaccgtgtaaccccgtgaagggttgggactaggctaataatagttggtaggcggccttgtgtagtactgggaggctggatatagacaaagcatatgctgacacgggcgactagggtagctagccgcccagtactttgtttgtgaactgggcgcgtaacaagcgtacaacccgtgttgggctgacataacgccggttgaatttatgcaattaacgcgctatttttgccgacacggcccgtgaagcccgcttggttgcgcacaatttgtacgacaattagcttaaaatgcgatatagtatgtggggtacggagacctgctacgcagctagctgtancacttagcgagttagagcaattactaccgacgcgtgggcaagcctggccagta

SEQ ID NO: 5492 - DNA, 427 bp, Glycine max
  Clone ID: jC-gmfl02220072f03a1
gttactaagaagcaaatggagctccgcaccgcacagcggatgctgagaaaaacctggagtggcggaagatgacggaggtggcgagatcagtggtgcacgacgttttggggcaaagggtggtcgacgtggaccagccaatcgtcgattacatcgtaaacgtccttgccgacgatgacttcgatttcggtctcgacggccaaggcgccttcgaagccctcggcgagcttctcgtcgtcgtcggttgcgtcgacgatttcttccactgtcgcttcgtgtgcagcacgctgtgcgacaagttcgggaagcacggtttggtgatggagaagcccgctgttcgtagccttgcggtgccgtttcgaattgaacgaggggatggacgacgtgcatgctcccaagaagaatcccgagcccgtcgacggtcctattc

SEQ ID NO: 5493 - DNA, 538 bp, Glycine max
  Clone ID: jC-gmfl02220072f04a1
tctatgctttcaagtagtaccattaggcactttgttttgtgtcttcaatttttttttcctttcaaccttatcaaattaaccccctacacatttatttagctagctagccaatttattaattaggcacataatgggaagcccagaatccaatttgccacccggttttaggttccacccaaccgatgaggagctcattcttcactaccttagtaaaaaggtagcatccatacccttgaccgtttccattattgctgaggttgatatctacaagttagatccatgggacttaccagctaaggccacctttggggagaaagaatggtatttcttcagtcctagagaccgaaagtacccaaatggtgcaaggccaaacagggcagctgcttcagggtattggaaggccactggcactgataagaccatagtgacatcattgcaaggaggagcacaagagagcgctggtgtgaagaaggctttggtgttttacaaaggatgaccccctagggtgtcaagaccaattggatcatgcatgaatatc

SEQ ID NO: 5494 - DNA, 581 bp, Glycine max
  Clone ID: jC-gmfl02220072f04d1
ctgcctgtcggggatttgccgtggtacatgtgtaggagtgccgcctgcttgggggggggggggggggggaacggtaagattggagtgataaacgagaggagaaaatgaattgttaagtaaattttaataatagcggtaaaggaatagggggcgatataaaggcgggtgaagggcgtagacaaatggccagaggggcggggaatacgggtggcagttggcaagccgccaagtgggtgggcaggtttgattaaagacggtggctggttaactgaataggtgaggtggtaggggtaagtataaaggaaggaaacacaaagaaaaaaacaaaatatgagaaggctgagcgatgaaattttgactgatgaggttggagtgaagcagtaaaggccgccgaggtgggccgcgctgtactggtgcaagaggggatgggaaggggttgagggtagggaagtggggcagagggcgccaggagttggcaaaggcaacagcagcattaactaggaattctgcaggtagtaaacatgctggtagcaccgacggttaggcgcccggtgtcgaggccggctgcagcggacgaccca

SEQ ID NO: 5495 - DNA, 491 bp, Glycine max
  Clone ID: jC-gmfl02220072f05a1
gaaaactctgcaaacatgttggtttatcatgacctccttacaggcgatgagcttgtgtcggactccttccgttacactgaaattgagaatggaacgctgtgggaagttgaggggaagtggatagttcagggagcacttgatgtcgacattggcgcaaacccttatgctgatggtggagaagatgagggagtcgatgacgcagctgccaaggttgctgacattgcagatacaatcagacttgacgagcaacctgcttttgataagaaacagcatgttaccttcatgaagaggcctatcaagaacttgactcccaagctcgatgcagagaatctagagttgcataagaagctcattgagggatcaaccataaacctgctatctaagactaatgatttccagctactcgttggggagagcatgaatgatgatgcttgctaggtccttgcatactacaaagatggtgctgctgatccaaatacttatactttgca

SEQ ID NO: 5496 - DNA, 581 bp, Glycine max
  Clone ID: jC-gmfl02220072f05d1
ctatcggggatttgcgtggtacatcgttggagtgccgcctgcttggggggggggggggggggggaaattttaaaaagaaaggctgtagaggttcggagtgacctaaacctaatagcagtataccgaagccgagaaattaattgctaagaggcggattagcaatgacgtaccagtaagtggtacaagacgttgagagacgggaaaatattgctagataggcttccgggacccgggaaggggttagatgtagaatactcgataggcacgttagtgattactcgagggcacaggacaatattggccataacaccctacaccaattgacaaaaggttttagttgctggttagtggtggacctgctggtcatagtggctagcgggcttgcccataacacccgacaccagtttacaaaaggttttagtttctggttagtagtgcacctgacggtcatagtgcctagcgtagatgttcgagatgtggtgcaaagagttttcaatcagcccagttaaggcggggtgttaagtagctgtgtgagtaaggtacaagaagcaaggtggggagaggtagtgaagctaagtgtc

SEQ ID NO: 5497 - DNA, 522 bp, Glycine max
  unsure (1)..(522): unsure at all n locations
  Clone ID: jC-gmfl02220072f06a1
acaagaagaaagaatctgaacaataatactgatacacacaacactaacactaacaagaagggaggaagaagctgaaaaccctaatctgcagagatgagatgagatgaaaatgaaaaggcgtggaatcagcgcggcaaggaacatcgtagatgcttgtcttgggagtgtgggatctcaaatggctcctccaattcgtattctccgcgttcgtcttggcgattggactgcacgcgctgctcaagaacaccgcctccaagtacttcgagattgaagccactttccacgctatgcctggccctctcaccgaccattctctctgcgccgtttgtcgcaaccccgccaacaagaaatgttcgcgatgcatatccgttcgatactgttcacaagcatgtcagcaggcgcactggaaatccgagcataagatgagatgcaaggagtttcanggcagcgccagtgtgatgaatctggatcatactgaagtaactaatcgtgttttcaaagcttctgctgctgtgaatacaa

SEQ ID NO: 5498 - DNA, 590 bp, Glycine max
  Clone ID: jC-gmfl02220072f06d1
ctatcgaggaatttgcgtggtacatgtgtaggagtgccgcctgcttgggggggggggggggggcctctcgctgtgagcctgagcaagagctgtgaaactggtgggaggccgtgtgaagtctattagggggaaacgcgaaatgaggtagttgaagttaaggacaggcactgaattagatttgttgtgcagcagcaggtggtccaccttatacgactaagagtaacggtaatacagggtggcggaataaacggataagcggggtgcagggtgttgggcggtttacgcactatattaagcggatttagtggaagtaggcaacttgtaaacctagtaaacaacataggggccgtatgctgcaattgaggcataagcccaagccgagtcctattcccgcgtcacaatactgtggcagtatgtgcaactaactttggtggcattgcaacaggccacaacgacatttgcgtaaggggagtaccacgcatacccgtaaaaggtataaccggcggcccgttattaggtccctagagggcctctaaggcggctaacgaacggcgcgtaacacggccagtagcgggcttgcgcttatgcaa

SEQ ID NO: 5499 - DNA, 503 bp, Glycine max
  Clone ID: jC-gmfl02220072f07a1
aagtgcgctccgagtatgggtagcaactgtccaggtcctgtcacatcatacctcaagtcaaatctgcgtcggctggtaagtctccacggcggcgaccgccgctgatgctctcctcacgcccaccgccactgtagcacaatgtcatccaacattgccgaacttagcttccaacaacgatgctcatgaaccagcccaagcgaaccctgccgtaagggatgctgcgaattgtatgaggatgcaggagggttacattgattacggtcacaagtgtggtgttaactccaatgtcttccgcctctatcttcgtccaggggcccatgattatgtcggtagtcttctgcttctctggggtcacttctaacccggtcctattattcgcaataacatcaggtacagcagccacaggctccacggttgtccatatcgtcctactgacattgtggcgccagagccacgcctgattccagcattgggccatgccccgtgggcggataattagcaaa

SEQ ID NO: 5500 - DNA, 496 bp, Glycine max
  Clone ID: jC-gmfl02220072f07d1
ggagtgaggggcttggcgtgtacatcgttggagtgccgcctgcttgggggggggggggggggggggggggggggggggggggtgggggggggggggggggggggggggttcggcaatttaaccaaccgagaggggaaaagaataaaagcctttagaatcaatagggggtttacgggtaaaggggctataatgggccggaggtatacgcatgcaatagctgccggaatattgaataaaaccggggggagcaagttttatagggttatcttgggaaaaaggaggccagattaaggcggctacaattttgggggaaggggaaagggaaaacccaggccgctagtaagggctgagctgcttcaagggaatcggaaaagcaatagctagcggcccaaaaacccagcaaaccaatttcttgaacttagcggtccgggtaagccccttataatccggtgacgctaaaattgggaccccgaacaaaagttgcccaagcccaaaa

SEQ ID NO: 5501 - DNA, 571 bp, Glycine max
  Clone ID: jC-gmfl02220072f08a1
gatgggttgactatgttgatgtccggtccgtcaccgtacaacctcgcggaatgggttattagtggagaacgagcaccggaaggtacagcacgaggagccacaccagtttaaccggccaaactctgtattactagccgcgcagtcgaggtgggtagagcctaaccccaaacacaggaggcacggataaaaccctacactgtaaatgtgttcagtatacattgcgcattcttatagagagccggcaacggcacagaggtgtgttgaccaactgatacacactttgaatgggtatgcagctacacaggcaaaagcaataacgtagaataaagggaacgaaggccaagggactgctggaatgccatacccagatagtagcacgtcgaaaccacaggaatggctacaaggggagccactagtacacaggctgctgctaatggagaatatgtataggcttatgatgacaaggacaggtaggtagggggggggtgggtgctacggcgggcgaagggcaggggcttggggattaagaacagggacactgacggcgggcaggcctgagagttgcgcgagc

SEQ ID NO: 5502 - DNA, 447 bp, Glycine max
  Clone ID: jC-gmfl02220072f08d1
tcagtatctagtgcgccagcagatttgccgtgtttgcatgtgtgcactgcctcctgctttggggggggggggggggggggggggggggggggggggggggggggggggggcgggggcgcgggggaaaaaaaccccccccctattgagtaatttttgggggaggggagcaatatggggcaactggggttatggaaacattggttaggtccggccattttgaaggtatagaagccgtaggttttccgggggcttaagtaaataatggctttgaaaggggaggccgaaaacccaaaggggaaggataaataatgcgtcaaacaaaaaaaacgccagccagggaaggtgaggacgcctaagcgcacccggaaaacggctcctaatgagaatgccgctttttgcaaaggggcccgctgaagggttgggataatttaggcacgggtttgcgtt

SEQ ID NO: 5503 - DNA, 642 bp, Glycine max
  Clone ID: jC-gmfl02220072f10a1
tagtatagcttcgattatgttagaaatgtaccaggtgctgtacacccccacaacagcctgatagtagggacaaacaaatggctgaatactacagtacctaacgcgccaaggctaaggcacttagtggagttttggaacaagccgttaaagttattgaagttgccattagtatttttggtattgcgcaacttattaaagcgtgcgcataatgatgatactgcgctgcagacgctgatggcggctgcgaggggtcacggtccaaagctggctgggcacgccccggctgcgttgtggcacccgctgattgctgcacagcattatgatacggctgctttgaatcatgagtttagtgctaatatggagctgccaatggcgtgtaacactaacaataatttaggtccacgcaacctaggcacctcgatgttcctgaaattttaggccattgggccctcgaacaataaccgtactacgctggaactacagaaaccaaagcgcaatcgctaacaaccacttaagcagcaacgaaagcagacatcaacaaggaaaatattactgcagataatggtttgggattggtatagaaagggtgtgcgcttaggggaggagcagatacaggcagatgaggtgcgagtaaaaggtacg

SEQ ID NO: 5504 - DNA, 561 bp, Glycine max
  unsure (1)..(561): unsure at all n locations
  Clone ID: jC-gmfl02220072f12a1
cgatgagaggancggtgtgatctatgtagtaatgtccaggtctgtccttaggtacatggattccatggtataaacagcaagtcccaaaacggcagcaacagccttccggtccggacaatgcccccaaacccgattagcacaacaaacaacaacctgcgttataacataataattatacagcataaaacctggtacactatttgcaacacaagaccccgcaagcttagtttcctgaggcaccaccgtaagagtgggaaccagcatcgacggagttacgggtgaaagtttaaacggtaactagttaggctgctgaagatggcccggcgtacgccggtgttataaataaacaacggctaacagagatgtttgactaggagttattaaggaccattacagaatggacaaaattgcaacaactgacttcactaaggttacaactacctgttgcaaacacttcgtccggtaattatactgtaacaacacaagcagcagcatcagcgtttccagtggcggttaacttaccaggggcacatactgctggcacacattaactgctggtgg

SEQ ID NO: 5505 - DNA, 563 bp, Glycine max
  Clone ID: jC-gmfl02220072f12d1
agtgacgattgagggcgttgggggagttggcgtgctagcatgtgaggacgtccgcctgcttgggggggggggggggggggggggggggggggacagcaaacaaactagagggaagacacgagggcaatgcgggacacgagagcaccccacaattcaatattgcaaagatggggaaaaaaaaccaaaagtaacccaaaaaaaagaaaaatataccacagagagcctcagcctatacgaataagaatatggaacaactacttggccgtgttgtactactgcgtgtaaaagttgccttgccaataactgttcccatagtcgtagtagtaggtgttgtggcactgcgccggcaattcctcctgttggtaccacttgctggtgccaaggctgtcctgactggtggtaccggggtgaacggagtgccgttgaaggccgccagaagctgacccacgagagtggctaatggtgggcgggcgccacaattatgcataatttaacgaggactactaagccagctggcaatgggcccagggacaaatgccagaatgatcgtagttggaaacaga

SEQ ID NO: 5506 - DNA, 360 bp, Glycine max
  Clone ID: jC-gmfl02220072g01a1
gttgggttcttcttgttttcaaccttaattatcaattttatttacttcttattttgggtattgagtgtttgcaaatcataaaactacaagactgatcgcatggtctttgccaacaatacataggttccaagcgagactccatctcctcctaccaattgcactgagactgcttacagtttcagaatttgtcagaaaaagcttgtcccgattgcatttttgttcctgtacgtactcttattgatacggatggcagcaccattggcatgtgttgttgggagtggtttatccatacagagtaataaaattggcaaggacgtcaatggaagatatctcttctcatatcataggctatcagtactg

SEQ ID NO: 5507 - DNA, 484 bp, Glycine max
  Clone ID: jC-gmfl02220072g02a1
ctctaattctcgaagtcataccttaccacggctccatccacttcgtatgcaactgctgggtttacaattcaaaaaactacaagactgatcgcattttctttgccaacaatacatatcttccaagcgagactccagctccacctttgaagtacagagaagaagaattgaagaatgtacgaggggatggaactggagagcgcatggaatgggataggatctatgattatgatgcctacaatgacttgggcaacccggataacggtgataaatatgcacgccccgttcttggtggttcaaccttaccttacccttgcagaggaagaaccggtagaagaaaaactagaaaagatcccaaccgtgagaaaccgagcgattttgtttacctctcaagagatgaaacatttggtcacttgaagtcatcaaactttctcgcttatggaatcatatcggtatcccaagatgtcttgccctgcttgactgatgc

SEQ ID NO: 5508 - DNA, 516 bp, Glycine max
  Clone ID: jC-gmfl02220072g02d1
aatatggttcgagtaatttaccgtgctacatgtgtgtagtgccgccttcttggggggggggggggggggggggggggggggggggggggggggggggggggggggggggggagacctaaatgaaataggatagggtattacggataagcagataagcccggaagagtaggatgaggtatgaacccgattaggagccatgaaggcccaaaaaatggataggggttcggcttaatataacaaaaaacaaagaaacaactaactgaccagtggcctaggatgaaaaggccacttaccccgagaggataaagagggtataagggtacaaaaggtacgaaccccaaactgatatgataggctacccctagagacctaaggtaaatactaatgccgcacccacggcaaccacccatttcaggggtactaccaagggtaataaatgtccataccaaactgtccaaggtagtgttacataggcctgtacgtgttaagacaatggttataagtggcctaagtctt

SEQ ID NO: 5509 - DNA, 459 bp, Glycine max
  Clone ID: jC-gmfl02220072g03a1
caagcatgctggcgccttctggcgaggccctgattatcggggactcaactgggataacaagcttgctggtgctcaggttcttctgaatcacccgaggcagggcctgagtgctgggcatccatatcaacaaactctgaggaccttgcacaatcagacatgcgtaatcatgcgctgctatctaccaggcttcacatgctgcaacagtaccaaaggtggctggattgaattaatccatgggaagcctcagcctgtacatatgcggccaatgcagccttgttggctgccctatatagtgattatccggacgctggtgatacacccgtatgggatcgtggaccgtaactcttttcaaccgacatgctgcgctgctttgccatggcccagatggagtacatacttggaaataacccaaggacaatgagctatgtcctacgttttggcatcattacccagatcacg

SEQ ID NO: 5510 - DNA, 654 bp, Glycine max
  unsure (1)..(654): unsure at all n locations
  Clone ID: jC-gmfl02220072g03d1
cacgcattaagacgctgtgacccacaagcgcagagctgtctgacgccgatcacgtagcagactagntgctaggcacgnatacgctagcgctatagctatatagtgtgtgtgtgtgtgtgtgtgtgtgtgctgtgagtgcgcagagagatcgcatngaccggtgagagcggagagagctgagagagatcggagcgagcgatgagacggcagagagagggtgaggatgacgacgatgaggatgtgatgtcggtggaggtaagagatgtagaaacggaaacctcctacaattcataaacccaaagaataaacctgcgaaaatagttagaaccttaaaatgactaaagtaacgtagctatttgggttgttgttaacaggacacgctggtttgcggccggggcttaagacagtgccccatgtggccaagccacagttccacaactcacgtgttggttacaaggtgccgcgtaccaagttagacccgggtagtaactacctaaaacgacttggaatcaacggcttaacccgtgaccaccatttttgccaccaacccaaaatagtagtaagattactaaatcctactattggtggcccaatctgacttcgtataagtatccaattttgacctctcccaattagctgaatccgaatccattt

SEQ ID NO: 5511 - DNA, 456 bp, Glycine max
  Clone ID: jC-gmfl02220072g04a1
cccaattcgaaaactccgcgcgtgctacaaccgttcgctcctattctattgtaacttcgtattagcacaaaacaaacaaaccctaactctaacccttgccgaaaccccttattcgatcatggctactgatgcccgtgactcgcgtcgcaagtatggacgatcattctctccggaggacgtggacagatcctcgaagcgccacaagcaccgtcaccacaggcaccgacaccgccacgggagcaaaaaacgcgacgaagagatgaaattcgatgaccgaacaattggcgcagttacttctacaactgacgacgggcatacacctgactacgatgatgtgcaggagggagagatcctcgaagatgaggctctcgacggcgaggtcgggataaaggacacggtatctgatgctgaacccggtgaaatctaggtgacgggagatcgagatgttcgatctga

SEQ ID NO: 5512 - DNA, 620 bp, Glycine max
  Clone ID: jC-gmfl02220072g04d1
gtggctgtcagggatttgccgctgctacatcgttggagtgccgccttgcttgggggggggggggggcgtgttgcgttttaggtgttgtttgggtttgctgttgagtgggggtgctagtttggtgagattgtgtatcctgttgggtatcggttgggttttggggcgcggtttatgtaagtgtgggattttgctgacgggttgtggcgggtggggtgtgcgctaacgtgtgagttatagtgtgagtttgatgttgagtgtgagtttgccttgtgtcaggcgcagagtgccgatgcgaggtttggtgagtagtgattatatgcttagcattagctgtttggttatcgatttgtatgtgggttgtagtagccctagacgtacactcttggtgtggccaagcactagaggtagtgagcagatgatcacactcacattgcgtgtgacgagcattaaggcagtggcagtcatggtgagagtgattagcacaaccacaatggctgcataggtgagaggggtttttggtatgggtacaccagcaaggttgaggcgaagcgctgggttgtataggacttgttacgcgggtagtagtaaacgtgttggagaccggtgtaagatgggaaaag

SEQ ID NO: 5513 - DNA, 527 bp, Glycine max
  Clone ID: jC-gmfl02220072g05a1
acatgaagaaagaatctgaacattaatactgatacacacaacactaacactaacaagaagggaggaagaagctgaaaaccctaatctgcagagatgagatgagatgaaaatgaaaaggcgtggaatcagcgcggcaaggaacatcgtagatgcttgtcttgggagtgtgggatctcaaatggctcctccaattcgtattctccgcgttcgtcttggcgattggactgcactcgctgctcaagaacaccggctccaagtacttcgagattgaagccactttccacgctatgcctggccctctcaccgaccattctctctgcaccatttgtcgcaaccccgccaacaagaaatgttcgcgatgcatattcgttcgatactgttcacaagcatgttaacaagcgcactggaaatccgagcataagatgagatgcaaggagtttcagggcagcgccagtgtgatgaactttgatcaaactgaagtaactaatcgtgttttcaaagcttctgctgctgtgaatacaagttca

SEQ ID NO: 5514 - DNA, 556 bp, Glycine max
  Clone ID: jC-gmfl02220072g06a1
ctcagtttctgttgtattttctcaattacttcatcgtattctgcaaattcaaaccgggtcttggttttctgaaagatgggaggtggcaaggacaagcatcatgatgaatctgacaaaggaattttttcacaccttgctcatggggtagctggcgcagcacatggtggacatgggtacccacctggggcttacccaccaccacctggggcataccctccacaacaaggatatcctccagctgggtatcctccacaacaagggtatcctccagctgggtaccctccacatcaaggctatcctcctgctggttaccccccagctggttatcctggttcatcacatgcaccatgttctcatgggcactgcggtatgggagcaatgctcgctgggggtgctgctgctgctgctgctgcttatggtgctcaccatgtctctcatggctcccatggctcctatggccaatatgcacatggtgctcacatgccacatggaaaattcaagcagcacgggcacggtaagttcatgcatggatagcatggcaagttcggcaagcatg

SEQ ID NO: 5515 - DNA, 572 bp, Glycine max
  Clone ID: jC-gmfl02220072g06d1
ctatcggggatttgcgtggtacatcgttggagtgccgcctgcttgggggggggggggggcaattggggggggagggagggaggctcgaactgctgcgctgaaggcggggggtgttggcaagggcagaaaagaaggaggcaggtggatacgcgataacgtacactcgaggggagacgataaatagaaggtgcgcatggctcgcgagcaggagctaatagagaaggtcctggggttagtaagcaagacatgtagcaatgtggtattagttatacgggtgggggtgagcacaacggcactaactggcgcaaccagagtaagcgcacggcacagaagagcgcggctttgacaagagctgtgtgtgattacggtttgtatggttctagttatgatagttctacggcttagccacgaagttggggctcagcatagtgcggcatttaacaagccagggttattagcgttattaagcctaatggcgttaagggggggctgcaagttaaagtgtgtaattagcgcttggcttatgtcgcaaatggctagcaacgtcgggcagctgttccgccgcatagggg

SEQ ID NO: 5516 - DNA, 588 bp, Glycine max
  Clone ID: jC-gmfl02220072g07a1
tagatatagcgtcgatctatcgtctagacaatcgtacccagagtgcctgtacaccccacactgtacctggatgcagccaataagtggtgctgagtaaagctttgattagagtggagtagggccggcctattaaaaacaggtaataccaatggctaaacttgccgcggtggcacaccgggcgacaaaatagacattataggcttaaaggctcgctagctgggctaccaggcgccacgggccaacatgtccagaggctgaaaaaactaaggcaaaagttacacggagggcgcagcaacttgtaaacacaaccaccaccaaataagagggagccgcagcacggcacccaaatttgttggaaaggataccaactaccggtgcaacaacagctactagatagttggagctacaccagagggttacttatggtgttactaaggggccgctcgcagccgaaggcccagaacccgtagcgtagggtacaactgccacgagggccgatggagggaaccaagaaccagaaccggagtaggaagaatcaaacgcctgagagccgctcgataaaaagagtagtagtggagcaaccgccac

SEQ ID NO: 5517 - DNA, 611 bp, Glycine max
  Clone ID: jC-gmfl02220072g07d1
ttgtcaggaatttgccctgctacatgtgtagcagtgccgccttcttggggggggggggggggggggggggggggggggggggggggggggggggggggggggggggggggggggggggggggggggggggtttttccccaaccctggcggccggggcccccccctttccccccctttggcaaaaattccccctggggggggccttgggggccgggtttttctttggccaaaaaagggaccccttttttttaaaaaaatcccggaagaggcccctttgcctttttccccaagtttccggtaacccccccccgggaaaaaattttccccccaaccccaaggggcttttaaaggaattttaattttgggggttttaaaccctttttaaggcccgggggaaaataaaagggtgggggattgggtttaaaaccccccaaaaaccctttttccccccggccaaaaattacccccccaattttaattaccctgggggcccccccttcccggaaaaaatttccgtattaggggggggcccccaaaataaaatccccccgcccgcttaaattttggtttggccccttgaggaaaaaaaataataccctttgggggggggg

SEQ ID NO: 5518 - DNA, 365 bp, Glycine max
  Clone ID: jC-gmfl02220072g08a1
cagtacgcttgatctatgtacaactgtccaagtcctgtcaccacggaatatgctaatgcatcctggtaatggtgctgagtgcatcttcgacgatggaccaatattccctgtgtgtaaagtagatggtcatggcgcatggatatcacattactagcagctacataggcatgctaagactagcgcagacagccagacacttgcaaaagctgaaatagctggagacatagctggtccacttgagcttgcgtataaacaacaggcacacctaaatgacgcacttaattagcagcaacaacattcagctgcagctgtaagcaaacctaagatgtgagctcatgttgtcatcgcatattcaggaaccagct

SEQ ID NO: 5519 - DNA, 552 bp, Glycine max
  Clone ID: jC-gmfl02220072g08d1
actacagctggcttgccgggagatttgccgtgctagcatgtgtgcacgtcctccttcttggggggggggggggggggtggggcagagaggggcggcgggggaggagggggaggatgggagcaggcggtttgggtatgaagcgatgactgacacggttacgcaagcctatcggacacaaagtagctatagatgtagcagcttccaaaagtcgaagcagtaacgtacacagagcgaatagcggacttatagaagcctatagagtatggggaggtgttgttgtgattagagtgtcctaagcaacggactaggaaggcgagaggacgccctgccagtagtagcggtaccaattgcagtagcaatacaaaagcggcagttgtgatttatacccacagaccattatctagggctgctacgattaatgccaggcctacgaggaatgcagttttaaagatagcgtgcttgttgaccttggtgggcgtgggtatcttcgcttagtgactggttgccggttgtgcacatagtgtttgaggtagccgtgtagaatacgcaaca

SEQ ID NO: 5520 - DNA, 332 bp, Glycine max
  Clone ID: jC-gmfl02220072g09a1
cagtatgcttcgatctatagctaccaatgtaccagagtcctgtcaccaactatacaccacccaaaaagcaattctgggttgaaaacatcatcgttagccgctgtcgggacgagcataacactgatacaaacgtagataacaatttctagacattcgatcagaaccaatcaggtgataagcacggcaactgcgaagccacacgaatggtggttcgctatcacaaattgcgccgcccgttaggatctctgcaattcgcggtctagtaatcactgctattgatagatttgtaatagcaacgaatgtctgttccaggtggaggcacatacctttgc

SEQ ID NO: 5521 - DNA, 305 bp, Glycine max
  Clone ID: jC-gmfl02220072g09d1
gatagctattcgacgctgccagggaagtttgccgtgctagcatgtgtgcacgtccacctgcttggggggggggggggggggcaagggggggaaggtgggagaatgagtgaacgccatacagcttgaagcttccgtaagaagactgtaaatatccaatccgaccagcaaatgctagaataagatgtaagtgagcgatgagcgctttagccgtaaaccgcctagaaccgtgtaagcgattgcataagcatagcaccaaaacggtaagtcgtcatgcttgtagaggtggtgttattgctccatggtgg

SEQ ID NO: 5522 - DNA, 655 bp, Glycine max
  Clone ID: jC-gmfl02220072g10a1
taggtacagcgtcgatctatggctaggaatgtaccaggtgccgtacaccgtcgcccgtttctccacaacgcttcgcatcttaacaactaacttcaacgtctgcgcgtcctcaccacatgtcttcttccctgcggatccggctagtgattccacatccatatcccgcagccttccaaccgcggccaatagaactagccaaggccgtatttaccctgttacgggtggccgtagttgaagcctagcatttagccggtgcagtgcaacaacaaggtagtgtaaacgttttcggttagagggccgataaccaagccatatggtgcgcacttgcaaacgggttactggtttaataagcaaagccacccgctaataaaagcccagttgggagcggtaaaaatagtacacccactctactagagtgatacttatagcaaatagtggcattaaaacctaacgctgcgagtgcggcgagtgctgtgaacactgcaatgacactacctatcaatatcaaggtaccaatggcacatgcaatattatgttgtctaaaacaactggcactaggggtggtacaacgtacgcaccaaaccctttaagccacaactaacatagcacaaaattctctggtagccagcataggaactacaggcaagtcacaaac

SEQ ID NO: 5523 - DNA, 606 bp, Glycine max
  Clone ID: jC-gmfl02220072g10d1
cagctagagcttgccagccaatttgccgtgctacactgttggagtgccgcctgcttgggggggggggggggcaaacaccaaatccgtttagaagaacgaggaacggagagggggggcgtttccaattataaagtagttggcttattgttgaaaagataagtgataataaagttgaactcatagatataagcagacaaaagtaaaagtgccacgacagaagctgagtagtgagaggagcgcatcagtggggggttagtatagggcgttgtgcaagacaaggcagataacgataatagagctgatagctggtgtagaaggggtgtaacattggatttacgcaacgacccttgcgaagtatacagcataaactcactaagggtttaacagagtttaccggggcaccgagggactataacacaagcacaacaggagtgctggggaaactggaagagcaagcagaagcaacaatgcaaagaaaaatgacaagcacctacaaaagcgctagtgaggtagcattttgtagtatgtgaactacagggggttagaaactactagagggcgatttgtataagtgaaaagcaatgctggggtagtaagtagggagta

SEQ ID NO: 5524 - DNA, 548 bp, Glycine max
  Clone ID: jC-gmfl02220072g11a1
cagatgagtaggactggtgtcgatctgtagctagcaatgtaccaggtcctgtcacgtataggcagaggcagtgctgcacaggccaaacaagaactacctctagcgcgtccgggctctccagggcaactgccttggctaccccaggaagagcaggggccacaaaaaaacacgccccccgccgaactggcagtggccacctgccacccaacacaggaagcgctacaaatataacgggttaggcccggataaaataggttaccatcttagggttttctactagctgaggcaccggtggcagcacggcataaagccccagctgaggcggacgatgccccggccctactagtaaagcgccctgctatacggggataacgataacacattcaactacgccggcattgtccccccgtggccacttagcccggggccaggcttgctcctgaggcctctgctgcagctgaattttcctctggcgcgccagcataggcagccacagccgacgggtagtagcaagcggtaacaaggcctaatgagaacacgccacaagt

SEQ ID NO: 5525 - DNA, 531 bp, Glycine max
  Clone ID: jC-gmfl02220072g11d1
actcacatgacttgaccagcagatttaccctactagcatgtgtgcacgtcctccttcttggggggggggggggggggggggggggggggggggggggggggggggggggggggggggggggggggggggggggggggggggggggggggacccaaaaaacccagtttttattttaggggaaaaccctttaaggccctggccagggttttaataaaagttcccccgaaagggttaattttaagaaggggtttcctttagcggggcaaaatttttttttaaaaaaaattttcccccttaagataaattttcccccaccccggaaaaaattttcaaaaaccccctttcccaaagacccccttaaaaaaaccccaaaatttaacccccccgtttaaaaagttcccaaattggccccttttttatcccctaaagttcccaattggcaaacttgggtttgagagagagagcccttaaattaactgggtccccatagggccgttccccaaaaaccttttccggggattcccgtttttt

SEQ ID NO: 5526 - DNA, 559 bp, Glycine max
  Clone ID: jC-gmfl02220072g12a1
cagtgacgcgcgactggtatcgatctatcgctaggaatgtgccaggtgccgtacactgggtgatttttttgtgtggggggctcggtaggtgcggggttgcggcaacgtgggtttgacttaagccttattcagtcgggcatttcccggtatacgtgttcgcacacctggcagcaaatttgtatgcataatagcaaagcaaaggggcctttggtgcgtaaccagtcaacttaaccctaaccctagttgctaatattattaccgtaggctgcacgggcaccaaagtttgcaccacaatacatacaactgtatgcagccgcttgggccacaacgtggcacagtgatataacaacttagacggggcttattagcccggctgtgcctgcggtcgttaccattgccgcgcgcccacgattgcaaacgcaagcgctatctgtggcagcagcaacacggctaattgctgcacgattgctagggaaccaacaatggcggcatgcaacggtgaaacctaatgggcgctggcacggccatggggaattaggtaagctacgtggtttttcct

SEQ ID NO: 5527 - DNA, 721 bp, Glycine max
  unsure (1)..(721): unsure at all n locations
  Clone ID: jC-gmfl02220072g12d1
cctactatattcctcgtagtctaggggtccagtccatggagtcagcgggtcctcataaggagcagctagtgtagctgtctgacaaagtgatatctccatctcgttagcattgctccccgtttcaacaacncaaaccccccaccccaaccacaccaaaacaacacacacacaatcacacacaccacacccccaccattacccaatacacaccacccacaccacccgggaacaagccccaacaaacccaaactccccaccatgcctcaacaaaaaaaaaagcaactttttttttccttctctttctctcctcttatcgaaagcttaatcacaaaactaaaatcacggacattatttataaaactcaagtgcgacaaactccaaatgagaaagaaaaagccggttcctccatttctttatccaactctttatcctcagtttactcagcagcaaggggcacagactcagccaatttgcggtacttgagagcatagaacatctcgagatagcggcggctctcacggcggtcaaggttagacacatgcttccagaagccatagacaccggtgagagtgagaagcctctgagagtaaatttgccatgtgtacttctcttcaatacgctggagaccagcctttgagatcttgtcccagtgagttgggtcaagcttgcacttctcaaagaagtcaacaaggagatcagcagcacggtcaccatggtaagg

SEQ ID NO: 5528 - DNA, 509 bp, Glycine max
  Clone ID: jC-gmfl02220072h01a1
gttgggttcttcttgctttcaaccttaattatcaattttatttacttcttattcacgctatttattctttgacaataatttgattgctggaattgtcaatggtggaccctttgagccaaagtgttcatatttgaagctaaatctttccaccaattggactgagactgcttacagtttcagaatttgtcagataaagcttgtcccgattgcatttttgttcctgtacgtactcttattgatacggatggcagcaccattggcatgtgttgctgggagtggtttatccatacagagtaataaaattgtcaaggacttctatggaagatatctcttctcatatcataggctttcagcactgagtaaggagtcaaagactatatgcataaaggcttccttggatcataggacgcatgaaggcagaagaggatctctgaaatcgttgaatgtaggagttggcttacctgtattattaggaggtgggacagcttatgctgatgaactaagacctt

SEQ ID NO: 5529 - DNA, 414 bp, Glycine max
  Clone ID: jC-gmfl02220072h01d1
agatcacttgccaggagatttaccgtgctacatgtgagcacgtcctcctctttggggggggggggggggggggggggggcggggggagggggagggggggggggggggggggggagacgtaaaagaaagaagatagcggattaagggtaagcagataagcacacaaaattaggatggtgtatggaccggataaggagcgttgaccgcacaaaaaatggctaggggttcgacataatataccaaaaaacaatgaaacaactaactgacccgtggcgctgggtgaaaaggccccttaccccgcggggcttaagggggtctaaggggaaaaaaggtaccagtgccaaaacgatttgataggctaagcctagagacctaaggtaaataccaaagccgcacccacggcaaacacccatt

SEQ ID NO: 5530 - DNA, 510 bp, Glycine max
  Clone ID: jC-gmfl02220072h02a1
acaaaacgcacaaaggattattatagcaatggcagaacaaaaccaaaaccagacaactgaagctggaaggcaccaagaggttggccacaagagccttctccagagtgatgctctttaccagtatattctggagaccagtgtctacccaagagaacctgaatccatgaaagaactgagagagttgacagcaaaacacccatggaacatcatgacaacctctgcagacgaagggcaattcttgaacatgctccttaagctcatcaatgccaagaacaccatggaaattggtgtctacactggatattcacttcttgccaccgctctcgctcttcctgaagatggaaagatcttggccatggatattaacagggagaattatgaattgggtttgccagtaattaagacagctggtgttgaccacaaaattgaattcagagaaggtcctgctcttccagttcttgatgaaatggctaaagatgagatgaccatgggagctatgacttcatcttt

SEQ ID NO: 5531 - DNA, 524 bp, Glycine max
  Clone ID: jC-gmfl02220072h02d1
accatcactctacgagcactttacctactacacgtctgcacgtcctccttcttggggggggggggggggggggggggggggggggggggggggggggggggccccggcccccggaggggcgcgagtaagcgtgtaagctgaggatggaggaaagagatagagtaacgataggaataaaaaacctcgaaatcccttaaaaaaaaaaaaaaaaaccccccccaaaaaaacaaaccccttcccccacctcaaccaaaaaccaccaaaaacaaactctatttaaaaccacccccccaaaaaaaaaacaaccccccaaaaataccccccccaaaaaaacccacccccccccttttacacccccctataaaaaaacccccccccaaaaaaaaaaccccccccccccccttaatatccccccaaaaataaaaaaataacaattctcactcttttcccccaaagcccccccttaatttttaccccccccaccaaaaaccccaccccccccccaaaaaaaccccttttgcccc

SEQ ID NO: 5532 - DNA, 481 bp, Glycine max
  Clone ID: jC-gmfl02220072h03a1
gaaacggtacagtgcataaggctcgaggcatagacaaatgatcctcaatttgtcgctctggcgcggcaaggatcattgcggtctacaactgtcggttcaacagctcgcttatcggccaaggattatgactttagagacagcggcactaaccatagatagcatatcttgacatattcttgtttcaacagtcaatggtgtgtgccagctctattgtgcctatagtcatggaatcgcttactggctcctctcaaccagaaatatgatgttgcttacatgcacttacatggtaatggcatggcgcacacaaccaaaccatcatttggcagtgaagctggacagtcgaatcaaaatgcctacctatttttttggctatttgaagctgcatagcgttaacttataggctgctttctgaatcatagactgtagccgttactgggtatagcttgaattctttgcaggattatatagcatagcttcatat

SEQ ID NO: 5533 - DNA, 444 bp, Glycine max
  Clone ID: jC-gmfl02220072h03d1
gatcgacgtacgccgctactctaccaatgtcacgttgtagtaccaccttcttggggggggggggggggggggggggggggggggggggggggggcaaccaatgcagggtgagaagagcaactgaactgagagaacttgataaacaaggaaactgagatttacgaatcctgatgagtgagcatataaaaacctacatgagaaaggaatctgagatacttgtaaagactttaaaaaaagaccgagataggcagaggtcatgcgttaatggcatgcttaaagcaaccgggccagctcgctattagcttaggattagcgaacgccagcgaactaatagtagagggtgccagcataccacttacgagctaaggttagaatgagacctataagaaactgccaatatattaggcatgcgtcaaataacaacagcgtatcagagatgagtga

SEQ ID NO: 5534 - DNA, 571 bp, Glycine max
  unsure (1)..(571): unsure at all n locations
  Clone ID: jC-gmfl02220072h04a1
tccaaatcaaccttaatttctccctttaacccatacaatacaaaatacccgaaagccaaaccatgtctaatgtatcatcatcatcacttccggttttcgccctggatgccaaacccaactcgaacatcactcgacacactgcaacttttcatcctaccatatggggggattatttcctttcctatgatcctagttctgcggtgtatttttcaaattcaaggaccaaactggaaagttcaatgaaaggctagcaaatgatatacaaggaacgttgagcttgtatgaagcagcccaactaagatttcatggagaagagatacttgaagaagcacatgatctcactctcacccaggtaactaagtcaccaaccacccaattaagccatttccttgctgcacaagtgaaacatagcttatggcaatcacttcgcaagggaatgcctagattggagacaagatatgatatgtctttctaccaagatgatccctcacataatgaaagctcgttaacccttgcaaaactagattntaatatgttgcaaaagctacatcaaatagaagtcagtagtatg

SEQ ID NO: 5535 - DNA, 590 bp, Glycine max
  Clone ID: jC-gmfl02220072h04d1
ctgtcagggatttgccgctctacatcgttggagtgccgcctgcttggggggggggggggggggggggggaatgaaacacaaaggagtagagaagagtatagaaaggtaacaaagacagtaataagagaagaaagaaaagaaatggtgaatggcgagaaggaagtaaagagtggaggaatgaccaaaaggggcagcgaagtgggtaggaggtttttgctagggcgagaatgagtggtagtgggcgaaactatagttagtagctctctaaccggcataatatctagaacaaagggtaggccgatggcacgaccaggaacataactgctaggaagcgttggttaactatgtgtaattaatgggacgacggtggtaagccgagtggcttggcaccgaggagcggctggtagagactaagtaacctggcaaattatagcgttgtgggtggccgtagatgtatgggtaataagcgtagttagcacttgacaaagaaggcaacttctgctaataagggggcccgtatggcgtctttagagcacaattgttgcgcggcgcgtggttaggttaaccaaacagataaggcgtactagact

SEQ ID NO: 5536 - DNA, 497 bp, Glycine max
  Clone ID: jC-gmfl02220072h05a1
gttgagatggaggatataatcgttgaagagactgttttggacattgatacctgtgatgcaaacaaccctcttgcagtcgtagactatattgaagatctttatgcccactacagaaaattggagggtactagctgtgtctcgtcggattatatggcacaacaatctgacattaatgaaaggatgagggctatactgattgactggcttattgaggtgcacgacaaatttgacctcttgcacgagacattgtttctcacagtcaatcttatagatcgatttttggcaaagcagacagtggcaagaaagaagcttcagttggttggtctagttgccatgcctttggcatgcaagtatgaagaagtttctgtacctgtggtgggggatctaattctcatatcagacaaagcatacacaaggaaggaagttctggaaatggagaagttgatggtgaacacattgcagttcaacatgtctgtgccatcagcatacgtttttat

SEQ ID NO: 5537 - DNA, 552 bp, Glycine max
  Clone ID: jC-gmfl02220072h05d1
ctgtcggggatttgccgctctacatcgttggagtgccgcctgcttgggggggggggggggggtatagagcgaaaaggcgaggatgtgtgagaagggcacaggaggatagagggtgactagaaagtggcacacaatagggggggggcgggtagtagagaaaagagagagcggtgcaaacaatatagataacgatataaaaaaaacccccaaaggtagaaaaaaagatacaaaaaaaaaaatacaaggcacgaacacccaaccaaatagacacaaaaggggactaagtacagaagaacaacttacgacgacgctaaaacgtttggcttaacacgcggccaattttggggacggaactaccgattggtgtttttggcacgcctggtattatggtttagcgcaacgtacccgtagtgtgcttaaacgcgttagagctactacgtggtaacaattgcttagggttattttgtggcacagtaaccggcagccacagtagcttagcttgcaacgtaaaatgtgttggtataagctgcaccagggttggcgtacccagtg

SEQ ID NO: 5538 - DNA, 497 bp, Glycine max
  Clone ID: jC-gmfl02220072h06a1
caaggatgctgtgatttttggcctctcaggatgagaatgactggccggtgattgatcccttgccatcttatggtagagggagggacacacaaggtggaaggtttagcagcctaatttttggaaccaacctcactgatgtaatcataactggggacaatggcacaatagatggacaaggtgatctgtggtggcaaaaattccgcaagggggagctcaagtatacccggccttacctgatggaaatcatgtactcagataatgttcaaatatccaatctcactttggttaattctccatcgtggaatgtacatcctatatacagcagcaaccttgttgctcaaggaatcacaattcttgctcctgtgacatccccaaatacagatggaatcaaccctgactcttgcacaaacacgcgaattgaggactgttacattgtctctggtgatgactgtgtggctgtgatgagcggttgggatgagtatggcatagcttatgga

SEQ ID NO: 5539 - DNA, 541 bp, Glycine max
  Clone ID: jC-gmfl02220072h06d1
ctatcagcgatttgccgtttacatgtgtggagtgccgcctgcttggggggggggggggggctagcatagcatgaacgggagtgactaacgattaaattagatactaggaggagtacggaaggaaggtaaataactagaccaaccggcagccgagccaccggggtgctactgcagcaagttgctttagaaataacagtgtcagattggaaagagtaaaataaaactctaaggagaatatttgggtatggtactgctcatgggagagtgccggcaaggtcgggggccataacagtacaatggcggcagaaaagtcgagagcgaagtagtcagggttgagctgctggtggcaggaggcaacgcacttatgttgggtgctataagtatggcggtgaaagggcctatagtggctggcaatttgctcgtcgccagagatgttggtaacggtactcacggcgagattagcgttaatgtattgcggagcgaggagatccctattggcagggctttgttgcgttagccgcttcgtaatgattaagggaac

SEQ ID NO: 5540 - DNA, 118 bp, Glycine max
  Clone ID: jC-gmfl02220072h07d1
tgtgacgagtgacgcggttagccgtgctacatgtttggacgtccaccttcgttgggggggggggggggggtacatcgaggtatcgggtcgtaatggtatgcgaagaaaagagccgaga

SEQ ID NO: 5541 - DNA, 564 bp, Glycine max
  unsure (1)..(564): unsure at all n locations
  Clone ID: jC-gmfl02220072h08a1
catcgcgcgcccgtatttctgnaatgtaccaggtacctgtcacctggttgcagcccgctggataacgagcgggtccactgagcctctaacaactacgtgcagcggagcacaggtggctactcccgcaccgctgcccacgattcttactaattggtgaggcgttcgggcataaacgtgatgtctttacataacctgtcttctggcccgggtaacctgaactacccggagcgcagggattcgcggtcgcgatcaaccccgccttccaacacattacggttaaaaccgaggcgggagccgaactttattaattaaccgcggatgtaatgcaaagggtactctactaacaccgtgcggcttcaccactcactgccaaccaacggcccgccttgtacccggtgtaaggtagatgcccgcaagcaccatgtcatggataaagaggggcaccgtaggtgccgccagcggctttatactctgcggacaaagcagttaacaagtaatgcctgtgctaatttacgttagaaatatacccaatgctcgccttgtatggtgctgcccaaaacgaat

SEQ ID NO: 5542 - DNA, 482 bp, Glycine max
  Clone ID: jC-gmfl02220072h08d1
gggagtgcgctcccgggagatttgccgtgttgcatgtgtggacgtcctccttcttggggggggggggggggggggggggggggggggggggggggggggggggggggacgaaaaaaatgtataggaggaagtgtactgcggtggacgatgaacataacagggccccccaaaaacttgcaggtacctcggtaaaatgcatcaggggttgaaacgtgatagggaagctttgttaaagatggccaaaagcaactaattgattagaatgctaataaaagtaatcccgcttattaacccaaaaacccggccggtggggttatcggctttgctcccagccattagggggcccccaaaaagcgttgggcctttcggaattttgcggatggggtttacttaaacgcaccttatctacggtttgcgcgggagccattcccggctaaaatttcggcaggtggccagtagggggaatactctgccccctaata

SEQ ID NO: 5543 - DNA, 595 bp, Glycine max
  unsure (1)..(595): unsure at all n locations
  Clone ID: jC-gmfl02220072h09a1
tagtatggtgtgactatcgtagcagtgtgccaggtctgtcactatggtaaaccccgtaacacagtaggtaaagaagctaagccgcccttactgacgggttccgcgaaggcacctgctagggcagctaccagagggctggacgcggacacggccgcaggtgaagatgatgggcagcccctgaagtggtaacttgccatcagatcggttgagggtattgcagaagcagcggctgttcacgcggttaagcagttaaacaaagcaacgggctggttttgtaacactgctgtaccggtaaatgttgtgtttaaaccaaaccaagcaatacttgcgcaagcggtagacacggcaaatgtggctaagcaagcctgtattagtgcgattgtaacgattgccaccactgcgtacggtgacgaatggacggcttgtgattacaaatactcgcttggtgcgcatcccttacattatgtagtaatgattgacaccgaagcgccgcttgcggtgcgtttaattgaagaaggggataaagccncgcttacgggtgaagtaattagtagtacttagcatttagcgggtgtgagccacgccacgccggctg

SEQ ID NO: 5544 - DNA, 596 bp, Glycine max
  Clone ID: jC-gmfl02220072h09d1
aggcggtagggtaccaggagatttgccgtgctagcatgtgagcagtgccgcctgcttggggggggggggggggggggggggaatgctttaaggaaagccaggcaaacaggaaaggaaacggggccataagaggtcaggctgaccaagcgaaggaatagttcatggcaaccgagccgtgtgaagcgaaaaataagaaagataatgagaataactgattggggtgttataactggctaacgggaaaaggagggaacagttggcacatgacaatgaaaaatgtgaaagagggtattagcgtacagagggattgatgggagcatacagaaagtgctacctataagaaagacttataaagcagacaaagggagaaggtaccgaggtaagctgtacaaacctgggctgcaggcaatacggttattagtggtaacgttacgggtgaaaggttggagagtagttaatggcgggttacagttgactgtactgctgagccaccagcttgcaggtgttcggggcggagctgctaaaattgctaaaactgtaggtatgtgcttacgggtacgatacgtgctaccggggccactacatcgtcactgggt

SEQ ID NO: 5545 - DNA, 568 bp, Glycine max
  Clone ID: jC-gmfl02220072h10a1
taggtacggtgtcgatctatcgctagtaatgtaccaggtaccgtacactataagttgctctatcgcgtcggaaattaatttctcgctgttggggttagggtgtagggttggtaacgatggtacggtgtactatattatagtattgggctactacttgttagaagaggttaaggtagtatttgtggggtaagaggtttggaggagtctgggcaggtcggcagggggggaaggtgggattgtaaggggaagaacaagtacgggggcgacggggcagggcggcgacgaacaggaaggaatgaggtacaggtacggaggcttactgggcagggtgggggggggggggaaggaccgggctaacgaaaatttaaatttaaattttgacattggcccaagacgggcacacggcgcggcaaaaacaagtccagtggcgtgtcggggagggtacagaacaaacgtggacaggtacaggtacggcggcatctgggcaggtcggggtggtgaaggacagggctcacgagaccgcaactttgaacgtggagccagaccgacgcactgggcggcggcaaca

SEQ ID NO: 5546 - DNA, 537 bp, Glycine max
  Clone ID: jC-gmfl02220072h10d1
ggggtcagcgtgccaggagatttgccgtgctacatgtgaggacgtcctcctgcttggggggggggggggggataaaggatcttggtaaaagaaggacaaaggtaagaacgatattacctgttaaaagcagggcccagcgattagacaaaagcataacatgaaaatgaagatatgattacaagaccaggggtgaggtatagaaaaacatgaactgggcggcggaccacggggggggggaagggttgctaacgatgcgtaaccaattaaattgagcgatatggtagctaaaagagaaaatgcagcagattaaatattacaagctgagtaaaatgtaagcttatgagggagtgcaatccacaaccaaccctctttaatccgccacacaccaatagtaatgtggacaatgacatttcacggttttatagggttaggttatgggcagtggttaagacagatgcaactaaacctacaaccagagcgtagcaaactatagctataaaggacaggaacgggtgtgggaatgcaagcaagcacggt

SEQ ID NO: 5547 - DNA, 563 bp, Glycine max
  unsure (1)..(563): unsure at all n locations
  Clone ID: jC-gmfl02220072h11a1
cgagtgaggtgtgantagtgttgatctgtagctagnaatgtaccaggtgccgtctacctttgtgcgcgcgggagaccccttagtaggccatgggagcttttaagactggagagtggccacccaagagggcacccgcataaccaacccagtaaactactgctattttagcgggggtgtggcgtgactttacgtggtagccaaccccgcctaggtgtgcctagcggtgtaatgttaagcacactggggcgcttgcgtggggataatgtaaccaccaggggtattaggcgccaggcctggaccacgcacagtaataaccggaagcaacactatacgcccgtgcagaccaccagtgggcggcccacacgatggctgcgactgaatagccttggtgccgctggtaagggcgggccagggggcagcttgcgggagtggttaaaacgggggaacggcgaggatctgccgtataaacatgcagtaaccataaccacgtagcgacggggtggggcagcgagaaccgtggcaattagaagggatgcggccggacgcgagcagaggggtagacg

SEQ ID NO: 5548 - DNA, 602 bp, Glycine max
  Clone ID: jC-gmfl02220072h11d1
ggcttgagttggccaggaggtttgccgtgctacatgtgagcagtgccgccttcttgggggggggggggggatagggatgagcaaaagagtagatatgaattaatacgaaaggagccggtaacattggagatagtaaaacaaaatgatagcatgttggcgttggcagtacgtgggcgcattactcgaagataattgaaaaatggggccaacagaaatacctaataaaaagttaaataaaggcaactattacaaccttagcggactgatactaacgatgtgtttaataaacagttgttgagtacatttatgcgctgtggtaggaattggcggcagtgtatgttgaacttaagttataagccgcaaaagttgttggcacggcgaaaacatacctataaaactgtgtaggccacggcacaatagcttacacaagcttattttggttagcaacatggcctgacataacacaaaaatagccccgctactgctgggcagtttggttggcgtatttgtaaagaggtttgttaacagagaactgaggcccctagaaacgttaagcagccttttgagaaatatagacacccttgtcacttcaaggttcactg

SEQ ID NO: 5549 - DNA, 572 bp, Glycine max
  unsure (1)..(572): unsure at all n locations
  Clone ID: jC-gmfl02220072h12a1
cagatagtgggtgaganctagcnattgatcgtataggtaagtaactgtgcgcaggtgcctgtacacctttgtgtgcgcgggagaccccttagtaggccatgggagcttttaagactggagagtggccacccaagagggcacccgcataaccaacccagtaaactactgctattttagcgggggtgtggcgtgacttaacgtggtagccaaccccgcctaggtgtgcctagcggtgtaatgttaagcacactggggcgcttgcgtggggataatgtaaccaccaggggtattaggcgccaggcctggaccacgcacagtaataaccggaagcaacactatacgcccgtgcagaccaccagtgggcagcccacacgatggctgcgactgaatagccttggtgccgctggtaagggcgggccagggggcggcttgcgggagtggttaaaacgggggaccggcgaggatctgccgtataaacatgcagtaaccataaccacgtagcgacggggtggggcagcgagaaccgtggcaattagaagggatgcggccggacgcgagcagaggggtagacg

SEQ ID NO: 5550 - DNA, 589 bp, Glycine max
  unsure (1)..(589): unsure at all n locations
  Clone ID: jC-gmfl02220072h12d1
gcactacatgtgcgatcgatcagnanatcattgnnnnnntnnnnnnnannncnnnnnnnnnnnnnnnnnnnnnnnnnnnnnnnnnnnnnnnnnnnnnnttnnnnnnnnnnnnnnnnnnnnnnttgtggnnggggaccttatanntnnnnngaaaantanatgacttcttgtccttgatcagtctttgtgaccagcgtaatacaacctaaaaacttttggaagataaacaggcaacaaaaatccaaacaaattgaagcaccagaaggccatgttagctacagcaagtactctcccaacaaagatcctcctatcagacccactgtgctcttcattaaccttgttgatctcactcctaagccaatccacaatggtgaaaatcctccttgagttgtaaaagacaggcacaaaagctctcattggagttgagaacatgccagagaatgccaccccttccatgaagacttggctagacaagagaaaaacatggggtgcagctgctttgatcccttccttgtcaccctcaaatattccctccaagatataagctattggggcataaagtccaatgatggcccctataaacacatag

SEQ ID NO: 5551 - DNA, 380 bp, Glycine max
  Clone ID: jC-gmfl02220073a01a1
caaaatgccaaccatgaatccatatagtttcaaattcatagaagccttactaatattaatggtgggtttgatgatgatgatgatgctgcacgttgtttgcgctgaagaggacatagtgcgcattgcgagggaaagggaagcactccttcaattcaaagctgcccttgtggatgactatggcatgctatcatctaggaccactgctgattgctgccacagggaagggatgctcttgaccaacctcaccggacatgttctaatgctcgaccttcacggtcagctcaattattattcatatggaattgcctcacgacgttataccagaggagagatccacatgtcgatgatggagttgcaacaattaaacctttttaaacctc

SEQ ID NO: 5552 - DNA, 513 bp, Glycine max
  Clone ID: jC-gmfl02220073a01d1
aatacatgataagttatatttcatttcaatagcacaacactaattaaactagtctttttcaaattatcaaaacatggtataagtatctcaattgacagtgaaaaaatctaaagcaatcataacttccaactaattgccttttccaagcattaacaagcttagacattggagttttccgatccaagagggctagtgtcttcaaggtactagttaagcttcagccatgcacctttgatattttattagcaaatattgctaccttgacataaatattgtctgatagattgttcaagaacttgaaataggcatgtctccaagaaagcttgaataagattgagccaaacaccacccaaaagcttataacaaatccaaatgccatactcatgtaaaattcacgactgaaaagtgaaaattcgtcctcttgaacttcaacatttggtttttgtgtaggtctcccatcaatacaaaatttctcaagtggctgtccacaaagatcaagattatcttcataac

SEQ ID NO: 5553 - DNA, 317 bp, Glycine max
  Clone ID: jC-gmfl02220073a02a1
ctctaggcaaaccagtggcccttacacattttgaagcggataggggatacccatgggcattgttgctaccatgaggatgacgaagacccatggaggaagggcctggatgattatcgcacgcgttgagactgccacggagtcactgccaccactgatggttaccataggcgatgcctctagattacgagtggtgacggccactgctgactgctaactaaaggagaacgtgatcccgggcccctagaccagacctgtgactatggatcgcgatcaacgacagactactgggaaggcaaaagtaacatgctactgaaact

SEQ ID NO: 5554 - DNA, 306 bp, Glycine max
  Clone ID: jC-gmfl02220073a02d1
acatgatactttttttgtaatttaaattggacatccttcggtaaacttgatttttcaagaatttctcaagccggtacaagaacctcaaatttcagtgtaaaactgttttgcctgcagctgatccatctggaggatatttccaggcacccactagggctgacactggcttatacaggacatcgaaggcttactgtccacatggtcgagtaaaagttcatcctttcaaatcagcttcttctacttcgagtttcgtcacactggggtggcccttgggtaaaagctttctttttaactccctatgagccc

SEQ ID NO: 5555 - DNA, 497 bp, Glycine max
  Clone ID: jC-gmfl02220073a03a1
agttgcaggtattctcttgttgattctgttagtactgtgctgcttcttgctgtgttgtttgatcagaagaagagctgcttcaagcagaaagagtagcaagactgctaaggctgcagcatctgccaggggtgttgagaaaggtgcctcagctggtggtgaagttgaatcaggaggtgaagctggtgggaaactagttcactttgatggcccttttgcgtctactgctgatgatcttttgtgtgcaactgcggagataatgggaaaaagcgcatttgggacagcatacaaagcaacactagaagatggtaaccaagttgctgtgaagaggttgagggaaaagaccactaaagggcagaaggagtttgaaactgaagttgctgcacttggcaaaatcagacacccaaatctcttggcacttagagcctactatctaagaccaaaaggagagaagccttttgtgtctgattacatgaccaaaggaagcccagcatcattcc

SEQ ID NO: 5556 - DNA, 563 bp, Glycine max
  Clone ID: jC-gmfl02220073a03d1
caggtaaaaacaaaagcatcatcatttcataagatgaagaacttgtttaacaaatattgaaaacatacattatttctccaagttaaaaagaatacatagtgtaaaacaaaatccttgctcgtatatatacataaactcaatgaacaaataaataaagaattaaaacacatatcctttctctagtaattaaagtaaatgaataaaaataatctccttccttaacacacacacacacacactcagaatcaattctctttactcagtttcttgggccttagctccatcatcatcccctgaagctaagtctggtttaatctcctccaattgctgtagaacttgatgaacttcaggcctagcagcaggagaaggatccacacaatgcaatgctaacttcaatgtgttaagcaattcatctcctatggctggtgcatccctcatgagctccaaatcaaacacttcattagtccactcttccttcactatggatgccacccattgtggcaagtccatgccattggttggctcccccggcggtttcccagtcaggagctccagcatgatga

SEQ ID NO: 5557 - DNA, 520 bp, Glycine max
  Clone ID: jC-gmfl02220073a04a1
ggtgggagggagaaggctcctgctgctttttgtcgcaagacacttacttccaaagaccgatttgagatgtggggagatggattgcaaacaagatccttcaccttcattgatgagtgtgttgaaggtgtactgagattgactaaatcagacttccgggagccggtgaatattggaagtgatgaaatggtcagcatgaatgagatggctgagattgctcttagctttgaggataagaatataccaatataccatattcctggccctgaaggtgttcggggtcgtaattcagacaatacattaatcaaagagaaacttggctgggctccaactatgaagttgaaggatgggctgagaattacatacttttggatcaaagagcagcttgagaaagagaaggcagaaggtgttgatttatcaggctatggatcatccaaagtggttcagactcaagccccagttcaacttggttcccttcgggctgcagatggcaaagaatgaagcctctagttcggcagttgct

SEQ ID NO: 5558 - DNA, 533 bp, Glycine max
  Clone ID: jC-gmfl02220073a04d1
ctatctgccttgaagaggatccaccactaccctttttgttttcatcaaatttcttggctgagtgctttttttgcatctgcatcatttgcagcccaacttcctttttttactgaaactacgacactagtttttttcacatcagccttctgaccaagtgcctttttcactgaccgcctggtaggtttggcttctgaatcactagctgtcacctttgaaacatcctctgcagtcccttcttttacagggccatctttcttttttgttcgtccaagtttcttagaatgattttcatcacagaggctctcacttggtggagaagcaacaacttcggaatcatcattgcatgccattggcgacgaaatcttagcatcaatccctttgtcattctctgaaggtcctgcagcttcaacagaatggtcctcgggaggggaactgtgaactatcttgctgttgctttcacagtcgagcattttctcagtttccttctcattagcagcaacttgaccctttggaggttttgtcaatttaattga

SEQ ID NO: 5559 - DNA, 471 bp, Glycine max
  Clone ID: jC-gmfl02220073a05a1
cttggtacagtaatagtaaattgtcgcagcctcttttttcaccaccatcgattacatctactaaagtaaactggctcaattgggattctcatgaatgccttaaattatctggaaattgacagtatgacgactcaaatcagaacctgaagaatatgatcagtacagtcattggtcagtatggactcttacctgtttcaggagttatctccaagcttaagtctgagggacatggtcatgtttttacttctgtattctatgcacaatctggcattcaccccatgttgagtccaaaaccagtctgccagaatgagaggcctccctttcccacaagtacctactcccagtccaatcctgacagtcactgctcagatcaacctcatgactgttccaatgatgctacttgtcttgatcaaaatgtaaaggataatactgattcagatcacgcaaggcatgagtctgctgctgctgatc

SEQ ID NO: 5560 - DNA, 558 bp, Glycine max
  Clone ID: jC-gmfl02220073a05d1
gagaaagcaagagaggttggcacatgggaacaaacaaggcaaataaaagccaggtttgacaggttgatctctaatgacgacaaacatgtcaacagcaaccttaattgttgacacgtatattttacaactcaaagtagtgccaccatacattttggcactttagtccgcaggatgttgcaatcgatagtagcttaaaatttaaaataatataatcacaatattgggagaaatatatatgaacaaaaagccatgccaaaaagcttcacaagcttggtaatgccgacataaagaatgagtgaaaatgtgatgggaagagtataaaatctgagaattttacttttggaacccaccaaattgatattgttggttgctaaggcttgagaaaaagtcgtctccagctgctggctgtgaaggagtgaatccagacctacccattccaagaccagatcctgaacccatagctctccccatgtaaaatgaaggtggagggcctttctccctttcatcggatccatcactcaatccacccacaatttcaacgtccgcaggggatacttt

SEQ ID NO: 5561 - DNA, 525 bp, Glycine max
  Clone ID: jC-gmfl02220073a06a1
ggttgggcgaggaatggatttgggatgttcagacgcaagcgtgtggaaggaagcactctctttatacccttctcgaatacaaactctctctgtgaaaaagaacaaacccgatttggtttctctggatgacttctattgcaaccaactccctctcctccttcaccagcgaaaccctaaccccttcatcaccactcccgagctctccaccctcatgcaatggaagctcacgcgcggcaaatggaggccgcgtctgttggatttcgtgtcgtccctagacgacgccgttgtgaaatccgcttctcagaaggcgtttcagagccttcccgatgtatccaaagccgtttccgagctcactgtgtcgaaaggcgttggtcccgccaccgcctctgccgttttggctaccttcgcccctcacttaacccctttcatgtctgatgaggctatggaggcagctcttggagctcaaagattattcactgaagcaatatttaaaattgtggataaagtgcaaaggaagcggaggaa

SEQ ID NO: 5562 - DNA, 302 bp, Glycine max
  Clone ID: jC-gmfl02220073a06d1
ggccgccctttttttaatacatgatttgttttttttttttttttatttttcatctttgggttctcgggtttttcttatattgtttaacataactatattattaaaaaaacaaaaaacaaagacaaaaaagaggccacgagaaccggcacaacagggaacaccagaacgcacaaacgacgacaggaagataaagaagacgcagaaaaaaaaaaaaaagaagagggaaacaaaaaaaaaagccaacaaaaaaagaaccgggacagaccaaaacggacagggaaagagccccagcggccgggaaa

SEQ ID NO: 5563 - DNA, 546 bp, Glycine max
  Clone ID: jC-gmfl02220073a07a1
attttgtgtcccttctctctttctcttgctcgatattttccaaccaaaataattattaaaaccaaacgtagctaggcaccactgctaggaatggcaagtgagatatttcttgcccttctgatcacaacctttgtggttgcagcctctgctggtaacttcaaccaagactttgagataacatggggtgatggtcgtgccaaaatcctcaatagtggggaacttctcaccttgtccctagacaagacctctggctctggatttcgttctaggaatgagtacttgtttggaaaaattgacatgcaactaaaactcgtgcctggtaactctgcaggcacagtcacagcttattatctatcttctcttggggatactcatgatgaaattgattttgaatttctgggtaacttgagtggtgatccttatattcttcatacaaacgtattcacacaagggaaaggtaacagggaacagcagttctatctgtggttcgaccccacccaggactttcacacatattccattctctggaatcctcagagcatcata

SEQ ID NO: 5564 - DNA, 475 bp, Glycine max
  Clone ID: jC-gmfl02220073a07d1
aagcgcacaattctttttattttgtaatttataactctccaacaaatttattaaaaaccaaaattacaacgaatctcatttgcacactatttcacagacaatagatgcatataaagtataaaccgaggagccctattgtggtcttattaatttacacaagacaagaaaaaaaaaatgaattcatgaggtatgagaggtttataatatgaaatagttttggtttcatgcgattgtgcactcaggaggaaggccctgtgggaaacgcttagtgtcagtgcagtagttgtaaatcatgtagttcttttggacccactgaatcctagcttgccctgttgaatccagtgattgtttcaaccatgcttggtttgatgatggattgttggaggagcaagatgagcctgaagaagaagtccaaacacatgcttgggcattgaactttctgtaagaggctgtgaatggggcttggctccaatca

SEQ ID NO: 5565 - DNA, 552 bp, Glycine max
  Clone ID: jC-gmfl02220073a08a1
ttctcttttcacgtcattatcctaaacttgcagattttcacatcccaagcaacatgaaggggaggttcatgtttctgtcggtgctcctttgtgccacctttcatgtctccttctccattactgacggcttagtagcaaacggcaacttcgagctgggtccgaagccctccgccctgaaaggaactgtggtgattggtggcagccactcgatcccagaatgggagatctctggcttcgtggagtacataaagtccggccagaagcagggcgacatgctgctcgtggtccccgagggggcctacgcggtgcgcctcgggaacgaggcctccatcaagcagaggatcaaggtgatcaagggcatgtactactccatcaccttcatggtggcccgcacctgcgcgcaggaagagaggctcaacatatccgtcactccagactgtggcgtcattcctattcagactctgtataccagcagtggatgggacccgattgcattcggttcaggcggagaatgagacagtagagatgctgattcataaccctggcaaagag

SEQ ID NO: 5566 - DNA, 573 bp, Glycine max
  Clone ID: jC-gmfl02220073a08d1
gtgaataatctatatttgtttcgcaccatttattcaaagtacatgaaaggagttatagaaacacgccaccgtatatatactatacgtctatagatgatacttgttatacacacttatttttttcatatttaaatgaaatcaaactcgttacctctcaagcctctaaagaaaaaaaatagaaaataagaagcattcttaattattctcctaactatatataaaatcaaaggctcagaacccatatatataatactttgattcattagcctcacaccctagcaagcccaaattccctcatcatggtttacgcaggctcaccaacttgacatcatcaatcacaggcccacagagtgaagaaaagtcatcacttctcatggtgtagaatgtgctaaggaacatgattcttgttctaggggtaacagccacaaacttgagtgctgcacgtttgaaccctcctttgcctttggactcatagggcaccttgatggtgtcttttcctgcaaaggctttcacaatcatggacccttcacatgagttgcttgcattcccacagagaatgagagcacataggtt

SEQ ID NO: 5567 - DNA, 566 bp, Glycine max
  Clone ID: jC-gmfl02220073a09a1
ctaatcttcccgttgcttctcaaatcgattcaattggggcgttttcagggcatcaatggagtgaaacaggagagagagagtccgtgttagatcagaaagaagagacagagacggcgccaccaatggcgggagcagataaagaattggaagagcaacttcttgaagccggtaacaagcttgtagatcctccttcgtcggtggaggacctcctcgcactcctagaacaagttgagagttgcctatcaagggttgaacagtccccgaccgactctatgcaaaatgcactctctccatcattgaaagcattgattgcagacaaacttttaaggcactcagatgatgatgtcaaaattgcagttgcatcttgcatcagtgaaataacaagaatcactgcacctgaagctccttatgatgatgatcaaatgaaggaggtatttcaattaatagtgtcatcatttgaaaatctacatgataagttaagccgatcatattcaaagatgatctcaattctcgacactggtgctaaagtcagatcatgtgtggtaatgctggaccttgatgtgatg

SEQ ID NO: 5568 - DNA, 560 bp, Glycine max
  Clone ID: jC-gmfl02220073a09d1
gtgcaaaattgttaagtttattacgaataacaaaatttacaatgaaggggttcaaaatactctcaaactctctaaacccaaaatacagagctccttgtaaaggagacaactactatctatctaaccgaaaatggttacaaacggaaaaaaatagaaaatagttacagttacaacacaacttatgttagtgaatcaccatgttggacggtccctcgtacgtgactggatgctccaccaggtgacataggattggatgacctatataaaagataaaagtactggaccagacgatcattgatgtccattctatgtctatcatgtattgtccaacaatcatcaatctccaccttgattcaataatatttctgaattacaactaactcagttcatttccagcaatctacagtaagtagatccagataatgcatgaacttgtttcttagaaccggcttcgtgaacatatctgttggattctgcctcgtatcaactttctggaccttgacccttttctcaaaatggatgaagtggcttctaatgtcaatgtgcttagtcctctcatg

SEQ ID NO: 5569 - DNA, 588 bp, Glycine max
  unsure (1)..(588): unsure at all n locations
  Clone ID: jC-gmfl02220073a10a1
gaaggtagttgccaaagttccataactaatacagtttgtcagcatgatgaaacagaggaaactcatgaaaatgaacctcaacaagaaagttctggatcggaacttgagaaggtttctgatcaggcaaaatctacagcagaaacaaatggcagtaagctttcagctgcggccaaacctttcaatccaggaatgttgtccatgtctcaccatttaaattcagcttccttcacaagcatgtatgatacagatgttagtcaaggcatgcacgtggagactgtgcttccccctgctgttgctagggtcccttgtgggcctagatcgcctctgtattatagaaccaactatacttttcgcatgaaacatggttctactaaaggtcaaacctctatcagagaaagaagtggatttgggtctacaagaataatgaatccacatgcgcctgagtttgttcccagaaatgcttcttanatagaagccaatgatgccaaatcaaatgtttccaatgagcataactctttgtctgacataggcatgtcagaagaaacaagctagatgaaaatttgctgaaatcaatggagttccacaaaa

SEQ ID NO: 5570 - DNA, 412 bp, Glycine max
  Clone ID: jC-gmfl02220073a10d1
gaaataaaaaaattcccaagcaaaaaattttttttggggctggcataaacttggccaacaattcacaatcttggtaaggcccgccatgattaagtgggaatatatttccccatttctctggattacagcttatggcatggccctctttgggggttttggggggccccttccccaaggggaagccagcctctgggggttccacaaaaaatttcccaaagggttctaaagtagtaaagttcatggcatgccctcggcttttatgcctttgggaaagggaattcttgtgagaaaggtctaggagcttttcaacggggcaatttcatgggctgccaaaagctttatttttttatatatatatatatatatttatatacatctatatatatagggtcccacaaaattttttctttaa

SEQ ID NO: 5571 - DNA, 300 bp, Glycine max
  Clone ID: jC-gmfl02220073a11a1
gttctaatcgcgagcggccgcccttttttttttttttttacgctcttcacaaactataacctggattctaacatatgattacaacactgaaactatacaaccgtgccttataaatgcaacgaacccacggactggactgggcagcccaatcttcataaccactatagatatccacgcacacgctaaagagacttggaatctctacaaagattaaacataaaactttgaggaattcttacggatccactgatttgactgcctcttaggacaatcatctcgaatgatatctaccatgaactt

SEQ ID NO: 5572 - DNA, 513 bp, Glycine max
  Clone ID: jC-gmfl02220073a11d1
aatatataagtgagtctttacagcaagtgttgagagggataagatccataaaaaagttacatcaaagactaaatatgtcagcactcagatattgtctttgctatcacaaggtaaaaaaatgaaaatgagaagtatacagaatttccctcacctatgctgcaggataatcaaatcccttgttatacattgctgagatcttatgttctctgggtacaaaatactacaaacaatctcaaattaaagaacagaagattattttccctttgcaaatttctcaatcattaaatgttcattgacaatatcaaaaaatgggaagtctctttgagggtcagaataacttgctttgcataaatgatgtcacacaggctcactcaagtttccatgccttttaaccttcaatttgtgatcttcgcatgaaagtcttaaaattctgaccatcagctttacaccattaaaaaagaaaaggagcactgtctacagaggaacatcgacaccacggctatgccggtcacg

SEQ ID NO: 5573 - DNA, 596 bp, Glycine max
  Clone ID: jC-gmfl02220073a12a1
gtgggttgatatctgacaaaaaaatgggcggaggaggagcaatgaggtcggcggcggcgaagatcgccggcatcggcatttccaaggcggcgctccgtccttcggcgctcccgacggagcaggcggtccacaacgcgtcgagaccgacatcggttgtcggagtgaagggggcgaaatccactgaggttgcgtcgcttcacgcggcagcgccgtgggacgactgggacttggccgacgacggcgatttggtcgcgccgaggatggtgttcggctctgtccccactttcgctgaagctaaggaagccaccgcagaattgaaggatgctattgatcaagtatatccttctcctgagtcctctcaatattcatctcgtggtggtcaagtctctgctttgtctcctactggtggtcaagtctctgctttgtctcctactctttatgagccagtgaacagatcttgtgaagttgatgctatttcagattcttcagcgcccaagcatgccattcaagcttttcatttgctcagcacaagtcgtgatggtgtttcaagtcaaaatacagtattctaatcgtgaaaatttaaatgtttataaatg

SEQ ID NO: 5574 - DNA, 580 bp, Glycine max
  Clone ID: jC-gmfl02220073a12d1
aaacaaaaggttaaaaataaataaataactatccaataagactttcaaatgttaatggaaataaattaccgagtgcgacacatcgtcaatttaaaaacagttcagacttgattacatggttttaaaaagatcagaaaagtcaacaaattgtagttttgcttccaagagtcttaagctctctttgtcactatcaccattatcactattattgccaaacctgtgaaggttcctcccatgctaattttactatccatgaaacttgctttagtgttcccatcgacatcaccagacatcttctctttcatagcatcaggtgttgggaatatgttctgaaggaaaccagacaccctacttaccaattcaataacggttagctttacattctgtagaagatccatgaaatcgaaaatcccattccccgggtgagactcatgtgacactcccaatctttcaggggattcaactgtttcagaagtacaacttgagaacttatccaattgctcagtatttcctgctgcttcaagatcagccactgactgttgtgactggaagaaactactgacggcaggattttcatgac

SEQ ID NO: 5575 - DNA, 310 bp, Glycine max
  Clone ID: jC-gmfl02220073b01a1
ctcgagctataggccaaccatggatccatatagctttaaatgcatagaagcgttgctaatagtaatggtgggtatgatgatgatgatgatgatgcaagtagtctgtgccgaagaggatataacgtgcattgatagggatagggatgcactcctccaattcaaagttgccattgtggatgactatggcttgctatcatattgcaccactgctgaatgctgtcttcaggaacggatatcgctgtaccaaccgtaccgggcaagttctaatgctcgatcttcacggtcagactaactattaattcattatgga

SEQ ID NO: 5576 - DNA, 409 bp, Glycine max
  Clone ID: jC-gmfl02220073b01d1
aatacatgatacgctatatttcatttcaatagcacaaccctggttaaactagcctttttcaaattatctaaacatggtataagcacctcaactgacagtgaaaaaatctaacgcgttcatatcttccaactaattgccttttccaagcattaacaagcttagacattggaggattccgatccacgagggctcgtgtcttccagggactagttaagcttcagccatgcacctttggtacatctatcaacagatatcgctaccttgacatgaatactgcctgacagagtgttcacgaacttgaaataagcctgtctctcaagaaagcctgaactacattgagccaaacaccacccaaaagctaattacaaattccaatgccatacgcatgttaaattcacgactgaaaagt

SEQ ID NO: 5577 - DNA, 575 bp, Glycine max
  unsure (1)..(575): unsure at all n locations
  Clone ID: jC-gmfl02220073b02a1
agaagagcaaagagagtgagaaatgaaggaagaagaagaagaagagatggcaaatgaactacccgtcaaagcttttggttgggctgctttagacacttctggcacccttgccccttttcatttctccagaagggaaaatggcgtcgatgacgtcactctcaagattctcttctgcggggtttgccactctgatctccacactctcaaaaacgactggggtttcaccacctaccctgtcgttcctgggcatgaaattgttggtgttgtgacagaagttggaaacaatgtgaaaaacttcaaagtgggtgataaagttggagttggtgtgatagtggagtcttgcaaggaatgtgaaaattgccaacaggatctggagaattactgtccccgccctgtgtttacctataactctccttattatgatgggacacgaacccaaggtggttattctaacattgtggtcgtgcaccaacgttatgtgcttccggtttctgagaacttgcccctngatgcttgtgcttctctgctgcgtggctggataactgngtatagcccaattgaatattatgggatga

SEQ ID NO: 5578 - DNA, 566 bp, Glycine max
  Clone ID: jC-gmfl02220073b02d1
aatgtaaattcaaaacccaaagtattattaattgaagagcggatgctctcatctttaaagttcaacatcttatagactagttaataccaccaatcttaactacttcaaaaatactgacacatgatgcaaagagttggagaatcacagtggattctaaaaacttgagaaagagctcgccacatcaatcacaaagcgatatttcacatcagctctgctaagcctttccatggctgtgttgatctgatccatcttaatcagctcaatatctgcagttatgttgtgctttccgcagaaatcaagcatttcctgagtttctttcagccctccaaagttgctcccccctataagctttcgtcctgcaactaaaggaaagataggaagctcaaggggtttgttaggcaaccctacagtaactagcttcccattcagcttcagcagaccaagcagtggaatcaaggaatgaacagcagaaattgtgtctatgatatagtccatggttcccaaagcagccttcatttttgcagggtctgatgaaacaagggaaaaatcagccccgagtcggtcaa

SEQ ID NO: 5579 - DNA, 493 bp, Glycine max
  Clone ID: jC-gmfl02220073b03a1
cacaactccactcttagctgccattggtttttcttcttccatttctcttcctttctaagcttttttcgattacccatttggagattctgtcctaatggctcttgctccttccaaagtttcctccttttccgggttttctcccaaacccagtgttggggatgctctgaaaaacccaacttgctctgtttctctgagctttgcgaatgtgaaacttggaagcagaaaccttagggtttgcgcctcaactgtgcctctctcaggggtgattttcgaacccttcgaggaggttaagaagggtgaacttgctgttccaacggctccccaagtctcgcttgctcgtcagaactacgctgatgagtgcgaatctgccattaatgagcagatgaatgtggaatacaatgcttactatgcgtaccactccttgtttgcatactttgacagggacaacgtggctctcaagggatttgccaagttcttcaaggaatctagtgag

SEQ ID NO: 5580 - DNA, 566 bp, Glycine max
  Clone ID: jC-gmfl02220073b03d1
cgttgaaaagcatatatcaaatgttattgcataataggcttgcagccttttacatgtgctactagcaattacattactccgagttcctaaatcccagtacataggaaaaacatttaaatactattttaaaaatagaaaacaacccagaacttcagaaaagaccaaaggtaaacgaagactactaataaggtaattcaagattaagcagcatcttcctaatcaagaagtctttgatcaaagtgccaaacaccgtgaccctttccaacccttctcaactgagccacatactctgaaattttcttaattgattcaacctgttcagacaaaaactcgctttcaatgaagtctgccaattgagggtcattgttgcgatctgccacactgtgcacattcagaagtttctcattcactaacttctccaaagacaaagctaattccattgcatacaatgcatcccccttttccacatgctcaaattctgaggggacattcttgatggcgtgaagaacaacccttccaccgcgagtattctgatatttcatgaagcttttagcgtgctctctttc

SEQ ID NO: 5581 - DNA, 567 bp, Glycine max
  Clone ID: jC-gmfl02220073b04a1
gagaaagcatcaccagcttcacttcctttatccactgtttctaacccaaacatgtgcatgaagcctgagtttagttccaaggacactttcatagaagatgctgccaatatgccacaaaccactagtattaagctttttggaagaacggtctctatggtaggtaatcagaagtcactgaacatagatgatgatgatggtaagccaataactgtgaagtctgatgaagtagatgatgttgagaatgagaagcttggccaatcaggagaatccaagcaagtagatacacaattatcacttggtgtggttagtggtaactggattataacacctgatgctgatggagctaatacaaccagcatagagcccccaaaggagaacctatgcttcagtgaatgtgcacctgatgcatcttttccgcagtggagtttgtaccaaggccttccacctttctacctgaggccatgcaatcaggtcctaaatcccttgcctcttaggccctctttgaaagtagaaccagagaggaggagagttgttgcactgttccacactgaatagttgggacatgaa

SEQ ID NO: 5582 - DNA, 548 bp, Glycine max
  Clone ID: jC-gmfl02220073b04d1
cgttgaaaagcatatatcaaatgttattgcataataggcttgcagccttttacatgtgctactagcaattacattactccgagttcctaaatcccagtacataggaaaaacatttaaatactattttaaaatagaaatcaacccagaacttcagaaaagaccaaaggtaaacgaagactactaataaggtaattcaagattaagcagcatcttcctaatcaagaagtctttgatcaaagtgccaaacaccgtgaccctttccaacccttctcaactgagccacatactctgaaattttcttaattgattcaacctgttcagacaaaaactcgctttcaatgaagtctgccaattgagggtcattgttgcgatctgccacactgtgcacattcagaagtttctcattcactaacttctccaaagacaaagctaattccattgcatacaatgcatcccccttttcacatgctcaaattctgaggggacattcttgatggcgcgaaaaacaaccctttcaccgcgagtattctgatatttcatgagctttt

SEQ ID NO: 5583 - DNA, 382 bp, Glycine max
  Clone ID: jC-gmfl02220073b05a1
gcaaacttgagtggtgcactcccatcagctcacaggcacctgctcagttgcgattgcgctctttccagatctggtagattccgcacatggctcaaccgctcgcgaagaaggactatgaccgccacgaccaagctgagtgtcctccctttttgagaatcgaagcgggagctgttcttcaagaggccatagtttttaatgacccacaactagatgctaggagatgttcacaggttatcacacaacttttatatctactgaatcagggacgagacatttacaaagaccgaagctcacataatggtcgcttttctgcatctaagcttctccagtctcgggatctagcgttaacgagactggtctacctgagcatagaggagctttc

SEQ ID NO: 5584 - DNA, 420 bp, Glycine max
  Clone ID: jC-gmfl02220073b05d1
gatgatcattgatgtcttctgtggctaatagtggtctgctaggcattttcaaggcggctgctccgtccttcggcgctcccgacggaacatgcggtccacaacgcgtcctgacccgcctcgtttgtcggagtgaagggggcgaaatccactgaggttgcgtcgcttcacgcggcagcgccgtgggacgactgggacttggccgacgacggcgatttggacgtgccgaggatggtgtgcggctctgttcccactttagctgaagctaatgaagccaccgcagaactgaatgatgctattgatcaagtatatacatctcctgagtcctctcaatattcatctcgtggtggtcaagtctatgctttgactcctactggtggtcaagtactctgctgctgtctgtactcgttatgagccagtgat

SEQ ID NO: 5585 - DNA, 488 bp, Glycine max
  Clone ID: jC-gmfl02220073b06a1
ggcgagtaatggataccatgcttgtttcccgtgttagaatcttgcatataagatctttgcttgctagatccacagagttgcaatccattaaggtattgtcagttgagtgctttcttgaaaaggccaacgctggacccagtagaagttctagccgagcaagcagtcctggaagatcttctatgcaatatgttgatgagcagatccagggatttaaagtgagtctaaagccagaaaagaaatccaaattttcatctgttgtgttgaagatacgtgggattgatgaggaaacctggagacagcaagtaactgggggaaagcttagggaaattagtgaggaagcaaaaaattttgcaattggaaacaaggctcttgctgcactatttgtacataccccagcaggagaactgcagcgccaaattagatcctggcttgcagagaagtttgattttctatcctgtatgggaaatgatgcaccaggggggaccact

SEQ ID NO: 5586 - DNA, 524 bp, Glycine max
  Clone ID: jC-gmfl02220073b06d1
ttgattgagttgttttttgagttcttcattttcttttccattgttttttgcttggtggctctcttgtattctttgacttccccttattaactggttactcttttatcgtctgtcgtactgcgctacccttttgtcgctcgtctacgcctttctgctgctcggtaacgctaactacgaaacccgtactctccctctctgacccaaaacaacaacagaacccaataatgcaatccctccgaagaaggtcctggttcccatcggattgggcaccgaagaaaaggaagccgatatcatgactcacgttctgcgccgagccggcgccgacgaaccgttgcctacgaggagccgcagctccaagtagaagccgccggaggcaccaaactgggcgccgataccgacatttacgcgtgtcccgatcaagttttcgatctcgtttgctttgccccggcagggagggacgcccggctctgcaagactacggtaatgccaagtgctgccggaaattacgtgcagacaagctgagg

SEQ ID NO: 5587 - DNA, 469 bp, Glycine max
  Clone ID: jC-gmfl02220073b07a1
gccggatatacaagatgaccagacaatgctgtatctccagccggacagggagcttcgtcaacactgtacgggatcaacgagcagttacactaagtcgcacgattaggagctttatcttataccaccttgtaccaatggctggagatcaccactactcttgcacctccttatgagaccacagctgccatgacctacacacttttatcctcgaccaaccttttggatgctacagtgtagttcatgctcatgaccatgttatctgagagtcaccactccaatacttaccgtactacttgcgaaggcgtaatcaatcatggcgagaatctggatcaggatattacccggcatgattactacgacaacaacaactgcactagctacgtgcttcagatgagcccttctcacatggtaatcatggctaggtcaacacgccacctttgaaacatggatcatgaggacaacatgctat

SEQ ID NO: 5588 - DNA, 375 bp, Glycine max
  Clone ID: jC-gmfl02220073b07d1
aaaagaaaatgattgctatatctctgtgcgctaatccttacctagtgaacaggctgtggataccatacggcacattcaactagtagatattacagttctttgtttcataacgatttgatccgtaacctcttgttgtctcccattttatttatgtgactcgaataactcctggctattgatcactgaaatggaagatattgaggactcatgagtggctgatcgaacatgaagttccattggggattagagctcggaatattgcaggaggaacttcgatatttctttgaagggtacaatctcatggtgcgctaatgatgcatgttcgaaaggtggcgttttggcctatccatgctttccatgtgggaagggttcttc

SEQ ID NO: 5589 - DNA, 583 bp, Glycine max
  unsure (1)..(583): unsure at all n locations
  Clone ID: jC-gmfl02220073b08a1
gccggatatacaagaagaccaaacatgctgtatctccaaccacagaggcagcatcatcaacactgcacgtgatcaatgagcaattagatcaagcagaagaagaggagcaaatcaaagacaaccttttaccaattttgaagaacaacactactcttgtccctcctcaacaaaccacactgctcatgtctcataaatctttatccttttccaacctcttggatgccacagattactccatgctcagcaccatcttatctgagaataaccactccaataattaccttactccaagtgaagccttattcaataattgcgagaatctggatcaggaaattaccccccaaaattactactacaacaacaacaccaatagctacttgtttcagaagaacccttcccacatggaaaacatggctaggccaaaacgccagctttcaaacatggatcatgaggacaacatgatattatacccttcaaagaaatatcaaagttcctcttgcaattttcctaactctaatccacaatggaacttcatgttcaagcagtcactcatgagtnctcaatatctttcattcagtgataa

SEQ ID NO: 5590 - DNA, 437 bp, Glycine max
  Clone ID: jC-gmfl02220073b08d1
aaaagaaaatgattgctatatttctgtgtgctaatccttacctagtgaacaggttgtggataccatacggcacattcaactagtagatatttcacttctttttttcatttttattttctccctaacctttttttgttcttttcttttctttatgtgactcgtataatttttggctatttatcactgaaatggaagatattgaggactcatgagtggctgcttgaacatgaagttccattgtggattagagttaggaaaattgcaagaggaactttgatatttctttgaagggtataatatcatgttgccctcatgatccatgtttgaaaggtggcgttttggcctagccatgttttccatgtgggaagggttcttctgaaacacgtagctattggtgtttgtgatgcagcagtaattttggggggtaacttcctgat

SEQ ID NO: 5591 - DNA, 548 bp, Glycine max
  Clone ID: jC-gmfl02220073b09a1
cacaactccactcttagctgccattggtttttcttcttccatttctcttcctttctaagcttttttcgattacccatttggagattctgtcctaatggctcttgctccttccaaagtttcctccttttccgggttttctcccaaacccagtgttggggatgctctgaaaaacccaacttgctctgtttctctgagctttgcgaatgtgaaacttggaagcagaaaccttagggtttgtgcctcaactgtgcctctctcaggggtgattttcgaacccttcgaggaggttaagaagggtgaacttgctgttccaacggctccccaagtctcgcttgctcgtcagaactacgctgatgagtgtgaatctgccattaatgagcagataaatgtggaatacaatgcttcctatgcgtaccactccttgtttgcatactttgacagggacaacgtggctctcaagggatctgcccagttcttcaaggaatctagtgaggaagaaagagagcacgcttgaaagctcatgacatatcagaatactcgcggtggaa

SEQ ID NO: 5592 - DNA, 406 bp, Glycine max
  Clone ID: jC-gmfl02220073b09d1
aaaaaaggaaaaaaaagtatcggaccaattagaaaaaccattatagcccaatcaaaaaccccggggttgcaagggaagaaaacccttttggtgcccaacattatgggtcctaccccgaaccccccaaggcccaccccaaaacacctttctctctttctttgcccctttttatcccaaccggtctttgaaatcaaagaaattccacccaagaagaaccaccctcctcattcattcaatccaactaaagtccgaaggtttacacccaaaatccagctttgggttcacctgggctcggataaacctttccaggcgggaaattcccccagttaaacccaaagcctctggggggggcactttggtagagcccgggggaaaaaaaaaggggtcaccgggtccccccaggggg

SEQ ID NO: 5593 - DNA, 526 bp, Glycine max
  Clone ID: jC-gmfl02220073b10a1
caaaaattcgatccgaatgtattagatctcaaatcatttctactgaaaactacagccatcgaattccctgcaattaacataagcataacccctttccaacctttctcctcttcagatcggatcagatcagatccaccgccatggatttcatgaaggtcttcgatcaaaccgttcgagaaataaagagagaggtgaatctgaaggtgctcaagattccggaaatcgaacagaaggtgctggatgctactgataatgaaccttggggtcctcatggtactgtgctggcagagatttcacaggctaccaaaaaatttactgaatgtcaaatagtcatgaatgtcctttggacaagactgggtgaaactggaaaagattggcgctatgtatacaaggcattagctgtcatagaatatttggtagcacatggatctgaacgtgcagttgatgacattatagaacatacttttcagatctctgcactttctagctttgaatatgttgaacctagtgcgaaggatgtgggact

SEQ ID NO: 5594 - DNA, 102 bp, Glycine max
  Clone ID: jC-gmfl02220073b10d1
tttttttttttttttttttttttttttttttttttttttttttttttttttttttttttttttttttttttttttttttttttttattttttttttattttt

SEQ ID NO: 5595 - DNA, 442 bp, Glycine max
  Clone ID: jC-gmfl02220073b11a1
cttcaaaacactcataacacaaagcacaatgcaaagctcatccttgagttaaaaaatggcagcagcttcttccatggctctctcatccccatccttggctggcaaggccgtgaagctgggcccatcagccccagaagtgggaagggtgagcatgaggaagaccgtcaccaagcaggtctcctcaggaagcccatggtacggcccagaccgagtcaagtacttgggcccattctctggcgagcccccgtcctacctaaccggtgagttcccaggcgactacggctgggacactgctgggctttccgcagacccagaaaccttcgccaagaaccgcgaactcgaagtgatccactccaggtgggccatgctcggagccttgggctgcgtcttcccagagctgctgtcccgcaacggggtgaagttcggagaagccgtgtggttc

SEQ ID NO: 5596 - DNA, 455 bp, Glycine max
  Clone ID: jC-gmfl02220073b11d1
acacatagttaaccatttatatcatttattgaaaaagtaattaatgtttgagtaaccacatatattctatttcatccatttgaggaagtttgtataaaactacagatagtgtaggcagttcctacccctggctgaaaagagatacttataaggcaaaatttaaaaataaataaataataaccatagatagcaatgaatacaaaattaagccacaagccacatgaagtaagttgtccaaaaagtgactgcaactgaggccaaagcatatgtccatagcatgataacagaacattcaccttcaccagctccaaacaattgcgcgattgggcctatagccattgctggtggaagtgcatattgaaggagaagcacaaactgatataagggatctggttgcaccaaacccaactgtgttgctcctttaataactagaatacccaaaattggcaggaaaa

SEQ ID NO: 5597 - DNA, 464 bp, Glycine max
  Clone ID: jC-gmfl02220073b12a1
gttcgatatattttgctgccaattttgggtattgtagatattaaaggagcaacacaggtgggattggtgcaaccagatcccttatatcagttcgtgcttcttcttcaatatgcacttgcaccagcaatggctataggcacaaatcgcgcatttgtttggagctggtgaaggtgaatgttctgttatgatgctatggacatatgctttggcctgaggtgcaatcactttttggacaacttacttcaagtggcttgtggcttaattggtgattcattgctatctatggttattatatatttatgtataacacgtgccttataaggatgttttttcacccaggggttggaactgtctacactatctgaaggattatacaaacttcctcaaatggatgaaacagactctgtgtggctactcaatcatttattactttctcaataaatgatataaaatggttactatgt

SEQ ID NO: 5598 - DNA, 429 bp, Glycine max
  Clone ID: jC-gmfl02220073b12d1
acacatagtgtaccatttatatcatttattgtacaagtaattaatgtttgagtaaccacatttattctatttcatccattcgtggaagtttgtataacactacagactgggttagctggtcctacccctggctgaaaagagatacttatgaggcaaaatttacaagtgtctaaatcattaccatacattgcaatgattacaaatttaatccacaagccacatgaagtaagttgcccactaagtgactgcaactgaagccaaggcatatggccatagcatgattacagaacattcacctttaccagctccaaacgattgcgcgattgggcctataggcattgctggtggatgcgcatcttgacggagacgcacaaactgacattagggatctgatcgctccaaacccaactgcgatgctcctttaataac

SEQ ID NO: 5599 - DNA, 342 bp, Glycine max
  Clone ID: jC-gmfl02220073c01a1
gtactgctctgccctatcttgaagacactctacaaaattttgatatcaagggaacagtcatcacaagttattctgaaagccttgacggatgaaaatctgaatgatcctcgagaacgaattgagattgcacaaagccatgttttctacaagccttcacttcttggacaaccctgattgttttctcattggcaaaagccaaatgtggatgcaactatatatggaagcatttgtcaactcaaagagaatatttaaatgagcatgaatgtattgttttgtgatggattttgtattacattgttgtatgtatatatgtcaaaatataagccactaagcaattggact

SEQ ID NO: 5600 - DNA, 450 bp, Glycine max
  Clone ID: jC-gmfl02220073c01d1
ttttgttttttttttttttttttttttttttttttttttttttttttttttttctttctttttttttttttttcttttttgactggttgttctctaatgacaacaaaaatgaaaacagcaaccataaaagaagacacgtatatcctacaactcaaaagagtgccaccatacattttggcactttagtacgcaggatgccgcaatcgatagcagcttaaaaaggagaataatataatcacaataacgggagagagagatacgaacaaaaagccatgccaaaaagcttcacaagctgggtaatgccgacataaagaatgagcgaaaatgtgatgggaagagaataaaaactgggaattacactttgggaacccaccaaagagaaaatgccggttgctaaggcttgagaaaaagaagcctccagctgctggctgtgaaggagtgacaccagac

SEQ ID NO: 5601 - DNA, 463 bp, Glycine max
  Clone ID: jC-gmfl02220073c02a1
ggcatcatggcgaccagggcgcaatacctgatccaatgggcgctcttatggagtgcaccacagtgcattcaacctcatgacaaccaaggcgcacgccacagcgcactcgaacccgattccattcccatcatagaacattcatccttctacaaacaccgaacgcgcctccaaccgcgactgcatagctcgcgcctgccgcgaatggggcgccttccatgtaacgaaccaaaggggcctccattcgctactcgattgcttgcgcctggccggactgtggttcttctcagagacacgaatacctgacaagctccgttactcctgcttcgcctccgcctgcgagggctacggcagtatactgctcgctgcatctagatgcgatcaaaaccacctgcgtctatgccgtcatggatggctacgcccctaacatgacccgtttcatgtctgatgaggctatcgaagccgg

SEQ ID NO: 5602 - DNA, 532 bp, Glycine max
  Clone ID: jC-gmfl02220073c02d1
acaatcaaataccaatttctataatactttgaatagtttattggtcaaattggcaaattagcgtcattctcagtttgagttggattccaagatccatatgaaaacagtatgttgatatcagaactttttgcatgagagttaattttacttcctttcactcccaagatacaagacatgagactaggagagaaaaaaagcattagcttaaggatccagcaaaagtgcatcaatatttcgttttcctccagggcctttggtataccatgatgatacatagtctccataaacaacatcacggtatttagctagtgagtcgtttatcagttcagaagcaggggaaatcttgactgtcttagcagggtcatgaaatgttgccacagagagccttgctctatcaggattagtgattgccctatgctcacagctcctgtactttccattggttataatctcagtttggtcagcccatagaacaaggatagcatctgacagaggctgaacagtgacccacttgtaccacccttgagaacct

SEQ ID NO: 5603 - DNA, 535 bp, Glycine max
  Clone ID: jC-gmfl02220073c03a1
caaaacactcataacacaaagcacaaagcaaagctcatccttgagttaaaaaatggcagcagcttcttccatggctctctcatccccatccttggctggcaaggccgtgaagctgggcccatcagccccagaagtgggaagggtgagcatgaggaagaccgtcaccaagcaggtctcctcaggaagcccatggtacggcccagaccgagtcaagtacttgggcccattctctggcgagcccccgtcctacctaaccggtgagttcccaggcgactacggctgggacactgctgggctttccgcagacccagaaaccttcgccaagaaccgtgaactcgaagtgatccactccaggtgggccatgctcggagccttgggctgcgtcttcccggagttgctgtcccgcacggggtgaagttcggagaagccgtgtggctcaaggccgggtcccagatcttcagcgagggtgggctcgactacttgggcaacccaagcctgattcacgcccagagcatcctcgccatctgggccacac

SEQ ID NO: 5604 - DNA, 432 bp, Glycine max
  Clone ID: jC-gmfl02220073c03d1
gtaaaaagcaagtaacattaagttggattcggattcccaagataattcacattatctgaagtacttcaccaaacacaaatctaaaaactctcaaaagtcatttcgttctttgacgctcactttccggggaccaagttggtggcataggcccatgcgttgttgttgacagggtcagcaaggtgatcggcgaggttctccaatggaccctttccggtgacaatggcctgaacaaagaagccaaacattgagaacatggccaatcgtccgttcttgagttccttcaccttaagctcagcaaaagcctctgggtcatgagcaaggcccaatgggtcgaagctgccacctgggtagattgggtcagtgacctcaccgagggggccaccagcaatacggtaacctttaacggcacccattaggataacttgtgtggcc

SEQ ID NO: 5605 - DNA, 500 bp, Glycine max
  Clone ID: jC-gmfl02220073c04a1
gaggaaacaagggtcacaagataaaggggaacttggtgattatgcgaaagaatgtgctggatatcaacagcattaccagtgttaagggtgtcatcggaaccggcattaacatcattggaggagtcgtcgacaccgttactgctttggcgtcccacatctccatccagctcattagtgccaccaaggctgatggacatgggaaaggaaaagttggaaaggctacaaatttaagaggacaagtgtcgttaccaaccttgggagctggcgaagatgcatacgatgttcattttgaatgggacagtgacttcggaattcccggtgcattttacattaagaacttcatgcaagttgagttctatctcaagtctctaactctcgaagacattccaaaccacggaaccattcacttcgtatgcaactcctgcgtttacaactcaaaatcctaccattctgatcgcatgttctttgccaacaatacatatcttccaagcgagacaccg

SEQ ID NO: 5606 - DNA, 523 bp, Glycine max
  Clone ID: jC-gmfl02220073c04d1
aaaaataccatttatcacgtactatcttgcatcagcttagagacttttcttttttattgcatgtgagactaaactgttttagttgactatattttcttggatgttcctaaaattacaaatctacttttgcttattagaaggaatcatcttcagaaaattgggaagtgttattgaagaaacatgtctgtctacgcacaagtagcttcaactgctaaactttttgccactcctctacaagggtttccgaatgtctcacttgatactccaacactacaactgcttgatccaatgcaggccttctgcacaatagaaagagccttgttgctgctgcagcgtccgtggtagaagttaccacaggttccaaggggtgttccatagctagcaaatttaatggaagagatgacttggttatcatgagggcaagtgagtgatagcacaggacctacttttcttcctgattctgtatctgagttccacaagtctacgggtggtgggtgagaatcggatacatgtgcacacaaac

SEQ ID NO: 5607 - DNA, 493 bp, Glycine max
  Clone ID: jC-gmfl02220073c05a1
atatcacctccctgaagatgctcagcattactaattgccataagctttctgcattgcctcaacaatttggaaacttggagaatttgaaacttctaaggctaagttcctgtactgatttgcaagagataccaaattctattggaagactttcgaatctaagacatatggacatctcaaactgcattaaccttccaaatttaccagaggactttggtaatctttgtaatctaagaaatctgtacatgacaagttgtccaaggtgtgaattgccacccttaatcatcaatcttgagaatttaaaagaggtggtatgtgatgaagagacggctgcttcatgggaagcttttaaacctatgcttcccaatctaaagatagatgttcctcaacttgatgttaacttaaattggcttcatgaaattcgctcctaagtcctaatacctgtttcatgctaatgtcattgtgttagtggctttccggtttgattagcaatctt

SEQ ID NO: 5608 - DNA, 285 bp, Glycine max
  Clone ID: jC-gmfl02220073c05d1
gaataatgatggggtatatgagtattattttatttttggaatgagggagaatttatgcaaaagagacaacaaaaaagagacaccattttgtataaggtggctaacttggaccttatacgtagggggcggatgcaaagtgatctggcgaggcaaaagggcgttttccccgtggaagataaaatgctgggcaagatagaggctggggccgagattgtgggcctggcattaacaggttcaggggatgctgcagctgggctgaacgagaaatcaataacagtaaggggt

SEQ ID NO: 5609 - DNA, 434 bp, Glycine max
  Clone ID: jC-gmfl02220073c06a1
cttccttcccccgttctacccaacaagcaccatttataccattgaggagtttacacaagtgaacataggcagcaatgattacatgggcaattacttccttcccccgttctacccaacaagcaccatttataccattgaggagtttacacaagttctgattgaagagttatctctgaatttacaggctttacatgacattggagcaagaaagtatgccttggctgggttgggccttataggatgcaccccaggtatggcgagtgctcatgggacaaatggatcatgtgctgaagagcaaaatctcgctgcattcaatttcaataacaagcttaaagctcgagtggatcaattcaacaatgatttctattatgctaattccaaattcatctttataaacactcaagcattggccattgagcttcgcgataaatatg

SEQ ID NO: 5610 - DNA, 434 bp, Glycine max
  Clone ID: jC-gmfl02220073c06d1
caatacaaattggatcatattcgaggcaggatagccaatttattcactggattcattccactttgtcgttcaattcaggggcaggccattacttaatacatattcaactcacaattatttcaactccatatgaacgactacatgataaccagaacttattcaggggcactaagttgtgaaggggactcatttgtgagctccaattccatcttaatttcatgatcaacaaggtgcttgatatccattggataagtgaaggctgaattagcggtagaattataagatgtcaatgcattgagtaggttccattgctcggtgggatggaaagcatcaaaaaacacatagccattcctattatagcacggctcttgatcaggaacacactcccctgttaatcccggtaggcagcaaggagtttccggaaccggaaaacc

SEQ ID NO: 5611 - DNA, 535 bp, Glycine max
  Clone ID: jC-gmfl02220073c07a1
tagggctcgagaaacaattctattataattctggcaggctcgtgagttgtatatgacatgtttctctgtgcacccattgttcttgtctcaaagtaaaagtgtgtgtatataaaagaggtccctcttctcagttctttgaaaacctcaacaactcaacacgttgcctctactctctgcagcttttaatttgtttgcaggcacacaaccatggctgctctctccaacggccacgacgcttccttcttcaagatgccctccatcaagttcaccaagctcttcatcaatggagaatttgttgattccctttcagggaaggagtttgaaacaatagatcccaggacaggagaagtgattacaagaatcgcagaatgagcaaaagatgacattgatgttgctgtcaaagcggcacgtgacgctttcgactatggtccatggccccgtatgcccggtgctgaaagagcaaatatcatgatgaaatgggcagacttaattgatcagaacatccaggacatagcagcattggatgccattgatg

SEQ ID NO: 5612 - DNA, 566 bp, Glycine max
  Clone ID: jC-gmfl02220073c07d1
gactaaaaatgtatttaaacacttattaatttgatgaagtatacgtttaaggaagctcttctatagttcaccattgtttatatccacacaacacaaaaaaaaataaaaaaaatcaaagccagggagaattgtaaatgggagttacaacagatttaacttgaagatacttgtgtagggcttccattccaaaatctcttccaaatccactcatcttgtaccccccataaggaatgtcatccccaaaggcaaaataacagttgatccaaacaatgcctgcactaatggaccttgacacactgtagtgtgtgtccaaactctttgtcacaatgcctgatgctaggccataccttgtattattggcaatcttaattgcatgatgaacactcttaaacttcatcaaagccattacagggccaaatatttcatcttgtactataagcatgtcctccttaacattggagaaaattgtaggctcaatgtagtaacccttgttgcccactcttttgccccctgtcaaaagggttgcaccttctttctttccatgctcgattaggaaagaatctttt

SEQ ID NO: 5613 - DNA, 522 bp, Glycine max
  Clone ID: jC-gmfl02220073c08a1
gttttctgctgcacagaaaatcgctctcttctctgttcaaatctcaatgtcaaaaattagaatttcaattcccaccttgtttctttcttctcacgctgtcagacccatcttattcactcactcaccacctagggttttcttttccacttcgtagctatgctcgactcactccgcgtttttccgatcgaacgacgccgttttggcgagttttagcttcgtttcgtctcccgacgcggactcattgcttgctttcgtttcccacgcgattgttggaggagtcgtgttgcgttcgttgaccgaggaggtgcaattagggtttccacaattcggttttggatgaggctctgagatggggatttaggttcttaggagcggtgttgttgttgttgctgatcgatttggagtggggaacttgcgaagtgaagagggatgttctactctcagtttattttggccaagacagggccacttgcgactatatggatagctgcgcatttggagaggaagctccgcaggaccagg

SEQ ID NO: 5614 - DNA, 508 bp, Glycine max
  unsure (1)..(508): unsure at all n locations
  Clone ID: jC-gmfl02220073c08d1
acagaaatgatgtaccttgtccactgacagttaaattacaaggtgctttctgttacataaatatgatgcctagagaaagcagaatgtcattcttactaggagggatgcgtttaaacgacatacaaattagcctctgcaacttacagattgtgacattttacaaaaatatatacattaagacccagaataatcaataggatgattattatacaagtgccacttcaaaaactaaaactgaacagctaaaccctatctccaaaaaattataaatgaaaagccatatatggctagaatcggggagaaatgtcgaaaatattatcccaaccctgcagataccagccaaactaccaccgaatggatctttacaactatatctgtcattcctacatgaggtttcagaaatctgactgcataagcttcattcgaggctatatgctgacatttgcaaagggttntgactgttctacatggacataatccctggtcttgagaaccagagtttcaaaaa

SEQ ID NO: 5615 - DNA, 487 bp, Glycine max
  Clone ID: jC-gmfl02220073c09a1
ttttcagttctcactattcatttttgaccgccattgtgatcagtttctcacattgattgaaaagaccccattttcctctatgctcctccactctccaccctccaccattcacacgcagagcaacacgacgatctcaccgacaacctttttgtcttcgttaacacacacatctgacacctggcgtgtccttttctcactgcagattaaataaatattaattaactaataaatgtacatatatagtagttgcttaacctggctctatattcttcactctccttcctctcccatttgattcccttccctctcaccaagttttatgatctctgtcatttcctcaactacttttattttccatttatatctactcacaaagcaacatcatttccacttgcatttcacacgcatgtgagacacgacccaaataacacacaaagcaaagtaaggttgctttgcattgtgttaacaaacaaggcaacctcattat

SEQ ID NO: 5616 - DNA, 547 bp, Glycine max
  Clone ID: jC-gmfl02220073c09d1
aataaaactccaacaattttattaatgaaaatactttacaatttcagcacatatacactgccatgaatataattttgcacgctataattatctttcgccacaaacaatggagtagtgctcaacaaagcacaaaccaacaataataacagttttagttgcattaatttacacaagaaagtaaattaacgtaataggcaacacatgtgtgtcacgttcatgaggatcattttataatgatatgcaacattgaattaaatattctcatgcaatggagcattctggaggaaggccttgagggaaacgtctgatatcagtgcaataattgtaaatcatgtaattcttttgcacccaacggatctttgcctgccccgtggcgtccagtgattggccagtggaggaagaagtttgggaattgaagtttctgtatgaggctgtgaatggggccttgctccaatccgtttttacaagcccaccccttgtggcccaatcctcagcgttccaaagactagagtatattctcatgggttggctctttgggaatggaacc

SEQ ID NO: 5617 - DNA, 577 bp, Glycine max
  Clone ID: jC-gmfl02220073c10a1
ggttgggcgaggaatggatttgggatgttcagacgcaagcgtgtggaaggaagcactctctttatacccttctcgaatacaaactctctctgtgaaaaagaacaaacccgatttggtttctctggatgacttctattgcaaccaactccctctcctccttcaccagcgaaaccctaaccccttcatcaccactcccgagctctccaccctcatgcaatggaagctcacgcgcggcaaatggaggccgcgtctgttggatttcgtgtcgtccctagacgacgccgttgtgaaatccgcttctcagaaggcgtttcagagccttcccgatgtatccaaagccgtttccgagctcactgtgttgaaaggcgttggtcccgccaccgcctctgccgttttggctaccttcgcccctcacttaacccctttcatgtctgatgaagctatggaagcagctcttggaagctcaaaagattattcactgaagcaatatataaaatttgtggatcagttgcacaggaaagccgaaggactaagttcagaaggcgattcccttaccccatctgatgtacaaagggct

SEQ ID NO: 5618 - DNA, 599 bp, Glycine max
  Clone ID: jC-gmfl02220073c10d1
aacatgaccttaagcagcagttattattacctcaaataaaacaaagacataacaccatccgtttcaaatacatgaaaaagttccaaaactaacttcaataactaatgtgtaaccaaagacctctaacaaatagcaacataaaagccagcccttcgtttggtaatgcattattcacccttattatttgctatctgcagcaactgcccgaactagaggcttcattctttgccatctgcagcccgaagggaaccaagttgaactggggcttgagtctgaaccactttggatgatccatagcctgataaatcaacaccttctgccttctctttctcaagctgctctttgatccaaaagtatgtaattctcagcccatccttcaacttcatagttggagcccagccaagtttctctttgattaatgtattgtctgaattacgaccccgaacacctttagggccaggaatatggtatattggtatattcttatcctaaagctaagaacaatctcagccatctcattcatgctgaccatttcatcacttccaatattcaccggcttccggaagtctgattagtcaatctagtacaccttcacacac

SEQ ID NO: 5619 - DNA, 534 bp, Glycine max
  Clone ID: jC-gmfl02220073c11a1
ttcccttttcagctttcattggtgtggcctagctgttttctcaatgagaaagccttcatctctgcaaagcgcacttttgcgctttggggttcccttgttgcttgttatcaccttctgttatgctacttctactgctgcagcaacaactcaagtttcagggaatgaagagctgccaaagacaaacctaaatgggcatgatgaagaagcaaaattcggattttttcatcataaaccaatattcaagaaacatattccaattccagtatataaacctgtaccaaagccatttccagtgtataaacctataccaaagccagttccagttccagtgtacaagcctattccaaagccagtgtataagcctattccaaagccagttccagtgtacaagcctataccaaagccagttccagttccagtgtataagcctattccaaagccagtgtacaagcctattccgaagccagtgtataagcctattccaaagccagttccagtgtacaagcctataccaaaagccagttcagtttcagt

SEQ ID NO: 5620 - DNA, 401 bp, Glycine max
  Clone ID: jC-gmfl02220073c11d1
gaaaggaaatcccaattttttttaaaccaaaaattgaaaattagttcttttcttggaataatccatccaaatcaatttacaacggcaatgctgaaaaaatttttggggcaaatgaaccgcattttttctaatccaatgcccaaaagtcccatgggatttttacaaaaaccccgttgatgttttaaaacaaacgtagcttttttggaaataaaaggggataacgttctaaggccaataatttttttggacccggccaaatcattttatggggttgaaattggaggaattgttttgggaattggaaaatgtaaaaaaccgggctttatcaaatttgggggaagtttaggaataggttttctgaaaaaaggctctggcttaaaaaatgactttggcttaaggga

SEQ ID NO: 5621 - DNA, 352 bp, Glycine max
  Clone ID: jC-gmfl02220073c12a1
ctcctttttaatcttttattggcgtggtctgcctgttctctctttgtactggcgtgaatcttggtgaagctcagtgtgacgctgtggggagacatggtaaactgcattaaactatggttgtgcttcatgtactgctgtatcttgaagtcaaggctgaagggatggagatgtgacttatagaacacgtaatgggatcggtggctagtgatagttgggatttgaacatcataaacgaatttcgaagatgcatactccaattccagcatttaaacctgtgccaatcgcaactctcagagttttgaccgttaccataacccccttcagttgcagtgtgctatcctattgccaagcc

SEQ ID NO: 5622 - DNA, 360 bp, Glycine max
  Clone ID: jC-gmfl02220073c12d1
gaaaggaagggcaaaaattaaccacacgaaaaaccggaaacgggatctaactttgaaatagcccacccgggaaaccctacaacggcactgatccccaatttataagggccaaggaaccggggcgttggaaacccagaagccaaacaatccacaacggattttgacaaaagcccaaaccatgcccaaaaacaaccacaaacaccctcggaaaaaaaaggggaaaacggccaaagaccaataacttaacagggcccggccaacccacctaaaggaatgggacccgtccaaaagggtgggggaaccgggaaaaagcccatacccggctttaaaacctttgggggacccccccggatgaaattc

SEQ ID NO: 5623 - DNA, 543 bp, Glycine max
  Clone ID: jC-gmfl02220073d01a1
ctcgaggtgaggatatcacttggttagaggagcattgccaaggacagatctccaacaggaaatgcttgctagatcggttattgaaatcggcttcagtgacaaaagaacttcaagaaaaggattttgaacaaaatgctcttgacaaacttgtgatgatggcttatgagaaatacatggctagccggggtcctagctcatcaggtgggaaaaatgcaagcaacaaaatcgccaagcaagctgcattgggatttgttaaacgaacattggaacgatgccaacaatttgaagatacaggcaagagctgcttcaatgagcctttgtataaggatatgttccttgctgcttcttcccagctaagtattgttcggcaattagatggcatagaggctgaatccacaaaaccttgtgcttccttttctctggaagcaagaactgcttccatgggttcacagcagaacccttcacaattaagtcagatatgaaaaatcatgatctcgaatcatcagatattctttctgctattaatggttcatctgaacaaac

SEQ ID NO: 5624 - DNA, 556 bp, Glycine max
  Clone ID: jC-gmfl02220073d01d1
aaatgaaagctgattttattagaaaaattaaatgtatgtacaaaaggcttttctctgatttataagagctacaaccaggatacagtgtttgctaacatacaatcactaggaatactaacttgtacctagaacaaaaagactttacagtggaagtcgtgaacgtcaatactagcaaaatccaaaacagttggatctgtcattagaaacagtttggagaaggaagtctaccaaagaatatatattaacctaattgagagcaggattagccataaaaccatcctacgtaactagtcatttcttaaaggtactttgtttcctttgtcattggtataatgaacagtactatacaaagaaagcagtttcaaaccatcatattcaagtctgaaaggtcatccatgggaatttcaaggcccataaagtcatcatgatcttgcaatccatcatcctcaatattcaaccatgaaccaagatcagcaccttggtcatcaagatcaccaggaacaccaagcacattcattccaggtagttgcaagttggacatatcaataggttcatg

SEQ ID NO: 5625 - DNA, 587 bp, Glycine max
  Clone ID: jC-gmfl02220073d02a1
tacagccgcaccttgattcagagcagagcgaccttgaagagctatggctgtcggaaagaataagaggatttccaagggaaagaagggtggcaagaagaaagccgctgatccctttgccaagaaggactggtacgatatcaaggccccttccgtctttcaggtcaagaatgttggcaaaaccctcgtctctcgtacccagggaaccaagattgcttctgaaggactcaaacatagagtgtttgaggtctcattggctgatctccaaggagatgaagaccatgccttcaagaagattcgtttgagagctgaggatgttcaagggaaaaatgttctgacaaacttttggggaatggatttcacaactgataagttgaagtccttggtgcggaaatggcaaactttaattgaagctcatgtggatgtcaagaccactgataattatacgttgaggatgttctgcattggctttaccaagaggcgttagtatcaggtgaagaggaccttgtatgcacaatcaaagccagtcagacagatcgcatgaagatgagagagataatggtaaacccagcagctgcctgtgatttgaa

SEQ ID NO: 5626 - DNA, 459 bp, Glycine max
  Clone ID: jC-gmfl02220073d02d1
gaaaaggcaactcccaagccaataaaaaaattcccccttttaaaccgttcttgggtttgggggttgcccaataaacctttggcaaaaaaaccgattttgatttgcaaaaacaaaggggtttctaaagggcaaaacaaaactgaaaaataaatttttggaaaagccccggggattttaaacaacccaaaatgccttttcagccggatcaagccccaactccttaagggggttccttagccaagggtttattaaaggggctttcccccttgggcccaacattttttggggaatccccatgaacccccatcagttttcccagatcaaacttgggggctttaaaaatcttaactttacgaataaacccattttggagggggtatttgccaaagggggcctctttaaacccctttccaatcatttcaggggtgaacttggcccccaatttttttaaaatacagg

SEQ ID NO: 5627 - DNA, 489 bp, Glycine max
  Clone ID: jC-gmfl02220073d03a1
cgcggttccggagcttccgggggagatcaccatcaccaagatgcagctcccccaggcaccgaaacacgacgaggttttcacaaagcttctagacgaggtcaacgcttcggagctcaagagccacggcgtgatcgccaatagcttctacgagctcgagccggtttacgccgatttttaccggaaggagctcgggagaagagcgtggcatttgggaccggtttgtttgagcaatagggacgccgaggaaaaagcatgcagaggaagagaagctgctattgatgaacacgagtgtctgaagtggctcgactcaaaggaaccaaattcagttgtgtatttgtgtttcggcagcatgacagcgttcttcgacgcgcaactcaaagaaatcgctttaggtatggaggcttcagggcagaatttcatatgggctgtcaaataagggttgaatgaaaaattggaatggttaccagaagggtttgaggagagaatttt

SEQ ID NO: 5628 - DNA, 552 bp, Glycine max
  Clone ID: jC-gmfl02220073d03d1
tttcgtttttttttttttttttttttaagcaacttccgcgggtattattagcaaatcggtcatcagcaatttcccacaaaccggcctaagtttacatgcatacatgacacaacaatcatcaacaggcacgcgacctcaaattcctctatcaatgagccgaaatcgttgtaagaagatcctccttcctacacagcacgctttgccattcgagcaagctcttttgctctggtcctcatttcctctggctgctcttcaaccatgatccttctcacagcctttttaaccggttccttcttcacagggtccctttccatcatcccaatgcacgtttgaacgcctacacttaccccaatcttaactatgtccgtcaaaaacttagcattgtaaaatagctctgtcgacattggccatgtcaccattggcacccctgcacacaccctcttcaatactgagttccacccacaatgtgtcacaaaccctccaacggattcatggtccaaaatcattacttggggtgcccaaccttgtatgatcaaacccttttcttgacct

SEQ ID NO: 5629 - DNA, 547 bp, Glycine max
  Clone ID: jC-gmfl02220073d04a1
gggagaggaagaagaaggtgcgagacaacaagagtctcatgttgatgttagtttgtttgagacaaaagaagcaagattccgaggagtttacaaggtatttgcatctacaatatttgcagcaatatgtttgatttgggtgtaccgagtggcaaacatccccacagttgcaagtgggagatggacttggattagtgttatggtgtcagagttatgttttggaatatactggatcatcactcaatctgttcgttggaaaatcgtatatcaaacgcctttcaaacacaggctcttacaaagatatgatgaggagagtttaccagcagtggacatttttgtgtgcacggctgacccaacacttgagccaccatgcatggtgatgaatacggtattatcagcaatggcgtacaattatcctgcgaataaattgagtgtgtatctctctgacgatggaagctcagagctcacattctatgctctcttaaaagcctccatttctccaaacattggttacctttctgtagaggatcaatgttgacctaagtcacca

SEQ ID NO: 5630 - DNA, 527 bp, Glycine max
  Clone ID: jC-gmfl02220073d04d1
aatccacatttatatatagtcccgagctacaccaaacctcaatctaaacaaaacatacatcaatgtgaagaagggcgttacatactccctggccctcgtctcttctctgaactatttaatccaagtccataaaatggagcaaatcaatactagctttcaatttagaatcaaacattgaaactaaattgacattgaaaaataacctactcgtttctttcaatataagatatggcacaaccatgaataaacactaggcatgtacgtaaccgctaagaaatgtggagcagcttatgtatgggaggcacattcaaccttgtgagattcaaggacatgccttgtggcttccatggctacctgtccactgacatagtgctggcgacacacaggcatgtagacatcaacaccaccaatcagctcaatctgcttatcctgtgtcttcctcagggtaaagcaagcacgctttccacagatttcacatctggcagttaacttggttactgaatcacgcaggggaattatattcagga

SEQ ID NO: 5631 - DNA, 520 bp, Glycine max
  Clone ID: jC-gmfl02220073d05a1
gatccacaaatcggaaagaatcagagcgccgtcaaaaaccgccgtccacggcggtgaaactcgccttcgaatccagagcctctctcggttcctcactcttctcacatcgagcgcaacgccaaaaaatcgaatttcacgatggaagagttggagcagtggaaggaacaactttctcacttcgctaacctagctttggatcgtcttctcgaggttcctccgaatcagctctacgcagctgctgcaatcgtgattttcacaacgctgcttcttctctcaattcggttgttcaagcgtgcgaagtcaaacactgttgtgttggccgggctcagcgggagtggaaaaactgttatcttctatcagcttagggatggctctactcatcagggtactgttacatcaatggagcctaatgaaggcacttttattcttcacaacgagaaaacaaggaagggcaagataaaacctgttcatgttggtgatgttcctgggcattctcggcttcgacccaaactggatgagt

SEQ ID NO: 5632 - DNA, 325 bp, Glycine max
  Clone ID: jC-gmfl02220073d05d1
aaaagggattttgggaaaattataaacccccatcaaaagggttttttttgagtatccctcggctcaaaaaatttccaaacaagggatattccccattatttcctctcaactttggggattacccaaaaatttcaagctgggaattaccccccccgccatatttgcaagccttttcccacttatttgaagtttttatttccctatgtccaatgggctctaatttccccgcaaaattgattcccaaagcctttggttatcaattttcacctttggcctggaatctaaactaaggggcccccaacaccagaatccccccaattttcag

SEQ ID NO: 5633 - DNA, 248 bp, Glycine max
  Clone ID: jC-gmfl02220073d06a1
gcaacttggagattgggaatgctcatgttgcgatacatacgcagagacatgaaaagactttcatcgaacgccaaagacacgagaattgcactgactggcggaagcggtccaccactaaattgttaatgtcgagagggcgatgcgcctagactagatattacgggtactgctggtacgacccatttgaggaaggtggcagctttggcagatttactggaccggtgagagtgattgcttatgataacaac

SEQ ID NO: 5634 - DNA, 258 bp, Glycine max
  Clone ID: jC-gmfl02220073d06d1
gttcgaaaggctgttctctgatttataagagctgcgggcaagatacaaagcccgataaaaaggaatcactaggaaaatccacaggcacggaaaggcaccacgctggggaaagcaaccgttaatgtacagcaatctggcgaaacacaaaagcaccggaaggcgggacaaacctaacctggacaaagaggaccccctggcccgcgccataaaaatgcaaatacacctatccccaaggggcactaattccccccgaaaaag

SEQ ID NO: 5635 - DNA, 347 bp, Glycine max
  Clone ID: jC-gmfl02220073d07a1
tgctcgagcaaagtagtcgctcagagcaggagaagacaagagcaagtaggccccagtgatcactggttattctaattgccttgttggatgatattcttcatgattctattcaactattttttattgcatcaaaccttgcttgctacatgcctttacttcttggacaaccctgtttgtattcttattggctatagctcaatgtagttgcaactatatttggaagcttttgcctactcaacgtgaatttttatctgagcatgattgtattgttttgtgatggactctgaattacattgttgcttgtctatatggcttaatttttgccacttatcaattggactttactt

SEQ ID NO: 5636 - DNA, 413 bp, Glycine max
  Clone ID: jC-gmfl02220073d07d1
aaaaaaaaaaaaaaacctttccatgattcacttaaaaatgccttactaaaacaaactggtcaagggattaatttccaattctacactttttgcaagactttccgcttaaaacttttccaaagacttccctgatttcaagccccaaacttttaatgcagtttttttaacccataagcgttttaaaaaaattcccccttttttatggaatataaaatccagccctgcccaaaatcaattgaacttgggcattccatggaagaatttcaaggaatcttgcaaatatttccagcttggtccattatcaggggtcccaaataacgattccgaatcaaaagggaggggccaaattcacctttttcaacctgtcgcaaaatcttttttatacctttagcctatggagctgctctaggggc

SEQ ID NO: 5637 - DNA, 391 bp, Glycine max
  Clone ID: jC-gmfl02220073d08d1
aaaaaaaaaaaaaaacatttccatgattcacttaaaaatgcctaactaaaacaaactggtcaagggataaattaccaattctacactttttgcaagactttccgcttaaaacttttccaaagacttccctgatatcaagccccaaacttttaatgcagtttttttaacctataagcgtttaaaaaaaattccccattttttatgtaatataaaatccaaccatgcccaaaatcaattgaacttgggcataccatggaagaatttcaagtaatcttgccaatatttccagcttggtccattattaggggtcccaaattacgattcccaatcagaaggaaggggccaaattcacctttttcaacctggcgcaaaatcttttttatacctttag

SEQ ID NO: 5638 - DNA, 592 bp, Glycine max
  Clone ID: jC-gmfl02220073d09a1
ccccttccacgccatgaagtcccttctcaacccaaagttctcagctttatctcccaaagcttctccttttgctctgttctcacttccttcttctcgattctccttccgcagcaacccgcgtcgaatccccaatcgtcttcttcgcctcaacccatcaccctgttcgtccaataatttctgttgcaccattcaaaatcgaagtttgcaaacggagccctcgccgcctccctccggcgagattcacgtcattgtggggcccatgttcgccggaaaaaccacatcgctccttcgtcggattcagtcggaaaccaccaacggcagaaatgtagcaataattaaatcaagcaaggatacaagatatggattagactcaattgttacacacgatggtgcagaattaccatgttgggcactggaaaacttatcttcattcaagcagaagtttggaattgatgcttatgagaagctggatgtgattggtattgatgaagctcaattctctgatgacccttatgaaatctggcttcagctgctgatcatgatggaaaaacagtaatagttgctggactagatggctactatttgaagagga

SEQ ID NO: 5639 - DNA, 167 bp, Glycine max
  Clone ID: jC-gmfl02220073d09d1
cgtatggccatcaagcttaatttctctttccttcaggagattctctaggttctctgtctcagctctaaccttttgtgccagttcacgcaatttctgacattcctcaaaattgtgtttattttcttccctgagctgcatgttactctcacgaagtaagttcatttctc

SEQ ID NO: 5640 - DNA, 461 bp, Glycine max
  Clone ID: jC-gmfl02220073d10a1
gaaaaagcctgttaagatgtccgtgcctcaatttggagggcgggaacacaagcccgcgggagtgcctactgactactctatggtgttcaaccaatctcgtgaaaaaaagacgactcagatgaatgatttgactgaagtcaaacgtctaagtcttgggaatgaaagggatgccctaaaacccaatcatcgtcgtgggcatggtcaaggacatgggcatgggcatgggcatgggcatggacatggacatggacatgggcatgggcttgatcatgaagatccttccgttatgaaaaagcctgttaagatgtccgtgcctcaatttggagggtgggaacacatgcccgcgggagtgcctactgactactcgatggggttcaaccaagcttgtgaaagaatgatgactcaaatgaatgaatcgactgaagtcaaacgtgtacgtcttggcaatgaaagggatgccc

SEQ ID NO: 5641 - DNA, 402 bp, Glycine max
  Clone ID: jC-gmfl02220073d10d1
aaaaaccggaaggacccaccgggggctatagggccctattggggaaaaggacccggaaccgggtccgggccaaaacaaacaaggccccaagcccccgcttgaattatgggccctgaaggggttccggggaaaaaaaagaaaattggggaaaaaagaatgggaaaccaaaggccgggcaattagaccattggaccccaaccccccaaatcggggccctatttccaaggtttttcccgggtaaacccccgggttttgaacccgggaaaaaggggatggaagggtttgggcccccccgagcccgtggcccctcccttttttccctataaaccattaaagaaatcccctccctttcagaaaaaccccctttatagggggcaaacccccttgggccccttggggggg

SEQ ID NO: 5642 - DNA, 551 bp, Glycine max
  Clone ID: jC-gmfl02220073d11a1
cgcctcttccatctgcatcaaaggattttgcctactttgttgttctatttcccttcggttcgattaggttctctctttttctgaatcttcgctttcttcttcgttgttttttctttgttatatcgatcatatgatgagaaaaaaactgcaacaatatgattggattcgttccatgattcctagtatttaagtctctgatgattagttctgctctccctcttcttttgatgtttgaaattaatttacaatttctttccgttttcatttttttaatttgttctcgattttttgggttagagagtttgattagaaaaaatagcgaagagagatgatgattattacattggtccgtgtttctgaatcaccgtgaccgacaacccttaccaatttctgatctccaatcgcagataattttttttaatatttaatttttaaatttcttaattttagcttaatttttgcgtggctctggctcagtgatcttctgccattgttgcagtatacgctattccgactcaatatgtgagtagagatatcatcatagatgagag

SEQ ID NO: 5643 - DNA, 456 bp, Glycine max
  Clone ID: jC-gmfl02220073d11d1
tttttttttttttttttttttttttttttttttttttttttttttttttttttttttttttttgtttttttttttttttttttttttttttttttttttttgggcccctaaaaaaaaacccttttttaaaaaccctttgggccccaaaaaaaaaggggggtaaaaaaaatttggggggaaaaaaaaaaaaaagggcccaaacggggaaaaacgggggcaaaaaccggggaaaaaaatttaaccccaaaccttggaaaaaagaagggcccaaaagggggggattattttgggcctccttcccccccaaaaaaggggttaaaaaaggcctttaaagggggggcctttccccacaaatttgggggccgggagggtaaagacacccccctcggggggggggggggaaaaagggccctgggaaacccccgggcgccccaaaaaaattgggggtgtttcccc

SEQ ID NO: 5644 - DNA, 556 bp, Glycine max
  Clone ID: jC-gmfl02220073d12a1
acagagtgtcacaaacacacacagatccaaactcaaatgtcgcctcaaacctctcttgttctcggtggcccactccctaattttccttctctacccgatttactctaaccaccctacacacttacttatgagagagagagagttcagtgctattgtatagaatcaccaccccattaccctgcatacaccatttaatgcattgatttcatctgggtcagtcacaataacagaagaaaaaaagaaaggaaaaaacccctctttgatgatggacaccacttcatcccctgtgtcccttcaaacccaaaaaaccaccttccaagaacttgcagaagcttctaccaagccatacaagaagggcatagtagcaaccttaatgggaggaggtttattcaaagaagacaactactttgcgtcccttctgagatcctcagagaaaaaagcccttcatgagctgacaaccaagctcaaagcttcatttgaagactctccctctgatgcatccatgtggggaattcccctgcctggaggtgatgacatagctgacgtcattctcctc

SEQ ID NO: 5645 - DNA, 299 bp, Glycine max
  Clone ID: jC-gmfl02220073d12d1
aaaaaaacatttgccccccaaaaacacccaagagaaaaaaaaaccccggggaaaaaaccccaaaaagggggacacaaaaaaaaaaaaaccccaaaaaaaaaaacccccgaaaaaaaaaaacccaaaaaaagggaccccagcaaaaaaacccccaaaaaaagggggacaaaaaaaagccgcccaaaaccttttccaaaaaaaagcggggcaaaaaaccccctttaagggggcaccccaaaaaaaagaggaagcctataaccccacaggagaaagggacaccccccaggaccccggagagg

SEQ ID NO: 5646 - DNA, 494 bp, Glycine max
  Clone ID: jC-gmfl02220073e01a1
tgaatttatggctaataatagagaggctgaaaaagaagcttttgaagaagcagaaggagaaagaagggctcgggaagaagaggaggcacagagagcaagagaagagggtgaaagaaggcggaaggagagggatcataaatatggaaataggaggcatcgtcgaaggccggatccccgtgatatggatgattaccatgatgaactttgaagactgcactaagggtaggtggcaggtgcgtaattacaacactaaaatgcatctttgaagttgcgaattgtaggaccaaagctgcaattgcactgaccatgccgagctgtactgaactgtaacatctgaaatattagcgtcagtcattatgtgtaacttcatttcttttcgattattatgcaacagctggtctgcttctgctactgctactgtattcaaaggatggaagttatactttctctattctgttaccgaaaggggggataagaaagaaattatcctttag

SEQ ID NO: 5647 - DNA, 497 bp, Glycine max
  Clone ID: jC-gmfl02220073e01d1
gtactaaaaaataatttctttcttttcccccctttcggtaacagaatagagaaagtttaaattccatcctttgaatacagtagcagtagcagaagcagaccagctgttacctaataatcgaaaagaaatgaagttaaacataatgactgacgctaatatttcagatgttacagttcagtacagctcggcatggtcagtgcaattgcagctttggtcctacaattcacaacttcaaagatgcattttagtgttgtaattacgcacctgccacctacccttagtgcagtcttcaaagttcatcatggtaatcatccatatcacggggatccggccttcgacgatgccttctatttccatatttatgatccctctgcttgctacttctttcaccctcttctcttgctctctgtgcctcctcttcttaccgagcccttttttctttttctgcttcttcaaaagcttctttttcagcctctctattattagccataaattca

SEQ ID NO: 5648 - DNA, 545 bp, Glycine max
  Clone ID: jC-gmfl02220073e02a1
caaaaataatggtaatttatatgattcttcacttttagctaataataacatggagcttttctctgagcctgggcatgctaaggtgtttggtcatgttcgtaagctttcaaatgagagtgttgaaagcgatggaagctcaatacgaggtagtgacatgtctaattttgggattccaagttcatctggtgatggctctcatgaccttcctggatctgctttggtttcaagagagacagatattatgggccacacaaagtcgaagtctactggtgatactcaattagtccttccactagatcaacgcaataaattgaacaggattctttcaaccatgcagcgaacgctaggcactgcaaaaactgatatggaggaccttatagttagattaaatcaagaaatagctgcaaaggattttctcgcaacaaagcttaaggatttggaagtagaacttgaaactaccaaacagaaaaataaggagaactcgcagcaggctattctaattgagagagaaaggtttacccaaatgcagtgtgatatggaggaac

SEQ ID NO: 5649 - DNA, 574 bp, Glycine max
  unsure (1)..(574): unsure at all n locations
  Clone ID: jC-gmfl02220073e02d1
aacaaagcaagagcagacataattttacctttgatatgttccggcttttcattattttatgttcagaaaaaaatgtggtgcaaggctcgtatgtgtgtaaagtaaaaactcgtagtacaagttgaaatacattaggggagctacggcactcagtatattaactcacctattggaaacggcaaatgatcatccaccgggataagaaacagtgggctcttggtcaaaagccgaagaacaatatatatattagcacttaacatatatttctaaatacttgttagagtctccaccgaaggggaatcatcacttgctgtcatatccaatttgagagcctgccttgtgacgcggtttgtctgttttctcaatctaacattatcgatgaacaaatctgctatgatctttctcacttcatcatcacagattacaccatcttttatgtcattggtggttctatctacattggaagccgcacttccgtagtccttctctaagttttctacctctgctagtaggatgtccattnggtcatcagatgtcgttaactgattaaaagctcagttgatgatgatgaatt

SEQ ID NO: 5650 - DNA, 299 bp, Glycine max
  Clone ID: jC-gmfl02220073e03a1
acaactatattgagctgtgatctgcttgagatgcagcttcatatggctcgtgggcggagcccgggccactaggaccccgagcttactgactcgaagccctctcatggggattcggatcctcgagactacccatgatgtactcagctgcaggtgcatcattcagaatgcatgtcacgggccatggatgacacatgggacccatttggcttgcaacttatggcgcggtacctgctaggacgacatcaggtggattgcctaactggattacgggagagcgatctaccgcttggccttcgcta

SEQ ID NO: 5651 - DNA, 531 bp, Glycine max
  unsure (1)..(531): unsure at all n locations
  Clone ID: jC-gmfl02220073e04a1
caacatcaaaagaggacaaaaaagaggaaaatggagtctcaagagtcaacagcatagatgcaaatgatgattcagtaagcaataatatctcaacaaatcaatcggaggaatcagcgaatgctcggaaagacgagatgcctagttctttcaggttttgggtgatattcttgtgggcattttctggagtaggtttcttggttgttatttttgtggtgtattcaggtcatagaagaagaggaacaaggttaaaacacggtagaaggagaagaagcttgcatacaggattcatggaaacgaatagccgtgaccggcatagccgtggtgtcgatgttcctctgtagacagtgctccttttcttttttaatggtgtaaagctgatggtcagaattttaagactttcatgcgaagatcacaaattgaaggttaaaaggcatggaaacttgagtgagcctgtgtgacatcanttatgcaaagcacgttattctgaccctcaaggagacttcccatttttgatattgtcatgaacattta

SEQ ID NO: 5652 - DNA, 354 bp, Glycine max
  Clone ID: jC-gmfl02220073e04d1
gacactatatgatataccttgaaatgatgccatgtgcccaaagcaacgcttaattaaaacctatgtcgaagtgccctagtacccaccgaacgtcgagttccataacctaccaaacgcgtctaattttacgcaacgtacagatgccgaaaatgtatcaaagccggcgcggattaataagaacccatcggtgctaaacatcttacagacactaatccttattacatatggaagtcacttaatagatactctgctccaattgcagcccaagtatatacaacctgttgcttggccacattcattatgaagtgcatggcctaatgcacctgtgatatctaggcctatgccaagccacac

SEQ ID NO: 5653 - DNA, 526 bp, Glycine max
  Clone ID: jC-gmfl02220073e05a1
ccacattcaaatccatatggccctttacattacactaataattggcctcctagtaaacaccctagtactctataaatagcatttgcatgcaccttagtcttcaccaaaatactcctcttggcatcttgtgttgtgtccctcttttaagctatttccttctcttaacacaattggttgtgccaattgccatagtcaccaaccaattaacaaaggtatatatatcatcatatcatcaccaaatgaaaaatattgggttgttttttcttgtggtggtggctacttttgtggtggcagccacagctggtagcttttaccaagactttgaaataacgtggggtggtgagcgtgccaaaatctatgagaatggaaaccttctcacactctcccttgacagagcctctggctctggctttcgttccaaaaaagagtacttgttcggaaaaattgacatgcagctcaagcttgtgcctggcaactctgctggaacaagtactgcctatttattatcttctctgggcctactcat

SEQ ID NO: 5654 - DNA, 58 bp, Glycine max
  Clone ID: jC-gmfl02220073e05d1
gctatctcgtgtacgtgcatcgcatatcatctccggaattttattcccgggtacgact

SEQ ID NO: 5655 - DNA, 577 bp, Glycine max
  Clone ID: jC-gmfl02220073e06a1
gaaaaagcatatggtctcccgtcacagatccaagaagtggtttcaaccgggaatccagaactttccacagcctcaagccccctctccgtctccctccccccaacgccgccgtctccgcagccgccttcgccctcttcctccgccgcaactcgcagttcccggactcctccaccgcctttatcgactctgccaccggccaccgcctctcctacggcgagctcctccaccgcgccaaaaccctagcctcgaatctcgccacaatcctcaaactcaccaaaggcgacacagcgctcgttctctcaccaaatattctccaagttccgatcctctgcttcgcgcttctttctctcggcgtggtcgtctcccccgcgaaccctctctccacgcgctccgagctcacgcgcttcttcaacatcagcaacccctcaattgtcttcacagtaacctacggtcgtgaaaaaacacgcgagtttcaagtgaaaaccgtgctcctggactctcccgagttcgacacgctcacgaagtctcagattcacacaaaatacatccaagagtgtgattctcatcagaggggact

SEQ ID NO: 5656 - DNA, 585 bp, Glycine max
  Clone ID: jC-gmfl02220073e06d1
gagaagttactatactacatcatttgataaagttcaagatctattttacaaaagaaggtctttcattacatataaattcttaaactgaacacacgcattgcttcttctttttttttttcatttggagcaaaagactaaatcaaacaccacttataaaacgaaaatgaagcatattacaacctagagagcgccagttttaagtccttcctcagtatctttcccgcagcattcttgggtatggaattaacaaatgctacacgccttattttcttgtacggtgaaacctgtttggcaacaaaatcaataacttctgctgcgccaagggaactttgaggttgtctcaccacaaacgccatgggcacttggcctgctacttcatcagggtatggaataactgcagcatcatttatctctgaatgagataggagtaactcttctagctctgccggagcaacctggtagcccttgtatttaatcaactctttcaacctatctacaacatacaagaaacctttgctatcaaaattacagatgtccccagtccttaaccacccatccaccaaagttgctgaagtgcttttgggt

SEQ ID NO: 5657 - DNA, 464 bp, Glycine max
  Clone ID: jC-gmfl02220073e07a1
cggtgagttcccaggcgactactgctgggacactgctgggctttccgcagacccagaaaccttcgccaagaaccgtgaactcgaagtgatccactccaggtgggccatgctcggagccttgggctgcgtcttcccggagttgctgtcccgcaacggggtgaagttcggagaagccgtgtggttcaaggccgggtcccagatcttcagcgagggtgggctcgactacttgggcaacccaagcctgatccacgcccagagcatcctcgccatctgggccacacacgttatcctaatgggtgccgttgaaggttaccgtattgctggtggccccctctgtgaggtcactgacccaatctacccaggtggcagcttggacccattgggccttgctgatgacccagaggcttttgctgagcttaaggtgaaagaactcacgaacggacgattggccatgttctctatgt

SEQ ID NO: 5658 - DNA, 360 bp, Glycine max
  Clone ID: jC-gmfl02220073e07d1
ggaaaaagcaagtaacattaagttggattcggattcccaagataattcacattttctgaaggacttcaccaaacccaaattttaaaaaccctcaaaagtcatttcgttctttgacgctcactttccggggaccaaattgggggcattagcccaggcgttgttgttgacagggtcagcaaggggatcggcgaggttctccaatggaccctttccggggacaatggcctgaacaaagaagccaaaccttgagaacatggccaatcgtccgttcttgaggtcccttaccttaagctcagcaaaagcctttggggcatcaacaaggcccaatgggtcgaaactgccacctgggtaaattgggtc

SEQ ID NO: 5659 - DNA, 296 bp, Glycine max
  Clone ID: jC-gmfl02220073e08a1
ctagaacagcttcacttaatcttcctcattactaaaacgagtctgttaagagagaaggtcatggagacaggtacagtgtccccggaggatatagactcagagggagagcaacttgatgagatatcagtcattatagggatatctattgtgaatttcgcgtcttccattttgggtacagacatcagggttcttacagacaccagacgatatcacatgcttaaagattcataatttcagataactgttttctgtatttgaaacttatataataagaagaatgcttgggattgctgatt

SEQ ID NO: 5660 - DNA, 275 bp, Glycine max
  Clone ID: jC-gmfl02220073e08d1
ataatcatgtcaaggcacttaaggtatcttactaaggtactagggttgaatcccgcgggaagaaaatagcttccacgaccaatgttacggtgacgagcatatgattaccccataataggcttgatggaatattgaatcctcacatgataatgtcggcagacatgtacctctgctgggggaaagaacgaggccaatttgaactcactatttggctttaaggccttgactttcgagggcatgaacgtgtggtgttgagctgtcgcgatctgaattct

SEQ ID NO: 5661 - DNA, 354 bp, Glycine max
  Clone ID: jC-gmfl02220073e09a1
agaaacattctcagcaaacgtgttgaaggctatggacgtgctaagaaatgttgctcaacatcaggcttattgaactgcgaagcaatatggctgccatatctataaatgactaccgagcttcttaaggattatatatcggctaaatctagcgtcgataggctggtagtatcgaaactggctctgattcagagacaggacgagtatgaatggttagcaaagacacttatggagagtcatggacaaagagctacttttggatgaagggcacttcaacgcctgatctaacatatgccttggattaaccacatggaataaccagcctgaatatcttgcgattacattaaaacctgcata

SEQ ID NO: 5662 - DNA, 498 bp, Glycine max
  Clone ID: jC-gmfl02220073e09d1
tgtggcggatggcgtgggtgttgctttgctgcttgattagtcaacccactggcagtggaattcctgctgaacccaggttgtgcatggtgaagtttctgctgttggagctgggatgacaatggagttaaaggggatgatggcgttataggtgaaagaggcacttgctgaggagaattttgtggttgaacctgagaactgttctgcagtggtgatgatgagatgggaagttgagacttagcctggacatgtggcattaatgcatttgatgcagcaagctgctgctggtgctgcagatatcgttgctgcagttgtctttcctttgccaaccgaacagcataggcttgttgctgtgaattagtggcatgactaggaccttgaagatgaggactgctgagatgggactgctgctgggggagttggtgtggcttgtgggcatgttctgagtaaggctgaacaggtggtgttgtctgattgctaaggcagaactcggccacacag

SEQ ID NO: 5663 - DNA, 545 bp, Glycine max
  Clone ID: jC-gmfl02220073e10a1
ggaaggaggagaaggagaaggagggtgttgcgccacgaacacatgaattagaaaagaagcagctgcagcaacttttcttgttcaatacccatcaaatgcaaatacaaagacactctctttttttaattactactgtgatatgttcctttcttccttctgaatctgaccaaccagtaggactccttcaaagggattttgagtattgtttgaattgctggagacctgagagtgaaaactaactccacaatccatggataaagatgctagggtggaagagactgttgatttgcgaaccaatgtggagttggtgagatcagtctctgataagcatcatgatcttttaaggccatctgctcggaactattcaagaggacaatcaacagatacaactggccgtggaaagggaaagtatgccttaattagagacccagaggacttccaaatgggagtttatgataagcccttccatgttttggatgtggaatcggatggttctcatttctttctggatttctatgccctcctatgtggttctatgctacaat

SEQ ID NO: 5664 - DNA, 356 bp, Glycine max
  Clone ID: jC-gmfl02220073e10d1
acgtaaaacggcggttcattctaggtggcacttggccatgccggctatgattgttgaaacatgcgcgagaacacttaacagcaagttttacaagcgaaatttgcttctttaacacgtaactgcagacgctgaacctttcaactgccccaaattcataacttaaccattcctaggtggatcaaggaatcataatgcttctattaagctttattggaaaccagggaaaggtctgtgccaaccattgagcccctaaatggggataccgttgggaattcctctgaaagggaatccctcctcactagaagggtaaagccaagggtcaggcattttagcccggccactgggggtcttcaacg

SEQ ID NO: 5665 - DNA, 298 bp, Glycine max
  Clone ID: jC-gmfl02220073e11a1
gagatcgctcatcaaggtccggatgcacgcacgcatgccctaacataagttgctcgggccctaattcgcatcttcaatttgactaacagacccatatatttcatcataacatagcatcaataatggtcttatattggtagacgtggaccgaatggacatggaccggttcaaggtctcgtagagcgacgcggaagtcgatgacttggataagctcgaggagcggcacgggcccatgcactggccgctcatgatccggtagattgtgggccggactgggaagtagcgcaggctactgggg

SEQ ID NO: 5666 - DNA, 327 bp, Glycine max
  Clone ID: jC-gmfl02220073e11d1
gtagatgtccaatccgttttccttttgaacaacttgggaaccgtctttcaaactgaaaaaaactcacaactttcttcagtctcaacccccctggtatgttggagccacttaaagtctagcactccctgggccctgggggaccccaaggcggatatattcccgggagccataaggcacggctggggcattcaatggatcctcccatacctggtagcccaggtttggatacacatctgcatcataccgaccaagatccgaaccgaggtaatgttctgtgcccttaaacgcagtatcaggggcgaagcattacgacgaacccgtgaatac

SEQ ID NO: 5667 - DNA, 494 bp, Glycine max
  Clone ID: jC-gmfl02220073e12a1
aggagaagttcaagcaggagatccagagcctccttgatggcaacttcggcagccacgcgcgccaccgcaccttcgtctcctggcgccgcttcatccaccacgaccgcggcagcgccggagtcaccgtcgccaaactcccggcgactatccggtcgccgctcttctaccgctcctggctcgacttccggaaggtcctccacgactggttccggaagcgacgattccaacccggtatcatgtccgggttgactcggtcaattaagcttccaattgattcacacaacaacaacaacaaactacaaaccaataacaaaaacaaatactcttcctgtgccgtagttggaaacagcggaattttgttgaatagagactatggtagtgaaattgattcccatgagtttgtgataaggttgaacaatgctagagttgatcactctgagaccaaggttggaaaaaaaactagcatttcattcatgaatagtaacatcttgcat

SEQ ID NO: 5668 - DNA, 486 bp, Glycine max
  Clone ID: jC-gmfl02220073e12d1
gatggagtcaaagaactgtattgatctaaccaacaaaatttacacttggtgttgccttgaggcttcatgttggacagttcaacacaaacaacaaaaacgaatcttgaatcagtattttgctttccactatctgtgcatttcacaagtattacaataacagaacaacaattcacagaggcccttcaccaccacttgcagcagcagcagcagttcagcacccatcattgatacatgacaacaggaggaaccttaaacctatcctcaagaaagggtataggccttttcccatccacaaggtccctataaaacgcatactcagcctcatagtcatgcaagtgaagctcagccttctggttagtgtggtaatggtgcttagcagaagtcgatttcccaaacccaaaaatgctaaccctatcacaaatccccaaagccagcatcacagcctgcatccctgaagagtagtgaaaaagagaaccatcatgagcc

SEQ ID NO: 5669 - DNA, 532 bp, Glycine max
  Clone ID: jC-gmfl02220073f01a1
ctcttgtactctgtttattcacagccacatttgaagcacgtctctcttctcttctcttctcttatctataaaagaagaaacaaaggcacctcatccaccaaaacagagctagtttagttatctactcttttctgcatgtttgttctctcaacgactcctccgcgaaagagtattattcaatattttggttgggttgaatcccggggttgaagcgttgcagacatcacggctattctaagagtgtctcgctccctcattcatgtccgatctgtacgacggaggacgggtagttgcgtaactgccgttaacccttcgccgcacggtgggcgtggtgctttgccttctgaaggtggtagcccttcagacttgctcttactcgctgggggtggtttcttctagtttcttcactcttttcattacctttagcctgcataggtttaaatatgaacaaaaaacagcgactttgtgactaggtaagatcaccgtttctttctcttcttcttcttcttcttctatactactactactacta

SEQ ID NO: 5670 - DNA, 558 bp, Glycine max
  Clone ID: jC-gmfl02220073f01d1
aacagataactgaatttattatttctcagagtcaagtcaagcattatgatacatcataccccaaaacaccaacaacagtactcaggtgagcagttattacatcgtactttcacatgaacgcgttataaaaggcagataaaagcaaatacatacaacacaggaccttaaggctcaagcacagcacaatactatgtgacttaaacggtgacacaattcagcaattattcttaaagcactacggatttgctgaatttgttcataattttagagccttgttagtgtagaatcacacattcttgtgaaccagctaccaccacagtagggtgttcgcttgtgctgactgcatcaacttctttgacactttcaacgttgacatcctccaattcaccacagccaatggcttcaaaaataagatcattgacttcttgaaacctctcttgagagagggacacctctgcaagaagccttcaagcattgccttcagatgcctcatcataatccttcttactctttagaaccatgtgcccactaatttcccacacagcatgattcacttgg

SEQ ID NO: 5671 - DNA, 478 bp, Glycine max
  Clone ID: jC-gmfl02220073f02a1
ggccctgatggccaccaagcagtggctgctagagtgcaggcggatcgtgcagtgtttgccaactgtcggttcgagggctaccaagacactctatacacccaagcccacagacaattctacaggagctgcatcgttacaggaacaatcgatttcatctttggcgacgcagctgtcgtgttccagaactgcatcatggtagttaggaagccattggaaaaccagcagaacatggtgactgctcaagggagagtcgacaagcaacaagtcactggaattgtgctgcagaaatgcacaatcaaggctgatgattcactggttccagagaaggacaagatcaggagctaccttgggaggccgtggaaggagttctcgagaacaattgtgatggaatcggaaataggtgacttcattcaccccgatggatggacagcttgggagggagactttgctctcaagacattgtactatgctgagtatg

SEQ ID NO: 5672 - DNA, 433 bp, Glycine max
  Clone ID: jC-gmfl02220073f02d1
ggcaatcaaggaaaattttattgacatctccaagttcactacagactcaacctgtttttatcaacaagaaaaggatcttctatttaccttaacatttggggaccccattctttgcaaggatttttcaccccactgcagttcgggccagattcccatttacgattaaatggttttaaaaaatttccgggaaaagaaagaatgaaaaataccattcattaaaatgagcaagaccctcaagtttaatttccggggggcctaaataacatgtagcaacagcagctcaaaggcttaagccagaacccaagtggtatgaaattctaagcaaaggggcttaattggacaaaccttgggcggcaggcacccccctgttctggagccctgtgcctttccagaaagatcccacagtgaactgggtagccccacccctggtaat

SEQ ID NO: 5673 - DNA, 542 bp, Glycine max
  unsure (1)..(542): unsure at all n locations
  Clone ID: jC-gmfl02220073f03a1
aaaaaaaattaacattaaatatattttacagaccaaaatgacaacctttgtttatttgaaccaggaaagtagtttaaaaactttgaaatataaaattacctagaatagtggagacaatcgatatcttatcccatttgtggtcttattatgctaaatttgccttgaaggagccttgacaaatggactgcaaataaaaaagttttattgtctttctatccgttattccattgtttagtctttataacgtcacatgctactttttagatgaaagtacaaaaaaaaaagtaaaaaagcttcactagtggaatcactgatgtgaaaactttcgctaagaatgtctattttttttattggcttttcatctaggattatcaaatttcctatctagattggcttatggctctgtgtgctctaatttcatatgctcatctgatcttcacanaaatacgctcactgacattgttcacgatgatttaatagaggcgcatatattgatatcttttattttctggcactggtatggtatttgacaggtcatggca

SEQ ID NO: 5674 - DNA, 511 bp, Glycine max
  Clone ID: jC-gmfl02220073f03d1
accttatgtaagaaatatcaaatatataaggaaaaaatgtcaattctatacaaaaacaaaatgtcaaatagttatgggaaaaaaatgtttttctagatagtacataacccaagcgtgaactgagccgtcacttgtcacataaattcggctatttcttcattaagaaacctacaaacaatacgctggaaacgtccaggagatagaacttgttaggatcttgtattctgctatatgtgtgaccctttaatgtcaaaactattgtatagaataagctcgtatcacttccaccactggtgcttgacacattggacactttcttctactttggagcaaatcattagcacattttgaacatgtgcacatgtgcccacatctgtacaacaaagaatcaatattgctttcgcagcatatacagcaaagtcctttcctcacacattcccatttagatttatctctgttgaaacaccgtcatgtattcctgatgaaccagttgagcgatttagggctgcag

SEQ ID NO: 5675 - DNA, 464 bp, Glycine max
  Clone ID: jC-gmfl02220073f04a1
gttcgatatattttcctgccaattttgggtattctagttattaaaggagcaacacagttgggtttggtgcaaccagatcccttatatcagtttgtgcttctccttcaatatgcacttccaccagcaatggctataggcacaatcgcgcaattgtttggagctggtgaaggtgaatgttctgttatcatgctatggacatatgctttggcctcagttgcagtcactttttggacaacttacttcatgtggcttgtggcttaattttgtattcattgctatctatggttattatttatttatttttaaattttgccttataagtatctcttttcagccaggggtaggaactgcctacactatctgtagctttatacaaacttcctcaaatggatgaaatagaatatatggggctactcaaacattaattacttttcaataaatgatataaatggtttactatgtgt

SEQ ID NO: 5676 - DNA, 377 bp, Glycine max
  Clone ID: jC-gmfl02220073f04d1
attcaaaaaccaggaggaaatagtaacagtttaacccaaaaccccataaaaattcagggaaccgggccccgaaataattaaaaaggcaaaaaccgatgaattcaaataaataacccgaagaaggcccgggcttttttttaaccaaagaaggggaaagaaatgaataaacaaaaaaatggggtttccatggcaaccaggggggggggggggatagcccctgggatctggccccgttaaaggggggagccccgaaaactttgacccctttccaccgtgtttttggacaagaccctgtttttccgggggccggaaaatccccatttgggggggggaaaaaaaccgggggttccaagcctagggaggggaaaaccaccggg

SEQ ID NO: 5677 - DNA, 167 bp, Glycine max
  Clone ID: jC-gmfl02220073f05a1
gagaaatgaacttacttcgtgagagtaacatgcagctcagggaagaaaataaacacaattttgaggaatgtcagaaattgcgtgaactggcacaaaaggttagagctgagacagagaacctagagaatctcctgaaggaaagagaaattaagcttgatggccatacg

SEQ ID NO: 5678 - DNA, 518 bp, Glycine max
  Clone ID: jC-gmfl02220073f05d1
gcgcacctttattgcttgatattcagagtctttcactgatggcaacttcggcagccacgcgcgccaccgcaccttcgtctcctggcgccgcttcatccaccacgaccgcggcagcgccggagtcaccgccgccaaactaccggggactattcggtcgccgctcttctaccgctcctggctcgacttccggaaggtcctccacgactggttccggaagcgacgattccaacccggtatcatgtccgggttgactcggtcaattaagcttccaattgattcacacaacaacaacaacaaactacataccaataacaaaaacaaatactcttcctgtgccgtagttggaaacagcggaattccgttgaatagagactatggtagtgaaattgagtcccatgagtttgtgactaggtcgaacaatgctagagttgatcactttgagaccaatgttggaaaaaaaactagcatttcattcatgaatagttacatcttgcatttgtgtgctagcaggggagggt

SEQ ID NO: 5679 - DNA, 513 bp, Glycine max
  Clone ID: jC-gmfl02220073f06a1
cttttccctcgttgaaatgaaaatgggttcttctttgtggactttgtgtctaattttggcttcactagcctcttctgcattctgtgcctttccacggaggccagtggatgttccattcggcagaaactacgttcccacttgggcttttgatcacatcaaatacttcaatggaggttctgagattcaacttcatcttgacaagtacactggtactggcttccagtccaaagggtcatacttgtttggtcacttcagcatgaacataacgatggttcctggcgattcagctggcacagtcactgctttctatgtatcttctcaaaatgcggagcacgatgagatagattttgagttcttggggaacagaacaggacaaccttacattttgcagacaaatgtgttcaccggatgcaagggtgacagatagcaaagaatctttctctggtctgatccaacaaaagcctaccacagatactctgtgcttgtgcacatgtatcaaattgtgttcctaga

SEQ ID NO: 5680 - DNA, 547 bp, Glycine max
  unsure (1)..(547): unsure at all n locations
  Clone ID: jC-gmfl02220073f06d1
aaagtagaattacacaacatatataattttattatagaggctctgctctgtattcaaacctcactcatcaattacacagctcaaacaatacaatgataataaataatggtaggaataaagtatatggtaaatgatgaatcaataatacaataagaaacttatggtagcaaccataaacatagtactacatgtgaatttaaatgtcacggtttcttctacattcaggtggaagctgagggtagcggcttctgtcagtgcagtagttgtagatggtgtatttcctgcgcacccacctgagccatctccattgagaagcatcaagatcatgatactgtgcttgatcccaccacctcttgccttgtgtagcacagaactttgcattcactgaagcttcacacccatcaacgtggaaccctttgtattctgctatgaagggtgctttggaccaatctgttttctccaaaccaccccttgtggcccagtcatcagcattccacaagctgtngtacacccttcatgggttggtcaaaggggaacttcactccca

SEQ ID NO: 5681 - DNA, 592 bp, Glycine max
  Clone ID: jC-gmfl02220073f07a1
cttcctccatcgtgttagggtttccactttgcagagtttcaatttactctcattatcacatcgcaattcctccgtgtttctgttttgataactcgcaaatattctacttaatagcccgacatctcgttccctgaatactgattttgagctttcccctgatttttttagggaaacaaattattgccccttccttttttccaatcatctgcagtgaaaaaaaaaaaaaaaactatatctgaagtttattggggatcgggtattgggaaatgcctcgagacttgtcacgatcccgatcgcctacctataggcggaggcattcaccatctcctgtgggacacaggtatagcaggaggagcagaagagacagaagcagatctccttattcgtcctactgttacagcaggcgaaaaagtcgttctatttcaccaagaggtcacagaagtccttctacaactccaagacgtggtagaagccgttctccatctggctaacgatacagaagacatagaagtaggagttcctcattgcctcctactcgtgaatcttacagtccaagtcttgtgtcagtagagcacaaaagtgccactgaaaa

SEQ ID NO: 5682 - DNA, 215 bp, Glycine max
  Clone ID: jC-gmfl02220073f07d1
gttctaaggcttttattttaatttattatctcaatataaataaacaaaaccaaacaaacaaacaataacagaacccactaacaaaaaatccacacaaaatcgaccttccgcccaacagtcattaaaaccgactcgccagaaacgtcaaactaaaaaaacaaaaaagaacacctacaaaacaaccacagcacaaacaccaaagacaagaacaacac

SEQ ID NO: 5683 - DNA, 473 bp, Glycine max
  Clone ID: jC-gmfl02220073f08a1
caaatattcagggaatggatgaatagtggttctagggatcatgcatcaaatcattcccaaggaaataattcaaggggagaatggcttggggaaactgagcaggaaagggtgagtgccataagggagtgggtacagatgagcagccagcagagaggcgtttcttctggggaaagtagggaagaacaatcttctgaaattggtacccaaatcgaatgcgttcgtgatggatttgttgttaatcagaatgagggccaacaccaaactgagcatacacggcggggaatccgtaaattacgtggtcgacaggtgtttcttgatatgcttaagaaagctgagatggaaaggcaaagagaagttcaagaattgttgaaccatcgagttgtatctcattttccccatcgcaatcgcatacaggccttgcttagaggcaggttctcgagaaatgacagatcgattgataattacacgtccac

SEQ ID NO: 5684 - DNA, 471 bp, Glycine max
  Clone ID: jC-gmfl02220073f08d1
ggtgtgagtttaaaacaatgcttaaatgccgaatgcaaagaaagatcaatcagttgcaaaacccatgtaattacagacccatattacagactgaaacctaaaacctatgtaattacagacccatattagtattcaacctagaaaacatatacacaggcaaaacccaaaccaatcccactaaataattacaattctaaagttgtaagtggcagtccaaatgtaaacccagaagaaaacacctaagaatgtttagcactaccctttagctatctccctactggcctactcttcttttgcctaatggataaacagattccaacaacacacagataccaccctacagctaatccttgttgacacaatcggtgttacagtcaactgtaatttaatactacaggaaacctaaagagaacaatgttcatgaatcaccaccagcctcagcgaatggatgattatgttgtcgtacaaact

SEQ ID NO: 5685 - DNA, 518 bp, Glycine max
  Clone ID: jC-gmfl02220073f09a1
agagcgtgaagatgacactggcgctggtgcgagtggaggtgttgctattgcagcagcttcttcacaaacgcaaacacaagagattgaaagtgctggcggcgacaggaggaggagatacaggggagtgaggcagaggccgtgggggaaatgggcggcagagattcgcgatcctcacaaagcggcgagagtgtggcttgggacattcgacactgccgaggctgcggccagagcctacgatgaagccgcattgaggttcagaggtaacagagcaaaacttaatttccccgaaaacgttgtaccggttccacctccttctccggttcccgatttaccggcaagtgcggtagccggttccgattccatttccggttccggttcagtggtggcaggtttttcgccgacgctgatgcatggaggcgccgttcagggctcctctgcttttctgagagattattgggggtattctcagctgctgaggagtacaggggacttccatggactcaccagtggttctttga

SEQ ID NO: 5686 - DNA, 332 bp, Glycine max
  Clone ID: jC-gmfl02220073f09d1
aggaaccaaaattaaaaaatcttatcccttggaaggaatgggccccactttcagtattggcccggcctttaaaaagcttgatttgcaaatgaaaggggcccggcaaaatgctaatggggccaaaacaatgggcttgggcctaaccgaaaatgggatgccacctttatcactcccaatgaaaagggccccataccccgggaaactggtcttaacccccaatgaacccaggggaatctggatcatcaattgggtaaagctgaattccaaatttaaaaccctcataaaccctttgattcccccaaaaagacccacaagggttaacaatgcccctg

SEQ ID NO: 5687 - DNA, 544 bp, Glycine max
  unsure (1)..(544): unsure at all n locations
  Clone ID: jC-gmfl02220073f10a1
taaggaaaatgattctgaggactggcttgacatagttgcaacagtagcgtggcaggctgctaactttgtgagaccagataccagcaaaggtggcagtatggatccaggtgattatgtgaaggtcaaatgtgtggcatctggaagcccaagtgagagcacccttgtcaaaggagtagtttgcacaaaaaatattaagcacaagcgcatgacctctcaatacagaaagcctagactactccttttaggtggagctctggaatatcagaaagttccaaatcaattggcttcttttgatacattgttacagcaggaaaatgatcatctgaagatgattatttcgaaaattgaggctcttcgaccaaatgttttgctggtagaaaaaagtgtagcttcatgtgcgcaggaatatttgctggcaaaggaaatcttcttggtgttgaaatgttaaaggcctttgctggagcgtatagctcggtgcactggcgctcttggcactccataagtggattggttatctaaagcacgattggngcactgtgagttg

SEQ ID NO: 5688 - DNA, 426 bp, Glycine max
  Clone ID: jC-gmfl02220073f10d1
agggaccaaaattaaagaatcttatccccaggaagaaaggggcccccctttcagaatgggcccggcctttaaaaagccagattagccaaagaaaggggcccggcaacatgccaatggggcccaaacaaggggcctgggcctaaccgaaaaggggttgccacctttatcactcccaaagaaaagggccccatacccggggaaaccggtcataaccccccaggaaccccggggaaaccggcttaacaatgggcgaaagcggaattccaaatttaaaaccctcaaaaaccccttgattcccccaaaaagacccacaggggttaacaatgcccccggggctaacaggggtaacatggtcgaaaagcccccaaattcaaggagcccttggccaaaccccttttgggcatccccaggaacccccttttgggg

SEQ ID NO: 5689 - DNA, 524 bp, Glycine max
  Clone ID: jC-gmfl02220073f11a1
gcgaagaaagagtgagttgcagttagagtctccaatccaatccatgtcgttgctgctactccctcaacctccgacacccctctcaacggtcaccttctccgccgccgcacgcgcacccttcgccgccgtcacgcctccgcgcccgagaacgctaactccgaaacccgcactctccctctctgccccaataacaacaacagcacccaataatgcaatccctccgaagaaggtcctggttcccatcggattgggcaccgaagaaatggaagccgttatcatgattcacgtcctgcgccgcgccggcgccgacgtcaccgttgcctccgtggagccgcagctccaagtagaagccgtcggaggcaccaaactggtcgccgataccgacattttcgcgtggtccgatcaagttttcgatctcgctgctttgccctgacagggagggatgcctggctctgctagactacgggattgcgatgtgctgcggaaaatcacgtgcagacaagctgagggaaacaggctctatg

SEQ ID NO: 5690 - DNA, 475 bp, Glycine max
  Clone ID: jC-gmfl02220073f11d1
caacaaaaattcgacatgatttttttttttggaaagcattctgtgatacaagatgatatttggctaattataattacattatgacatattgcgttttggacattttcttacatcctatcaggggaagtttggtttttatattagaaagttcaatctattgttaactagagtctacagtgtgttaactatgagaggatccattctctaaatgatgaaaatcatcaagttcctgtctcagtcaatagcaatggcattcccaggtcgacatcccctccagaaatcaaactcagaagattgattgttaccatccaagtgtgtgaaacgaatgccaaaaggggatatgaatcgatacagagctaatcacatgagttcaagttggtagattttgccaagatattgaattagaagactgcaacttatcctttccgaagtgattggaggcaaaataaatcataatgataatatggagctgctg

SEQ ID NO: 5691 - DNA, 503 bp, Glycine max
  Clone ID: jC-gmfl02220073f12a1
tgaacacattgttgctggtgcatgagagcttcatcttgagatctgtttgaaggacttgcaggatgatttcatgggtggagctgagattatcaaatctgaccctgttgtgtcattcagggagactgttttggagagatcatgccgcaccgtgatgagcaaatcacccaacaagcacaaccgtctgtacatggaagcaagaccattggaggaaggtcttgctgaggccattgatgatggcaagattggaccaagggatgaccccaaggttcgttccaagatcttgtctgaagagttcggttgggacaaggatcttgccaagaaaatctggtgctttggccctgagacccttggacccaacatggtggttgatatgtgcaagggagtccagtatttgaatgaaatcaaggattctgtggttgctggattccagtgggcattaaaagaaggtgctttggctgaagataacatgagagccatctgcttttgagtatgtgatgttgtgc

SEQ ID NO: 5692 - DNA, 543 bp, Glycine max
  Clone ID: jC-gmfl02220073f12d1
gaaaatactatctttcaagcaaaattcgcaaaataataatttgaaccaacaccgatgcaaaatcctattagagcaaaaatacatcgatgcaaggaccaaataacagcattacaacattcacgggcaaaaccacaaacaaaactaacagaaattaaatctaaagtagcattgttcacaagagaaaataaattcgactaagttcaaagtaaaataattcatgaaacaaatttaaagcttgtcttcaaactcggagagaggagtcatctgttccttcaagcccttcctcttgcgaatgtcagtgacaagctgtgcagcttgtgatccagcctccaatgggtcagaagacatcatgtcccagtgatcaaacacacattgtgggaaggcctggcctgatgttgcagccctcaatgtgctcgagaaaccaaaggactcgatgacagggaggtatgccttgatgttgtatagtggggtacctggcctctgcatttcctcgaacacgtgtccacgcttctggttaagaacactgtagattccaccaagagc

SEQ ID NO: 5693 - DNA, 534 bp, Glycine max
  Clone ID: jC-gmfl02220073g01a1
gtgtgtaaccaattcttctcttttgctttctctctccaaattcatcacaacttctctcgtacctctgcagagaagttaacatataggagtgagagggagggagagagaaggaaagcttggtagcgatggggaaggagcaagttcaggtgctgaatgccctggacgtggcaaagacacaatggtatcatttcacagcaatcatcattgctggaatgggcttcttcactgatgcttatgatctgttctgtatatcactagtcacaaagctacttggtcgcatttactaccacgttgatggggctgcaaagcctggttcattgcctcccaatgtgtcagctgcagctaatggtgtagcttatgctggaacactttcagggcaactcttctttggctggctcggcgacaaaatgggccgaaaaaaggtctatggcatgacccttgcgcttatgggtatagccttcattgctttcggtctatccttcggacacgatgccaagactgtgatgacacctttatgctactttcgcttctggc

SEQ ID NO: 5694 - DNA, 592 bp, Glycine max
  unsure (1)..(592): unsure at all n locations
  Clone ID: jC-gmfl02220073g01d1
ataggaagaactacacattccaatatctattttctcaaaattcaaagaacaagcagtacctcaggtccctatcattacaacaagatagagcagaaccaaatagaaaaagaaataatcaaacgggaaaggaaagctttggcaacaattccctagccgaattaaggcacggctttattctagtaacagatcactaataaactagagaaagacactgaattattctgttgccattatttttacaccttggtctcctcttcttgctctcccgaaatctcctccaaggatctacccttggcctcaggcaccaagaaagtgaacatgaagcctaaaatgttaatcacacccaacacaagcagtgaattcctcacaccaatacctgcagggtaccctgcatctgctttgctcgggtcctgattctgtgccaaatataaaaacccgaatgcaccaaccatagccccgagctttccagatgctgaagatattccatggcaagtggatctaaatctagctgggaaaatctccgtccgcacaacatatgtggtggcattaggcccaaagttngcaaagaagaatgtgagagagtaaatgacca

SEQ ID NO: 5695 - DNA, 532 bp, Glycine max
  Clone ID: jC-gmfl02220073g02a1
aaaaatacattaataagacatcttagaacatgactagcatatgattcggaaaggaatgacaacaggcaaactaacatagactccagaaatcataccttccaggaaatatacaagaaccatgacctgtaaaaattataatacaataaatatcagttatattaaaatgctaagtaattataaatagaaaattacttagcattttaatataactgatatttattgtattataatgctaagtaattttaaatagaaaattcattatgcaagacctattttaatgtataacaaatctgagccaatagaaaatggacaagaaagaaaaaagctgcaaaatttgaagagattttttcatactgactaattaattatgtcaaaaggatgctaaggaaatgaaattcaaaaagtgttcatgtaacatttcaaaatacattaatataatcatccataattttaacaaatatacttctgaaacaaactgataagccagatttgaataccactaatctcatacttaacgtcacaggatcatttt

SEQ ID NO: 5696 - DNA, 508 bp, Glycine max
  Clone ID: jC-gmfl02220073g02d1
ctgaaaatacagtacatttatttgatcttcttgatttgccttacaacaaggttgaggatttatacctcatttttcttgtaaataactcaataccactaagtctcccgtgttaaaaatgaaagtccttcattcataggctccttttttttcaacagatgcttttattggtgtcaacattggttcagatatatctgacatgcccggtccaacagagattgttgctcttctgaaggctcaaagtatccaacatgtcagactctatgatgctgaccaagccttacttcttgcacttgccaacacaggaattcgtgtaactgtttctgttcccaatgaccagctacttggcattggtcagtccaatgccactgcagcaaactgggttactcgaaatgtcatagctcatgtccctgctaccaacatcactgccatatgtgttggatctgaggtcctaactaccctcccaaatgcagcccctattctagtctctgccataaatttcattcactct

SEQ ID NO: 5697 - DNA, 554 bp, Glycine max
  Clone ID: jC-gmfl02220073g03a1
ctcgagccgaatcggctcgaggaatcctataccttgcgcggtggaccgagttgacggtgataacctcctcccttctcctccgccagatctcatcctcgccgccgccgccgccgccgccgctgccgccgaatttctcctcgtcgttttgtctccacctctcactctcgctgaagcttattaaggaccgacagcatgtgccggcaaaattctccggtacaccatgccggtgaagaagaaattgcagctgatgagagtcttttaatttattgcaagcctgttgaactgtacaatattctctaccgccgcgctcttcaaaatccttcttttcttaggagatgtttgctttataaaataagagcaaggcgtaaaaggaagttgagagcaggaattgtgattttcaattatagggatcactacaacattcttcggaaaactgaagtgaccgaagacttttcttgtccgttttgcttgatgcagtgtggcagctttaggttactggagattaccaagcagtgaatgtctccgtgaaaattaatatattgagatcagagaat

SEQ ID NO: 5698 - DNA, 425 bp, Glycine max
  Clone ID: jC-gmfl02220073g03d1
aacaaacacacgatcttgttcatattaaattattcttggacaacaggatgctacgataaatccacaagtgaaactagtaataatcacaaactttccctggtatttccgagggttccttattgatcactcttaattcactagtcaccgcatcagcatgatttatccctccaagggaacactgtgaagaacaacggtctcaacggttagacccggcccgaatccgaatagcaccccccactctaacccttctccagtggtactcttcccttcctccttagacttattcctcattttatccagaatgaacaaaacacacgcgcttgacatgttttcgaactcactcagtacatgccgggtggactggagtttcttcggcttgagccggagcttctcctagacttgatcgatgatcgctggaccaccgg

SEQ ID NO: 5699 - DNA, 603 bp, Glycine max
  Clone ID: jC-gmfl02220073g04a1
gaaggtagttgccaaagttccataactaatacagtttgtcagcatgatgaaacagaggaaactcatgaaaatgaacctcaacaagaaagttctggatcggaacttgagaaggtttctgatcaggcaaaatctacagcagaaacaaatggcagtaagctttcagctgcggccaaacctttcaatccaggaatgttgtccatgtctcaccatttaaattcagcttccttcacaagcatgtatgatacagatgttagtcaaggcatgcacgtggagactgtgcttccccctgctgttgctagggtcccttgtgggcctagatcgcctctgtattatagaaccaactatacttttcgcatgaaacatggttctactaaaggtcaaacctctatcagagaaagaagtggatttgggtctccaagaataatgaatccacatgcgcctgagtttgttcccagaaatgcttttcaaatagaagccaatgatgcccattcaaatgtttccaatgagcataactctttgtctgacataggcatgtcagaagaaacaagctagatgaaaatttgtgaaatcaatggagttccacaaaacagtatttctgatctg

SEQ ID NO: 5700 - DNA, 426 bp, Glycine max
  Clone ID: jC-gmfl02220073g04d1
aaaaaatgaagtggccaatcagctttttattgataaaacaaaatttccaagtttcagaacaaaacttactatataatagagaataaacaaatcccgaatgccctaattgtatcggcaaaaaccaaagtgaattgaatgaccaaaaattttaggccttgaagttataaactattaacaatctgacgtccaaagcttcggccagacaaacactcaaatgtagagacaatttccgttatttatttcataactctattcaacgaactgaagcacaaagggactggtggttgcccaattctgggactccatttgggaacttttgcctgtctttcccccttttggagacaactataaacccttgaccatctccattctttttttcaggaacacctaattttttttggctataactatcacctgaaatgaggc

SEQ ID NO: 5701 - DNA, 521 bp, Glycine max
  Clone ID: jC-gmfl02220073g05a1
caggattctgatcctattgtgttggccttcgggatcggagtaatgattaacagggacagtacaggctcaagctaataaggcggatgcttcaagtggcgataccaattcctttcatgatgaccagagtactttacatgttggtcccctgattcagaaaagtactgaagtggagtcagttgcagattatgaaaaacagttatcttatgaatgtgttgaaacatttgttaaaccaaataagaagaagaatggtgctacatatgatcagggatggcagttggattctgttgttctaaatgaacagaaggatcagtccaagaagagagcggatagtcatcactttgaatctaatggaagtttgtgtgggcaacctaatgctaagaagccaaagataataaggcagtcacttgataatactttcgacaacattgctcctatgactaactctattccttcccctgctgcgtcacaaatgagtaacatgtcaaatcctaataatttattaagatcattagtgggcgaga

SEQ ID NO: 5702 - DNA, 450 bp, Glycine max
  Clone ID: jC-gmfl02220073g05d1
gttaaaagcaagtaacattaagttggattcggatacacaagataattcacattatctgaagtacttcaccaaacacaaatctaaaaactctcaaaagtcatttcggtctttgacgctcactttccggggacgaagttggtggcataggcccaggcgttgttgttgacagggtcagcatggtgatcggtgaggctctccaatggaccctttccggagacaatggcctgaacaaagaagccaaacatagagaacatggccaatcgttcgttcttgagttccttcaccttaagctcagcaaaagcctctgggtcatcagcaaggcccaatgggtcgaagctgccacctgggtagattgggtcagtgacctcaccgagggggccaccagcaatacggtaaccttcaacggcacccattaggataacttgtgtggcccaaatggcgaggatgctc

SEQ ID NO: 5703 - DNA, 532 bp, Glycine max
  unsure (1)..(532): unsure at all n locations
  Clone ID: jC-gmfl02220073g06a1
caaaaaaagattatgaaattttctctccaatgaaagtcacgatcctctcgtccatattcattctctatctctctcttcacctcctgtgtttttttctctctccttccttctcccttttttcaatctttcaatcaccaattctaatcactcgtagatcctctctgtttctcattctggattaatttgcattggcaaatctctacattatggatgaaatggcggattcagaaatggatcaacagatagaagattatcaacattctgaacccgatatcctttcgagaggaaccactagcatctcgcagcctaataataaccatgcaatggtgggagaatctgagaacacaactaatgctgattctcactttctgccagatgcttatgacaatgctagggtgtatggggttccacaatataatggtattcagcctccacataatcttgatacgggtgtaccagttgcaactaacttatattattctagcattaatcctccttccagtacctgtgcttntcatccgccttaaagtca

SEQ ID NO: 5704 - DNA, 448 bp, Glycine max
  Clone ID: jC-gmfl02220073g06d1
caccaaacataatgcaggtttatagatacaagttatggtgctaacaacaaatgagttgggtagtatgacgtctatatatgtgcaagtacatgtacaaaattcataagaattctgttcataaataaatcaggtaggaggagacacagaagttgatttcaaagcttgagatttgcatatggggcaaacattttttaccaccaaccatgttcttaagcaatctgcatgatattcatgctcacattgaagaactccaatcttctcttggctcttgaattcatcctgacatattatacaagaaaatgtgccctgatcatgacaaacttgctactccatattaatactagtagcacccgttaaataagtccttggcttcaattgagttgtaattgtttgctacgataaccagtgtttacattgccaattctctcaccctaagcaatgagatcct

SEQ ID NO: 5705 - DNA, 565 bp, Glycine max
  Clone ID: jC-gmfl02220073g07a1
atgatgatggagatggcgaagctaaacgctgtcgttgcggcactcgcggcgttggtgctactcgcggcgagtgtggcggtggatgctcaggagaactcggacgtgaagacgctggtgaagtacaagcacgggaagaagtactgcgacataggatgggaatgtaagggctggtcaatttactgttgtaacctcaccattaccgattatttccagacctaccagttcgagaatctgttctccaagcggaactcgccggtggcgcacgcggtcggattttgggactaccactccttcatcgccgccgacgcgctttttgagccggaagggttcggcaccaccgggaacaagacgatgcagatgatggagatcgtcggcttcttcggacacgtcggcagcaagacctcttgtggttatggagtggccactggaggacctttggcctggggtctttgctacaatcatgaaatgagtcctatgcagtcatactgtgatgactacttcaaactcacatagccctgtacttctggtgctgactactatggacgctgagccattccattttttg

SEQ ID NO: 5706 - DNA, 292 bp, Glycine max
  Clone ID: jC-gmfl02220073g07d1
gggtatggtgtggtttgttttttgactttattttgtctttaaagagtcaaaatacagggtatgcagcggcaaccgggggggagaaaaaaaaaaaagaagaccacaaaggcgccgtgaagagagacacaccaaaaacaaatcagaaaaaagaaagaaaaggagaaaacgaacaagccgccacaagaaaaaaaaaaaaggggaaaaagaagagccacccagacacccagagcaaaagggagggcaacccgaaaaaacaaaaaccccagggaaaacaccatcacgaggggggggg

SEQ ID NO: 5707 - DNA, 407 bp, Glycine max
  Clone ID: jC-gmfl02220073g08a1
cccacccagcatatctctctatttctatttattagcacccctcacattaccttgtgtcaccaagtactttgactcctttaccataccattacaataattatcaaacctaaccagtaaaaatggtgaccgtggaggaaatccgcaacgctcagcgttcccatggacccgccaccatcttggccttctgcaccgtcacgccgtccaactgcgtctcccaagccgattaccctgactactacttccgcattaccaacagcgaacacatgactgatctcaaagaaaagttcaagcgcatgtgtgaaaagtccatgataaagaagcgatacatgcacctgacggaggagtttctgaaagagaacccgaacatgtgcgagtacatggcgccatcgctggacgtgagacaagac

SEQ ID NO: 5708 - DNA, 512 bp, Glycine max
  Clone ID: jC-gmfl02220073g08d1
agtgacatcttttgcactaaacaattgttatttttaacaaatatccaaatcattgaaaaaacaaatatttatgcaaatccccaaaattcgtattacagttgctacaaataaaagaagtataatcatcaccattgaagtttactccaacaaacccaacgtaatactggcaagtattgttgctcgtctaacaaagcatgcaatgggcgaccaataaattgcatatactaagtgtacagttttgcaattctttttacacacggctatctatgaggctgctaaactccaatctcagtaacaaaaagaaaggccgagttgagccaacatttcttgacaaagtgcactagccggtagccacaatctcatggatggtatcgctaacagtttcatactcggatctgacagcaagtttcatcgcaacatactttggaccatcaagtccaaaagacaaccgtacaagaaccttcacatttcctatgaatacacctgacaacaagcatgtgtgtgacctttga

SEQ ID NO: 5709 - DNA, 415 bp, Glycine max
  Clone ID: jC-gmfl02220073g09d1
gcaataactgagacataagctgtggcctgatttttcctgaacagtttgaaacaaccccacatcagcgatgtgcataaagagttgcttatcttgctccattattacgaccacccatttccttggatttgctacttggatctgtgaagcattcatacagaaattacatgctacataaaccacatggtctaaaccgccacctgagcctatgctgagattattatacccgtgccgaatgatcaagttcacaccatcaatagataaaccaactcctcttagttcagggtcacgtgacaaccacactgaagcatctgttcaaattaaatggctggatggatatatagcagatacaggcgagaccatgggatgtaatccacacacattttgacctttgcagatcttgaaaaatccattcttt

SEQ ID NO: 5710 - DNA, 432 bp, Glycine max
  Clone ID: jC-gmfl02220073g10a1
gtactcattgctacattttatatatgacgttcgactcaaccccatcgtggaatcagtgtgcaagcattccaatcgctcccaaaatcttttctaatctgatcataactgagtagttctaatcatgggctccttgattggtccacgtgatcatgatcacagactaccgcttgtttagcttccctgtgtatcaaccagacacctaattcaccgaggagacatacctaggctctttgccattcatggtgttgatgctaccataagtaccaccacaggcactgccgacattctccaaagctctatcgatcgcgaccgtgaccgcggtcactctatcagaacccacgttgtcaagttcccatgtgaacaagttgggttgccagaacgagtacagagcgttcacttcaacactactaaggatttggtccacaaaatcta

SEQ ID NO: 5711 - DNA, 323 bp, Glycine max
  Clone ID: jC-gmfl02220073g10d1
ataggaaacgcaatctgtcaaagatttacctaattgtgttgacactaataacatgattacagaaagaagtggccagttgcaaaatattgtagattattgggtcacactactatgatttaaccaaaaacatacaaacacttataattctgttatgtcataagtcggacaattactaggtaacaatactattgtatttaacactattttggaatgaggcatgtaacttatttacaatcacagaggtttgagctgaattgattgctattattcccaagagttggtctaacttttgaggatggccttctcgcagatgagtgacttta

SEQ ID NO: 5712 - DNA, 339 bp, Glycine max
  Clone ID: jC-gmfl02220073g11a1
ttttgtttaccatcttctcttcctcactcctttattcaaacctcgaaaccaaacaagggttttcttctctttccccccctcctgattcttcattttacctctatttcacactccaattttctcctccttatcatattttatcacttctctgatgctcaccaaaaccattctttcgtcttctgtattcaagttccctggaattctcaatccgggggcgtgttcgtttctacacatgtttggatgaaaagacgcaccaggaccctatgtgtcggtgttctacgagaccgatgactgtttatggctgaaagctgctgactcgcatactgcattttgctgacc

SEQ ID NO: 5713 - DNA, 393 bp, Glycine max
  Clone ID: jC-gmfl02220073g11d1
acaaaataatttaaattttgattgtaaagtttttcattgtttataaatttttggactaggtccaaagcaatgaaaaaaaaagagactttttctaggtaaaggagaaaaactagaaggagggaacccaaagcagccacaattataatgcaaagaggaaagaaggatgttacaaacactggaccaaagaaatgcattcccaacccttgtttaaaaaagctatttcagaactcaatattccagagaatgaggaccataaaggctgaaatataaaccgatagcccatgctcgagggggaggatctgcaattagagcaaccacagaactttgcaaaggggccgctcagcatatcaaggatgagagtgatagttccgcggggaaccttctcaccgaaat

SEQ ID NO: 5714 - DNA, 531 bp, Glycine max
  unsure (1)..(531): unsure at all n locations
  Clone ID: jC-gmfl02220073g12a1
ctctaatcacatcatcataaatcaaaaaccctaacccgcgcgcgtgctcacttgtcatccctctctcttcttcttctttttctttatcgtggccgccatggattccgaggtgcagcaatcgcaagtcgccgccatcctcggcgcggatccctcccccttcgagacgttgatctcgcacctcatgtcctcctccaacgagcaacgctcccacgcggaggccctgtttaacctctgcaagcaaaccgatcccgatagcctctccttgaagctcgcgcacctcctccactcctcgccgcacgaggaggcgcgtgccatgtccgccatcctcctccggaaacagctcacgcgcgacgactcctacctctggccgcgcctctcccctcacacgcagtcttccctcaaatcgctccttctctcctcgattcaaaaggagaacatcaaatccatctccaagaagctctgcgacaccatctccgaactcgcctncggtattttacccgacaacgcctggccggagcttcttcctttcat

SEQ ID NO: 5715 - DNA, 498 bp, Glycine max
  Clone ID: jC-gmfl02220073g12d1
gtctgcaaacttaataaataaatagcattaaaatttcatatggtacaacttcatgctgtctgataaggaaataaaaccaatacaataggccaaaactgcaagaattgccccacagacaaccctatattctcacgcaatatggtaagaaaaaacaattgaggaatagaacgagaagctcccacgccacaattccctaacctcctcttttggactcaatcgcactattaacactcataatatacacattctagagaaagttccctttccaatcacaattgactctgcattctcaaaactgatatagaacaccatgcaagaatgaatgatggaaaccatcttatggcaaaaagaatgggtacaaatatagagaccaccaaactggaaaaaagcttgttcccaaaaagagcaagacaccaactgccaagccagatgctatgaagaaatgatggatatgcagcaaagcaatgacaactatgtagaaaggatagattgcaatgc

SEQ ID NO: 5716 - DNA, 618 bp, Glycine max
  unsure (1)..(618): unsure at all n locations
  Clone ID: jC-gmfl02220073h01a1
aaaaaaatatattataatatataaaataaatttatagaaaataaaatttaactatataacaaatttaataaaaaaaataacgagaaaaataaatataaacactaaanatataaaaaaaagcgagaaagttgtaancccataaanttttnnnnnnnnnccccntnnntnnnnntnnnnnntgtggnnaaantaaataaataaataaactttttaaatttgcatctttaaaaatagaggggatgactgcattaattattgacccaagatctgttagagcagaagtgtctggatattacatacaacggcttggaattcatgttgaaatggttatagatttaaaacaaggtttgtcaaccataagcaatgggaatgtagttgttaatatggtcctgattgagcaagaggtttgggatagagatttaggcttgtcatctcactttgtcaataacacgaggagaattgatcatggggttcctccaaaactgttcattcttgataaatctagtaattcttttaaagatagcgtaaacttgggtgatcataatcctactgtgatcaccaaacctctgagagcaagtatgcatgctgactcactacaacgagccatgggtgtccaaa

SEQ ID NO: 5717 - DNA, 524 bp, Glycine max
  Clone ID: jC-gmfl02220073h01d1
aaaaatgtaacgcgcctaggctagattactataagttgtgttattacatacacaaggatgagactccagaacctgtattataatacaccctagtcttctaatcaggctcaatcatttcggctgactttacatggaagaagaattaatgggttatggtacccttaacaaccaattacaactcaattgcaaccaatcaaacttgggtcctatgtacactccctgccacaaaaacaatgttttaaaacgggaacccttcaaacacagcagaaaagacaacaaaataggtcaaaaaggtagaatgaaccatttctgaacttctacaatattatccccctttgttccatttgcttttatctttcagatgagatagatagcattcttctgtctctagtgaacaaccaccaagctttgaggtggttaaatactaaaacatgcactggctgttaaatagggaacttactctgaggagacttcggacctatttgccacttcgagtgtctggatacggacagtacgctccatat

SEQ ID NO: 5718 - DNA, 627 bp, Glycine max
  unsure (1)..(627): unsure at all n locations
  Clone ID: jC-gmfl02220073h02a1
tctaccctaacataataaaaaataaattcacttaattttataaatcataacagaaattaaacaataaattaatatacattttattctatataatatacttcatttatanatataataaactccgttcacttgaanccccnnannnnttttngnnaaattccntntttttcctttattttaacaaatattataaaattacttaaatataattttcataactcattataaataacaatatatactccgtagaaaatattatcgtttgacattaatcttaagttcaactcatacaagtactggcaaacccttatgaattctactgaaatattccctaaggccttcccacatgattacaaaagcattgatgttcttgagggtgatggcaagtctcctggttctatccgccacataagttatggtgaaggttcaccacttgtgaaatcatcctttgagaagattgaggctgttgatgaggaaaagaaggtagtgtcgtacactatcattgatggggaactcctccagcactacaaaacattcaagggagacaattcagtgactccaattggcgatggatgcgaggtgaagtggagtgctgtgtacgaaaaggttaaccatgatatttctgat

SEQ ID NO: 5719 - DNA, 447 bp, Glycine max
  Clone ID: jC-gmfl02220073h02d1
gatactgtaacattatattagataaggtatggtacaagtacaaccatattatttaataatagtccataatacatgcacagattaaaacattagccattattaattaagaggcatgcatagaatagaacctctctatgcgttggcttgaacataggcatcgacctctaggaaattcttgactgcaaaatctttgacaagggttggatcagaaatatcatggctaaccttttcgtacacagcactccacttcacctcgcatccatcgccaattggagtcactgaaatgtctcccttgaatgttttgtagtgctggaggagttccccatcaatgatagtgtacgacactaccttcttttcctcatcaacagcctcaatcttctcaaaggatgatttcacaagtggtgaaccttcaccataacttatgtggcggatagaaccaggagactt

SEQ ID NO: 5720 - DNA, 564 bp, Glycine max
  unsure (1)..(564): unsure at all n locations
  Clone ID: jC-gmfl02220073h03a1
ggaaaacgggtgtcggtcgatnncaagnnnannttnnnngncnnncccnnnnnnnnnnnnnnnnnnnnnnnnnnnnnnnnnnnnnnnnnnnncnttttnncnnntaccnngnnncnncncccaancgggggaacaaaaaggaggaaagtgtgctaacaaagaggccaagagaagaagaacccctagagaacaaagatagtacttatgaattactagagtccttatcaaagaggcacaggtcatacaaccacatactctccctccttgaatcagaggaagatgactccacacaagacctatcttctctcatcacttccctccaacaagaaatcaccaattgtgcctctgattcggacacccttttgaaccaacacagcctcaccaacaccaccaccaccaccacaacaaatagtaatttagaggattgttcatcctcaacaactaaatattctagtgacatgatggaggaacatgatgacaaagaaggggtcatgagacaccttcttgaagcttctgatgatgaacttgggattccaaataaagaggatgaatcactcgatcttg

SEQ ID NO: 5721 - DNA, 372 bp, Glycine max
  Clone ID: jC-gmfl02220073h03d1
aaaaaagaaggaattttcatttacccttaaaagtcaataaaattaacatatgaaatagtttaaaagatcattactagctaattaattacttggggtaaggggaatatataagcctagctgctttttttacagatcgacatattgccaagtagtaaccaaccacacataaacgtcccatgattttaatttacaaaaagaggggacaaaaaaatgaaaaaataaaaactagtaaatttttcatttttttcctccttggatttcatcttgaacgcatgaaaactatggtttttcactttctatcccccaccaaaaaaaaaaaacttgagaaagagttgagactgcaaaagatcataggagttagcagctttattt

SEQ ID NO: 5722 - DNA, 568 bp, Glycine max
  unsure (1)..(568): unsure at all n locations
  Clone ID: jC-gmfl02220073h04a1
ggaaaacgcgcggtcgtttcgagaccagctttgantttncatgcacccntccctgagcttngnatttttttcgtgagcttgatgagaaggaaataaattttttaccaatgcctggacaagttgatttcattgggggtggttctccatgccagggtttctctgggatgaataggtttaaccagagctgttggagtaaagtccagtgcgagatgatattggcattcttatcctttgctgattatttccggccaaggtatttcttgttggagaatgtgaggaactttgtgtctttcagtaaaggacagacatttcgtttaactttggcttcacttcttgagatgggttatcaggtgaggtttggtattcttgaggctggagcatttggggtttcttactcaagagacagggcattcatatgggctgcttctcctgaggatgtgctgcctgaatggccagaaccagtgcacgtcttttcggcccctgagttgaagatcacattatcagaaaatgtccagtgtgctgctgtgcgcactactgcaaatggtgctactttacgtgcaataactgt

SEQ ID NO: 5723 - DNA, 482 bp, Glycine max
  Clone ID: jC-gmfl02220073h04d1
gcaataacaaatattcataacaggttaaaaaaaattggtctcaattttcaactacacattgggaggtaatcaattcccaaccatttctttcataaacagccaaaataccatctaatcaagaaaatcctagttgatagaaaatgagcatcatccattcaattccttggttgaggaaagttaaacaaggaattagcctcaacaaatgaccaatggatatcactatatacaagggtttctagtttttggaacccggaatgatgatttgcaatatcttggtgactgttatgaatacaataagcatgacctaatgtagaaggcccatcttctaagtggagctcttactgtccactgcttccttgagctttctccccaatgctgatgctagaggaggaggcacagcattaccaatctgccggtgcttgtgtatgatattgccagcaaattcatagctatctgggaagccttgagaccgagcacattca

SEQ ID NO: 5724 - DNA, 431 bp, Glycine max
  Clone ID: jC-gmfl02220073h05a1
ctgaagttagatacccgatcatatttctccaggaactccaccaccgcacctgaaaacggtgattaccatgtctagcgctccgaacaacaccctcgctataacagaaatggctggagcagcgcatattgtagcaaatcatgatggacttcgacggcagatgatcggaacctcatgtctgtcgctacactatcactgttgtcactgcataggctgctgggatgaacttgtgctcacttgcacacgacatgaaatgaattatcccccgatgatgtcgtgaggaggatggagactctatatggttgtacgcgggaacacgagaagtccatcatgctggatcgtgtcaagaccgttatggagtaacactttccggactaccactcagctgatgctccgatggtagagttctacccgacgacaggggtcagtatccg

SEQ ID NO: 5725 - DNA, 377 bp, Glycine max
  Clone ID: jC-gmfl02220073h05d1
agaaacaatgattcgcataatttgaaataaatattatctatgtaaactgataaaagaatgcaaggtagcatcctcttagaaagaaagtttaattgaagaaattcactaaattacagtcaaacaccatgcaaatctaaactacagtcttcagtgacagaaagcacacgcattgaataaaaggctcacaaagccttatggtgattgtgctagagaccaattccatgttctattacaacatcctaatggtcaactatcaagagagagactagccttttcgtatgcactccacaaaatccttggccaatacctgctatgcatagttacctccagcagctcgggcagaatccaccttttgtacctctccatcttcagggatg

SEQ ID NO: 5726 - DNA, 473 bp, Glycine max
  unsure (1)..(473): unsure at all n locations
  Clone ID: jC-gmfl02220073h06a1
gannccgcgtgatcttcgancccatttgatttnncagccacccccccngnnnnnaaaaannacgggcaaggaaaagaaaaccaccaactttcatggacaacaccaaagaaagctaaaacggggttaccattactagcgttgccaacaagccccacgctatgaaaaaatggtggaagcattgaataatgaggcgaagctaaacgtgtaattgacggtagaggagcggaacctactgtctgttgggtacaagaacttggtgggtgctccttgggcttcgtggaggattctttcctcgattgaacagaaagagaaatctaaagggaacgaagatagcgtgaacaggatagaaggcacgtatgctgaacgcggaatcacgagtaagaccaatatgtgcaatgcatgcacgactgtgatggatgaacaccttatggcctatagctcatctgatgaacctaccgtcgatttttacaaaa

SEQ ID NO: 5727 - DNA, 424 bp, Glycine max
  Clone ID: jC-gmfl02220073h06d1
ataaacaatgattcgcataatttgaaataaatattatctatgtaaactgataaaagaatgcaaggttgcatcctcttagaaagaaagtcaaaatgaagaaattcactaaattacagtcaaacaccatgcaaatctcaactccagtctccagtaacagaaagcacacgcatagaataaaaggctcacaaagccttatggagattttctagagaccaattccatgttctattacaacatcctaatggtaaactatcaagagagagactagccttctcgtatgcactccacaaattccttggccaatacctgctatgcatcgtcacctccagcagctcgggcagaatccaccttttgttcctctccatcttcagggatgtcagaagtccacaaggtgagaatgtccctcaaaagctgcgtaattagg

SEQ ID NO: 5728 - DNA, 479 bp, Glycine max
  Clone ID: jC-gmfl02220073h07a1
gagatcactaatgagctcaaccagttttgtcagatttctgagaccaatgtgtataagggggtccagaacaggcgggctcgctccaaaagaaagcagcagaatgtggcgcctagtgctaatgttgaatcagaagtggagactgaggttgattctaaggataagaagacaaagccggacgaatttcaggcccctcctagcgtttctgctgggcctgctgataatttaggcttccagaaccatgatagttcgcagtacttgaatccagaatccaacaaaccagattctgtcttcccgtctgatgggaccagacattttcatcatgtgcctgcttttgatgggctgctatcaaactcaaggagcaactatcttactggaaaactggaaacacctgagaactacgaattataccagccagcaggtgactacaacattgcaggtcaacctccaatttgaccgcacattcctgacgtgacaccagc

SEQ ID NO: 5729 - DNA, 449 bp, Glycine max
  Clone ID: jC-gmfl02220073h07d1
atcaaagagtaagactagtacataattattatgaatagaatttagtgttgtaaactatgataatagtagttacttttttttcgttttgctgattaaattaggcactaggtaattcattttaaccgtaagcctaaaaaaatgcccctttttttgccttcagttgcatgtgcctatgatgacaaatcagaagcttagcaataaaattacaactctacaaaagttggtttcaccttttggcaaggggagtcatcattgctaacccctaatggacaaaaactagatccttcatttcttactagcataataaacacctttaagaaagtgtggccttggctttctgaatatcctgcagactgacaccgcatcagttcttcaggaggcttctctttatatcaagcttcttcaagcacaaatccgggtacatatttgatactcttattttgttctgg

SEQ ID NO: 5730 - DNA, 448 bp, Glycine max
  unsure (1)..(448): unsure at all n locations
  Clone ID: jC-gmfl02220073h08a1
ggggacctgcgtgctcctccgangccaacttnannntttngngaanncncnnnanntnanaatananntngaggaaaantganatntaanaaaacatttttggntgttattttgaggaccaatgttgatttgtgtggttntaagatcaggcgcggccttactacaaacgagagcaacactaactgccgtaccataatgctgatgttttattacaagtggagactgtggcaggctctagcgataggaagacatagcctcactaatctcaggccacagctagcgcacactcttggactgctggtattaaaggcttacaaatctcagagcctttgctttacttgggtactgaatgcaccatgcctgactgtgcttttccatctgatgggaccggacatgtgtactctgaccctggttcttgtgctctgttataaaactaacagggcttctg

SEQ ID NO: 5731 - DNA, 339 bp, Glycine max
  Clone ID: jC-gmfl02220073h08d1
atcaaagagtaagactagtccataattattatgaatagaatttagtgttgtaaactatgataatagtagttacttttttttcgttttgctgattaaattaggcactaggtaattcattttaaccgtaagcctaaaaaaatgcccctttttttgccttcagttgcatgtgcctatgaggacaaatcagaagcttagcaataaaattacaactctacaaaagttggtttcaccttttggcaaggggagtcatcattggtaacccctaatggacaaaaactagatccttcatttcttactagcataataaacacctttaagaaagtgtggccttggctttct

SEQ ID NO: 5732 - DNA, 672 bp, Glycine max
  unsure (1)..(672): unsure at all n locations
  Clone ID: jC-gmfl02220073h09a1
aaaaagaaaaaaaaaaaaaaagaaagaagaaaaaaaaaagaacaaaaaaaaaaagagaaaaaaaaaaaaaaaagaaaaaaaaaacaactacctctgannncagagagaacgtnngaacacaaaannaaanaaaaanaaaaaannnaaaaaannaaaaaaanaaannaaaaaaaaaaaaaaaaagaaaaaaaaannaaaaacaaaaaagaaaaaagagaaaaaaaagggagaaaagaaaaaaaaaaagagaaaaaaaggaagagaaaaagaaaaaaaaagaaaaaaaaaaaaagacanagaaaaaacgaaaaaaaaacaangaaaaaaaaaaaaaggaaaagaaaaaccacaagaaaacaacaaaaacaaaaaaaaaaaagagaagggggggaaaaaagaaaaaaaggagacgaaaacaaaaaaaaaaggaaaaaaagaaaaagaaaaaaaaaaagaggaancaaaaaaagaaaaggaagaaacagaacgaaagaacaaaacgaaagaaaaaacaaagaaaaaaaaaatgaaaaagaaaaaaaaaagacagaaaaagaaaatgaggggacaaaacaagaaaagcaaagaaagaaaaaagaataaaagaagaaaaaaaatgaaaaaaaaacccangaaaagaaaaaaaaaaaaaaaaaaaaggggagagacagc

SEQ ID NO: 5733 - DNA, 291 bp, Glycine max
  Clone ID: jC-gmfl02220073h09d1
ataacatacaaagcatatgacacaattacctacatgtgtaaacggtgcttacactataacaacccgaccagggcactttcacaaagagaaacctcatacggtatcactactatgatatgaccaacacctttctatcacaagcaaaactctaatctcttaataatctccttcccaagggcacaacaataaaaaagttcacactatactagactgaggcatgcccttgttttataatatcagagcttatagctgacaagattgttcgtaaccccaactacgggaccaacagga

SEQ ID NO: 5734 - DNA, 118 bp, Glycine max
  Clone ID: jC-gmfl02220073h10a1
gccctcacagtcacctgtgctatattaagcgcgctcctacgcgctcgtggcaacagtgtgcatgcgttgcaaaccctaactacctcatttccatggtgttacaaaagcacacggtcga

SEQ ID NO: 5735 - DNA, 272 bp, Glycine max
  Clone ID: jC-gmfl02220073h10d1
aggatacacagcatatactacatttacctagttgtgttgacgcggctaacattataacaacccgacatgggcactttcacgaacgtaaacctcatagtgtctcacttctatgatgtgaccaactctgtgcattgacaagcaaatctttaaggtcttcatactctaaacccctagggcacagtcctgatatatttcacactctattagagagatgcatgcaactgttttctaataccagagctatgagctgaaatgatcaatagtaaccccaa

SEQ ID NO: 5736 - DNA, 579 bp, Glycine max
  unsure (1)..(579): unsure at all n locations
  Clone ID: jC-gmfl02220073h11a1
ggataaggcagagagagaaaaacaaacaaacaaagcggcttccaatggccactctgcaattcaccttcaccgactcaaccacattgttcaggccttctctaccttccacgcgaaccttctctcgaaaccgaagcctcattgtcaaagcctcttcttcttcttctgacgacttctccaaaagcaggcgacgcttcatcgccgaaaccgccgcactctcggtctcgctccctcagttagcggcgcgtgccgaagacgcgctttcggagtgggagagagtatacctccctatcgaccccggcgtcgtgcttctcgacatcgcttttgtccccgacgatcccaaccacggttttcttctcgggacgaggcaaaccattctggagacgaaagatggaggaaacacttgggctccgcgttcgattccttctgctgaagacgaagatttcaactatcgcttcaattccatcagcttcaaagggaaggaagggtggattgtcggaaaacctgcgattctgttgtacacttncgatgccggagacaagtgggagaggatacctcttagtgctgaactttcaggggata

SEQ ID NO: 5737 - DNA, 293 bp, Glycine max
  Clone ID: jC-gmfl02220073h11d1
gaccgaaaattgagttttaatttgaaaggaaccgggggaaaccaatttcacattggcaataaaaatctctttttacaaaagggaagggggggaataaacccccccccatttttttcccccccccgggggggggcgaattgatcccctactgttccccatttaaaagaaaggaaaaccggggggtgtaaatcggcccaaaaatggctttgggggaccccccccgggggaatttcccccttttccaagggggcaaaaaaaaaatccattttttccccagagaaatttcttttttt

SEQ ID NO: 5738 - DNA, 601 bp, Glycine max
  unsure (1)..(601): unsure at all n locations
  Clone ID: jC-gmfl02220073h12a1
ggaatttggcagaaccaaaggactctatatacttattggataattgccctcatgattggcttttcttgcgttgcaaggctgtggctagccaattacatggtagtttgtcttgggtgtggccccgcatcttacaatgtgagcatcgaaggttcatcacggaggtgctggcacaacagctgcggggctcaaagctgcttgcccaacaaccatagttccttttttcggcgatcaaccattttggggtgagagagtacatgctagaggagttggtcctccacctatcccagttgatgagttttcacttcccaagttggttgatgcaataaaacttatgctggatcccaaggtaaaggaacgtgcaatcgaacttgcaaaggccatggaaaatgaggatggagtgacaggagctgtgaaagcattttttaagcagcttcctcaaaaaaaatcagagtctgatgcagatccgcaaccaactggttntttctctgtaagaagatgttttggntgttcctgattcaaatgcagtntattaaacccccactctttggtaattaatagtgtaaatcacaaatagttactgcatctataggatgtgctggac

SEQ ID NO: 5739 - DNA, 495 bp, Glycine max
  unsure (1)..(495): unsure at all n locations
  Clone ID: jC-gmfl02220073h12d1
tttttttttttttttttttttaaaatcaacagtaaatttacatacaaactgaatctcaagttaaatagtacaaatacaagcatgcatgaaattatacaatcacatgacagggtgacaagtccagcacattctatagatgcagtaactatttgtgatttacactattaattaccaaaaagtggggtttaataaactgcatttgaatcaggaacaaccaaaacattttcttacagagaaaaaaccagttggttgcggatctgcatcagactctgattttttttgaggaagctgcttaaaaaatgctttcacagctcctgtcactccatcctcattttccatggcctttgcaagttcgattgcacgttcctttaccttgggatccagcataagttttattgcatcaaccaacttgggaagtgaaaactcatcaactgggataggtggaggaccaactcctntagcatgtactctattaccccaaatggttgatcgccg

SEQ ID NO: 5740 - DNA, 405 bp, Glycine max
  Clone ID: jC-gmfl02220075a01a1
gtagatttagcagagtagagatagtgtgaggctagtacctggagagaaaagaggagactataatacatggggaagcagggtctaaacacggaggagcaacaatctgaggcaccgactgcatccaagtttccgtagatctttagggaagccacagaggcttcaacggaggcgctggttttagcagagggtcttctcggagagtacctcaccatgcccgattccgattacagcttgcttaaactccctcgtaccctagaagaccttcaactcctacgagatgaccttgagagctatacaagtgactacactgcacaagtctaggaggggtactgcgtggtttatattttcatgcagactttcatgattccagagactgtgttcatgtcattgcttgctggagcactc

SEQ ID NO: 5741 - DNA, 507 bp, Glycine max
  Clone ID: jC-gmfl02220075a01d1
tttttttttttttttttttttttttttttttttttttttttttttttttttttttgcgcccaccggggaccttttttcattccaaaataattttatttcataccccgggggcaagactgaacaacacctaggttttaagcgaaaaattgaaaatatgggcccttgtgaccattccccaaagctgaaaaaaggggattccaatttagcttccatccctttgagcaagctttgccctcaaaatttttaaaaggttgggggggggacaatcggaatattccaaggggggaaggacccctctccgggccaaatttggttgggggggaattccgtcagtttgggaaaccccttcaaagaaaatgcatttaaaggggccttctttctgctacaattggctgaaaaagccacagtcctctaaaaatgggttgcctgaatatttacctttcatatttagctaacgaattatttggtagcaacggggctgaaaattaatgaagcccgaacttacat

SEQ ID NO: 5742 - DNA, 355 bp, Glycine max
  unsure (1)..(355): unsure at all n locations
  Clone ID: jC-gmfl02220075a02a1
nggcatagtagtcacnnnngnatntggcgagncccaagcnagganncggctcgagcaaattccaatccttcaattcaataatttctcttaaaagnagccttctctgctgaaccctgaggtgaccttcacccttncaatccacccaattgtaatgcctaataaccggcgcgcctccacctgaacatcatgctcctgctcatacctcagcatcaacatgcactccgaagtaagcttgccggcgaacatcaaggacgaggcccgccggcgccccgggggggataacgacttcacggtgagagacgtgcccttgaacgccgggttagactcggcggaaacctactcgctcgaggaaatc

SEQ ID NO: 5743 - DNA, 329 bp, Glycine max
  Clone ID: jC-gmfl02220075a02d1
ccaaaaaatatccaaagcatatattggattttattcattataaaatgggcttcacaaccccttgcaagcgcagcaggttgcaaaccaaaaggcattcatgggatatcattcaacgacagagacaaaagcagtgccatacaactgtttaaaaccaaagtaattaatatttcataaacaatccaaacgaaaaaaaaggggattgacacttcgtttttcttatgggacaaaatgcgcggaaacttggcttccgttgttttccttgggcaattgcgaagggcattttcctgctataacaacgttttttattggcttatattcttcaaaaataa

SEQ ID NO: 5744 - DNA, 343 bp, Glycine max
  Clone ID: jC-gmfl02220075a03d1
ggggaaaaaaaaccttatttattggagtctggtggggggggccctcaaaggggtcttgaacattttttgtaattaccggaccctcaaatctcaatggtaaaaggggggataaataattgaataaaccggccaataattttatctggaatggcaaaccctggccgaatcacccctggactgggaacagttacttttccttggcctacaggggcttcccaaactggaacaatttaaccacccgtttttttttttttgggacaattaaccccatgccgcttttttaccggcccaattttgatattctacccactggaagccctctaagggctcgggagggaaaccc

SEQ ID NO: 5745 - DNA, 534 bp, Glycine max
  Clone ID: jC-gmfl02220075a04d1
gataataagcaaacatttctctattattataaaatggtttacaaacgagtttatctgaaatttctcaagatctaaaatacatagagcacagtttttttttttccaaactaaagaaaaacagcaaacttttgaatcactttcacgatgtgtagttgtacttgtacacaataataatttctaacaacataaataatgacgagtctttatgtgacaagagatatgccttgtagaattaatgcatcagctagaacttggttagcagcttgtgaaggatggacactgtcccaaaacacatactgtgtggcattagaacaagttcctggtgattttggattacacaacaaggatgttgtctctacagtcccggtaccacagcatcctctgtttgcctccacaaaaccagattttgaaggggattgaacaaggtcatagagaggcttgtaaatgtcgaaaaccgcaatcttaagaccaggaagttgcttttgaagactcgttgcagctgagttgagcttcttgttaaatccttgagcatca

SEQ ID NO: 5746 - DNA, 509 bp, Glycine max
  unsure (1)..(509): unsure at all n locations
  Clone ID: jC-gmfl02220075a05a1
aagagtctgacttcaagagaggagaatagttgagagaaagccttgacatgtcagagtaggactcgcctgagttggccttggattgcattcttgagaggcttcccccctcttcgctgagtcgaatcgccgccgtgtgccgcaccttgtgggagaggagtgagagtgatcaccttagggagatgcacatgaggaagaagaggggtagagttattggccctgctgcttatagggagaggaaatggcatgtagcttccaaaaggaaagtagggggtcttaaacatggcaggcaaaagagggagatgagatttatgtctcttcattggcctttccaaaggattagaccaaaggttgaagcaaattataataacccaaagctgaggagctctctgcctgtagactcagacatgaactaggatcttgctctagagtctggcaatttttggttccctgctcaagtctattaccgagagaatggncatgttggattcatgctatcttgctatgatgct

SEQ ID NO: 5747 - DNA, 434 bp, Glycine max
  Clone ID: jC-gmfl02220075a05d1
agcctctgatgctcgtttccctcattattttcctttccacaacagaatacaatacacataaacataaaaataaacaaattgttaatcagagaccagaaaaagaaagaaatagaaaaaaagaaccacgcaaaatgaaaaataatgttgtaactcctcagctctcaccagtctcttcgtctcttttgagtcttttatctccatctacatgcacacatgcacatgcagtacttaactaatagtagtaatttctctctatgagtatcaccacaaccaattcacctcaacacacaacagaaacacaatggttggatttgggttacgttgtctttgaatattctaaccccaccactggtgcactgcaacaccctcgtcccttaacttgccatacaaagccaagcactcccaataggcccttcggctggaattccctgagc

SEQ ID NO: 5748 - DNA, 714 bp, Glycine max
  unsure (1)..(714): unsure at all n locations
  Clone ID: jC-gmfl02220075a06a1
ggggnnnnaacgacgctgactcacttnggtaannccccnnnnnnnnnnttttnnnnnnnnnnnnnccnnnnnnnnnnnnnnnnnnnnnnnnnnnnnnnnnnnnnnnnnnnnnnnnnnnnntttttttntttnttnttttttttttttttntggtggtttttntttttttntntttttnnttttttnnttttntttttttttngtttgtttctnttttttattattaacagaaccatacaatattattgcagattaaagaaatggaggtgcagcggatgagggagttattgaaactttggtcaacgttgcaaattaaccgcgttgccctagtgggtggaaaccacaccgccgccagattttgcactcgttaagtccccgtttgcctcttcccctctctttgtccctcccacaatatcttttttcttcttctacctacacagaaaccaaacaagtcattacttataatataatccacaatcacaaaacaaatttctttctattctctttctaattatccaacatgatgaaaacacgttatcgcttgccgcttttggcattcttcgcattcgcttccttcatattcataacgagatcatccctgcttgaaaaaatctcttccaccatgcctgaatattccttcaacaccgaccaggttctgtcaattctatttcgcgaatgaccaacaaccaagagaaaatgttttcctcgcaacaa

SEQ ID NO: 5749 - DNA, 548 bp, Glycine max
  unsure (1)..(548): unsure at all n locations
  Clone ID: jC-gmfl02220075a06d1
gaaaaagaaccaaccatctaagtagcattcaatgaacaaagcaacaaacttcaacgatagttcagtaatagttcgttcaatgattttacaatccgaatcaatcaatcacttcatagattgaatgacccctgtagttagtatacatagtgataaagtaatatattatataaaaatagcataccaattcttcttccttgctggctgaataaaatccaggttttccaactggctctgacaaaatagagacagggaaaacctgatgactgttgaggctgctcaaatcatggctaattgctaatactatatttgttatatacactaataggctaattgctactggtaccaccacctttgtagatgtccttcagagctccatcttcaactgatttgaatgcagagatactgaatttgccgatgagtcataactccagagtgagttttctggagtcatgttagtttttgtcttcttccctcccccaaggggttggtggaatgcatcaaactgccacggntgctgatattgttgtctgtttccgctctgtgggatt

SEQ ID NO: 5750 - DNA, 685 bp, Glycine max
  unsure (1)..(685): unsure at all n locations
  Clone ID: jC-gmfl02220075a07a1
aggggnnanaacggcgctcgtcagctcntgnannnccccnnnnnnnnnnnntntttnnnntnnnantnnccnccnntnnnnnnnnnnnnnnnnnnnnnnnnnnnnctnnnttntnttnnttttntttttnnntttttctttttttttttttttnntttttttnttttnttttttttttttttttggggtgttttttttttgtgtttggttttcttgttttttctttggttttgtttttttttttgttttctctttttttctctcttttcttttttgggaacaatgactatcttcccacccttttcaaggctgattaccctccttatgggagggactttgttaaccaccaacctactgggaggttttgcaatggcaaattagctactgatttcactgctgacacattgggtttcaagacctatgctccagcatatcttagcccacatgcatcagggaaaaacctccttattggagcaaactttgcttcagctgcatctggttatgatgaaaatgctgctactttgaatcacgcgattccgttgtcccaacagttgagttatttcaaggaataccaaggcaagcttgcccatgtagcttgccagtaaaaaagcagcctcatcataaagattcgttgtatgtgctcagtgctggaagcagtgactttgtgcaaaattattatgtcaat

SEQ ID NO: 5751 - DNA, 457 bp, Glycine max
  Clone ID: jC-gmfl02220075a07d1
atggtaaaaacagagaagagactttcattattttgaaccggtttcactaatgaaagggtctacaactttgatatttctgcccttccggaagtgaagaacgttaaagatctatacgtacacattaattatgatatcaatatcataattgatattgagaaatattaaaagggcataatatgataggaatagagggggcacacggcaagaggaatttttttaaaacttaaatgtagccattcttgatcatccattccaaactccaatgattattgacgttcttgagtgtccaataacaccacccaaatgttggtcgcccaaaaacatctaattcagccttgacaaatctttgataatcctttttgggagccccttcaaccttccactcagcagtccattcacccacgaaagtgagaggaccatctacggttgtaatattatccaactgtgatgaacggac

SEQ ID NO: 5752 - DNA, 675 bp, Glycine max
  unsure (1)..(675): unsure at all n locations
  Clone ID: jC-gmfl02220075a08a1
ccaacctctaaaaaattatatactgtaagttattgaagtcaaaaagttttattaaaatattagattattataacccaaccaaancnaagnnnccggctgagtcgaaacaattnnntttnnnnnnnncccnnnnnnnnntnntnnntnnnntttttttttnttttttttttttttttttttnttttttttttttgggggttgttgatattgtttgaattttaaaacggggaaaaggagaagagaatcttttggacattttcccccctacaaaaagatctaatgaagccttctctgagcatttcaccaaggaaggactggtggccttggtggagtataatgaaaagaaaaattttgaggtgaaacttaaggaaatgaagtcttctttaacagcacagttaacagacgaggctgatacatctgaagtcattgagactgtgaagctgcgagttagagatgctaaattgccggacattgaggtggtgcggatcttgtgggatgttttaatggatgctgttcagtggtctggaaaaaatcagcaacagaatgccaatgcagcccttcgtcaggtaaaaacttgggcagaattgttgaatacattctgcaccactgggaaacttgagctggaactgatgtacaaagtacagatgcaatgctatgaggatgctaaactgatga

SEQ ID NO: 5753 - DNA, 619 bp, Glycine max
  unsure (1)..(619): unsure at all n locations
  Clone ID: jC-gmfl02220075a09a1
caaccacaacgcacaacagaaaactcaaaaaaaatataacagacaaaccacaaaaaataaaacacaaaaaatatacaaaaacaaatgtaaatacnnnncnannnnccgggcgactcgaaacaatanaatttnngncccnnccnnnnnnnnnnaaaaannnnaanaaaaaaaaaaaaaannnnaaaattaaaaaaaaaattttgtagtgttcggaaacaagagaactttgttcgaagagcatcccccttctccgccagtatccaagaggctccgctgttcctcctaccctattcgcctctctctcccttccctcatcgaccaccttcgctctctcttccctcatatggatgaccaggacctcgagagagcgctccaagaatgtggcaatgacctagatgctgccatcaagagcctccacggcctctgtatgggatctgctgatgataattctcaaattgctccacaacctgacctacctaatgtcgtccacacaggcacgttggaagagaatgacgatgcttctgctgctggggatcagcccgcttacggcaattttcccgccgatggagcagaatggattgacttgtttgatagagagatgacgtgtgctactagtgat

SEQ ID NO: 5754 - DNA, 481 bp, Glycine max
  Clone ID: jC-gmfl02220075a09d1
atggagaaaaaacaagtgcataaatttcactttgaatgttaggctgatcaacagcatataactaatatatacagatggatctgtttatgcttttataaaaaacacatgttacaaaatgtgaattaaaagttaaaagaataatgaaattttcagacatgcacaagcctcccctgtagaaacttctaacctctatctacatttactattctggattcattggattagcaccacaaaatgttaccaagatcatggtaaaccagcaaatgaacatagtattctggtttccacaatcaaatacgtttattctggtccccgcaatcaaatccaatggaaaggatgcatagtccttacgtgtgacatgaaccatgagactgatatgtgggcaaggcgaaaaccacccaatcagatttttttattaggaaacaaatggtgaccacagtccagatgtgaaatctatattcactttcattttccttctaca

SEQ ID NO: 5755 - DNA, 599 bp, Glycine max
  unsure (1)..(599): unsure at all n locations
  Clone ID: jC-gmfl02220075a10a1
agaaaataaactgtctctcttgccttttgaganccccntgnnnnnnnnntnntnnnnnnnnnnnnnnncncnnnnnnnnnnnnnnnnnnnnnnnnnnnnnnnnnnnnnnnnnnnnnnnnnnnnnnnnnnnnnnnnnnntntntttnnnnnnnnnnnntntnnnnnnnnntnnnnntnnttnggtggggttttttttttgttttnnttnttttttttttnnttttttttnttgttttttttttttcttgttgttttcagcaacaaaacaaagggtgctgtggaacttccaccaaatgtctcggttccagcagtgttggtatttggagattcgatcatggacactggcaacaacaacaacaacttgataacatcagctcggtgcaacttctcaccatatggccaagattttatgggagggatccctactggccgattttgcaatggaaaggttccatcagacattctagttgaagaattaggcataaaagagtttctacccgcatacttggatccaaatctgcagcttagtgaattagcccaccgtgtgtgctttgcatcgggtggttccggatacgatcctttgacatcacanaccgcga

SEQ ID NO: 5756 - DNA, 488 bp, Glycine max
  Clone ID: jC-gmfl02220075a10d1
aaaagcaaaaaactgaaacttcttattattgatattagaaattaccatagtcatgttcaacattgaagcatgaatatgtacagaacaatggaaccaaacgagaaaaactacataacccaaaagagctgaagcctaaaagcagagtcagcaccatcatattaagttgtgtactcttaaccacttagaaaagggttttaaaaaaaagttgggctatgattaaatcagtcaagtttgttagctccatgtggcccaattagcttcacttccaacacgaggcatcacttggatctttgtctgagagtcaacattgaagttagccccacacataaatccctcgctgtcaatcctaggcattgctttcatcttctttgttggatgttcaatgctcatgagaccatgctcactatgaaacatacacccattcggaaatggtgcaaatgatttagcacagcttgcttttataagctccagattttcagaaataacta

SEQ ID NO: 5757 - DNA, 604 bp, Glycine max
  unsure (1)..(604): unsure at all n locations
  Clone ID: jC-gmfl02220075a11a1
cggcnctaatgcccctctctgttngaannnccnnnnnnnnnnntttnnnnnnnnnnnnncncnnnnnnnnnnnnnnnnnnnnnnnnnnnnnnnnnnnnnnnnnnnnnnnnnnnnnnnnnnnntnttttttnnntnnntnttnnttttttttttttttttgggggggttgttttttttttttttntttttttttttttttttntttttgttttttttacattgaaggatccccggtcaaaagatgcatctcaaaggtatcatgctcatcaatatactaatggcaccgtatgtgatcttacaaataagccacgagagaccgaggtgaggtttgtatgctctgaaccgagagcaatgattagttcaatcacagagatttccacttgcaagtatgcacttacagtgcaatgtccgcagctatgcaagcacccattatttcaagaggagagaccagtatggcataccatcgactgtaatgtgcttccaaaagatcacgtggatgccaaagtgagacgacaaaacgaaaatacggagattgttatagtgaaagacttcgaaaatagtgacttagagtcagaacaatgatgtcaatatacataatgagaat

SEQ ID NO: 5758 - DNA, 464 bp, Glycine max
  Clone ID: jC-gmfl02220075a11d1
gattagccttttttgcaaaagaaatttctgaagtgaatcaaaatggccgaatttaaaaaaattccgaatacatcgattgtcatctctctaaagcgtaaaaacagcctgttggcaaccaagctaccatggatataggtatgcaggcatataactaacaatttctaagccaaggacaagggactgctctttacagcaataattgaaaaagcaaatgaagcctataaaggtagggacattcattgcccatgtcacttggaagcctcttcatcttttgccgccttaggatgtattcctttcaacttaagaaattgttacaccgatcagaccccatattacggaaaaatcactatccacttatatcagcgcggttcaccctcattggacagaaatgcagagtgaactttctcagaccaactgtccagttaatcccagaaggatttgatctgtaggatacccataactct

SEQ ID NO: 5759 - DNA, 535 bp, Glycine max
  unsure (1)..(535): unsure at all n locations
  Clone ID: jC-gmfl02220075a12a1
gaaaaaactgcgctgtccgttgatnccatnnannnntttnnnnnnnnnnccnnnnnnnnnnnnnnnnnnnnnnnnnnnnnnnnnnnnnnnnnnnnnnnttttttttnntttttntttntttttttttttgggggttttttttttttttttttttttttttntnttttttntgaaaaataaggttggctagaaagggccaatggccacccctattggaaaagggcatcgatcgttaaatcttactctgaaaaaagagctcaatttgtatgccaatgttcgaccttgctacagtcttccaggctacaaaactcgatatgataatgtcaatctaattacaattcgagaaaatacggaaggcgagtacagtggacttgaacatcacgttgtgagatgtgttgtaaaaagtctcaaaatcattacacgtcaatcaagtttaacggtagctgagtatgcttttcactatgccaaggctcatgtaagagagagggtttctgccatacacaaagccaatcttatgcacaagactgattgactt

SEQ ID NO: 5760 - DNA, 350 bp, Glycine max
  Clone ID: jC-gmfl02220075a12d1
ggaacaaatgaaacatcatcgggggtttttttttatttagcactatattattgacaaaaaatactaaaacggcctaccaagggttatcaatcaatgtgcattgtgaaagggtgtcctctcaatgccataaaactgcactgggcaacgaatatttgaatccctgcccattccttgtctttggttggaaaatgtcacacaaacatgggtgagtttgcctttaagctgagggaatcccattctttccgattaattggggaaatagatagaaaattgactgaaattcaaaaatcataagcaagaatttcttgctgactccaaccaaaatttaaagatgatcaatgattgctttt

SEQ ID NO: 5761 - DNA, 341 bp, Glycine max
  Clone ID: jC-gmfl02220075b01d1
gggggggcaatgcttccattaggggcaatgaattatgctgatcaaaaatgtccaagttcatttttaagtttcaagatcccccataatctaaaaaggggtttttgggtttttcttttcttttttatggaaaaatttttgtttaaaaatagagatgaatttttgaccatttgctatggggggggtctaatttccacagggtcaggtttgacaaatgaaaattccccctccctcctactggggggttctcccccactatcttggctatgttccgcttgggggggggcgccatgatcaacttttacaatgaaacttgttgtttgcgaccccaacggaaacaactt

SEQ ID NO: 5762 - DNA, 529 bp, Glycine max
  Clone ID: jC-gmfl02220075b02d1
cacttcttaactaaattgtatttcatggtaacctcaaatttcgttcatggtgattaatgtacagagtacagaaaaacatagataacgctggtaagtaatgaacatgccaagaaatttatggcgattatggaacaaatttttgaaatggaaaccatccaggacggttgatacaaaaattggttgagcatctaacaatctgacaatgtttcaattaaggcaagctccaacacatgcaagcctcacattattgaaggcaaaaagtatatcacacttcagcaggaatccaggtcacggcagggaggaggcttgggctcacttaacaaagtagtgttccctccttcaggtccactcttaattcggcggggattttgggtgccgtgcggtggcttctcaccctttctcagcttttctactatctcaactactttctctggggttacatcttcaaagtaattataagtatatccctctgatccatttgaataatcagccactgtaatcataggagcattcacacagcatcccatgc

SEQ ID NO: 5763 - DNA, 482 bp, Glycine max
  Clone ID: jC-gmfl02220075b03d1
cgaataaatgttcacaacttcacataaagctccaaaagtaccggaacaaggcaagttccacgaaaagaactaccatacacagagcacgaggaaaaaaaaaacaacacagacaaagtaacataacagtgcaaacttctaatcaataatcttctccttcatcaccatcttcttcagttgcctctgcaccgacttcctcataatctttctccagggcagcaagatcttcacgagcctcagagaactctccctcttccataccctcaccaacataccaatgaacaaaagccctcttggcatacatgaggtcaaatttgtggtcgatgcgagagaagacctcaacaccactggtggaattggagatcatgcacacagccctctgaaccttggcaagatcaccgccaggaacaacagttggaggctggtaattgattccacacttgaaaccagtggggcaccagtcaacaaattgaatagtgcgcttg

SEQ ID NO: 5764 - DNA, 307 bp, Glycine max
  unsure (1)..(307): unsure at all n locations
  Clone ID: jC-gmfl02220075b04d1
tgtcgcgtgcgtcgattcngtggggcgttttgtattttattgccctggggagctagccgagctagtctcccgccgcccttgtgtgatccctatgttttgggtttttcttccctttacatctattagtgggctctgtgtctcttgtttttagggggggggccccctccaaaaaaaaaaaaataatttcttcgaggagggctcccccttttatctctaccaaaaagggggtgagccccccctttccatcccataatcccctttttccggggggggaaaacctttgggccaacataacctcaatcttttt

SEQ ID NO: 5765 - DNA, 469 bp, Glycine max
  Clone ID: jC-gmfl02220075b05d1
atcagaatcattttggaccaactttcctaattgctttaaagcatattatttctgcaaacttgtacatattcttattaagacttgaattttcataagaacatcaatgcctctcatcccttttggatgctattcctttaaaaggaaaatcatgtagttacattacatctaacaaataatgaatcaaatttatttttttcaatttaagctttcagctgtctatcttagtagtccttcagtgtaaggtatatctgtgtcaggaagccaagtatttcccaatgtaaaattaaggactgtgaagttccaagcttgagtagcattcaacagagagtaaccaggccatgttactctattgctagtgttagaaccaggtccatagttgttgaattcaccataaaagagagtgtctaatccaactgttccattccactctagccacccagcaggttgaattacatttccatgtatgact

SEQ ID NO: 5766 - DNA, 298 bp, Glycine max
  Clone ID: jC-gmfl02220075b06d1
gttcttggaacatgagctcagattttctgacaggcgaggaaagggaaatctacatgcaatgcctcgcccacctggatagttcgccatccttcagtgctcacttcctttaggtcactgatgcacattgaggctcctttagcaatctcaaaagatggcccggggctcaagccaagcaaatgtactaaatccttgctcggccacggggagggaactacatgagcctccatcttttggattgatcatgaacaagttcttttcacaatcatatctttcaagtgtatggtatagaatgggttcc

SEQ ID NO: 5767 - DNA, 647 bp, Glycine max
  unsure (1)..(647): unsure at all n locations
  Clone ID: jC-gmfl02220075b07a1
gtnaacctgcctcatctctgaaaccccatnnnnnnnntnttnngnnnannnnnncccnnnnnnnnnnnnnnnnnntnnnnnntnncnnnnnnntnnnnnnnnnnnnnnnnnnnnttttttttttcnntttnntnnnnntttttttctttttntttgtgggcngtttttttttttctttnttttctcttctcttcccccttcttcttttttcctttccccctagtgctgatcagctaatggactttgatgctgccaccctcatttcgaacatctgcatgatgccagaactatatgatattagtgctcgccgtttgcaatggatgctattgccagacgatgctttgaaattgacctcagtcgtgtgttcaaacgttcattctctcactttggaactgtcagatgagcttcttccgctatttctctcatggtttgtaaatgtggagaatataccgctagaacggagtaaatgcacagtcattcccgaatgcatcaaaaaatgccgctttttatctatccttattttgagtggttgagatcgtcttcaagaaattagagggattcctccagacttggaaagattctccgcaacacaatccccagacttgacttcctcaaacataaacatgttgctgaatcacgaactgcat

SEQ ID NO: 5768 - DNA, 107 bp, Glycine max
  unsure (1)..(107): unsure at all n locations
  Clone ID: jC-gmfl02220075b07d1
cggcttctaattttgtcttngtaggcnccattttaattttttgacgagctgactaaccgagctgccggccgccgccctttttttttttaatcgttttcaatttttga

SEQ ID NO: 5769 - DNA, 625 bp, Glycine max
  unsure (1)..(625): unsure at all n locations
  Clone ID: jC-gmfl02220075b08a1
gananccgcgctgtgcttcgataccaatattanntttatgcacacntcccntannntnnnaatattnnttnagtttttatttctttccaatttattaatttttttnttataanaaactttctaacccaatgagggagataaaagtgcagaagctcgccctcaatatctctgttggcgagagtggagatcgtctcaccagagcctccaaggtgttggaacaacttagtggccaaaccccagtgttttccaaagcaaggtacactgttcgttcctttgggattagaagaaatgagaagattgcatgctatgtcactgtcagaggtgacaaggcaatgcaacttttggagagtggtttgaaggtgaaggaatatgaacttctcagaaggaacttcagtgatactggttgcttcggctttggtattcaggagcatattgatttgggaatcaagtatgatccttcaactggtatttatggaatggatttctttgttgttctggagcgacctggctatcgtgttggacgtcgccgaagatgcaagtcccgtgttggaattcagcaccgagtcacaaaggaggatgctatgaagtggttccaggtgaaggacgagggagtgatccttaacaa

SEQ ID NO: 5770 - DNA, 483 bp, Glycine max
  Clone ID: jC-gmfl02220075b08d1
ataacagacttttatcttttaacaacaggtcgggaccccagggtacatgtatttatttattgctacaacaggaaaccccttccctgagcatgcacaaggaagcttctatactctttttgcataaccccagctgccctgggcctcaaatggtgggtatattaaggatcaagtttcagcctccccatttcagcgtattcttttaagacctttttctttacccttggatgcaggcttgtccgaacctgtttttattggcctctaccgaacatttttttgtaaggttaaaaccctgttggacgagttttttagctttcctggtccaagacccatggatagccattccctccaccttgatggtattttttgacaaatagcatatatttctgcaccccttacaattataactgcttttcttgcttttcaggtcttcatctttgtaccttgtgtttttgtccgtttacctttatgctgactattttaata

SEQ ID NO: 5771 - DNA, 543 bp, Glycine max
  unsure (1)..(543): unsure at all n locations
  Clone ID: jC-gmfl02220075b09a1
cgcgtcgtctcctgaanccaataaaanatttaanagaaaaancncaaaantnnanaaaattattttatattattctatccaatttctattttttttattcattttacacatctttattaacccgggggacttttttcttaaataaaccaaaaacccttgtgctattctcattctctggaattattatggcacataagagattcatcattgaggtcgagagagcgaatgaggccactgatggaaggccttccagaggacctgtctatcgtagcctattcgccaaggatggattccctgctcccattcaaggtctagaatgttgctgggacctttttcgattgtctgttgagaaatatccatcaaatccaatgcttggtcgacaggaaattgaggatgggaagccaggcaagtacaagtggctaacatacaaagaagtatatgaccaggtgatgaacgatgggaattctatccgcagctgtggttatggaaaaggtgtaaaaagtggtatttatggcgccaattctgcagaatggattatgagca

SEQ ID NO: 5772 - DNA, 475 bp, Glycine max
  Clone ID: jC-gmfl02220075b09d1
atggagggaaaatcggtaaatttaattatatcataaccctccaattgacaattatacaggctcttgcaccactttcagctcaaggcttattgatgatccatctatatacttttttatagattaaaaagactgaacatgaaccgtttagtatttgaataaagataatgcttcaatataaagaggattgcctcttaattatgttgcaatgtccagttaattggtccattcctaaagagactgtatgctatattgaaataaaatcttcaattcttgtgtagtatactagtagtaaagggccatttatttagtaattttacttataagtgaattcactatagctttacaattttcttgcatgcctttgatagaaagattttatccttctcataccctctccaagagcagatggatcagcagcgaaagtaatacgaagccaatcttttaggcctactgcagttcctggaagaatgatcac

SEQ ID NO: 5773 - DNA, 615 bp, Glycine max
  unsure (1)..(615): unsure at all n locations
  Clone ID: jC-gmfl02220075b10a1
gaanaaactgcatcatactttngatgcccnttgnnnnnttnttnnnnnnananncnccnnnnnnnnnnnnnnnnnnnnntnnnnnnnnnnnnnntnnnnnnnnnntttttttttttnntnnttttntnnntttttttttggtggtttttttttttttttnttcctttttttcttttttttttttttttttttttatgatgacacataaacccggcgaccgagaaagaagaaaccgacttcaaggttcccgaaacgattacgctttgcgttaacaactgcggcgtcaccggaaaccctgctacgaataacatgtgtcagaagtgcttcaccgccttcaccacctctaccgccaccacgtccggcgccggaggtgccggaatagcttctccggctaccagatccggcatctccgcgcgtccactgaagagatcttttcccgaggagccctcgccgccggcggatcctccgtcttcagaccagacgaccccgtcggaggcgaagcgcgtggtgaaccgctgctccggctgcaggaggaaggtcggactcaccggatttcggtgccgatgcggcgagctcttctgcgccgagcaccggtactccgaccgccacgactgc

SEQ ID NO: 5774 - DNA, 351 bp, Glycine max
  Clone ID: jC-gmfl02220075b10d1
aataataacaatctcattatttccatggcacattaacatcaggtcaagaaagtaaaaagtgtgtatgtagtaatttaatatggtacacagacctacacgacaagtttcgtgagctgcagaattagaaaataagcaatacagacaatgaacaaggaaacttagaaatatatgcaaaactagagattttctttgtgtggttgcatgggaatatcaggcatcaagttgaagcctccccattcaagcgtaatctcttgggacctttttcttcaccttggatgcaggctgttccgatcctgttttcattggcctctaccgaacatcttttgtaaggtttaaaccctgttcgacgag

SEQ ID NO: 5775 - DNA, 501 bp, Glycine max
  unsure (1)..(501): unsure at all n locations
  Clone ID: jC-gmfl02220075b11a1
ggggngactccattatctctgaancccaataaaanatttnnggggaaatacccaanaagaacttanttcanntatgtttcattttatcatttcacatactcctctttttacctccccatttcaacacatctaactcgggggtttttttaaattcataaaccatattatatcaataccacccctccttctctacatgatgacacataaacccccctgtcactttgaatcgcttgccacaccccctttgttgatttagaaatgctagatctattattcgcataacacgtccgatccaaaacctggttacacaataggaaaaaaaaccaccgacttcgttcccataaaccctagtgctatttccctcccaatttcttaacactgattgtaatttgcaaattgtacagctagaattttgtttctcttcttcgtttaattatctgtactttttttcgcatatcctttattttacaattctctttgctggctttgcaaagtctgtac

SEQ ID NO: 5776 - DNA, 475 bp, Glycine max
  Clone ID: jC-gmfl02220075b11d1
aacaaagccttattccccttcttaacattatcacaactctgttgctagaaaaaagagagcaattcgtttgtggactaatgggtatcccacaagcctcacaataatacagatatagtgaattcccacacatagatgtaaattccctttctaaagggaaaaaaaatagggggaatcaccaacttctatgtgatctactatctattattatttttatatactatgatttggctcaattcttctggatcctactcctcaaaaaagttgagctctaccctccaaagatgctacactatttacagaagcagatttggcatctcctttgcagttcatagaaccaagaactcgcttattatcacgataatgaccaaagttgtttttgaccagagagacgatttacaagtctgtctagagcttccttcatcaccagtgttgacaaacttcccttgcttctgtgacgctcatccatattctttga

SEQ ID NO: 5777 - DNA, 650 bp, Glycine max
  unsure (1)..(650): unsure at all n locations
  Clone ID: jC-gmfl02220075b12a1
cctaaaaagacaaatatatatagtaataatataaataagcgagccaaaaaccaacaaaaaatatataatacaaaaaactatcaataaaatacctacaaaattntaatagnnnnntcgcnggaaggtaagantnccaaaannnnttnnnnnnnnnnccnnnnnnnnnnnnnaaaaaaaanaanaaaaaaaaaaaanaaanaaaaattattaaaaaaaaaaaaattaaaaaaaantataaggggtaaaaaaataccggcggggatacacctccgagccggagccggagcgcaaggtggccgatataggtgccggcggcgggatcgggcaacccctctcccttctcatgaagctcaaccccctcgtgtccagcctctccctctacgatatagccggaactaccggtgtcgccgccgatgtcagccacatcaacaccggatctgaggtagtggggtaccaaggtgacgaagagctcggaaaagctttggagggtgcaaatgatgatataattcctgctggtgtgcccagaaagcctggaatgactcgtgatgatctttttaacatcaatgctggcatagataagacactgtgtactgctattgctaagtactgccctcatgcccttgttaacatgataagcaatcctgtgaact

SEQ ID NO: 5778 - DNA, 511 bp, Glycine max
  Clone ID: jC-gmfl02220075b12d1
gaagggtacaacaccctgcaattacattacgtgaaaccatacacagttaaaagggaccattattaatggaatggccaaaacctaaacccggttataagatcgttgaatctctttagcaacaaaaagctctcagacttaaattattaaatcatggcgtatacctactctaaataaaacaacaaagtcgccacaccactgccggcaacaatacaacaatggttctgagattgcaaaatttgatttggttcttgaaggaataacattaacattagcctaccagacacgtatgtgataacatgttcaattactggttggcaaatttgattcccttctcaattgatgatttgagttcaggcttaaggctttcgaggccttgttgctcaaaatctgagagaggtcctaagcccaaaacttcctccactccattcttcccaagcctcaccttggaagcaaagtagggaagttcagtaacagtggattgcacgaatgagcactccacaacatctgggac

SEQ ID NO: 5779 - DNA, 395 bp, Glycine max
  Clone ID: jC-gmfl02220075c01a1
gaggagcagttatttttcaaagagacctctactgtctccttcttcctcctttcaaatttagattttagtcccactaatttgtcacagtctgcattttttaaaccactctcatctaaattgaggaggttcagttactttctctaccatgatcttccttcacttcttttctcattaccactactctttatatccataaccaggagctttttcatcaagtttaataactcgtaccttttattttttctccctttggcttgcaaaacctgcttctactctaaagcttatatctttacctccaatgaattcagtatgagccatcaagttatagatatgtttgacatatttttcggtttggccaaagcttcctaatgtaagatggcgatcaaacgagcccg

SEQ ID NO: 5780 - DNA, 414 bp, Glycine max
  Clone ID: jC-gmfl02220075c01d1
aaaacaaaaaaaaatgagaaatgataattgatcctcaataaattgaatacaactctgaattgaaaatcatgatgcccttcctatgttactattgtaaagaaaaacactattttggggcaataaataaagtcacaaaaaacaggacaaatatttcaattgatatgtctccaggggaatttggcaaacctactatcttaaagaccttcgggaaatcatttgacaaaaactcctgaacatgcaatacttaagaagtaaacatcttggtaagcatcagccagacaccaactttaaaaaaatgcagatggaattgagaagtatgagaggaactctgaggtactgagttgcataaatgaggcctataagctggcctttgaacgacttagtccttccacctgagaaatcttggaagcccca

SEQ ID NO: 5781 - DNA, 156 bp, Glycine max
  Clone ID: jC-gmfl02220075c02a1
gaccacctatcattgaggacacccctatattttgaatgagggctatgatgcactctctctgctgcagcatttttccatcaacaacctgagggatcccttcattgaacgctagtatggtggccactctgagcacattgaggttggtgtgatggactg

SEQ ID NO: 5782 - DNA, 394 bp, Glycine max
  Clone ID: jC-gmfl02220075c02d1
cgttaaaggttgtattcatattttcaactcaaaattttctacatgaataaggttatcaaacatctcttaacaaaattgctaaagtagcagaaattataaggagtaacatcggcaggcatcagctgatcaacctgagataagaaacactctagtaaaagaacaaggtccttgattttcaaggcactccttttttctttttacggggtaatattgttttgaaggtttctactaacagaaattagactctccggaatttaaacaagtattcatcgcaggcaaaaacaaaaggttaaagtttatccccttaagttttatggttcctttaacttctctttcccgtccttgatgggagatcaaggctgagctttccagattgatgaaatgtcagccacag

SEQ ID NO: 5783 - DNA, 412 bp, Glycine max
  Clone ID: jC-gmfl02220075c03d1
caaaccaaaaccataaattttgcattaaatttcgaagaaattaacatgatatccatctcaatgcatattaatgaacatatcatgtgagagccttaaatgacacaaactaacagaaatcttaaatataaaatggtcttaactcaataaattggcacaccatactaattaactaattaagagtactactacttaatctgtatttcatcatggtctaggcttcattcttccttcgttggccatcttgaagagctgggcttgtgcttctgctgccttgttggagttgagtgaggccacaaacctgtccctgacttggttggttgtgtaagggaacttgttgttcaccatggagttgaggaaggaagctgtgccttctctgtagagtgctcctagcccatcagttcttgtgttggaa

SEQ ID NO: 5784 - DNA, 366 bp, Glycine max
  unsure (1)..(366): unsure at all n locations
  Clone ID: jC-gmfl02220075c04a1
tcacaattagctttcgtttagttgctgctgttgtttctgttccttctctagttccttaaactctttgtttccaacatccttagaaaaggtaaaaattcaaaaaccagaacataaaccggcggctgaggtttcccaagaatatgctgcggcgttgggctctcgcaccggtagggagccgcaacgctatagaaatagtcgtcgccaaggagagggatgcataccgntcagacttacgataggagtgtagtcttccttggatgtcttctgtgaagactcggaagacctgggtattagtgcccagaaaggtaaagggatgctctttccttagggaggctctgtatttgacgattcaaaataggaagccgc

SEQ ID NO: 5785 - DNA, 429 bp, Glycine max
  Clone ID: jC-gmfl02220075c04d1
tttcgtccttttttttttttgttttttcgtttttttctctccctaaaaagcaaaaagggcttagtgtttttatataaaaagcgaaatgctaacaccgccactacaacaaaattttaattctttttttacctcaattccttacccccccaattgctaagttttaataaactgcacctagacaataccattcaaagaagcctcagatgtgttcatactcgttaataataataccctctaaaaaattaacccaagcattggtctaaaaagctacaactacacccacattattcattaataacgaaggggtctccacctacttattaaatatcccttgttaaaaggggctggttttgcggcccacaaagggatgtgcagaaaccttttcccttcttgggggctaggtggcatcccatagaaccattctggcag

SEQ ID NO: 5786 - DNA, 346 bp, Glycine max
  unsure (1)..(346): unsure at all n locations
  Clone ID: jC-gmfl02220075c05a1
tctcgtcgaacagggtttaaaccttacaaatgaagttcggnagagagccaatagaaaacaggatcggaactgcctgcatccaaagagaagaaaaaggtcccaagagattacgcttgaaaggggaggcttcaactagatgcctgatattcccatgcaaccacacaatgaaaatctgtagctgtgcatattatttctaagttgtccttaggtcatgagactgtattgcttattttctaattctgcatgtcacgaaactagaggaggaagtctgaggaccatattaaattactacatacacactttgtactttcttgacctgatgttaaagagccatggaaagtaatga

SEQ ID NO: 5787 - DNA, 379 bp, Glycine max
  Clone ID: jC-gmfl02220075c05d1
aagattaaatcatggggaaatttttcatttttttttttgagaaaacccaaaaaaaagggaaacgaccatagttgggtcggtgaacacaagcgttattcagatagattcttcggcctctttttttaggaacgataatctgtgtattgctctcggtgtcaaaaaaaaaccaaagaccctctctgtgtctctctcagggctgttatctgctacttttttttttcttctctcccccatagggtctgaaaagaaaaaatgcgaaacccgtgacctgaacccgatcgcgcgaaaggcccaccgtgatcgacgtctttttgagattccgcccacacggggtttttcctgggggggtgagccttatcagactttgacgaggttcggg

SEQ ID NO: 5788 - DNA, 568 bp, Glycine max
  unsure (1)..(568): unsure at all n locations
  Clone ID: jC-gmfl02220075c06a1
gtttaaaccgctgtgcttgaaccnttnnnnttntnngnannncccnnnnnnnnnnnnnnnnnnnnnnnnnnnnnnnnnnnnnnnnnnnnncnnttttttttntnnttntnntttttntttntttttggggggtttttttttttttttttttttntnttttttttttntatntccttgttcaacccttttggaccaagggggagaagcattgcatgactcaaattacccaaaagtttaatttgtgtcagctggaatggatcttctgcacgattgccaattggcatatgcaaaaggtattcaggattctggacaacaggccaagcttctatttctcaaggaatccactataggctgttacttcctaccaaacaatgaccatttctattgcctcatgacagaaatcaacaactttgtcaattctgattctgactgttaatatactattactactaaaacgactacgactgaaactactacttaaccttaccttaccttaccttacctacaggaggcatacataactaaagcttgacatttaacttgggttatctatttctatacccctcac

SEQ ID NO: 5789 - DNA, 301 bp, Glycine max
  Clone ID: jC-gmfl02220075c06d1
ggtaaacaactttaatttttcatttcaagattatttttaggggaatgggagcacatgacttgataaacaaaaagcaaattttctaaataaaatatgcgtttctaaccccacatcggcatgagaagcagagacccaccttttctctcgtgaggctatgttttctagaaacacaagtctccactctaatatctccatctacgcccaagacctaagaatattcatgattcctttatcaccccggccttatatgatgtgatttacacctcaccaattattattctatcccataaactggggacac

SEQ ID NO: 5790 - DNA, 693 bp, Glycine max
  unsure (1)..(693): unsure at all n locations
  Clone ID: jC-gmfl02220075c07a1
tggggnnaactgcctctcacttttgaaanccnnnnnnnnnnnntttntnnnnnnnnnnnnnncnccnnnnnnnnnnnnnnnnnnnnnnnnnnnnnnnnnnnnnnncnnnnnnnnnnnnnnnnnnnnntttttttnntttnnntttnntntnntnntnttntntttttggggtgttttttttttttttttttttttttttttttttttttttttttcttttttgtttgcaaccctttttgaccaagggggagaagcattgcaggactcaaattccccaaaagtttaatttgtgtggctggtttggatcttctgcaggattggcaattggcatatgcaaaaggtcttcaggattctggacaacaggtcaagcttctttttctcaaggaagccactattggcttttacttcctaccaaacaatgaccatttctattgcctcatgacagaaatcaacaactttgtcaattctgattctgactgttaatatactattagtactaaaacgactacgactgcaactactacttaaccttaccttaccttaccttacctacaggaggcatacataactaaagcttgacattttacttgggttatcttttttttttcccctcacttttgnatcttgtcttttctttngaataaagtgtgtaattataagattgtgtaccattacttgttattgtcataacat

SEQ ID NO: 5791 - DNA, 315 bp, Glycine max
  Clone ID: jC-gmfl02220075c07d1
aaaaacttgaattatcgtgtatacttaaagagaataacttgccaataaaacatacacatatgatgactaaagacaagatatgtcatttaacaagacagaataattcctacaggtaaagtgcataacaattgagtataccatctaataatgaaaataacgcaaataacataatgcttaaagcaacgttcatatcagaagggaaaaatagtttgaatcccatccaacaaaaatcatgcgattaaaatccaattaaaaaagcataaagtaaaataagtttttaaaacaggtatctggaggaaagcaactacatttagt

SEQ ID NO: 5792 - DNA, 678 bp, Glycine max
  unsure (1)..(678): unsure at all n locations
  Clone ID: jC-gmfl02220075c08a1
actaacacaataaaagaataataaaaaacgatactatgtaagagaaaagaatagaaagacataacaaaacagaaaaactgagagaagatacaaaaatacaaaaagaaaagctcttaaataaaaaaannaagggcgaatggtagatnncanaaannanntttnnnggacncnnnccnnannnnnnngaaanannnnnnagagaaaaagangggaaaaaaataggatttagaatggggaaaagaaaatggtaaataggtaggaagtggtgttgtttttgtgttagtgctatgggaaggcaaccctgctgtgacaaacttggggtgaagaagggtccatggactgctgaggaagacaagaagctcatcaacttcattctcaccaatggacaatgctgttggcgcgccgtgccaaagctcgctggcctcaagcgctgtggcaagagttgtcgccttcgtaggacgaattatcttcgtccagacttgaagagagggctactcacagaggcagaggagcaacttgttattgatctacatgcccgtcttggcaacaggtggaccaagattgctgccaggttacccggaagaacagacaatgagattaaaaatcattggaacacccatatcaagaaaaaactccttaagataggtattgatcccgtactcatgagcctatcaaaaa

SEQ ID NO: 5793 - DNA, 332 bp, Glycine max
  Clone ID: jC-gmfl02220075c08d1
aaaggggggggccccccccaaaaaaaaaagaataatcccttcaaaaagggatcccactttaatcctcagcaaaaagggggtaacccccccttttccctaccatgatccccattctccgggggggaaaaccccttggccaaataaaagctaaatcttttttccctcaataaaaaaaacccgaattaatcccccgtaaattttggaaaaaaaatgggctgaatgaaacccaaagtattgttcccccggttttcaattaaaagggtcccccctcatttgcattccggctaggggggggaagacccggaaagcccaccccacccccccccaaaacc

SEQ ID NO: 5794 - DNA, 681 bp, Glycine max
  unsure (1)..(681): unsure at all n locations
  Clone ID: jC-gmfl02220075c09a1
acagagacaaaaatagataacaataaaaattacacgataaaatactaaaccaaagagtaagataggaagaagaacatatctctcatcatacataaaataaaaacnggggnnccgggcgaaagtcagaanccaaanananntttnnggncncnncccnnnnnnnnnnnnnnnnnnnnnnnnnnnnnnnnannnnnnnnnntttttnntnnntaaaaacaaacaatacttattcggggaagaccaaagttggtggtgccccaacattacatagcggagcaaggcatggaaagcctctcatttcaattgtatcttcacttggtaaacaagcattgggcttggagaaagaaccccttccagagaagcatgatgtcgacctaaggccatcaaccgtaaaagaaaataaggaccaaagctgctcaaaagtatttaccattctccaagaggcaccctgttcatctgtatcttccgccaacaagaattcaacatcaatattagtgccgctgagaaattcatgtgccctaaggaagtttataccttcggtgaaagatgtgataactcaagatgaaaccaacgactcttttgttactgatgatcttgaaaatcagaagttggagatagatgatggcaagcacactcaaaagtctaatggcacttgtaaagtctctaagtcggagaattctg

SEQ ID NO: 5795 - DNA, 562 bp, Glycine max
  Clone ID: jC-gmfl02220075c09d1
catgctgacattttttaattccttattcaatgtaataatatacgagtaacctcagctctatcaacaatcaatgacatttttgtctttatttgttttcaatcaatggaaacaattttcatattttcattttacttctccaaaataacaagtacctaggaaagcaagacatgaaatcattcatattcatatttctgataaatcactcaattatttgctactgcacaccagttacaagaaacaattatctctcggtatcattctgcagatcagcaacaccattcaacttccgtcgggtaaattttgtcctgttgaaaaaatccaccaatcaaattgcagctataagtttggttgcttgaatatctaaactccataatttactaagacagtaaccaagcaccccagttttgattactcaaactcttcaagtggtttggcaaatagtaacagtctgaacaatgctcagggaatattctttctctgagaggctcgcacgcttctggtgaaaccaagtcagagtatccttttacgtaagagcagttccatggcaattttttgctcacat

SEQ ID NO: 5796 - DNA, 590 bp, Glycine max
  unsure (1)..(590): unsure at all n locations
  Clone ID: jC-gmfl02220075c10a1
aggaaaaactgcctgcatctctgtancccacttnnnnttntnnnngnnnnnncnncnnnnnnnnnnnnnnntnnnnnnnnnnnnnnnnnnnnnnnnnnnnntnnnnntttttttntttttnntttttnttttnnttttttttttggggggtttttttttntctttttttncccttgtgttttttctttttgtttttttagttttgtattttgtttaggtgatcctttgacaacccacacatttcctacacactgagaccacaggccttttggatgcttcacaccgtgacttgagaagagccagggctgcagcactgaacattgtcccaaccagcactggagctgccaaggctgtgtctctagtgttgccacagctgaagggcaagcttaatggaatagcgctccgtgtgcctacacccaatgtttcagttgttgaccttgttgtgaatgttcagaagaagggtcttactgctgaagatgtcaatgcagcattcagacaggcatctgatggtccacttgaaagtgtgttggacgtgtgtgatgtttcacttgtgtctatcgacttccgctgctttgatgtttcctctacta

SEQ ID NO: 5797 - DNA, 385 bp, Glycine max
  Clone ID: jC-gmfl02220075c10d1
ccatccgaatccattttatttatatataaaaattatatccaaaggaaataaaaggattttaaaagatcctatttttaaaaatttgaaggggaaattataaagtttttaaaggattaaccaatttttttctccccggcccgggagaaaaaagagtcccatctgttcttgaaaagcttccttaaaaaggacttttgtttccccagggaatgttttggtaaaaaaaataatttttttgaatggggggttattcgggtttaagtaagcccgtacctcaacaagaaatttccttacctggccaatttttaaggaatcaagaaaccccttcgttccagtaaaaaaagttattatctggtcttccccggaaaaaggagctgattgggattgt

SEQ ID NO: 5798 - DNA, 599 bp, Glycine max
  unsure (1)..(599): unsure at all n locations
  Clone ID: jC-gmfl02220075c11a1
agaaaacctaccttatcactgaaaacccttnnnnnnttnactgtgaanccccccnnnnttntnntnttctcttccctcttctctctccttcttctccccctttttttantccttctacttccttccttctccttctcccttgtgggtctatatctttatccatcattatttctccaccactatctctcctaatcaaatcaactcaatttaccacctccaaacactccaattcattccatttataccccccctccccgaatccataattcacatgcaaccatttatattgttctacacaatacagaatatgacgagtcctctgcagtaattgctcaaaatccaccatagagtgcacatccccatatagaggattttaaataagaccatgtacctgtggatgaaattccaaggttcgagcccaagtattcagatggttctccacagcattataatgctcgaaagaaagagattccaagaagaagaatgccatttataaattcctgtgctgctaacatgcctaatggagatgaaaaattgttctttccacatgaaaaaccaattgagtactctggctcaaagggccaaaatcctaagaacta

SEQ ID NO: 5799 - DNA, 506 bp, Glycine max
  Clone ID: jC-gmfl02220075c11d1
aaaatccaaaagatttgtttaaacaaacataattgttgaaaatattagtccaatacaaccatctaaatgtatttagcactttatttaaatcattacatcattagaagggggtcactatcatccatattattcatctgaagtccatcaacgttggttacagtgggcttctgcactcgtcttgggctataagagaacgcgatcttgtttgtcccagggcagcagaccctcgtgggacgaatggcgccattcaaatgacaatatcagtctgaactgggtaccaactatcacccaaacgattaatgccttgcccttgcaggcgcagcaaaccatgctggttataatggacctccttcacattaagaaacactccaggttgggaatccattatgtggatattgcagtgatatgccgcagatgccggaattagctcccttagctcaaacatttcggctggagccataaggagtggctgcttattagctgaaccaaccaatggctctgggata

SEQ ID NO: 5800 - DNA, 582 bp, Glycine max
  unsure (1)..(582): unsure at all n locations
  Clone ID: jC-gmfl02220075c12a1
accccctccacctcctcccccccttctcatcttcccttacacccctcccccacttctcccttccccctccacctccccaaaaannnccgccccctccaaccannnnnttnnnnnnnnnnnnnnnnnnnnnnnnnnnnnnnnnnnnnnnnnnnnnnnttttntttttttttttttttaatttatattggggactttctatgaggaaaaagatgtcaagagctcaagatggaatactgaagtacatgctgaaaatgatggaggtttgcaaggcacaagggtttgtttatgggataattcctgagaaggggaagccagtgactggagcatcagacaatcttcgtgaatggtggaaggacaaggtcaggttcgatcgaaatggtcctgctgccatagtgaagtatcaagctgataatgcaatccctggaaagaatgatggatgcaattccattggtccaactccacacaccttgcaagagttacaggatacaaccttgggttctctcttgtcagcacttatgcagcactgtgatccccctcagaggagattcccattagagaagggtgttcctccaccatggtggc

SEQ ID NO: 5801 - DNA, 506 bp, Glycine max
  Clone ID: jC-gmfl02220075c12d1
ataagagaataaaaatcttttatttatgtcacagtcgtacatatatgatagtaagtaacaacatagggctaacacaaaaagacacacattaaaagggttacattatgggaacacccatgatttattaacccataatatagtaccaccagaccagacctgccaaagcataaaaatatctaaagacctaaacgattacatgggaagaaaaatgcattaactgccttttgagtcaagggactttcacatgtccccttttaatgacacaataaaagcccttgatacacgagtttcccctcttgtcattttcactggtaccaaattgaaacctcttgctgtttgtgaagaggatccattcctactcctccttgtatatcctccttgaaatcaaaggatgacaaatcacaaggggaattaaacatcaaatggatattattattgttgctatggttggtataaaaggggtatgagtgttcatgttcatggtggccttgaaccggtcaaattga

SEQ ID NO: 5802 - DNA, 394 bp, Glycine max
  Clone ID: jC-gmfl02220075d01d1
cgttaaaggttgtattcatattttcaactcaaaattttctacgtgaatagggttatcaaacatctcttaacaaaattgctaaagtagcagaaattataaggagcaacatcggcaggcatcagctgatcaacctgagataagaaacactctagtaaaagaacaaggtccttgattttcaaggcactccttttttctttttacggggtaatattgcttcgaaggtttctactaacagaaattagactctccggaatttaaacaagtattcatcgcaggcaaaaacaaaaggttaaagtttatccccttaagctttatggttcctttaacttctgtttcccgtccttgatgggagatcacggctgagctttccagattgatgaaaggtcagccacag

SEQ ID NO: 5803 - DNA, 396 bp, Glycine max
  Clone ID: jC-gmfl02220075d02a1
catgcacacaaagtaaaggacaaaaaaccatgcaactcatcatctcatgatcctgaagtgagaaagggaccatggaccatggaagaagacttgatcttgataaactatattgcaaatcacggagaaggagttaggaactccttagccaaagcttctggtctcaaacgaacgggaaagagttgtcgactccgttggctaaactaccttcgtcctgatgttagaagaggaaacattacacccgaggaacagcttttgatcatagaacttcatgcaaagaggggcaataggaggtccaaaattgcaaagcatcttccaggaagaatctgccatgagattaagaacttctggagaacaaggatccaaaagcacattaagcaagctgagacttcacaacaa

SEQ ID NO: 5804 - DNA, 347 bp, Glycine max
  Clone ID: jC-gmfl02220075d02d1
gagagcaagaaacaagcttacttcacaatattatacaacttattagttaagcaaaaattactcatgctctcgtagaggtatttccagatcatgacagagacaacgcaatccggaagcaagacttaatagaagtactactaagtaaaaaataaaataaaagcccttcatagttaacatatcctttaactttgtgttttcttgaatctaaagcacaataaaaacattaaacacccatagtggatactcaaaagtatagtgaactctttactttgccaatgatccaagctcatggctcgaagttctcatgttcatcttcaaactcctgctggttctggttcccgctgtag

SEQ ID NO: 5805 - DNA, 417 bp, Glycine max
  Clone ID: jC-gmfl02220075d03d1
ggcaagacattaattaataaaaattataactcatcagtagcaaaaacaggtcaaaacaaaattacgatgccaatttgggaaggactaacaggataatttgcactaatcgatgtcctggggctcaaaacatcaccttaaatgggtcccgccacacataaaagcaactaaagccctataaaaatttggaaaacactaaaatcaagcagccccctttcccttttttttttggaggtttttcatgtaaaactccaactccttaccttccagaatgtggccatcagctctgccacattgaccaggtcttgaggaaatgcaagcaagcaaacgcccaccaccaaactggtcctcaatgggagcatcaagctttcgatctttctggcgcttctccaattttctctgacatgggtactctttttg

SEQ ID NO: 5806 - DNA, 410 bp, Glycine max
  Clone ID: jC-gmfl02220075d04d1
aaccctcaagataccatcaatgtgactctccatttatagcaggatttctctacttatcaatcaatgaactatactattaatatctataaagaatgaagaccgagaggtatgtttcaagtgttggtgtggaagttgttctgccaccaatagatagaaaagccccattactccggtgtgctcacggctgctgctgtaattagactctagagttaaagtttcaccatcaattatatttacagaaccaggtcgaggataacatgtgctcattcctacaatgtagtctgcttcatttcctgcttcttttccctttccataacttggtatcgaagaacatataactcttccatcctgtccatatagagttgatccagttccacctgaatgttgatgagcaacaccatagatgacat

SEQ ID NO: 5807 - DNA, 317 bp, Glycine max
  unsure (1)..(317): unsure at all n locations
  Clone ID: jC-gmfl02220075d05a1
tctaaatcttattcttcacctgcaactattttgattgctgatttttgttaataccatatttactgatattggcgcatttctttgagaaatgcacttattccttgatagaggcaaaaatgtcgggtattttcaaggagaagtaggttaaagcacccaaagagctgaacaggccagcttagnagatttcatgcacttagcctaagctaagccacgaaatccttcaagatttcatgtcctgctattcctccaatgctttctcaaagagcttagggtatgatgctttgctagcctattccccttcaaacaagccctccatt

SEQ ID NO: 5808 - DNA, 661 bp, Glycine max
  unsure (1)..(661): unsure at all n locations
  Clone ID: jC-gmfl02220075d06a1
cgcccaactcatctcccttgaanccnctnnnnnnntntnnnnnnnnnncccnnnnnnnnnnnntnnnnnnnnnnnnnnnnnnnnnnnnnnnnnnntnttttttnnnnnnnnnntntnnnnttnntnntntggggttnntttttttnnnttttttttttntttttttttttttttttttttttttttttttttgtttggaggacgcgccttttcagaggattcattcgaggaccggtgtccccttcaactccatgctctttttcgatgatgagaataggaacatccaagcggtgtctaaaatgggagtaactagcattttggttggagatggggtaaaccttgggtcgttaagggaaggccttacacaattctctcgaaactggaatgcctcgcagaagaacaagcacaaatggctttccaagtactccaacaagtcagatacttccaaccccactgcatgaaatttaacatcccattgaattttctctatctggattctattcagaaccacactattttgtatcagtcgtttcccttaatgaagcagactgggagaacttgaatagaaacctggtatttccaacagctatatacttgaatattcaattggaattttctatggatgtgattcagaaactatttaatgaacttaaatagaagt

SEQ ID NO: 5809 - DNA, 331 bp, Glycine max
  Clone ID: jC-gmfl02220075d06d1
catgaaggaagataattcttatgactagtcgtagggaacacaggcaacggaaatagtcttgaatataaaacaaacaagtatatagcataggcaaatctacaagagagatctttgataaacaaacaagcatagcataaatccacatggcagatctttgattcagattttttgagattaacaaaatcattcaaatgcccattggttttcccgacgaacttgctcttcctcctcaggggtgaagccattcttaatgttaacagggcttgcgaatttcctctggagccttccccttgatcatgtcggctacagttagacatgtaaggtccagcag

SEQ ID NO: 5810 - DNA, 671 bp, Glycine max
  unsure (1)..(671): unsure at all n locations
  Clone ID: jC-gmfl02220075d07a1
tgggtttctcatgctcccttgaanccntnnnnnnttttnnnnnnnnnccccnnnnnnnnnnnnnnnnnnnnnnnntnnnnnnnnnnnnnnnnnnnnnnnttttttnnntttttttttttttnttttntttttggtggtttttttttttttnttttttttttttttttttttttnttttttttcttntgattgggttgtggtgattatatccaccgaacccttttgtgattgctttctggtttgtgatcagagaatcttggatccgattttgcgttgtttgcttgcctctcgtcaattgaatttctcccatttgtgatcaatatgtatcgctctgtttatattattatttttttaataagaatttgtaagttgaagatttatgttttctatttgacccgtcaataatttgaatatgattgtcatatttgatcatttgatattataattctcttgttatttgctttttacgtacactcactgatttcatctttgaattggtgcattatgtctgtttgtgttgctttgttgggtgttctgttctaactagactnttaggattgatgatttggtgagatcatcccttgttagataaattctagattgtgaatgaaatgttttatgaccgcgaaatctctcgattgttcaggttcagtgctgtgatagttgtaaaa

SEQ ID NO: 5811 - DNA, 346 bp, Glycine max
  Clone ID: jC-gmfl02220075d07d1
aaagggaggggccccccccaaaaaaaaaaaaataattccttccataaggggtccccctttaaccctcagcaaaaatggggtaaccccccctttcccctcccatgatccctatttcccgggggggaaaatcctttggcccaataaaagctaaaccttttttccctcaataaaaaaaaaccggtttaatcccccggaaattttggaaataaaattggctgaaggaaccccaaagttttgggaccctggtctccaggtaaaaggttcccccctcatttgttttccggtttggggggggaggcccgggaagccaaccccccaccccccccaaactttggctttgttttgg

SEQ ID NO: 5812 - DNA, 628 bp, Glycine max
  unsure (1)..(628): unsure at all n locations
  Clone ID: jC-gmfl02220075d08a1
gggatgccgtcgtcgatccannnnnnnttntgnnccnccccnnnnnnnnnnnnnnnnnnngncnnnnnnnnnnnnnnnnnnntnnnttttnnnncccctcttccanacagggaagtgctgggggaactgactatggtgcatacacttatgagaatcttgagagagagccttactggccatcagagaagcttaagatttccatcactggtgctgggggttttatcgcgtcacacatagctcggcgcctcaagacagaggggcattacattattgcttctgattggaagaaaaatgagcacatgactgaggacatgttctgtgatgaattccatcttgttgatctcagggtcatgaataactgcctcaaggttacagagggggttgatcatgttttcaatcttgccgcagacatgggtgggatgggttttattcagtctaaccactctgtcattatgtacaacaacacaatgattagcttcaacatgattgaggctgccaggattaacggcattaagaggtttttttatgcctctagtgcttgtatctaccctgaattcaaacagttggaaactaatgttagcttgaaggagtctgatgcatggncagctgagccacaagatgcatatgg

SEQ ID NO: 5813 - DNA, 375 bp, Glycine max
  Clone ID: jC-gmfl02220075d08d1
agataaactgtttcatcaattattttttaatagcgaacataaggcagaaatttgctacgttgtcatcaatgccaataattattacatctaaaatttcttcaatcaagggtcattaatctgtgttgtaagtcaaatcaatgacctgtacacagttatctaatttcttgagtgtcaaaaatgagaaacacgggcataacatggacatctgacactgtcattccatacagatacttgtggaaaatgagtatgaaacattaacaagcaaagtcaattcatggctcaggttgcattttctcgcattcttcccgtattgactggaaaagaatagttgacaaatatctttcaccaaagcttgggaagacaaccccaataagc

SEQ ID NO: 5814 - DNA, 656 bp, Glycine max
  unsure (1)..(656): unsure at all n locations
  Clone ID: jC-gmfl02220075d09a1
ggaaaaacgcgcgatactccgatnccaanttnanantttatgcaccccctccttaaattatatatttnntttaacccccttctttgtttaactttttttcttttctacccaccaaccaataaccatgcacatggttttctctgcataacttcttccgcccctgccaacatgacttgcatgcatgtgtgtgttaactcttcttcacttttacatgcatgcttgaggttttgaggtttcaacattagatgggcttataaagtcatcatatacacactcacatatatatatatatggttaatataaatatttgttctcaagaaggatttagttgattccattgaagattgaatgcactaccaccagcacctttaagtggaaggttaatttctggtgtaaatatatcaacgagctttatctacataaattaatgtcgaccaaggtgaaaggcatccttaaaggacttagatacatatcccaaatattcgaagagaaagaagaagaatttcaaattgggttgccaactgatgtaaagcatgtagcacatattggatcagatgatccatcagcaaatgcaccaagctggatgaccgatttaaaggaggaaaagaaccctcatcaggaaaccctactcaaacagttgaagaacgtgagaaaaa

SEQ ID NO: 5815 - DNA, 284 bp, Glycine max
  Clone ID: jC-gmfl02220075d09d1
tttcctttttttttttttttttttttttttttttccaatttaatttttttatattggtgggatttttttttgttcaactttctgttttttgataaggtaataaaacctttacaatttgccaaaactgcaagaattgccccacagacaaccctatattctcacgcaatatggtaagaaaaaacaattgaggaatagaacgagaagctcccaaacaacaaatccctaacctgttgttgtggacccaatcgcactattaacactcatcccccacaaaaacaaaagaa

SEQ ID NO: 5816 - DNA, 536 bp, Glycine max
  unsure (1)..(536): unsure at all n locations
  Clone ID: jC-gmfl02220075d10a1
gaanacctgctctctctgtaaccacnnnnnnntttncgnaaancccntnnnnnnnnntnnnntnnttnnnnnnntttntttttttnttttttttttttntatttttnnttttttttttttttttgggggtttttttttatgtttnttccccttttccttcactttccttcttcttcctctcctttgttccatgaaacaaaactcaaagtgttggataggagggtgaggataacagagctggtgttaaggtgtgtgaaccttggtctaagagctgctgcaattgctcttgtggtgactgattcccaagccaaggaatttttctcctttcacaagaaagctaaatttacagacatgacggctttagtgttcctggcaaaatgccaacggactaactgttccgtactccataatccaaagattgcgctttgttgtgagtatcattagaggaaatgtactcttcaacaagccctttgcttggctcatacactctgatgatcacgtgatggcatatgtgactgtcgctgcagcgatggctt

SEQ ID NO: 5817 - DNA, 548 bp, Glycine max
  Clone ID: jC-gmfl02220075d10d1
gatcatcagctaggttctatatatagtggaatgaatattctacatttgtgcttaaatgaacaatttacaatgagggaaaccacatgaatatgcataaattttttcatgaaaaaatgtgacaaaaaagagaagaaaatcgggttggcctaaatatctgaactgaagtccacttcaggttgtatattgccatgtataatccagaaccagtcaatgcttcagtttctgaaacaaagcttctatattgaaatcatgctaagttgtagagaatttgatcagatccagtgctagtgcctactaatccaagacttcagatggccaaaggcatttccaagtggcaatctcagcctcgctggtaatctttcttattccgccataaaatccatcagcctcgttcccctcctccctatgatctttcctactgacagtggtcagcctccatcgtgagcaggagtgtaatgattgaactctagcaccacagtgtcactactatgacatcggcaataattttcactcccattgcatgactccaagtggcctacaacaccata

SEQ ID NO: 5818 - DNA, 346 bp, Glycine max
  Clone ID: jC-gmfl02220075d12d1
aaatatgactttcaaaataattattataagaaaataataatttttaattatacaacaattcatgattgaataatagcataaacaacttttaaactaatagtatattccaatcaatgttttggctgaaagttaaccctaagattcatatgccaagaagaggacaaataatgaggtatgcttcgacattaaaatataaaatctattttacatcaacaatatgttattcagcaaaaagaagaaattaaaaggaagaagaagaagcttgctagtggcaaaacatgactaggtttgcgccttccactggcatgttgaacttgactgaccaaggtcagcagattctaatgta

SEQ ID NO: 5819 - DNA, 469 bp, Glycine max
  unsure (1)..(469): unsure at all n locations
  Clone ID: jC-gmfl02220075e01a1
atagcaatcaaattagttcattctctttgcgcagntccctacctctcctttcaagaagcagatcttcgtcaagaccctcaccggaaagaccatcacccttgaggaggaaagctctgacaccatcgacaacgtcaaggccaagatccaggacaaggaaggaattcccccggatcagcaacgtctcatcttcgccggaaagcagctcgaggacggccagaccctcgccgactacaacatccagaaagagtcaacccttcaccttgtccttcgtctccgaggaggcatgcagatcttcgncaagactctcactggcaaaaccataaccctagaagtcgaaagctctgacaccattgacaacgtcaaggccaagatccaggacaaggagggaatccccccagaccagcaacgtctcatcttcgccggaaatgcactagaggacgggcgcaccctcgccgactacaacatgcag

SEQ ID NO: 5820 - DNA, 545 bp, Glycine max
  Clone ID: jC-gmfl02220075e01d1
aagcaccacgaagtgccttaaaaaactatataaaatacattaggaacatcagggcttccgattcaaacatgaacaaccagcagatacataagaaatccttagcagctaattaaaaataaccagataccgctatttagttgctgtatataatccaactcttcacttgaaacatttaggtgaatactactacagccatatgttgaccacctcattctttgccatctgctgctcgaagtgagcctagttgaactggggcttgagtctgcaccactttggaagacccatacactgatatatcaataccttgagccttctccttctcgatctgctccttaatccagaagtatgtgatcctcagtccatccttcaacctcatagttggagcccaaccaagtttttcttttataagtgtattgtctgaattacgacctcggacaccctcggggccaggaatgtggtgaataggaatattcttgttctaaagccaagaatgatctcagccatctcattcatgctgaccatctcatcgctttcaatatttactg

SEQ ID NO: 5821 - DNA, 274 bp, Glycine max
  Clone ID: jC-gmfl02220075e02d1
gacaaaggtaagtatgattcacaccctaacgagttaaaaatagacagatatccatgcaaattaggcggccaaaagaattgaccatttttgcaacggagttcattttagttttacaacagctaatctccaggaccaaatgtgatcaaatctaagctaaccattaacaagtacatgtgctaaaaaatttagccatgtcccaatgtacatcatcgaggaagaaggaggggatgaacttatccccgatttaccttgcccattcttatgctttacactt

SEQ ID NO: 5822 - DNA, 439 bp, Glycine max
  Clone ID: jC-gmfl02220075e03a1
aaggctttcgctttcactttcaccaaaaccctaattctcttggtgtccctctcctccctcctgctgcaaacccacgcgggccgcggcccccgcaccgtccaggcccgcctctacagcctctgcaagcccaccaccaaaggtgggctgagctacaggaccatcctgccggaggagctgggcctgccccgcttcaactattacagggccctcagaggaggagatgctcgcgacccagaaacaggtggagaaaacctcgaagttgataagcgagctccaggcgaggcccggaaactcgaaagatctcggcgactcactccagatttagaaagagcaggacggcaacatcatggactcgaaggcggaggccaaaagtcaagtggctcagcgcaacgtcatagaggcacggttcaaggtcagctccgcaggatcctactatgaa

SEQ ID NO: 5823 - DNA, 565 bp, Glycine max
  Clone ID: jC-gmfl02220075e03d1
gatcaaatggcataacaattttatataaaaaagaattgggctgcttaatcaatgacaaccactttggggtccacttgccagagaaaatacatccatcggtagagaaaagggggttataaatttatattatacaataaaaaaaattcagcatcctttgttcaacgtttctccaagtcttccctgatctagaagttggaactcccgtttgaatctctggattaacctgaactttgttctttgcaacatatgtcatcctatccctaataatattgggtaatattggatagtagaagcatttcaaatgaataaaataattaaataaataaataaactttgtcagaataaccaagaagcattgccatggcagccctagctcatgctaccatctgctcctgctctatatacagctgctccatccatggtggaagcatctctttactgagatcatattgttgcttctcagcaccaaatatctcagacctctcggagggaacatctctaaccaatgaatgaacccatgagacatcccgctcacacccaattcaggctgtgctatgggggatgc

SEQ ID NO: 5824 - DNA, 485 bp, Glycine max
  unsure (1)..(485): unsure at all n locations
  Clone ID: jC-gmfl02220075e04a1
ttaagatcaaaggacttccttattaggaggctcatgcagaaccttacatgaagaatttagtaacacgcgatgttgtttccggtccattgataacgttttctggcatcgaaaaggtagcaaatatattgcaagctttgaatactactggacataaagggtttcctgtcattgatgaaccacctttctctgattcaccagagttatgaggacttgtactgaggtctcatttactagagttactgaaggagaagattttttcaagggataggggttttagcaaatcaaaggatcttccaaagaatttctactttggattttggaaaagcgggatctggaaatgggatcaaactagaggatcttgatatccaagaagaagagatggatatgtatgtagatctccatcccataactaangcatctccttacactgaggntgagacaatgtcactagccaaagctgctattcttttccgacaacatggact

SEQ ID NO: 5825 - DNA, 526 bp, Glycine max
  Clone ID: jC-gmfl02220075e04d1
ccttgatagaatatgtatatattcactcatacatgttatatagcgacattaccatagaacatacatgcatagttactataaaaatataaacaagctgcctggctcagaaatccaactggaaaatagggagtgcaaagtccaaagttgtcaactcaaacgcaacccactgaaactgtattccaaagaggaccttctaatgctgagtttctctttcttgatttggacaagaagagggtaaacacaccatgagaaacttagataatgatccctattcatgccttcattatagcaaccccagtaacttggatgataagtaacatggtaccaagcagaagcttttgcatacacatcactactccctgaatctacatcaccactgctgttttcattgaaccaggccctggcctctttccttagggacctcacagccatattgattgcttctgcatccctccctttgttgaaagattttgacattttcataatattcccaccgaggatttcagcttcagttttgatcccatag

SEQ ID NO: 5826 - DNA, 463 bp, Glycine max
  Clone ID: jC-gmfl02220075e05d1
acaaaaattccaatacattttgaaataacgaatcgctcaatattggttatacatggtaaagatatttgaacaagagggggggcacagaaagagagatggtgagggtggaaatagaaaaaaaaaaaaaaaaggaataacgtgtcagaaggccacactaatgaccaatgttgctatatacctggaatacaacaagggtcatacttatgatcattgggtctaactagtgtgatacaatacaatcccatctccatgaagctacatttacaagtttacactgatctttccgctgctagtagaatcaatttgtcaagtgatgttttgctctcaacatggttgatatttgaagtttctaccagtatggtatccattctgaatatttggtgacgtattctcatgagttggaataatcgtggaagttgaagttagaggatgagacaaggtgcgaccactctttccctgaaat

SEQ ID NO: 5827 - DNA, 666 bp, Glycine max
  unsure (1)..(666): unsure at all n locations
  Clone ID: jC-gmfl02220075e06a1
cgcncntaaactgccctctcacctttgtaanccccnttnnnnnnnntntntnngnnnnannnncnccnnnnnnnnnnnnnnnnnnnnnnnnnnnnnnnnnnnnnnnnnnnnnnnnnnnnnnntnntttttnnnnnnnnnnnnnnnnnnnnnnnnnnnnngggggnnnnntnnttnntnntttntttcttttttttttttttttttcttttttgggaagtgaaagaaatatcaacaagtgccggctcaattacatccttcacaaagttggttgcgagagactcttacgaccatgaaatggaagttgatggcttcatggattatgttgatgatgctttctatcacaaaaccaattatgactacaagttgggaaatctgatggactactatgggatcaaaactgaagctgaaatcctcggtgggaatattatgaaaatgtcaaaatctttcaacaaaaggagggatgcagaagcaatcaatatggctgtgaggtccctaaagaaagaggccagggcctggttcaatgaaaacagcagcggtgatgtagatacagggagtcgtgatgtgtatgcaaaagcttctgcttggtaccatgttacttatcatccaagttactggggttgctataatgaaagcatgaatagggatcattatctaagttactcatg

SEQ ID NO: 5828 - DNA, 493 bp, Glycine max
  Clone ID: jC-gmfl02220075e06d1
aaatgatagtgcacactttcataaatcttagaattgttcttgacattttatacaatgcagctgtgtgctatattctttctttcataagcacttgataacaatacattatccatgaacatgctgaaacttattaaaacaaagtgacttagggaagaaagcaatttagaacactttggaacaaatttaattattgctgggctttgaagggctgatatttcttgagatcttgagcgaggccttggatggagccagcagctgagataatagaaacgatcaagcaagcccagctcaatatcttgagccatgtccaagtgaaggaaaacttttgcatctttgactgcttaatgtacatctctatggggaagtaaaccgctaatggccaaaatgacagtgaaccaatcaggcctaagaagtcattgaagaatggaaacatcataactatcaaagcagtgatgatgacatatggttgttctcataccaccctgaaaaagtt

SEQ ID NO: 5829 - DNA, 669 bp, Glycine max
  unsure (1)..(669): unsure at all n locations
  Clone ID: jC-gmfl02220075e07a1
aatcacaacaaacttcaattaaacttaaaatataaaataaaaatttaaaaacttaaataaaataaaaaaaatacaaaatctaaaacaatataaaaatcataaataaaaaagctatattgaaccaannntttatnnnancccnnnnnnnnnnnnnnnnnntnnttattttntaatttttattttaattaataaaaataatataaaaaaaagaggaaattttataaatattaatcaaaaaataaacaaatataaaattaaatacaaaaaaatgaattggggtgtaaaacggagacaaactgaacaagctgaggaaatatacttgctttggatacagaaacagtggggtaactgcatcccacatagcacaacctgaatttagcgctgagacagatatatcatgggttcattcattggttaaagatgttccatccgagaggtctgagatatttggtgctgagaagcaacaatatgatctcaataaagagatgcttacaccatggatggagcagatgaatatagagcaggagcagatggtaacatgagatacggctgccatggcaatgcttcttgattatactgacaaagtttatatatttatataaatattatattcatttgaaatgcttctactatccaatattacacaatattattaaggataggatgaca

SEQ ID NO: 5830 - DNA, 361 bp, Glycine max
  Clone ID: jC-gmfl02220075e07d1
aaagcaaacttacttgctttccttctataccaagccatatgctaccaccaccacaacaaccattttttttctttttttttacatcacattagtacccccacaactactactagttaataaactactactagttaatacctgtgaaacaggcttttaatgagttcagaaacataaataaaaaaaccctctaaaaatttaacccaaaaaaagggagaaaaagtaacatctcccgccagatattaattaataaagaagggcctagaaactatttaataatagccattctcaaatggtgctgcttttgcggacaacgtagcgatatgcagcaacctttttcctccttgaggcagtgttgtcagcc

SEQ ID NO: 5831 - DNA, 463 bp, Glycine max
  unsure (1)..(463): unsure at all n locations
  Clone ID: jC-gmfl02220075e08a1
cgcttgatcgtcngannccacttnnnnnntttnnggacacnnncncnnnnnnnnnnnntnnnnnttngntnnnnnntnnntntnntttttnttttttttnnttnnctttntnttttttttnggtcgggggggatatgttatgggcaccatataacttaaggggataaacttttaccttttgtttttgcctgcgatgaatacttgtttaaattccggagagtctaatttctgttagtagaaaccttcaaaacaatattaccccgtaaaaagaaaaaaggagtgcctcgaaaatcaaggaccttgatcttttactagagtgtgtcttatctcaggttgatcagatgatgcctgccgatgttactccttataatgactgctactttaacaattttgctaagagatgtttgataaccttattcatgtagaaaattgtgagttgaaaatatgaatacaacctttaacg

SEQ ID NO: 5832 - DNA, 584 bp, Glycine max
  unsure (1)..(584): unsure at all n locations
  Clone ID: jC-gmfl02220075e09a1
cgcttgtcggtcgatacaaatttaannttnnggcncnncccnannnnnnnaattnnatnaaggaaaaaannatttnaaccctaatttttgtntntgtttgttggaagagctcatctctggtgtcttcgtcatcttccccaaccagagatgcgccccacaacagatacttactaaagctttcaactttccaacaccctttcagatgttagccaaggcccataacaaaggggatggatctaagtccctggctaagatactggcaaaatggaaagaatataatgcccagattgattccagcagtgatgcagataagccaattcgcaaagttcctgccaaaggatcgaagaaggggtgcatgaaaggtaaaggggggccagagaactcacggtgtaactaccgaggtgtcaggcaaaggacttggggaaagtgggttgctgaaattcgagagccaaacagaggcaataggctttggctaggtactttacccactgccattggagctgcccttgcatatgatgaagcggccagggcaatgtacggttcctgtgcccgtctcaactttcccaatgtttcagtttccagtt

SEQ ID NO: 5833 - DNA, 364 bp, Glycine max
  Clone ID: jC-gmfl02220075e09d1
ggaaaaaaaaatatcagccccccaaattggtaacaaacaggggtaacattaaggggacaatagggttcaacccaaaccaaacttatttttaaagggtattacagacccattacacataaaatttttttttaaaagggtggggaaaatccaacattgaacattacacaaaaattagctccagcttaaaaccccccccgaagacccaacaccaagggcggaggtgactccttttggagggtggaatcaggggggggccttccatcctctagctggtggccagcaaaaaaaaacctttggtggtccggggggaatccttccttggccgggaacttcgccttcacattggcaagggggggggagctct

SEQ ID NO: 5834 - DNA, 621 bp, Glycine max
  unsure (1)..(621): unsure at all n locations
  Clone ID: jC-gmfl02220075e10a1
tgaaaaagcttccttatcttcgaanccactnnnntttnnnngaaannccccnnntntnntnntnnatttngcttctttttttttttttttttttttttttttttttttttntnnttttcttntttttggggttttctttctcttattttcccattctacattttaatcctacattattttcccctttctccctttactgctacagagaatgaaacaacgactgatgtaaccaagattgaggaaactaccccagaacagccagccaccgatgttactgccccagaaacagtcaacgaaaaagcaaaagaggaagcagcagttgagactaatgatgcaacagaagttacagaggaagggaaggctgataaaacagaacaagaagaagaagtgaaagaggagactaaagaaaccgaatcagcaccattggaggaagagaagcagggggagaacaaaccagctgaaaccgtagaggaacccaaaacataacatgtttcttgtcgagaagactgaagtttaagcccattgatatatgttattgtgagtgggaaaaaagaagctctcgcatttttaatttaaatattattaatgtcgttattgtaatgctaagtctttgggtattgc

SEQ ID NO: 5835 - DNA, 579 bp, Glycine max
  unsure (1)..(579): unsure at all n locations
  Clone ID: jC-gmfl02220075e10d1
gattaggacgttgcacgtctgcagatgcattttatttgtacctaagaattaaagatacactcgagcacacagccatttcagtcttgagcacttgaaaagttaagtccacataattcattaaagacattggaaacggcaaaagagtatcagcaactgaggctatccgaagccagagatccaaaattacaaaaggcaaaacgataaatacggaatgaatatgcaataaaattctatcatatgatgaatcaaaattcaaaatcagtctacccgttgatcaactcctgcatatgtgggaaacgagatgcaataaaattctactaccatgagatgaatcaaaatccaaaatcagtctactgggttgatcaacttctgcatatgcagtttcaaggtgcgcttgctctgcttcttgtacctccttctcagttttcctgccctttttganttgtagtatacactcataaaggtcccaacagctccatacttcctcctagtatgctcatataaaccagcatcaaacatccttcagaagtttttcttcgacagctctgacacagcatactgtggctgaaaccatgattt

SEQ ID NO: 5836 - DNA, 637 bp, Glycine max
  unsure (1)..(637): unsure at all n locations
  Clone ID: jC-gmfl02220075e11a1
tgaaaacacggcctgctcgctcgtannccccnnnnnnnnntttnnngnnnannccnccnnnnnnnnnnnnnnnnnnnnnnnnnnnnnnnnnnnnnnnnnnnnnnnnnnnnnnnntttttnnnnnnnnnnnnnnnnnnnnnnnnntctggggggnttttttttttttttttcccccttttttttttttttttttttttttattgtgttcgtgtctaacaatttatctcttggagaacgtcaaattgctgcacagtttcaagaaattccattagatcttcgtatggtggaagctgagcgaattggatttgatatgctgaaggcaactgcagttgacaaaattccctcagatttagaagggatggaagcatcaatgcaacatctgctagtcttgattgatgacatctacaaatatgttgacgatgttgtggaaggacgagtggcaccagacaacaaaatcgggagatttatatcagaagctgtaggttcccttcccaaattgtccccatcagtttttgataagcttgtgaatgacagtttgcaagatcacttgcttttgctgtatttatctagtatcacaagaacgcagcttagcttggctgaaaaattgaacacagctgctcagattctgtgattcttt

SEQ ID NO: 5837 - DNA, 490 bp, Glycine max
  Clone ID: jC-gmfl02220075e11d1
agataatggagagaaagctttttgctcattttctttcaaatacagattacatgaaaaataacaagtgaacgctacactgcataccttggacaataagtgaacttacctagcaaagaccagcacaaaacataaataaaaaataagcgaagtaaaagtgaagtataaaacgctgacattccacgtttctggaaataagacaagaaaagaaactcagaaaaatttgacttcggcgataaacaagcggaagaatcacagaatctgagcagctgtgttcaatttttcagccaagctaagctgcgttcttgtgatactagataaatacagcaaaagcaagtgatcctgcaaactgtcattcacaagcttatcaaaaactgatggggacaatttgggaagggaacctacagcttctgatataaatctcccgattttgttgtctggtgccactcgtgctttcacaacatcgtcaacatatttgtagatgtcatcaatc

SEQ ID NO: 5838 - DNA, 599 bp, Glycine max
  unsure (1)..(599): unsure at all n locations
  Clone ID: jC-gmfl02220075e12a1
aaagaaaaaaaagaataaattaaaaaaaaaaaaataataattaaataataaaataaataataaagatattaaaaaattaatataaaaaaataatttctaaaaaaaaagnnnnaaggggaaagggtagaanncaaannnnnntttnnnngnnnnnncccnnnnnnnnnnnnnnnnnnnnnnnnnnnnnnnnnnnnnnnnnnnnnnnnnnntttatnnnntttttttttgttgtttcaatttggggggtataagaatgaaatggttcaaaataacaaaagttccctattcaaaagaaaactgggtttggtgggcaatacagaaatgaggtggcatgtgccaaatggaggcttggcgtggaagcaaacaacgtagtcaagtggcaaactgttacagcagattgcagaaagtacatagatgacatacgttctaggagaccaatatagatcagattccaaaacagttaaccaacaagcttatttctatgctaaatcactgaaactcaccaacaaagatgtctttgtcttggacgatgacgacactactctctctaaaatccaagtattatgctaaaaatggatttggtgtggaaccacacaata

SEQ ID NO: 5839 - DNA, 536 bp, Glycine max
  Clone ID: jC-gmfl02220075e12d1
aacttggaacggacaatttcttaatggaacaagagctcataattcatgaaagcctcgaaaagggaaaacaacattgttcagtgcccctacatgactaagtaataatactcaggatcttatttcatagaaattaaggagcaacttagaggcttgatttgagagcttaatcatagtacaagggattaggcagcttaaaagtcctagtccctttgttgcttcccaggaggtcactccattggtctccaacgtttccaatgattctgtatccctccttctccagcttctctctctcagctgatttgtattcaaatgataacttaccagagtactcagatggatccctgagaattaacttctcccatgtgttgaatccaacctcctttaagttcttggctgttacatcccctagactcagtggtctttctgataagaatacaatcttgatgccgagagccaacagtttgttgtacattataagagtctctggcagtgcgaatgcctcgccatcaagaacccagttcttaaacgccgtcgta

SEQ ID NO: 5840 - DNA, 527 bp, Glycine max
  Clone ID: jC-gmfl02220075f01d1
gagagaatacaagtgaacttgtaatcacaaaagattttaccattattttcaaagtagacttctttgtacaatatgtttctgcactcactagacatttcccatttgttatgtccctaccgtacacataaatacatgcagcatttaattagaagaagaaagtacgtacgtactgtgccattttgatgatgatttggttttgctttgctatcaattttgtgttttggttggcgaggaacctcacaagaggaaacgttcaccttccaccttccgagagaaacatttttgtaaaatactaggtagataaaattcaacaccaagaacctaaatttgagcccgtggtattttgtcacatttatagatttgatatcttacccttaattttctttcatagacaattaaattcccgtgctaatgcccctcttccttcattcctatcgtttgcagtgcatgtgactctatctcgttgaaacaggtaaacccaaaatcatgaataccaaagtcttgacagtccaataaccaagcacaat

SEQ ID NO: 5841 - DNA, 357 bp, Glycine max
  unsure (1)..(357): unsure at all n locations
  Clone ID: jC-gmfl02220075f02a1
gagactttgggtagggtttcgtctcaactcaacaaacgtcgtcgttctcccatttccaatctttctccaaaggcttcttctgcttccttaatcaactcgttgacttgctcttcgcctgcacccactcagcactgtttcgccttcacccgcaccaccgncaccgntaccgncacgtnactgagacaattcaacagccaccgtccgcccccactcaccacgaggatctcctcgtcgccttccaccgtagtctgcaaagctgtctccgttaagccccaaaccgaaaccgaaggtctcaacattgctgacgatgtcacacagctcatagggaaaacgccgatggtttacctcaacaatatc

SEQ ID NO: 5842 - DNA, 371 bp, Glycine max
  Clone ID: jC-gmfl02220075f02d1
ggaaaggaagccccccctttaattaaaacaatgggctcaaaacatggaaaattttacacccgggaaaaaaaacatttttttttcccccccccccccccccaaaaaaggggtttgattgggggggggaggggaaaaatttaagaaaaatttgggcctttttaggggaaaggcacattttttacattctactttaaaaaaaaaaatccccttaaatttccaaattccctattttaacccttaaaaccaaaaaccccctaaaggctgggaatctgggttggaaattttcgggacattataagagcatttttttatataaccttttaacgggcccccaccccaatttaaaccctaagggggggggggcccccttt

SEQ ID NO: 5843 - DNA, 356 bp, Glycine max
  Clone ID: jC-gmfl02220075f03a1
agatgatggagacgacggcgaagcgtttctctgtcgttgcgccaatcgcggcgtagttgatggtggagcttctctcggcgagagtggaggtggaggctcaagagaactcggacgtgaagacgctggggatacacttgcacgggaagaagtgctgcgacactggatgggaatgtaagggctggtctatttactgacgtaacctcactctgactgattatttccagacctaccaggaggagaatctcttctacaagcggaactcgccggaggagcacgccggaggattttgggactaccactcgttcatcgccggtaccacgcttttcgagccacaatggatcggcaccagcgggaac

SEQ ID NO: 5844 - DNA, 397 bp, Glycine max
  Clone ID: jC-gmfl02220075f03d1
aggaaaacaaaacatgatttgctgctttaaaaaggaatgatttaaaatacaaatcattatgggctgctctccccttttaaaaagaccttatccaaataaaaaattaaatttataaaaaaatcctcccttgttttctggaaagaacaatataccggggaaaaaaaaacaaggggtttttttccctccaggggcccccttttttatgtgtaggaaaaaaatgtccccaacctactggatcattaatactttggcaaaaaaaattttcaatggtcaattttggagtttgcccccactgaataattaatagctactttgggttcataaaggattagggatgtttaaatatcttggatcatgccaggagctgatcgccaaaagatccaacgggtgaacgggg

SEQ ID NO: 5845 - DNA, 493 bp, Glycine max
  Clone ID: jC-gmfl02220075f04d1
aaattgaattttactatccaataacattaatgctggataacaacactcacaaatagggaacaggacgaaagctgtgacttctatttaagttcattaaatagtttctgaatcaaatccatagaaaattccaattgaatattcaagtatatagctgttggaaataccaggtttctattcaagttctcccagtttgcttcattaagggaaacgactgatacaaaatactgtggttctgaatagaatccagatagagaaaattcaatgggatgttaaatttcatgcagtggggttggaagtatctgacttgttggagtacttggaaagccatttctgcttgttcttctgcgaggcattccagtttcgagagaattgtgtaaggccttcccttaacgacccaaggtttaccccatctccaaccaaaatgcttgttactcccattttagacaccgcttggatgtttctattctcatcatcgaacaagagcatggagttg

SEQ ID NO: 5846 - DNA, 526 bp, Glycine max
  unsure (1)..(526): unsure at all n locations
  Clone ID: jC-gmfl02220075f05a1
ganccctccctctatcgaaccctttnnnnttttttcggtaanncccnngggggnnnnnntnanntntggntattttcttttntnattttttttttntcttccngccnttttcttttctcttgggggtatttttattaaaattcccccctattctccacctccaaccaaatctttacatttaatgtttccctggatcaaacatacatctcaaaggtatcatgctcatcaatatactaatggcaccgtatgtgatcttacaaataagccactagacaccgacgtcagcatcagtctactctaaaccgatagcaatgattaactcaatcacatacatttccacttgcaagtatgcactcacaattcaatgtccgcagctatgcaagcacccattattctatgaagaaagaccattatgccataccaacgactgtcatgtgctttcaaaacatcactttgaatccaaagtgagaccacaaaacgaaaatactgatattgttatagtcaaagacttcccaaatactgactt

SEQ ID NO: 5847 - DNA, 299 bp, Glycine max
  Clone ID: jC-gmfl02220075f05d1
caaaaaaaaccccggcgggaagggggggcaaaaaaaaaaaaagggggggggggcccccccaccccccttaaaaaacaaaaaagccctttgggccccccacaaagggaaaaaaaaacccccttttttttgtccccccccccgggagatgcaaaaaatattagggggaccccaaaaaaaaaaaggggcccccaaaaaaaaaaaaaaagggggtaggccccggggaataaaaaaagaagggggggcgcctgggtttttccggggaccccccaaaaaaaaaaagggggggggggggtcaaaaa

SEQ ID NO: 5848 - DNA, 525 bp, Glycine max
  unsure (1)..(525): unsure at all n locations
  Clone ID: jC-gmfl02220075f06a1
cggcccacccctctctttnnnnnccnnnnnnnnttttnnnnntntnccctttttttnnttttttttttntttttttttttttttttttttttttttttnnntttttttttttttnnnntttttttntttttnttttttttttttgggggtgtttttttttttttttttttcttttttttttttnnttttttgttttttttcttaagtattttatcaagcaaagaactctgtggctctccatgaaacttatctccatcactgcgttcttgcaagatactatcaacctaaatatgttaaaacacacacaaactattatctccatagaatacttcataactctcatttcatatttgagaagaacaacttcttatgccacataaatactctattacagcactttgcccttggatccgatacacgagacacaactactgatgttccaaatccttttgacatagctctatcggatcctccacaaattcctgaagggtatgaacaaaactagatgttcaatatccatgccat

SEQ ID NO: 5849 - DNA, 548 bp, Glycine max
  Clone ID: jC-gmfl02220075f06d1
aaaaccataatgcataatagagatcaattcataaataagtattcagcaagcaatttatggatacaaaagacggctccgataaaatttaatgttactaagcaaacaaaggaaaaaagtagcagagtgggttttccacgagataagagatacgcaagtcgataagtatcataaaagattacagaagaaaaggaacagactcttctcaactatatcctatttgctgctgttgttgaggagcttggtaaccaggatatcccggataactgccatacatgttgggatcctgtccagcaggagcataaccataattttcatatccttgagcagcatacccataatatccaccaccagaaccagcaccagcagcaccattccactggtttggatctgcctgagcctgtttgtttgaaggactgcgaccccatgaaagacgcacattttgtccacccaacagggtcccattcaacacccgaagggcctcttcagcacagctcctgtctgcaaattggacaaacccacatcggttgcctgctggaatcttcacatga

SEQ ID NO: 5850 - DNA, 669 bp, Glycine max
  unsure (1)..(669): unsure at all n locations
  Clone ID: jC-gmfl02220075f07a1
ganataactgcgctgtgcgttgattccccatnnnnnnttnnnnnnnnnccccnnnnnnnnnnnnnnnnnnnnnnnnnnnnnnnnnnnnnnnnnnnnnntttttnnnnnnnnnnnntnnnnnnnnnnnnnnnnnggggnnnntttttttnttnnttttttttttttgttcctggtacccctagtgttccctcaccaccactcattccttccccatctcccttcactggcacatgcaactattggaggaatcatccagcaatcatctggggaatccttggctggtggggaaccctaggaagtgcatttggtgtgacaggtactactgttccagggttcagtcctggccttagcttgccacaagcactttccaacacaagaactgatgggctaggagcactctacagagaaggcacagcttccttcctcaactccatggtgaacaacaagttcccttacacaaccaaccaagtcagggacaggtttgtggcctcactcaactccaacaaggcagcagaagcacaagcccagctcttcaagatggccaacgaaggaagaatgaagcctagaccatgatgaaatacagattaagtagtagtactcttaattagntaattagtatggtgtgccaatttattgagttaagaccatttatatttaagatttctgtag

SEQ ID NO: 5851 - DNA, 370 bp, Glycine max
  Clone ID: jC-gmfl02220075f07d1
cgaaacatgcctttcaacaggcacaaattatattaaagaaaaacaaaaggggacaaagttacaaacaacttaaacccccccaaaaaaaaagttacaaacaagttggaactttatttcttctcatttgaacccaagcaacaaattctctctttttctagctcttacaaggccaacaacaagcttgttttgcagaagacgcaaactcatcctagcaagaggagtagcttaaatcttctgtgcaatgtggttttttttttctttccaaaaaaaaaaagaaaaagcgaacaacaacaacaacattaatggttggtgttctttaacaaggcttgccaacgaaacagtttagggcaccagcatgtcgtgtcaacct

SEQ ID NO: 5852 - DNA, 583 bp, Glycine max
  unsure (1)..(583): unsure at all n locations
  Clone ID: jC-gmfl02220075f08a1
cgcgcgctcagttttgaaacccagatatnaatttanaaagaaccnaccncnaanatannnaattanattanaggtaaaaaaaatatttattataaatttttttttttttttactttacttgatgggtttggggtttttgctaatgcgctagccatattaaatgaggaccgctttcttgcacctagaggatggggcttccaagatttctcaggtggaaggactaagtcgttcaaaggccagcttataggcctcatttatgcaactcagtacctcagagttcctctcatacttctcaattccatctgcatttttctgaagttggtgtctggctgatgcttgacaagatgtttacttcttaagtattgcatgttcaggagtttttgtcagatgatttcacgaaggtctttaagatagtaggtttgccaaattccactggagacatatcaactgaaatatttgtcctgttttttgtgactctatttattgccacaaaatagtgttcttctttacaatagtaacatacgaagggcatcatgattttcaattcagagttgtattcaatttattgagtatcaattatcat

SEQ ID NO: 5853 - DNA, 393 bp, Glycine max
  Clone ID: jC-gmfl02220075f08d1
aatatatggtacaacaaccatattatttacgataataggagaatgcacatgtagtatataagttactatatatttcaatccataactaaattaattcttaactcacatcatgcattacaaacaccaaacttagactactcatataaacagacctaatgatgttattaagcctgaacacactctacaagagcttaggtttatatatcatcatatatatgatttatataggcatgcatatagctaggtttaatctccattgagtaattgcatagacgaccagatatcctcgatgctccaatagttgttgttgtcgttggtggtggtacaacaacttgattgatcagtgattgtagggaattgaggttggaatggctcaaaagttccttggtatga

SEQ ID NO: 5854 - DNA, 672 bp, Glycine max
  unsure (1)..(672): unsure at all n locations
  Clone ID: jC-gmfl02220075f09a1
aaagagaaaaattaaaaaaagaagaaaaaaaagaataaatatataaaagagggtaggaaaaagaagaaaagaaggaaaaaaaaaaaanaagnnaaggggaaggtagaaacaaaannnnntntnnnnnnnnnncccnnnnnnnnnnnnnnnnnnnnnnnnnnnnnnnnnnnnnnnnnnnnttatntnnntnnntttntttntttttnnttaacagggttttgtttggtntttaaataagagcaagagacagccagttcttcagcaaagtcacccattaagacaaaaacagtgtcaaagagacagaacttcccaacaaagaagcaccagaagggaacaagccagagcaacaaccacctttcattccggagactgaaaacagctatggcctatatggtcatcatgatgagtataaccaagtcccttccaccaccaccaaccccacttcttaccacccctacaagaccgagtttgagaactccaacaacaagtattacaacaatgatgcctataacacaaggttatacgaaaccgggtacaacaacaacaaggattcttatgagggtaaccaatatgagttaagtgacacaaagtacacagaagaagaaaacaacaacaacaacaacaagtatcacaactcctatcagaacaacaaccagaagtactacaacaacg

SEQ ID NO: 5855 - DNA, 369 bp, Glycine max
  Clone ID: jC-gmfl02220075f09d1
gaatgagacaaagagcgcttgaggaaccttacaaattgcccctatgaattaacgatacagtgagccacccagccccatcagattacagcatacaacaagctacttctatatacgccatgccagacaccgaaaacggaagaagaatttggttgctcgaagatatatcgggccaagatatcccagaaacacatacgcttgatcaacaactcgtggggaaggatgctgaaaacatccagcgccgatgacaaagaatacataagacaaatgcccgatgcccaactcacagtggacgttgaaacgagatggaaaacaaattgccgaccatgagaacaatgctagaactctatggagactgtgcctgatcaaggg

SEQ ID NO: 5856 - DNA, 575 bp, Glycine max
  unsure (1)..(575): unsure at all n locations
  Clone ID: jC-gmfl02220075f10a1
gaaaanaatctgccctctcacctttgatnnccccttnnnnnnntnttttnttnntatnnnnnctcnctnnnnnnnnnnnntnnntnttnntttttttnntttttttttttttnttntttnntttttttttttttttttntntntntnncnnnnntnnttnntnnttnttttttttntggtgggtttnnttttttttttttttttttcttttntttttttttttttttttttaattttttcttttnntttgttggactccagtccaaatatgtcgaagaaaatttgaggaacaagagtgaactgcttctcaaatccaacccagttcacaagaaggttccagtgtttattcacaatgagaagcccataacatagtctcttgtgattgctgaatacattgatgagacatggaagaacaaccccatcttgccttctgatccttaccaaagagccttggctcgtttctggaccaaattcattgatgataaagtttttggtgctgcatggaaatccgctttcacagctgatgacaaagagcgtgagaagaatgttgaggaagcaattgacgctctgcagtt

SEQ ID NO: 5857 - DNA, 368 bp, Glycine max
  Clone ID: jC-gmfl02220075f10d1
ggaaaaaaaatcgatccggggggaaactaaaattaattaactcaggcctgctcaaagcccgggaagctttccctcacgttgttttatacataagctaacatgcccttccccgggcttgggttccccctagcagaaaaccgcttccccctttttttttcccaaggaaaaccaagcgggcctaaggcaaccttaatttccttttattaggaaccccaattttccccaattggtcctaatttaatagccgaaaaatgccccccccccccgggttgattttactttttacaaaacaaatgggggggacatttgggttagctcctgtttcgcaaaacccacctttgggtttccccattccttggccttttttt

SEQ ID NO: 5858 - DNA, 581 bp, Glycine max
  unsure (1)..(581): unsure at all n locations
  Clone ID: jC-gmfl02220075f11a1
gtaacctcctctatcgacccccnnntttntnnnnncccnnnnnntnnntnnnnnnnnnnnnnnnnntnnntttttttttnttntttttttttttttttgtgggtnttttttttttttttttccttttttttttttttttttttttcttttacttttgtcttttgctgtattatgtacccaaacttgagctacactgagtcaaccaccaccgagaccttggtcatgggagtggcacctgttaaggctcaatttgagggtgctgaaatgggtgtgcccgctgagaacgatggctgcaaatgtggaccaaactgctcctgcaacccctgcacttgcaagtgaggtgttgggagagcaagcttcaagcagagatagcccttaattaagaataatgataaactattaatgtgtaactaaaaacttatgtattatgtctgtgatggttctcgtgcactctggtgttttgtgttaaacaaacatccttagaataaagtggtcatgtcttgcctttcagcaagttcaagtgttttggacttgtgatgggtgtgaaaagctcatggttgcttcttttttttttttttaat

SEQ ID NO: 5859 - DNA, 393 bp, Glycine max
  Clone ID: jC-gmfl02220075f11d1
cccagaaaaagttttaaatattataggcggagattcataattcagattagccgaactttatacagaggcgcccatttcccaacctttaaaaaaaaaaaaaaggaggccccctggggcttaacacccccatcaaaggtccaaaacacttgaacttggtgaaggggaaaacatgaccccttttttttagggggggtggttaaacaaaaaacaccggggggcccgaaaaccttcacagacataatacaaaagtttttagctccccataaagagggaatcattattccaaataaggggctatttttggtggaagcttgctctcccaacacctcactttcaagggcaggggttgcaggaacaatttggtccaaatttgcagccatggttttcaggggg

SEQ ID NO: 5860 - DNA, 372 bp, Glycine max
  Clone ID: jC-gmfl02220075f12d1
ggtaaaaaaaaaagggcttttttttaaaaaaaaaaaaaaggggcccccccggtttttgggggcggggggggggcccccaagggcccccccattttttttttaaaaaaaaaaacggcccccggggaatgggggggggggtaaaattaggcccccccaaaagggaacgggggaaacaaccccctaaaaaggtaccttttttttccccaccccaccgcgggaatttattatggcggggcccgggttggttttttcaaaaaaaaaagggggggttcggggctccccccccctttggaaggggggggcccaaaaaagggaaaagggggaggggccctacctggaaactttggcccccccccgggccccaagggtttt

SEQ ID NO: 5861 - DNA, 361 bp, Glycine max
  Clone ID: jC-gmfl02220075g01a1
gagaaacacgcgaacaatgaggggagtgcatcatgcaagcctctgcaattgtctgtgttgctgtctctttcttccctttttcagaaggcagcgtcaccgcttcatcatcggagaaatacccaaaaccagacaccgggatcaactgattacaacagtttcttcatagcgagttctgtcttcaaaatcattgctttatgttggagtctttctgggtgggccgcttcttccacaatggtagagagagtgagagagagtgaaagaaaggaaagaatgagtcaggaggaagatagagcgacatactgagaagggggtcctactgcttaattgtgtaagggcatcaacagtctctgtccatgatttt

SEQ ID NO: 5862 - DNA, 456 bp, Glycine max
  Clone ID: jC-gmfl02220075g01d1
atataacacccacaaaatttgatattttcaataaattttaaccaagagaaaatacatttaaaaagtggaaaatactcctccatttagtggaattttccagtaggagatatgaacacattgtgtctacatcagtaaatggggaggagtattttccaccgtattgaggtatatttagctagttctggccctcgcaagtaaaatgttttgcacatgcttctcttatttggttgcaaagaaaactaagtaaattgcccaacatcattgcataacgcggggttcaggagttctttgcaataaaagtgccgtttaaacagggctaatccatacccttcatcacgaaactgaaatgacaaacattgattcaaaacctgccttaaaattaacataatatcacagaaagatcgagctatagttgacaaaactgataacacactcctaaagtgaactcaatctaac

SEQ ID NO: 5863 - DNA, 408 bp, Glycine max
  unsure (1)..(408): unsure at all n locations
  Clone ID: jC-gmfl02220075g02a1
agttggaacctgctaggaaacatgtcctccactgaagctatgcgtctttttgtaaaaatattggaggaagaagatcctggttggtattcaagagcatctaactctgttgtagaacctgtcatagatgtgcaaatgaataattccaaagttgaaccagtaattgagaatgggaactcttatccagagacaaagactatttccacccaaaatggaagtgaagttggaacacaggataaagatattggtgaggaaggcttaggttcagttgaagtatatgatcaaaggattgcacctccagtatctggaggaaatccaaaagcccgatatgagcatggagctgcagntgagcaagataaactgtacatatatggaggaaatcacaatggtcgataccttaatgatcttcat

SEQ ID NO: 5864 - DNA, 430 bp, Glycine max
  Clone ID: jC-gmfl02220075g02d1
gagtgtaatgtaataatttaatatggtacacacacctacacgacaagtttcgtgagctgcagaattagaaaataagcaatacagacaatgaacaaggaaactaagaaataatatatgcaaaactagagattttctttgtgtggttgcatggatatatcaagcatcaagttgaagcctccccattcaagcgtattctcttaggacctttttcttcaccttggttgcaggctgttccgatcctgttttcattggcctctaccgaacatcttttgtaaggtttaaaccctgttggacgagtctttagctttcctggtccaagacctatgattagcagtccctcctcctcattgttatctttgacaaatagcagatttttctgcaccccatcacaattagaactgcatttcttgctttcaaggtcttcatcttt

SEQ ID NO: 5865 - DNA, 412 bp, Glycine max
  Clone ID: jC-gmfl02220075g03a1
ctctctccaagttcatggattcttcaaactccaaaggagcatcacagaggctccaggacttggctcaacggctccgcctgtacaaacccccaccattccctgaagacatcttggatcagatcatggaagagaagggagataaggtcgtctcagaagtgagttacacgaaatcagccaccccaattgctcaaaacacagcaaaaatcggatacaagagagctgctgtttcgatctgcatctttgaaggggatgctggggatctgagagtgatactcactaagcgctcttccaagctttccacttactctgggcaagaggccttgcctggagggaaagcggaggagggggatccggatgacggggacacttgaaaaagagaggcaatggaggagattgggttggatcctgaact

SEQ ID NO: 5866 - DNA, 166 bp, Glycine max
  Clone ID: jC-gmfl02220075g03d1
ataacatacaaattcatataacaacaggttgggactccagtttacattcagtaatttagtgctacaagaggaaaccattcacttaatcaaacaaaatgatgaaccaatcctcatcttctatcgcccctcctgccatggacctcaaaggggggggggggggggggga

SEQ ID NO: 5867 - DNA, 448 bp, Glycine max
  Clone ID: jC-gmfl02220075g04a1
aatttctctctgcttcatttcttttcattctctaagggaattcaaactcaacatagagtgcaaccatgccaccctctctggccacaggtgtcatcatgagctcgaaactgcaaggatcaaaggatagctgggtaatattgatgcaaacactggtgatcctcaagtaggaagggacactgatcagtttcttgtagatattcaagaagcgacactgattatgctcagtgagatcagaaaaggagagacttgcacccggaggattcaacttcgatgcgaaattgcggagtgagagcacagatgttgaagacttggtcatagcccacattgttggaatggataccctggcccgaggcctgaagaaagctgccaagttgattgaggaaggttctcttgctgagcttgtgcgcaagcggtatcagagttttgacactgaaataggggctcaaat

SEQ ID NO: 5868 - DNA, 244 bp, Glycine max
  unsure (1)..(244): unsure at all n locations
  Clone ID: jC-gmfl02220075g04d1
aataacatacaaattcatataacaacaggttgggactccagtttacatccagtcatttagtgctacaagaggaaaccattcacttaatcaaacaaaatgatgaaccaatcctcatcttctatcgcccctcctgccatggacctcaaagggggggggggggggggggaatatnctatatacgcaattcattgatcctcaactacaaatattttttttcaaaatgccaaccttgcctatatcaacg

SEQ ID NO: 5869 - DNA, 582 bp, Glycine max
  unsure (1)..(582): unsure at all n locations
  Clone ID: jC-gmfl02220075g05a1
gaanaaacggcctgtgctcngataccnttgnnnntttttnnnnnaanncccnnnnnnnnnnnnnnnnnnnnnnnnnnnnnnnnnntnnnntnnttttttttttttntttttttttttttggggtttttttttttttcttttttttttttttttttttttgttttttatgaggacacataaacccggcggtgacattcgggttgttcctaggacgcaaggtgtcgttgataagggcgttgttgtacatggtggcacagtgtgccggtgctatctgtggtactggattggccaaggggttccaaaaagcatactacaacaggtatggaggtggtgccaactctgttgctgatggctacaacaatggtactgctttgggtgctgagattattggtaccttcgttcttgtctacactgtcttctctgccactgaccctaagaggaacgctagggattcccatgttcctgtactggcgccacttcctattggatttgccgtgttcatggttcacttggctacaatcccaattactggtactggcattaacccagcaaggagtttcggagcagctgtaatctacaacg

SEQ ID NO: 5870 - DNA, 427 bp, Glycine max
  Clone ID: jC-gmfl02220075g05d1
gcacacaatgtaaaatctatggctgagcttaatttggacacacatctcgatcatattcaacaaatcaagaccaattctgccaaaatctaaaacaaacggacactttacgaaaaataattaccgaaaaataatgtcatgtcagtgtgaagaccaagtctttataaggatttcttgggcagatggagacatcatgatgcatgcaagcatcactatgcgagagagaatccaacaaacctgacacctagctttttctatatctttcattatcctcggggaatcatctctaaatccatcatcctttaacttgtgcagattcacatcattgcagtaaaccggcttccttgagagcagctttatattcttaacactttgtgctcgccctcagttacacgagtgccaaatggtctcgatctcgactgagccttta

SEQ ID NO: 5871 - DNA, 446 bp, Glycine max
  Clone ID: jC-gmfl02220075g06d1
gcatggaaaaaacatggcaaagcaactaccatcattcaataagtaaatgttttacacaaatcaactcatgaacaatgtacataactaattcagccaaacgtcgtttcttgccactggcacagatccgaccaatcatatgcttgtcttgaactactgcagcattttgcaataaatctattagcagagaatcacaatgcaattctttttttcttcttcctttttttgttttggagatctgtacaaatactgagctgtcaggagaatatgggcttcattcacaaaggttcttggcttctgaaattctataattcgttcttgcttattagtggtgggtgtgactgaaactacaccaatgaggaacaatgtagcaattgagttgaaatcataaagatcacccacagattgtaactctccaagagccaacccagccttgacagtgacataag

SEQ ID NO: 5872 - DNA, 629 bp, Glycine max
  unsure (1)..(629): unsure at all n locations
  Clone ID: jC-gmfl02220075g07a1
tgggaanacctgcgcggtcggtccgannccntttnnnnnnttnnnnnnnnnnnnncnnnnnnnnnnnnnnnnnnnnnnnnnnnnnnnnnnnnnnnnnnnnnnnnnntttttntntnnntnnnnnnntntntnntttttttggggttttttttttgttttgtggcctatctncttgtttgataagaggttcacgaggaattgaagaagccttattgaaacacttgggagtgaagcgcaatgaagtaacaccagatggtttgttttctgttggagaaatggaatgcatgggatgctgtgtgaatgctcctatgattacagtggctgattattcaaatggatcagagggatatacttataattactttgaagatgtaaccccagagaaagtagttgagatagtagaaaagctgagaaagggtgagaagccaccgcacggcacccaaaatccccgccgaattaagagtggacctgaaggagggaacactactttgttaagtgagcccaagcctcctccctgccgtgacctggattcctgctgaagtgtgatatactttttgccttcaataatgtgaggcttgcatgtgttggagcttgtcttaattgaaacattgtcagattgtttgatgctc

SEQ ID NO: 5873 - DNA, 540 bp, Glycine max
  Clone ID: jC-gmfl02220075g07d1
ggtacatataactgtatattgctgatttcattctttcttttcatgtaaagattcgtaatacacaagcctgcttcagaagtagcaggaagtttggacaaaagattcaaaaaggaaaagtaatacacaaagtgtgcaaaatatatttcaaaagaaatacaaaatctttaatcacattcgcagggtggagagaattctaggacagcctcagtgccatttcatgaagaagagctcgcttttgtgaagcattaattacattatgtgtttcagcattctcaagcacttcagcaattattgcagatgcagggccaaggggttcctcagccaccctcttcaacatgaaagcctggccatgatgggttatgttaattgtgcagggttgctgaaaccaaggctctccatcaatttgaacaggaaacatggcaaacaattgtatcttaattgactgtccttgtgcaagtcttcgagctcgagaaagcccgactgaaagtttccgaggtgccatgttccagatatgctcacaacttcaagtatcttatcatg

SEQ ID NO: 5874 - DNA, 145 bp, Glycine max
  unsure (1)..(145): unsure at all n locations
  Clone ID: jC-gmfl02220075g08a1
agaagaacgtaaaaaaatagaaagaaaaagaataataaaaaaaaaaaaaaaaaatgataaaagtaaaaaggaaaaaaaaaaaaaaaaaataaataaaaaaaattaatattataataaaagannaaagaaagaatcattagaagac

SEQ ID NO: 5875 - DNA, 428 bp, Glycine max
  Clone ID: jC-gmfl02220075g08d1
acaccggttctaggaaatgagaagatatacatcggatacaaacatctttcaaccaacaagtgacttttagcagtttttatccatcagaacttcttctaccaatcataacactgatcaatgattacagaagccccaaactctcgacaaaacacattgcaaatatagttacttagttacacacacgatacctgtgcagagcacaaaggcacatatcctgtcctacatgagacgctatacaattgggttgtcagttaccatctctaaaccacacagtacgcttttgcacaagctcattgagaaaatcatcaggtttctcaagggcgacatttggcattaccacaacatgtgcaacgtctgcttggcacgcatgctgccacttgtgcacaaacccttcatcgtgaggcctctcaaacacaacggtgctgctg

SEQ ID NO: 5876 - DNA, 571 bp, Glycine max
  unsure (1)..(571): unsure at all n locations
  Clone ID: jC-gmfl02220075g09a1
aataataataatataattttaatataataaaagtgaaatatataaagtaaatatatgaatataaataattttaaaatatttatatcaaatatataataattataattacaggantagggtgtagagttgaaacacnnnnnnnttnnnannnnccccnnnnnnnannnntnnnnnnntnncnacnncaactaancaaaacatttattttaaatttaaatttataataaggaagggaaatagaataaaaggaaacataaaatttaaggggataaaatttaaccttttgttattgcatgcgatgaatacttgtttaaatatgggagagtataattaatgttagtagaaacctataaaaaaatatatacgcagtaaaaagaaaaaaggagtgcattgaaaatgaaggacattgatatttatagtagagtgtttcatatctcaggttgatcaggtgatgcctgccgatgttactccttataattgctgatacttgagaaatttagttaagagatgtaagataaccttaatttatgtagaaaataatgagatgaaaatatgaatacaacctttaacg

SEQ ID NO: 5877 - DNA, 427 bp, Glycine max
  Clone ID: jC-gmfl02220075g09d1
aaagaaaatctcaaactaatcgtcaattggttctattgattggcaaccttctcatatttcttacagatagtaaaatttaaattgtaatcttacatggatgaatgccaaagaatatatagtgatatttaaaaacaatctcataaataatatttgaatgagggattcaaaatttaataggccagtactatacaaagctggatatatgcctcctttatttgttttgggccttactgcagtccatgttttccatgcgctctctcttgagagcagtgaacttggcagctatgtcatcatagtctggcaacttaggatgaacatgactaggatgtggagaaggacaaaaatatgtccttaacatcttatctttggtggttctgtgcctctcttggggcatggtcatggcccttgaataggaagcttctgtttc

SEQ ID NO: 5878 - DNA, 565 bp, Glycine max
  unsure (1)..(565): unsure at all n locations
  Clone ID: jC-gmfl02220075g10a1
nctcccgctcgataccctngtaaanccctaatanaananntntnnantgaggaanaaaaaccccccnaanacgtgncanaaactatttctcaaacgantacactctcttcataactaataatattcaccctttttttatatctacctaatcaccacatcatccctcttatcggggggtatttactatcaactatttcctctaatattcaactactacaatcttcaattccacttcgaacactataaaaacacgatcactcacccaaatgatgtcattcgaagaccccccaactcttgaacttgcatgctcttcttagaatactagaatatgaacatccacatggagatcataatcaaactaactatcaacttgaaatgacatggggataaccctgtgacggtcaagacatatctaccacaatacaatctaaactggaacacctcgcagacaaacaagcataaatggattatcaagatctccaacaagtccatacactctaccaccccactgcacgaaaaataacataccatggaacattctctatcgggattctatacaaaacca

SEQ ID NO: 5879 - DNA, 308 bp, Glycine max
  Clone ID: jC-gmfl02220075g10d1
ccttaagcgacaatgactaatagggttgaggagatgttgaccccggacgagcgtgccgcccgagatgctcaggatttattgatcgagcgctgggacccagttataaaccacgtataggcggagatcaacgaagtctgtaacaaagaagaaagaatgactatttgtgccggagtacgtgttgaaggctctaggggtttcttgaatttggcgagtacattgaggaagtctatgcggcatttgaacaacacaaggttggtgacaatgcatgacttcttttaaagggtggcaagtggggcaacaaatctgat

SEQ ID NO: 5880 - DNA, 509 bp, Glycine max
  unsure (1)..(509): unsure at all n locations
  Clone ID: jC-gmfl02220075g11a1
cgcnaacactccctctcctttganaccccntnnnnntnttnnnnnnnnnnnccnnnnnnnnnnnnnnnnnnnnnnnnnnnnnnnnnnnnnnnnnnnnnnnnnttttttttttnnttnntttnntttttttttttttggtgtttttttttttttttttntttnttttttttntttttttttttcttntcccttgcttcgtgggtggaggaggcggctaacccgatactaatggtgtctggcgtggaggcggaggtggttcgggtgatcggcgagtgccggcgtgcgttgaagtttgctaggttcgtgagcaggttcggtaagagttaccaaagcgaggaaaagatgaaggagaggtacgagatattctcgcagaatctcaggttcatccgctcccacaacaagaagcgtttgccctatactctctctgttaatcattttgctgattggacttgggaggagttcaaaagacacagactatgagcttgccaaaattgctcttgcactcttaa

SEQ ID NO: 5881 - DNA, 465 bp, Glycine max
  Clone ID: jC-gmfl02220075g11d1
gcaaagacaatgctatcttataactgatatttgaagcgggagcatcaatacaatacaatatgtaactatgaactatcaatatatgatcgttattatgtctgtgatacacacaattaaggccataatatacttatgtgatttacaacaacttctagcttattttatacatcatgccaacccaactaggagcaattttcatcatacaattacacttatctttaatcatcattcatcaatactggcatcagcaatacgctctaaactctgaagcatgacaaggtggtagtcaccagggaccatattgttatgcaatttatgccacaattggataagatgcacaagttgcaacacacacatgttcttccccaattccatcttgaagtagccattttcaccccagctttctccccatgaattttttatgagccaatatgggacaccattttcaactccatatccaacagc

SEQ ID NO: 5882 - DNA, 529 bp, Glycine max
  unsure (1)..(529): unsure at all n locations
  Clone ID: jC-gmfl02220075g12a1
tgtacctggcgtcgtcgataccannnnnnntttttnnngcacccccccctacccccnannnnnnnntcngannanccccnncacccccttaaatttttttccaatctcctttaaatttctaataatggggaaagacgttgagcaggtcacagagcaaggtgaatactccgcgaaggactaccatgaccctcctccggcaccgttgatcgacccagatgagctcacaaagtggtccttgtacagagccgccatagctgagttcatagcaacactcctttttctttacatcaccgtgttgaccattattggctacaagagacagagtgacaccaaaatccccggtaacaccgaatgtgacggcgttggcattttgggcatcgctagggccttcggcggcatgatcttcatccttgtttactgcactgccggaatctgtgggggacacatcaaccctgccgtgacattcgggttgttccttggacgcaaggtgtctttggtgagggcgatgttgtacatgatagcacagtgt

SEQ ID NO: 5883 - DNA, 335 bp, Glycine max
  Clone ID: jC-gmfl02220075g12d1
gttgtggttgttttttttttttttattttgttattggggacaagccccccccaattttttaaagggggacccccgcagaataaacgccgggaaaaaaaaaagttataaacaacagggggtaccaaatccccttcgtcataaaaacctttttatgaacaaatttaaaaacccacgggctttggtttttcccccaaacccacgggtactggcaaaagccaaaagaggggggctctgaaacaagactaggcggaaaacacctttttttattgggggacccaagccccaccacatttggtttaggggggggagaaacttcagcttttttgtttttaaaa

SEQ ID NO: 5884 - DNA, 429 bp, Glycine max
  Clone ID: jC-gmfl02220075h01a1
atcgttttggaagaacaagggcatgtttgtaaaaacatactaatcaaattaaacagcgaagaagagtttcaaatttattgcttcgaatctccagcttcgtcagggaaggaaaacagcataacgtgaggtctcgggggaaccaaaaactgagaaattctgaagccactaggccttttaaaaaccaaactaaggaagacggtttagacagagtgtacttcaagctaagaaaatggaaagaggggttgtggctgagaacaacaacatcaacaactatgaatccaaagcaacttccaccatcaccattaaaggcattctcagccttctaatggaaagcattgatgatgagaattgagatggaggtggaagcaagaagagagttatttctctaggtatgggagacccaactctcaccacattggtccacacacc

SEQ ID NO: 5885 - DNA, 386 bp, Glycine max
  Clone ID: jC-gmfl02220075h01d1
ccccccacacacccggggaggggggcccccccttttggaaaaaaacccccaaaaacaaaaaccccccccaaaaaaaaaaaaaaggggggggggaaaaaaaccccccccccttaatttcccccgggaacaaaaaggggggccccccccccccccccataaaaagaaatttttttcccggggaaaaccccccacttaaaaccccccccccaattttttcataaggggaacagggggcaaaaaaaaaaaatatttttaacccccaacccgaaaccccccccaaaaaaatccccctttttaaaccccccccaacaaaaaaaaaaaggggccccccggggcaaaaaaaaaaccacccccctggggggacaccttttttgagtaaacccccc

SEQ ID NO: 5886 - DNA, 470 bp, Glycine max
  Clone ID: jC-gmfl02220075h02d1
aagcttatattaataagtaaaggcgaataatgtcttcttcaagaagcgccccagaagaaatcttatgtgtcaaacctgagtacactctatcaagcacacggggatcagcacagaaaatagttggtttctagttccccagcatcatcaattaacaatttgacatccccacggcagaaacctattgaagcaccatgccatatgaatatctcctcaatgaccctatcaaaagaatgtgcgagtggaaggtatgatatgtatacatccttctcagtcaattgttcatttacactctccaacaatcgcttaaccccagctaagagagtaataatactctcatttgatatcaacactcccttggggtcaccggtagttccactagtatacattattgtacagatgtcactccttttcttaataggaagatcaaagctctgagtttgacccactagtaaaaattcatcccatgaata

SEQ ID NO: 5887 - DNA, 528 bp, Glycine max
  Clone ID: jC-gmfl02220075h03d1
gctctcgtatctttattagtattggatggtgattgactatgcaatagacattgctccatctgatgtaattatttggttttttattcatttgcataaaactcctttcttttagttctttaaaaaaagtacattcagaggaatgtattaagagattgaaatgctcgatctattttcattgaatccaaagcaaaatagaatatctaaaaccaaacttgactagacaacaagaatcagtagggctacttacactgttgtcttttgtcagcgttgataccataccactgctgaacttgaattctctctttcatccaattattgattgccagatctgcgagacattacaagtgatagtgtccagttccacacgtgtgacaaaaaacccatatgttgttgctgctctacaaattttgtctcaacaacttcactgcctactaatctttgcttttttcccccacagcaacctccttcgaacaacaattttttcttttctaaaaggatcagtgaatcgaatatcctccatgctacttt

SEQ ID NO: 5888 - DNA, 449 bp, Glycine max
  unsure (1)..(449): unsure at all n locations
  Clone ID: jC-gmfl02220075h04a1
ataagagagcccgtcattttgaagttgatttgtctgctttccggaaagtacttgagatcgacaaagaacggatgattgcaagagttgagcccctagtcaacatgggtcagatcagcagggtgactgtacccatgaatctttcccttgctgtagttgcagagcttgatgatctaactgtcggaggtctcattaacggctatggtatagaaggaagctcccacaaatatggtttgttcgctgatactagtagaggcctatgaaattattttggctgatggcactcttgggagagccaccaaagacaatgagtactctgatctatactatgccattccgagggctcagggaacactcggccttcttgttgctgctgagatcaagcttatacccgntaaggagtacatgaagctaacctataaacctgttggtggcaccctgcaagatcttgc

SEQ ID NO: 5889 - DNA, 366 bp, Glycine max
  Clone ID: jC-gmfl02220075h04d1
atgaaaagtgattttcacataacaaattaaagacattggaaacggcaaaagagtttcagcaaccgaggctatccgaagccagatatccaaaattacaaaaggcaaaacgataaatacggaatgaatctgccataaaattctatcataagaagaatcaaaactcaaaagcagcactacccgtgagaacaactgctgcatatgtgggaaacgagatgcaatagaaggctactaccatgagatgaatcaaaagtcaaaattagacctactggtgagaacacacttctgcatatgcactatgaaggagcgcttgctatgcttatcgtaccttcttatcagtggtactgccgtacattgataggtaggata

SEQ ID NO: 5890 - DNA, 528 bp, Glycine max
  unsure (1)..(528): unsure at all n locations
  Clone ID: jC-gmfl02220075h05a1
ggggnncccccatctcccttgaaacccctgnnnnnttttnnnnnnnncccnnnnnnnnnnnnnnnnnnnnnnnnnnnnnnnnnnnnnnnttttttttnnttttnttttttttttttttggggttttttttgtttttttctttttttcttttttttttttttttttttgtgtattcaacaactatggacctggttctaacactagcaatagagtaacatggcctggttactctctgttgaatgctactcaagcttggaacttcacagtccttaattttacattgggaaatacttggcttcctgacacagatataccttacactgaaggactactaagatagacagctgaaagcttaaattgaaaaaaataaatttgattcattatttgttagatgtaatgtaactacatgattttccttttaaaggaatagcatccaaaagggatgagaggcattgatgttcttatgaaaattcaagtcttaataagaatatgtacaagtttgcagaaataatatgctttaaagcaatt

SEQ ID NO: 5891 - DNA, 499 bp, Glycine max
  Clone ID: jC-gmfl02220075h05d1
gcagaaataggccatgcaacgccactctttattatatctgtcatcatatttacatacagaaaatcaaggtgaactccacacaatattaatattttcactttacagaaagtgcagtaatatataaacacgtagaccattgtattgcatccatcataccggaatgaaggaaatttacacactactaaattttccggatgacttgaaaaaactaatcatagggtcataaagatcttgttttgcttgcaagcttaaaatgaagtcaacatgaccatagttttcaagataaaccacttccggtgtggatggcaattccttgagtgtgtgctggaaatcagttatatctgccaaagcatcatttccaccataggccatccacagaggcaatgatttgggtatgcgactaaggtcgaactttggtggattgaacttgccgtactctatcagattttttagctttccataatcatacttggagtaagtacctttgcggatcatctgg

SEQ ID NO: 5892 - DNA, 535 bp, Glycine max
  Clone ID: jC-gmfl02220075h06d1
gcagaaataggccatgcaacgccactctttattatatctgtcatcatatttacatacagaaaatcaaggtgaactccacacaatattaatattttcactttacagaaagtgcagtaatatataaacacgtagaccattgtattgcatccatcataccggaatgaaggaaatttacacactactaaattttccggatgacttgaaaaaactaatcatagggtcataaagatcttgttttgcttgcaagcttaaaatgaagtcaacatgaccatagttttcaagataaaccacttccggtgtggatggcaattccttgagtgtgtgctggaaatcagttatatctgccaaagcatcatttccaccataggccatccacagaggcaatgatttgggtatgcgactaaggtcgaattttggtggattgaacttgccgtactctatcagattttttagctttccataatcatacttggagtaggtacctctgcggatcatctggaaaaggtgtttcaagtttttggaggatgatgggtga

SEQ ID NO: 5893 - DNA, 695 bp, Glycine max
  unsure (1)..(695): unsure at all n locations
  Clone ID: jC-gmfl02220075h07a1
caaaaaaaaaacataaaaaatataacataaaaaaacaaacaaaaaatacaaaaaaacaaaaataaaaaacaaaataatccaaaaataataagannnccgggcgaaagtagaaaccaaannannnttnnnnnnnccnccccccnncccnnnnnncncccccccaaaaacaaaacaaacaacccattttcaaaacaaaaaaaaaccacaaacggggagaattcaaattcttcaccaccaccatacaagtacccatcaccaccacccccagtttacaaatacaagtctcctcctcctcctgtacattcaccacctcccacagtttacatctatgcatcccctcctcctccatatcactactaggttatttctgaagaatataagccaataaaaaacgttgttgatagcaggaagaagcacttcgcaattgcacaaggaaaacaacggaagccaagttaacgcgcattttgtcacataagaaaaacgaagtgacaatccctttcttcttcggatgtattgttcatgaattattaattactttggtactagacagttgaatggcactgcttatgactctgtcgttgaatgatatcacatgaatgcattttggaatgcaacctgctgaacatgcaaggtgttgcgaagccaattttataatgaataaaatcaaatatatgctttgtataantattgaaaaa

SEQ ID NO: 5894 - DNA, 454 bp, Glycine max
  Clone ID: jC-gmfl02220075h07d1
aataaaacgacatggtattggcaagaaaacgcgaaaaccacgaccacaggatactaacgcacatgtacgtaacacttaaaaatacatacacaaattaacatgggcatgtctgttgagatggacgtcaccacaaatatagtaaacataaattaaataaacatagtgacgaggatatacagattattccaatccaccatgtataagcaaattaattaagaacacaattaaatgaagcatgtctctcgtagctcaaatagcttggccagaattacaggtttgaggagctcctgaaagaccctagagcctttgctgcttgggccctcaacacggactggtggtagaatgcagcaagagcagcaccgatgaagggtccaacccagaagatccactggtcatcccaagccttctcgttgttgaatatgacagcaggcccaaggcttctagctgggttgat

SEQ ID NO: 5895 - DNA, 615 bp, Glycine max
  unsure (1)..(615): unsure at all n locations
  Clone ID: jC-gmfl02220075h08a1
gaaaacgccgtgtcganccatnnnnttnnnnnnnccnnnnnnnnnnnnnnnnnnnnnnnnnnnnnnnnnnnnnntttttnntnnttttttttttttttttttttgggggttttttggttttgcctatgataatactgttggtggaggtgatgatgctttcaacaccttcttcagtgaaactggggctggaaagcacgtgcctcgtgcgatttttgtagatctcgagcctactgtgattgatgaagttaggactgggacataccgccaactatttcatcctgagcagctcattagcggaaaggaggatgctgcaaacaactttgcccgtggccactataccattggaaaggagattgttgaactttgcttggatcgcatcagaaagcttgctgacaactgcactggtctccaaggttttctggttttcaatgctgtgggtgggggcactggctctggtcttggttcccttttgctggaacgtctttcagtggactatggcaagaagtccaagctcggtttcactgtctatccttcaccccaagatataacctctgttgttgagccttacaacagtgtcctctccactcattcccttcttgagcacactgatgtggc

SEQ ID NO: 5896 - DNA, 452 bp, Glycine max
  Clone ID: jC-gmfl02220075h08d1
aataaaactacatggtattggcaagaaaacgcgaaaaccacgaccacaggatactaacgcacatgtacgtaacacttaaaaatacatacacaaattaacatgggcatgtctgatgagatggacgtcaccacacatttagtgcacataaattaaataagcatcgtgacgaggatatacagattattccgatccaccatgtataagcaaattaattaagaacacggttaaatgaagcatgtctcttgtttcttagatagcttggccataattacaggtttgaggagctcctggaagaccctatagcctttgctgttagggccctcaacacggactggtggtagaatgcaacaagagcaagaccgatgaagggtacaacccagaagatgcactggtcatcccaagccttctcgttcgtgaatatgacagcaggcccaaagcttctagctgggttg

SEQ ID NO: 5897 - DNA, 286 bp, Glycine max
  unsure (1)..(286): unsure at all n locations
  Clone ID: jC-gmfl02220075h09a1
acaaccaccaaaatactaacaattaaaaaaaacaacacaaacaactaccataatcaaacaaacaactattaccaaaacttaacaccaacccacaacccacccaacaaacaccttttnacaatccccccccttttaaaaanncnnaanannanaannaaaaaannaaannaanaaaaaaaaaanaaaaaaaaaaaaaaaaaaaaaaaaaaattaaaaaaaaaaaaaaaaaaanaanaaaagggggaaaaaaaaaaaaaaaannacaaaaaaaaaaaaaaaaaaaaca

SEQ ID NO: 5898 - DNA, 415 bp, Glycine max
  Clone ID: jC-gmfl02220075h09d1
gagcatagaatgcatataactcggtgataaaacaaaggctttgatgatcatcatataataaaaaagtgatatgataaatatagttgggagtgacagccaacaggaacggaggaagagatccgtgatctggctgatagaaaaaagacacttttatactaaaaaaagacagaaggcaaggcagtgaaaagagtttaccgtacagattctaattctacacgaggtgaatatgaaacagcagcccccttttaaaagtttttttttttttttttataaaaagtaaacgggcttttttggtcgatcgagacaaatcttcacaataattttgccccatggcgctccaggtaagaatcacagttcgaccgattcgattcttcacctttttcccctaacaatcccacagaatcgctaaacatta

SEQ ID NO: 5899 - DNA, 556 bp, Glycine max
  unsure (1)..(556): unsure at all n locations
  Clone ID: jC-gmfl02220075h10a1
ggaaaaactcctctcgcttgtatccaacgnnnnntttnngggnaaancccnnnnnnnnnnnnnnnnnnnnnggntnnnnntnnnnnnnnnnnnnnnnnntttttttnnnnnnnnnnnnnnnnnnnnnnnntntnggggggtttntttttttatntttnttttccttgttttccctttggttttttntctttgtatntttgataaaatttactaggcccaccccagctgaaacaactgatgtagctaatgcaattcttgatggaacacattgtgtgatgcttaatggtgaaagtgctgctggggcatacccagaacttgctagaaaaatcatggctcgcatttgcattgaagcacaatcatcccttgactatggtgccatcttcaaagagatgataaggtctaccccattgcctatgagtccattggagagccttgcatcatctgctgtccgcacagcaaacaaggccaaagcaaaactcattgtcgtgctgacacgtggcgggtctacagccaagttagttgacaagtataggccagcggttccaatattgtcggt

SEQ ID NO: 5900 - DNA, 531 bp, Glycine max
  Clone ID: jC-gmfl02220075h10d1
aatcattaagcttaacaactttattcaaaaaaataacaagcagcgtgtacaagagatcattattaacttactgtggcacctaatttctgtgtttaaaagtgtctatctgattgtatcaagctgacttcatgaaatagagattaacaatccatttgctgcagtcacttcttaagcagcattttttgattcaagtgttctgtgaataataattgcactctactttctataaaaacttcgatcaactaatgaatccaacacttcgacacgtacagaagaaagaatatttttcatggagatccctcatttccatttgtgaggcatgatatcagggtgaagtcccaaaacatgctctggcataaaatcatggcgtgttagaatcccaacaactggaggtctcccttggctctttggaacaacacacatgtgcctgagtccatgttgtcggaaaagaatagcagctttggctagtgacattgtctcaccacagtgtaaggagatgcattagttatgggatggagatcaacatacata

SEQ ID NO: 5901 - DNA, 626 bp, Glycine max
  unsure (1)..(626): unsure at all n locations
  Clone ID: jC-gmfl02220075h11a1
tgcccnaactcctactactttgtaaccccnntnnnnnntntttnnnnnnnnnnnccccnnnnnnnnnnnnntnnnnnnnnnntnnnnnntnnnnntntnnntnnnntnnntttttttttttttntnnttnnnttttntttnntttttttttttggggtttttttttnttntttnntttttttttttttnnttttttttttcctaatttactcctcttggcatcttgtgttgtgtccctcttttaagctatttccttctcttaacacaattggttgtgccaattgccatagtcaccaaccaattaacaaaggtatatatatcatcatatcatcaccaaatgaaaaatattgggttgttttttcttgtggtggtggctacttttgtggtggcagccacagctggtagcttttaccaagactttgaaataacgtggggtggtgagcgtgccaaaatctatgagaatggaaaccttctcacactctcccttgacagagcctctggctctggctttcgttccaaaaaagagtacttgttcggaaaaattgacatgcagctcaagcttgtgcctggtaactctgctggaacagtaactgcctattatttatcttctctggggcctactcatg

SEQ ID NO: 5902 - DNA, 419 bp, Glycine max
  Clone ID: jC-gmfl02220075h11d1
cgaataataaaactccaacaattttattaatgaaaatactttacaatttcagcacatatacactgccatgaatataattttgcacgctataattatctttcgccacaaacaatggagtagtgctcaacaaagcacaaaccaacaataataacagttttagttgcattaatttacacaagaaagtaaattaacgtaataggcaacacatgtgtgtcacgttcatgaggatcattttataatgatatgcaacattgaattaaatattctcatgcaatggagcattctggaggaaggccttgagggaaacgtctgatatcagtgcaataattgtaaatcatgtaattcttttgcaccaacggatctttgcctgccccgtggcgttcagtgattggccagtggagaagaagtttgggattgaa

SEQ ID NO: 5903 - DNA, 492 bp, Glycine max
  Clone ID: jC-gmfl02220075h12d1
ttgagcattttttttcttcgttattttttttaccacagacttcaataaactggccggaagctaacaccaactataggccaaatcaccaataaatattatttcccgttcttttggcgtgttggccacccactgagcacattggcactcacacatagaagcagagagaggccattggttggttttagagatgggaagcatgcacatagaaaccccagaaacttatagctgatggtagcaaaaacttcgatgatgatggacgagctaaaagaactgggactaggatcactgcaagtgctcatatgataacggctgcgattgggtctggagtgctatctgttgcatgggcacttgcacagatgggttgggtagctggtgctgcagcgctctttgacttctgtttgataacatacttcacctacactcttctcgatgactgttaccgctcacctgaccctgtacatggcaagcgaaactacacatattctgaggttg

SEQ ID NO: 5904 - DNA, 562 bp, Glycine max
  Clone ID: jC-gmfl02220076a02a1
ctccaccactattcccttcaccccaatcacactttccgctattagtgtagaagatgagtacgctggatgcaacaagggctgaacttggtcttcttgttttatatttgggcaaggctgaagcaagggacaaaatatgcagggcaatacaatatggttccaaatttttgagtaatggggaacctggtactgctcagaatgtagacaaaacaaccagcttggcacgaaaagtcttccgtctctttaagtttgtcaatgacctacatgctttgataagtccaacaccacaggggacacccctccccctagctctgttgggaaagtccaagaatgctctactctccactttcttgtttcttgatcaatttgtgtggcttggcagaacaggcatctaccagaataaagagcgcaccgaactaattggccggatatctctttactgttggttgggatcctcggtgtgtgccaccttggttgagcttggggagcttggaagactctctgcatcaatgaagaagttagagaaagatctcaggaacaagaattaatacgatgatgaagcata

SEQ ID NO: 5905 - DNA, 543 bp, Glycine max
  Clone ID: jC-gmfl02220076a03a1
gtcagcttcactgcacaggatttatgtgatcgcaacatgggagtttgtttgagcgcccaaattaaagctgaaagcccatataacactgggttcaattcaaagtatgtgagtacggatggaaatgatttcggcagcacaaacgataaggtttcagcaaactcaattcctcaaactcctcggagtgagggtgagatcttgcggtcatccaatttgaagagctttcccttgtcagaacttaagacggccactagaaatttccgtccagatagcgtgttaggagaaggtggttttggatcagtttttaaggggtggatcgatgagaattcattgactgctaccaaacctggcactggcattgttattgctgataaaagacttaatcaagatggcatccaaggtcacagggagtggttggctgaagtcaactatcttggacagctttctcattctcatctaatgagattgattgtgttttgccctgaagatgaacattgccttctcgtctacgaatttatgccacgtggaagcttggaaaaccatttg

SEQ ID NO: 5906 - DNA, 505 bp, Glycine max
  Clone ID: jC-gmfl02220076a03d1
gaatacagcacaagcctttaaaatgtactactatttggtatgtttgatgtagaagtcacataaggcaactaggtgttacaaaatagactagggaaccacagcaccctaatatagacaacaagaacaaaaatgagctaatcagagctatcatacaaatataatgtacctgccttcgcatctagtttagtagttacaaacacttaaaacagaactccgaaaatattaattggtggactagcaatactgaatacattatgtgaaataagatatgtacaatactagagtgcaataggctaatagctactgaggtgactgagttggtggatgagatcaccagcaacagatgcatgatgataagtttgcaatatcaagtatagagaggggatgcagaaggccggggataagctgtgggagtctccatagggctaatatcatcggcacttcttctacgaactcgagatccattaacagaaggattttgatagcctctattcacatcagcact

SEQ ID NO: 5907 - DNA, 568 bp, Glycine max
  Clone ID: jC-gmfl02220076a04a1
cacaagacattcattcttaatttcttatccttatactaatgtcatcgacagcagaagcacccatccatggggatatcttagaggccatattctcgcacgtgccactcatccaccttgtgccggcctctcacgtgtcaaattcctggaagcgtgcggtctcctcctccctcgctcacgtcagacccatcaagccatggctcatagtcctcacccagagcctccgccactcgcacgtgacaactctccacgcctacgacccccgctcgcacgtgtggctccaaataaaaaacaccgcacgttcccacgcttcccccgtgcgatcctcccactcgacgctgttctacgcgctcaccccatccgagttcagcttctccctcgacgcgctgcacctgaaatggcactacgcgccctccccgcgcgtgtggcgcaccaatcccgtggttgcgcgcgtgggatcgcgcgtggtggtggctggcggcgcgtgcgagttcgaggacgatccgctcgcggtggagatgtacgacgtatatagccaagcctgggatgcgtgtcccttcatgccggcgct

SEQ ID NO: 5908 - DNA, 559 bp, Glycine max
  Clone ID: jC-gmfl02220076a05a1
caaaaccctcttttttctctctcttgcaaaacctaattttcatttcttccctcaaatttcaaaatgcgtgagatccttcacatccagggtggccaatgcggcaaccagatcggcgccaagttctgggaggtggtttgcgcggagcacgggatcgaccctaccggaaggtacggtggggactcggagttgcagctcgagaggatcaatgtctactacaacgaggccagttgcggtcggttcgtgccgcgcgcggttctcatggacctcgaaccgggcaccatggacagcgtccggtccgggccgtacgggcagatcttcaggcccgacaactttgtgtttgggcagtccggggcagggaacaactgggccaaggggcattacactgagggtgcggaattgattgattccgttctcgatgttgtgcgcaaggaggctgagaactgcgattgcttgcaagggtttcaagtgtgccattcccttgggggaggaacttggatcaggaatgggaaccttgtgattctaagatcagggaagagtccccagatagaatgatgcctac

SEQ ID NO: 5909 - DNA, 523 bp, Glycine max
  unsure (1)..(523): unsure at all n locations
  Clone ID: jC-gmfl02220076a05d1
cagttcaaatcaggtgttcattcacatgaagctctggttacttgtttcacctgcaccactactcttgcgtttgcttttggagccactagaagacgacggattagtatgccaattcctttttctttgatttatgaaccagttatttatctgctttaattgcagccctgtttcctgcaccaaccttgccttgtcctcttctgttggatatggccatttagaatgtgactgccaccaagcttttaaaagggaagtggtgtcgcctggtagctttcccgctcttctctttcgtaaaatttcttctcttatgtccacaatcttgtccttgtaaccctgttttaactcatgcttcagctcctgcctcacacgctccatcaaagatctttcagtttctgtgggaacaagaggaccaaagctgagactatcagctccatccatgcttccttcgaacaagttggcattactctctgcctgatcttcttcatcgncggacattgttgcacccgttccttcaccgggagataca

SEQ ID NO: 5910 - DNA, 507 bp, Glycine max
  Clone ID: jC-gmfl02220076a06a1
agaagaaacaccctgtacccttcttacatcttctaatttatttttctgaggacttttttatttttatttcttcgtttccaccattttctgttacgccaaactgcgtctgcgacgcgaattgtgattagtgaacggtgaatgttgaggatctgctactttttgaacattgaataaggtctatcagacaaggatttgacagaatttgtcagaatcaaattgttaattctcttctgaagatttcattcgttcgtttgcgatatttgaagatacatttttctctcgaaaaatcgtcgaattcggaactctggactctctgctagatcgtgcctgagtttgtacttgtagccgtggttgcagatcgaagctctgaaatgtcgttattagttggagtttagaaatagattttcatttttcaaagcttcagaactgaaaccagcgagcttgtgtggcgcgtcttaaggcttgggtttttgacggaatcggattagtttaggtaggatggataag

SEQ ID NO: 5911 - DNA, 325 bp, Glycine max
  Clone ID: jC-gmfl02220076a06d1
aactgagataataatggaattatgaatgttcttggtacaagcgaagaagtctttagtgcgattttcaaaccgaaattctataataccatagtaagaactaagaagcaacatgcaagttcagaggtaggaaaagtaaagaatgactgctttcttctcaaataagagtagcgaaatccaaacacaaataagttcatgtaaagagaatttcattggtacatgaactttataatattaaacggggtaagaactcattgtgaccttgaatgaaataaagaaaatgaccttatgcatatttttgcaaataagaagctatcgcctattcact

SEQ ID NO: 5912 - DNA, 480 bp, Glycine max
  Clone ID: jC-gmfl02220076a07a1
tgcagattgtactgtaatcacggttgcccacagaataccaactgtgatggattgcactaaggttcttgccattcgtgaaggagaattggtggagtatgatgagccaatgaacttgatgaagagagaaggatcactgtttggacaacttgtcaaggaatattggtctcatttgcagtctgctgaatcacattaaagctagaaatgtttcatttttattgatgtcaatctagtccaaccctgcccatagactaaacggattggaaaagtagactcactttttcaccaattgatttttcaaaatttcttgatatttttattttcttattctttgagtttgttgttatgaattaatatgttgctggatttgtcgtatttatatattctttcttttttaaattagataaataaactcaatcttgtaacggtcgttttaattccctattaattgttattgttgatgacttacaatggcttttgaac

SEQ ID NO: 5913 - DNA, 516 bp, Glycine max
  Clone ID: jC-gmfl02220076a07d1
caaacacaacagttcatctgctaatttactcattaaatttgggccatttgacccctaacatcggttaaataatgttacaacttacaaatggatcaaaatgaagcacgtagtgcttggtgattcctctaaagtataatatgaatgcaattgacaggacttgaaactgccatgctatacaaataaccaatttttcaaataaggaggaaatgtcatccttaatattattttcacatatacctgttcaacaaattggccagacatagtgtgaagctttcttcctatgatatatgcttttgggtaacctgaatttccaagcctcttgaatttattggaaaaagggtaaattatcagatgaaatcgggttgacctgttgaagttaagcaacgatgccacattcgactgttggggtccaccaacctaggatgggatatcacttcggggatgggaagagtaacatagcgggtggtacataaacctactgtaatgccactatatcctgcaaacgcaccatgaaca

SEQ ID NO: 5914 - DNA, 532 bp, Glycine max
  Clone ID: jC-gmfl02220076a08a1
gattcataggcccaagagcaaagaaactaagaagattttgagcacaatggcatccacacaatgcttcttgcaccaccatgccctcaccactccaaccagagcttcatcacagcgcttagttgtgagcaccaaaccaaaccacattgtttgcaaggcacaaaagcaggttgtccaagagggtgaggacactactaacattgtctctcgcaggttggccctcactgttctcattggtgctgctgctgttggctctaaggttgcacctgctgatgctgcctatggagaagctgccaatgtgtttggaaagccaaagacaaacactgacttccttccatacaatggggatggattcaaactctcaattccctcaaagtggaacccaagcaaagaggttgagtacccaggtcaggttcttagatatgaggacaattttgactcaaccagcaatgttgctgtcatggtcactgcaactgacaagaagtccatcactgactatggttcacctgaggagttcctatctcaggtggattac

SEQ ID NO: 5915 - DNA, 497 bp, Glycine max
  Clone ID: jC-gmfl02220076a08d1
ccaacccctctctttcttttttcgggtctgacccctcatttatgtttttttccaaactaaataaacctgaagcacaggatcatccaaagaggctcagaatcatgccaaagaaatttcaaatttgccatgaaatttcactttccatcattccattccaggctactactcttggcttctctcgtcccgttcccactgtacactaaccaatattattattccctaaaaataaaataaaaaaaggaaaacagcttccttttttttttttctcttcccttgatcatagttcttcataaacctcattttgtgaaaacacttattaggtcataataataataataatattaataattacgaatccaccctgctaatcccaattctttttaacgacacgttcctaaacccttccattatttccataccctgaaaacacattatcccattctgctgttccaagtaactcctaacctacttccttatcatttcatgcatcaccgtca

SEQ ID NO: 5916 - DNA, 414 bp, Glycine max
  Clone ID: jC-gmfl02220076a09a1
gttgccaggcatgccttaggagctgaagatatcattagttttccagatgacaaattaaaccggatgtggcaaccatacaaggaccagaatcttgttgaggaaagccattcaaatgtgacttcttcagacttttggaatcaacctccagtgaaagcattcagttctgcaatgacaactaggcgggggaagacacttgagattcagtggcctcctatgtcccttcccagcacctattactacatttccctctattttcaagacaacagaaatccaagcccttacagctggagaattttcgatgtttctattaatggccacaccttcttttccagcctcaatgccacaactaagggagtcactgtttatgctgcaaaatggccactctcatggcagaccaaaattacattgacccct

SEQ ID NO: 5917 - DNA, 238 bp, Glycine max
  Clone ID: jC-gmfl02220076a10a1
ggatggagagacatagtggaagaaagacagttcgtgttcgcgatcggagactttgaaaccctgcgttgacccattcattcctagcattcaacaatgtctccgttatcgaagctctcgttgctgatactgatggagttcatctcctccgcgagggcctcctccgacgagagagtgagcgaattgctctccctgcaatccagatccaaatcgggcagtatgcggctgaacgaccaatccc

SEQ ID NO: 5918 - DNA, 338 bp, Glycine max
  Clone ID: jC-gmfl02220076a10d1
aaaaaaaaaaaaaataggggggttttttttttttttttaaaaaaaaaaaacccttcccttttttgccccgcccccccccaaaaaaaaaggggggtggtttcaaaaccccccccccttttttttttaccccccctttttttaaaaaaaggggggggggtttttttttcctttaaaaagggggtttcccgggttaaaaaacccccccaccccttttttttaccccgggggaaaaaaaaaaaaaaaagggggggggaaatttttttgtttttttccggaaaaaaatttttttttgccccaaaaaaaaaaaaaaattggttttaaggggggccggcctaaaa

SEQ ID NO: 5919 - DNA, 401 bp, Glycine max
  unsure (1)..(401): unsure at all n locations
  Clone ID: jC-gmfl02220076a11a1
aattttcttccagtttttctaaaataatttttctttagttccctattaaaaaaaaagtacgctctgtttcggaacttgcttgcatagattctatctgtctcaatctctctctttttttttttttctttttctttttctcgcttcatttccaactgtctcgatcagctagggtttgatctaataatctcgatctcgcatgcgcaaccgcaactgtattctttatgcttgccgttcataccgntgctggggtttggaagtttgaagttagcaaaaaatgattaatagaagatgcttttgacaaaaaatagggatgatgaatgcctttcttgttcaatatgttttttgagagaaagaggatgagtgttcatgtattaaccagcttagaattgcccatgtatgaa

SEQ ID NO: 5920 - DNA, 430 bp, Glycine max
  Clone ID: jC-gmfl02220076a12a1
actcaaagtcctactggggctgtttttccatttctagctgtagttttacatctatgaacgagactaaaaaagtaaaataagttttttgagttctctcatgtttgagtacactgccctctctggtccagttgaaaatgaggatggggaagatattcctgaataagaagccgcctgcagaattagttcgattgaatagggagaaagttctgatacacttaaaaaggagtgcagctagaaatgtgaacttgcactggcacaccaagagagtgcagttaaatggtttagcattaaaggcaacagaacatgtgatgtgtgcaagcaagaagttcagaaccttcctgtcactcttctacgagttttaaatggccaaacactctacttgacaaggagtagaagccaacaatacagggtgtggcaaaatattcccatt

SEQ ID NO: 5921 - DNA, 291 bp, Glycine max
  Clone ID: jC-gmfl02220076a12d1
gttaagagccccctcgaaaagaaagggaaaaaatccgagctttcaaaaaaaaaaaaacacttttggatcaaccccctcaggaaaagggatttatctaaaagacctgcttttcttgcccgccaaaacacacacagagggccccagagattttgtgtctcagatacatgcatctatggtggggccctgaggctctcattggagactttttccaacacacaattcttagaaattctaatttgtcacaccaccttttgcaacccattttgctcctggaaggcccttatagagacc

SEQ ID NO: 5922 - DNA, 422 bp, Glycine max
  Clone ID: jC-gmfl02220076b01a1
ttcctttattattattattattataaaataaattctttcatcctttattttcctattttgttttgtgtgctgccgatggatcccaagggctcaaagcagcaacagccacaggaggtggtaccataattgctcaacctgccgcaacatcaataccaacaacaagggaattccaacaacaacaacatgggagagaacaaaccatcagaggttaaggatttccagatagtggtagctgctgagaaggacgagagccagatgcagtaacagttggcaccaaagaggagtttcaacaatgacaggcacaccaaggttgacggcaggaggaggaggatcaggatgactgctctctgtgctgtcagaatctttcagttgaccagagaattgggccacatatctgatggggaaaccattcaatggctcct

SEQ ID NO: 5923 - DNA, 525 bp, Glycine max
  unsure (1)..(525): unsure at all n locations
  Clone ID: jC-gmfl02220076b01d1
ccacacaaagattaaaatttcccagatgataaacgtactaaataccagatccaatatgaaatttgacaaatatgattatgaaactatatcttcaaattcacaaaacaaaccgatctcagcactccaccctgtcctagagaagaacaaaataatcaacacacctctgaattaaacaatagttttaaggccagaccaaagcagccaagccatctggccatgcaattccacctgtatatggagacttgagtactggggagaaggaacaataaggggctaaaccaaatccagctttctattgaattctctgagacacctttttcttttcctcacagtctcccaattatactacaatacaaaagccattgtagaaacctcagccagcatctgcacaatgatgcttctttcttttttcttttcatccaaatccataataaaactctactactgtcctcctgagccttgagaatcatccttagcaggagtttgctgatgctgnntgtgctgatgctgatgctgttgatgcac

SEQ ID NO: 5924 - DNA, 426 bp, Glycine max
  Clone ID: jC-gmfl02220076b02a1
aagaaaatcctcaattttctgagcagttttacactctctctctgtctctcaaaaattcttagttcgcatagaaaatatgaatcatgtagaggcacgcgcatgtcgacgatcaccttctgtgtgacattgaaggtgaccacctcactcacgctgatatcatcggccaagacggcagcgtttgggctcagagttccgacttacgtaagtcaaacctgaggagataactgccatcatgaatgactttaatgagcctgcatcacttgctccaactggattgtatctgggtggcaccaaatatatggtcatccaaagtgaacccggttctgtcattcgagggaagaaaggtcctggtcgtgttactgggataaagaccggtgccgtcttgatcattggcatttatgatgaaccaatgacttcagggcaatg

SEQ ID NO: 5925 - DNA, 516 bp, Glycine max
  unsure (1)..(516): unsure at all n locations
  Clone ID: jC-gmfl02220076b02d1
gataaatatgccaaccattataccatagcattaaaaatttaaaaccagtgtaatgtatacaggtaccccactaaaaaagtacaaagatagagattatagtcatcatttctcaagcatcaaacactttcttcgcaacacgcagatcccgtgacttttcatactcacaagattattacactgcaatcaaagcattccagtccaggtcgatgcaaaaacttgtacagaagccaatgaaatatgcacgataacaagacattaagcaaagattagagaccctgttcaatgagataatcaccaagcctttcaactaccatgttgcattgacctggagtcattggttcatcataaatgccaatgatcaaggccgcaccggtcttcttcacagtaacaccaccaggacccttcttccctcgaatgacagcaccgggttcaccctggatgaccatatattnggtgccaccgagatacaatccagttggagcaagtgatccaggctcattaaagtcattcatgatg

SEQ ID NO: 5926 - DNA, 344 bp, Glycine max
  Clone ID: jC-gmfl02220076b03a1
ggatgattatatcatggtcaagggatgctgcgttggtcccaagaaaagggttattacatggcgccaatccctccttaagcagacttctcgtgttgctctggaggagatcaagctcaagtttatcgacacctcttcaaagttcgggcatggtcgcttccagaccacacaggagaagcagaagttctttggacgcctcaaagcataattttgttaattggatggaaatgctggatttctattcggttaccatatcttataaacatattgtagtgtttactgttttgacattatggatcctcgagtagtgagttatttccccccttaagttggccaaacttttgttg

SEQ ID NO: 5927 - DNA, 326 bp, Glycine max
  Clone ID: jC-gmfl02220076b03d1
aatgggggaaaaaacttactacttggggatccataatgtcaaaacaaaaaacactacaatatgttaataaaatatggtaaccgaatacaaatccagcattaacatccaattaacaaaattatgctttgaggcgtccaaagaacttctgcttctcctgtgtggcctggaagcgaccatgcccaaacttttaaaaggtgtcgataaacttgagcttgatctcctccaaagcaacacgaaaagtctgcttaaggagggattggctcaatgaaataacccttttcttgggaccaacgcagcatcccttgaccatgatataatcatccctt

SEQ ID NO: 5928 - DNA, 477 bp, Glycine max
  Clone ID: jC-gmfl02220076b04a1
ggaaaattaaaccatcaacaacaacagaataaaaaaaaaggagccaaccgaaatggcaaacaaatacactgcgttgttgttggtggtgtgccttatagtcgttgcaagtgttgatgccatatccgatgccaaaagaggatgcatagatgattgccacgctaattcttgcacgctccaatcgatgttgtgcaaaaactattgttgttttgtttgcttaaccgtcaaccgtagagaaacatcagaggttcatactcttggtaatggagcatcaaggaaaatgaaagcgcaaatgattaaagatcctaccgagccaaagcactaaacacttggaacataattagttaattgagatgcagaacatgggaatcgaacgattatccgaagcacggttggcataatgcactgaagattaatatatataaggctctctcaagaacaaggacaaaatattgtattacttaattactatttatacac

SEQ ID NO: 5929 - DNA, 506 bp, Glycine max
  Clone ID: jC-gmfl02220076b05a1
attcttcactcctcctcctccctctcttttccaaacacacatcctcaaccatggcagcggcatcttcagagacaaagtcaccatcatcctcgaacacgcagcttccgctgaaaccaatcccaggcagctacggaatgccgatttttggagcaataagcgacagacacaactacttctaccaccaaggacgcgacaagttcttcgcgacgaggattgaaaaacacaactccaccgtgatccgaaccaacatgcctccggggcccttcatctcctcggaccctcgtgtcgtcgcgttgttggacggtgcctccttcccgatcctcttcgacaacgacaaggtcgagaagctcaacgttctcgacggcaccttcatgccttccaccaagttcaccggcgggttccgcgtctgcgcctaccttgacaccaccgaacccaaccatgcactcattaaacagttcttccttaacgtcctagccaagcgaaaagacttcttttgtccctctgtt

SEQ ID NO: 5930 - DNA, 532 bp, Glycine max
  unsure (1)..(532): unsure at all n locations
  Clone ID: jC-gmfl02220076b06a1
ctcactacatgaaaggccttgttctcctgctggctcattgtattggggcatgcttttcgtacaaagaacaccctttaataaccaagctgatgnactaacatcacacttaaaccagccactaatgcagttttaagcgcttaattagtaggctttggcctatttcttgtcctttcctgagatgaagaatggtggtatcgatccaaacccaaaatcagattcaaattcaatggattggttattgtttcattctgatcacattgtcatatccataaagaagggggggaaaaaaagttagcactttgcagaagcattgcaattattttaagttgcaatagctagctgttagaaatgaaccactactgtgaaagatgttgaatcatacgtacgtgtgttctatcagagaagctgcttttgatcttgtgttactacggtagatgccaaatgagtggaaattgttcttgtttgaatttgctttagtaagaatccctttttcaatttgcagaatctcttgtatttaatggtgtactatata

SEQ ID NO: 5931 - DNA, 473 bp, Glycine max
  Clone ID: jC-gmfl02220076b07a1
ctcttgacatgatctccggtggctccctcgtcggctccgtcgcctccaaggtcccaaggatcggaatcctccctcgtgatgctaaggatgagtcgatgatgaagtggtttgaggtgccggggttcaacatcattcacgcgataaacgcgtgggaggaggacgagggaagaacggtggtgctggtggcgccgaatattctttcgatggagcacgcgctggagagaatggagctagttcacgcgatggtggagaaggttcggatcgagctggacacagggataatcacgcggcaaccggtgtcggcgcggaatctcgatttcgcagttataaaccctgcgttcgtggggaagaagaacaggttcgtttacgcggcggtgggggacccaatgccgaagatctcgggggtggtgaaactcgacgtgtcgaagggggaagagcggacggactgcacggtggggtgcatgatgtacggc

SEQ ID NO: 5932 - DNA, 322 bp, Glycine max
  Clone ID: jC-gmfl02220076b09a1
aagagggccaccatagcccgcctcctctctggccgcaccgataacgccatcaagaatcactggaactcaacgcttaaacgcaagtgcgcgtccttcatgaccggcgatgaagcccctcaagatccgacgtgagcgagtccagcgctgctcccggcgaggtctctgtctctgtctctccttcacaagagtttcgccccgagccggttcggccggttgtcgaaacggcgtcgtctcaagacgacgccgatgccgacgccgaggatgctggacctactacctcgctggcgctgtctcttcccggggaggagtcatcggaaatctc

SEQ ID NO: 5933 - DNA, 461 bp, Glycine max
  unsure (1)..(461): unsure at all n locations
  Clone ID: jC-gmfl02220076b10a1
ctcttatcctatcgcaggtagacctttcatttttggggcccttcattttctctctctctcatgattatcagaggcaaagacctttcatttttgagacccttcatttttttttctctctctctctctctcgtctctctctcgagctgagagtgaaatcctcaaggaggcatttagctcttttaggatcaaaactctcgcattcaatctcatagagagctacaaaatcaaaactgggttcatccacctccaatttcaaacccttccaatcctttttcatgtacaaattccttttgcaccctcttcaaaaccctagactccattgaccccaactttgccggctccgccaagcatttagagcctnctccacgctccaccataatttcccattcccaaaatttctcattctccctttcctctctgaatccttgagcactctcacgcgctcctatattcacctcctg

SEQ ID NO: 5934 - DNA, 533 bp, Glycine max
  Clone ID: jC-gmfl02220076b10d1
atcaataaatcaacaattttcatgtaataaagaaattatacaagtgccatcattttacagaaaatgaaaaataaatacaaatggtaattccttgaaaaagaaaaaaaaaaagtcttacaattatatcctggttaattgtgctaaggggaataaaaaaaaatccaaaacttgcacttgctttgttgctctgatagcacattgcttgcacccgcgcccctttcctgagtatttacctgtggggcgggtcacagctgagaccaggtatcagcagcctgctgataggatcgacagaacatgagcatgagctcctgatttacaattttttaagcaagaacatgagctcttgataggatcaaatgagtacaagcaacgtggcccgacaactttgtgccagatgactgacaactgttcaccatggcaatctactggtggatgcttctgccttaaagagcaaccagttggaaatgaaaaggaccatctccttcctaattttccattccctcaatccagtcatacttagatccacactggga

SEQ ID NO: 5935 - DNA, 334 bp, Glycine max
  Clone ID: jC-gmfl02220076b11a1
tgacttctaggagcccttatttgggttcttagacaactggggtcaggaaaggtggcccaactgccattttgtaaaaggagaactcgctttaatgttttgactattaggaaccttccctgtgaactctttcatggaggtatggtgaacatcatatgtcatcatcactggtttgatcgctattatgataccattcttaaaagactggctttgcctgagaggctcactgactttttggccatgaacagattacttccccatagagatggacatttagcaatcaaagatacttaagatgtccttctcttggacatggctgaagatcttgagctgggct

SEQ ID NO: 5936 - DNA, 386 bp, Glycine max
  Clone ID: jC-gmfl02220076b11d1
gggaaagggttttaaaaaaaaacagggggtgggaaaaaattttgggccccccaaataaacaattttccccagccgggcccaaaaaaaaaaccaaaaaaaaaaagggggggggggggggggggcaaaaaccgggtggaacaaaaaccccccttttttcggggaaaacccctggtgtttttttcccccttaaaaattttttgggcttttccaaaaaccccttggggggaccccccttttcccccgttttgggattaaaaaatccccccaaatggttaaggaccccccagggggttggtttaagggggttgtaaaaaaaaaaaaccttttattggggcaggaaggcaagacccccccctggggaaaataaaaaaaaaaaaaaggggggg

SEQ ID NO: 5937 - DNA, 393 bp, Glycine max
  Clone ID: jC-gmfl02220076b12a1
caaactaggttttaataggtatagagcgtgccaaggactcgttaattttgagcgttaagtgctgcaactaatcagatcccaagaccttggcctaccttgccatacagaaaaaaaaaaagcaaaaaaaaagccaaggttaggagccaacaaaaataaacacaaagcacaagtcatggaaagaataatggttggaagtgcaacaaaggttgctttcaccctcttggccactttcgccattgtcattccatgccttgaagctggcattgctgagtttgacgattttctcaaagcccaagctgaagaagcccataaaattgctctagattcctatgtcccagagccccacgatgtcgcccatgaactcaatttccatgttcatatggcactggaaaa

SEQ ID NO: 5938 - DNA, 399 bp, Glycine max
  Clone ID: jC-gmfl02220076c01a1
gaaaaaacgacattcattcatctatggctacccttattgctcccagcaaccactctccccaagaagacgctgaggctctcagaaaggcttttgaaggatgggggactgatgagaaaactgtcatagtaatattgggtcatagaactgtttatcagaggcagcaaatcagaagagtctatgaggaaattttccaggaggatcttgtgaaacgcctagagtctgagatcaaaggagactttgagaaagccgtgtaccgatggatactagaacctgcagatcgtgatgctgttttggccaatgttgccatcaagaatggcaaaaactacaatgtcattgtggaaatcgccactatcctcttcccggaagagcttttggccgtgagacgtgcttatctcaacc

SEQ ID NO: 5939 - DNA, 57 bp, Glycine max
  Clone ID: jC-gmfl02220076c01d1
atgggtacatttatctcttttttcttataaaaacaaaagacatactgaaataacatt

SEQ ID NO: 5940 - DNA, 502 bp, Glycine max
  Clone ID: jC-gmfl02220076c02a1
gacgcgcggaggatcatggagggattgttgatcggaccacggcttaagatggtggtgttgcatgacggatgacaaaggtacagttttttccttgaattatgagttcaggttcataggtctacaactttggggattttgaggggtcgagtttgtggttaaggtggacagaggtcttcgatattgaatatgtgtctacctctgatttgagtatgggttctagcagcttttcttctaggagttcgacctccttgtgcgaggacaatccgacataacttgctattgaggagaatttggtggatttgggttagatatcgtgcaacgaaagagtgagtggtgacgcacctttaaatgataatgtgacaatcatttgttagccgaaatgacaagtgccagttaaaaagaaagagtactcgccgaatactctactatggtattcatgggttgatggtgaagtgggttccttctatttctgttacaacgatgaagtcaatattcttacctt

SEQ ID NO: 5941 - DNA, 465 bp, Glycine max
  Clone ID: jC-gmfl02220076c02d1
aacataaaagattaaggaatttcattaagaacaaggaaagggatacaattgaatagttacatcataacccatagactagggtgactagtcgctcatgatcagagcacaactcataatcctatatgaaatagacatagacataccaataaggaagaaacaatgatcatgatttgtccttacggggttgtctacacttcacaacttttaaaaccctcaaaagttctcaaattcaaaactaggtaaaaggtactaaagatacaagatacgacccatatttataatttctcaaaaagatgtcaatcagaaaaggcacactatgtccgtgatgaaatccattacgacatgggcaaaaagtcatgacgttgaagctctgggcgttgtggattgactacggcccttatgagttgactacgaccatgatggaatttaccacgaccattgtcagaaagttggtgttgtttggag

SEQ ID NO: 5942 - DNA, 168 bp, Glycine max
  unsure (1)..(168): unsure at all n locations
  Clone ID: jC-gmfl02220076c03d1
ggacctagtgctgactccgtatngnanacgcatattattggcgaacctatctgtcgcgcgcggcggcgcgttaacgttgacgatgacgacggtgatggtgccactgccccggcggagtgaaatcgcggtggctgtaaaggtcgagtaaggccgcgtgggagagtaaaa

SEQ ID NO: 5943 - DNA, 440 bp, Glycine max
  Clone ID: jC-gmfl02220076c04a1
taggaaattttatgtagtgcaattgggttttttaatagtcctgaatatttggtggggtattgggcttctttgaacaagttgaagtttgatttggggaatttaaggtttggggagaggtttatgtttttggatttgtcttgtaagtgcgtgtttgggaaggttcctaacagtgttgatgggcttgagaagttgaatgtttcctataaccatgtttgtggtcagtcttccaagaataagttttcggcatgtgcttttgttggaaatgattgtctctgtggttttcctttgctcaccctgcaacatagcatttgtgtatttagctttgttgctgatgatttcaagtgtttaatttccctttactgctgagttttgcaactaattatgtcttttaataagttaattgttattttaactttaatatttactatatatattaactt

SEQ ID NO: 5944 - DNA, 445 bp, Glycine max
  Clone ID: jC-gmfl02220076c05a1
tattaattggatcctgctttgtgagtttaagggcttcgcttttgtttcttctattccactgcggctactgacgaatctcttatcttcttctgcttcctaaatgtgagttcattcatttgatgttgcaacttatagttttgttttgtttgaaattgaaatagtgaagtaaaatggagtctggagctggaggcctagtgtcgtcgtctgagaaagaaggagcctcgtatacctattgggttaggaaaataacggaagatgcagcgcctttgcctctgcctcgttagctcaacccagaagatcttcctccttcccaatctcaatcttccacgcttgcttcaacttggaatcgcgctgggacatgggaggagaaaagtctaagcaattgggcaactcctagaattaaggagttgcttttctcattagctccattcagttctcctttggc

SEQ ID NO: 5945 - DNA, 590 bp, Glycine max
  Clone ID: jC-gmfl02220076c06a1
ctcgagccgattcggctcgaggcacgctcatcacacgaaaagcagatggtgggcctggcttattgtgatagcaggagtttttgttgtacttatattcggctacttgtgctgcatcatctggagaaaatgcaaaatagaagctgacagaaaaaagaagcagaaggaactactattagaaattggagtcagttctgtggcttgcattgtgtatcacaaaacataaagacacagaaaacgtagcaaggtcaactatgaaatgcaaatatttagctttccaatcattgctgctgcaacaggcaacttttcagttgcaaacaagttagggcagggtggttttggaccagtttacaagggagtacttcctgatggacaagaaatagcaataaagagactttctagtagatcggggcaagggttggtggagtttaagaatgaagctgaactggtagcaaaattgcagcatactaatcttggtaagctttcggggctttgcatacaaaatgaagaaacatattaatctacgagtacttgcccaacaaagtttagactttcatttcttgattctaaagaatggaaaatagtttggagaa

SEQ ID NO: 5946 - DNA, 604 bp, Glycine max
  unsure (1)..(604): unsure at all n locations
  Clone ID: jC-gmfl02220076c07a1
gcatcaacacagcacttgtttgttcccaactccgaaaaatatcatgctcctaacgtaaaatcctcggtttcaacgttcaaccgcgatctcaaaaaacaaaactatggcatcactctcaggcatttgctcctcttccccgactctcaaaaaattcccaaaccaatccccatcgttgaccgaccctctccgcaaagaccacgtgtccttccccgcacgcctcgccgatcggaccctcagcctcgcgccgctccgtgcggtggctcgggaggtttccgacggagcgttggcggcggcggtgaagaaggggttggagaaggatccgcgcgcgctgtggcggagatacgtgggttggctataccagcacaaggaacttgggatttacttggatgtgagtcgggtcgggttcagtgatgagttcgttaaggagatggaaccccgtttccaagcggcgtttccggcgatggaggagttggagaatggcgcgatcgctaatcccgatgaaagtcgcattgtgggacactatnggctgaaggaccctaacgtgcgcccaactcgttccttaaactcagaatgagacactctcgacgctgttgcaagttcgcta

SEQ ID NO: 5947 - DNA, 199 bp, Glycine max
  unsure (1)..(199): unsure at all n locations
  Clone ID: jC-gmfl02220076c07d1
cgggcaactcttgtcgtacgctcgcgtatagcnanagcagccatttaagtgggaagccctacaacggcctaccgcctacttaacaaactaagcaatattattatatcgctctttatttctcgccccaagccgactgccctaatcgaggcgaggttactgttcaactctgacaccggcggcatagagatccactgtataa

SEQ ID NO: 5948 - DNA, 472 bp, Glycine max
  Clone ID: jC-gmfl02220076c08a1
cacaaacccgtccctcacactctccataccctagcggcactacacactagttctatcgctatctccccaagatgtcgagcgccgatcccgagcacagagaagaggaggaggcacccgccgttggcgacgacgaggacaccggagctcacgtcgctccaatcgtcaagctcgaggaggttgctgtcaccaccggcgaggaggacgaagatgcaatcctggatctcaaatcgaagctttaccggttcgacaaggacgggaaccagtggaaggagcgtggcgccggcactgtgaagttcctgaagcataaggcttccggcaaggttaggcttctcatgaggcaatccaagacgctcaagatctgcgctaatcatctcattttgcctacgatgagtgtgcaagagcacgctgggaacgagaaatcctgcgtttggcatgctagggattttgctgatggtgaactcaaggacgagct

SEQ ID NO: 5949 - DNA, 372 bp, Glycine max
  Clone ID: jC-gmfl02220076c09a1
attaggatttcagaacatcgcttcatatgtctgaacaatttacatatattaagcctctcacattctatacaggtagctgcattatgctactctagccattcttagagcaatagctgcttcatctccatcaaaggacaaggaaaacgtctccatcaaaagcattacacttttctcaaccttcagttggacaagctgccttgaaggactctgccaatagaaacgggaggctgcaatattcgacgagctactgcgttcgaaaagatgtggccgcacagatcctatccgctgccgattgtcaccactatgatgcccagactccgccagggccttgggaaaaggagactgacaacctcatctttgagaaaacatgag

SEQ ID NO: 5950 - DNA, 519 bp, Glycine max
  Clone ID: jC-gmfl02220076c09d1
aaaaaagaaacaccaatcatcgggcatttagttggattgaacatttagagctttaaaataatagcagtttcatattgtcttccctacaaacaacaggttacataaaaacggaaacaaacagaaccagttttatagaacagtaatggaaactagatctagccggaacagaaccatcccctcaaaagagacaatcaaccggcaacaggaagttgcggcatgttatacatcttcaagccaccgcaatacattaccaagttcaaaatcacatatcatgttggccatactcctcctcctcctcttcctcctcatactcatcctcatcagcagtggcatcctggtactgttgatactctgacacaagatcgttcatgttgctctcagcctcagtgaactccatctcgtccatgccttccccggtataccaatgcaagaaggccttcctcctgaacatagcagtgaattgctcactcactctacggaacatctcctgaatggaggtagagttgccaatgaatgttg

SEQ ID NO: 5951 - DNA, 361 bp, Glycine max
  Clone ID: jC-gmfl02220076c10a1
ctctctcttaatttttctccataggctcttcttctagacaactgtgaaggcattttactctcttaggactcacacaaatcagagcctgctcctttcctcaccaaaacataccaactggtggatgatcccgccacagatcacattgtgtctaggggcgaagacaacaccaccttcgccgctaggcgtcctcctgagttggaaagagaccttgttcctaactacttgaaacacaacaacttctcaagctgagttcgccagctcaacacctatgggtctagaaagatagagccagaccgatgggaggtcgccaacgaattcttccagaaaggagagaaacacttgctgtgccagatccataaaa

SEQ ID NO: 5952 - DNA, 320 bp, Glycine max
  Clone ID: jC-gmfl02220076c10d1
cttcttggggacggttaaaatgaaatcaaggggttattctaaaatctaagatttttgatagtacatcttttggaggaaaccaatgaaacttactgagtgacattcttgaagtaggaatttgaattccaagggcctggacccttttcctttcttagtacatataaaaacctacctactcttgaaatccacaattggggttgaatagtataatgagcccatgtttagggcaaaaatacattaaatgtcaaaatcaaggcttttttacatagttaaaccccgaggaagcttgaatttaggattttgctccaagaaagccggag

SEQ ID NO: 5953 - DNA, 437 bp, Glycine max
  unsure (1)..(437): unsure at all n locations
  Clone ID: jC-gmfl02220076c11a1
agaaaagttagggttcacaacttttccttttccttttgcttgcgaatctgaatcaaataatcaatcatccattcattattcatcatgtcgtcggcgaagaaaatcacgctgaagagttcggacggcgaggctttcgaggaggaggaggcggaggcgctggagtcgcagacgataaagcacatgatcgaggacgactgcgccgacagcggcatccctctgccgaacgtgacgagcaagatcctggcgaaggttatcgagtactgcaagaagcacgtcgaggccgcgaatcccgaagacaaaccctncgaggacgatctcaaggcctgggacgctgaattcgtcaaggtcgaccaggccacgctcttcgatctcatcctggctgctaactactagaacatcaagagcctgctggaccttacatgtcaaactgtagccga

SEQ ID NO: 5954 - DNA, 471 bp, Glycine max
  unsure (1)..(471): unsure at all n locations
  Clone ID: jC-gmfl02220076c12a1
gcaagttagagatctctaaagaaggaaaagctgccgagacactctacaaatttatgagacctgaagacattcctgttcagtatggaggactgaatcggcccagagatttgcagaaaggtcccccaaaacctgcatctgagttcacaatcaaaggaggagagaaagagaacatacaaatagaaggaatagaggctggtgcaactatcacatgggacattgtagagggagggagggacttggaatacagagctgagtttgtgccaaatgctgaaggaagctacaccatagctgnagagaagccaatgaaaatgggggcatcagaagaagcaatccacaactcattcacatcaaaagaatctggcaaaatggtactctcggctgacaacactgcctcaaagaagaaaaaggttgctgcatatcgctacgttgtccagaaaagcagcaccatttgagaatggctattattaaata

SEQ ID NO: 5955 - DNA, 476 bp, Glycine max
  Clone ID: jC-gmfl02220076d01a1
gaaaaaaaaaaaacgcagcacacaagttaaaaccttctcaaactctttcgtcatcagcgtcaaaacgcgtccattggatccatcaacgcacgccaaaaatctcgtctttttgcgtttccgttggtgggttttcgttttcctcagtgttcttcagcgatcttcttctgggtctgtgaaaagctcggtgctttgtttcggaagcaccgacattgggtaacagtgtgatggtgaaatcggagattgagaagaagggttgcagcacaagacaatggctttggctggtgatggctctcgtcgctgtttttgttgccatggccatgtctttcaaaacctctccaaaagctctgtttggagccattgatagagcttgtccgtgtgctcggggcacaccgaagtacagtggcatggtggaggattgttgttgtgattatgaaactgtggatcgttttaatgaagaagtgttgcaccctttccct

SEQ ID NO: 5956 - DNA, 569 bp, Glycine max
  Clone ID: jC-gmfl02220076d01d1
cccaagtaaaatatatcttctattacgctggtaattttttacttgggtttatttttaattttgagacattctacgtacattagtttcacatccctcagaaaatttccaaaccacgacagtggttttcctatgtctagtctctctagtaatctgaatcattaaaaacagaactgtaaccaattatagcttgcagattgcaaacatgtaatactcagtttggtacaacaaacgggaaatatgacaaatactcagaagagagcatgttacctaagttttagatacataggaccaaatttttttccatgagctaatcagtgttcttgtatgagcagaaaaatgtcctccttccatgattctttcagctgtaggtcccacttcgtggacgaatttgacggattccgagagtcgattaagaaggttcgtcaatgcaattacctcattcctttgcagctgcagtgtatgactcgagttttcttgaccatcaacagagaagagaatctttaatgcagttccaagaccaagaacctgaagcttaccccattatcgacatttctcacatcctacacaat

SEQ ID NO: 5957 - DNA, 533 bp, Glycine max
  Clone ID: jC-gmfl02220076d02a1
gaaaaaaaaaaaacgcagcacacaagtttaaaccttctcaaactctttcgtcatcagcgtgaaaacgcgtccattggatccatcaacgcacgccaaaaatctcgtctttttgcgtttccgttggtgggttttcgttttcctcagtgttcttcagcgatcttcttctgggtctgtgaaaagctcggtgctttgtttcggaagcaccgacattgggtaacagtgtgatggtgaaatcggagattgataagaagggttgcagtacaagacaatggctttggctggtgatggctctcgtcgctgtttttgttgccatggccatgtctttcaaaaccttttcaaaagctctgtttggagccattgatagagcttgctcgggtgctcggggcacaccgaagtacagtggcttggtggaggattgttgttgtgattattatactgtggatcgacttaatgaaaagggttgcaccctttccttcatgagcttgtgaagacccctttctttcgaaattttaaggtgtaattatggtgtgact

SEQ ID NO: 5958 - DNA, 545 bp, Glycine max
  Clone ID: jC-gmfl02220076d03a1
ctttttctctctaccctccaacgtgctctcttccctcctccacttcatccaaatctttctcattttctctcccaaatcacactctcaattacaataacacacactcaacttgagaattttccccaaaaatcccaagagctcgcgccatggtttccccggaaaacagcaattggctgttcgattacccgttgatcgacgacgacgttattcccgtcggcgactcctccttcgccgtctccgcttccaccttctcctggcccccacctcccgccaatgtcagtgtcgaaattgatgcttcgcttggggattctgatggcctaaaaaatcctgctttgaagaaaaggactaaatctgattcaagtactgcttctagctccaaagcgtgtcgggagaagttgaggagggataggcttaatgacaagtttgttgaattgggcttcatcttggagcccgggaggcctcccaaaacagacaaagcttacattctgattgatgctgtccgaatggtgacacagcttggggatgaagccctgaatttgaagact

SEQ ID NO: 5959 - DNA, 424 bp, Glycine max
  Clone ID: jC-gmfl02220076d04a1
caaaaaatggcttctagttcagaatctcaatctcagtctaaaccgctccaagaccgagttgcaatcgtcaccggctcgtcccgcggaatcggccgagaaatcgcgcttcacctcgcctcactcggcgcgcgactcgtcgtcaactacacctgcaactcggcccaagccgactcagtcgcggcgcagatcaacgccggttccgccaccacgacaccgcgcgccgtcgtggtccaagccgacgtgtccgatccggctcaggtgaagtcgctcttcgactcggccgagcgcgccttcgactcgccgatccacatgcttgtcaactcggcgggcgtgatcgacggcacgtatccctccgtcgccgacaccaccgtggagtccttcgaccgcactctcgcggtgaacgcgcgtggcgccttcgcgtgcg

SEQ ID NO: 5960 - DNA, 492 bp, Glycine max
  unsure (1)..(492): unsure at all n locations
  Clone ID: jC-gmfl02220076d04d1
ggactgatcatagctcgatngcaaccnnnnntnnntnaagcccaanncacnnntgctnttacgccctttttggcttcgagatctcaaattttttttccaaacaacaagtcgctgagcttgggctgggattattattgtcattattttggttctgcctttgggttatatcaaaaacagtaacaaccattaaagccgttgtgaagacagccagacatgcttattaacatttacatgcaaataccagccattacttcataatagtatcctatgccaaatacagtcaaagccaccactgaatccagttacttggaacacttagaagataataactaaaaagctataggaaaatgattacaacttttgagccaaaatggaagcccaaataattgtacaatgccaactttagcaaccggtggacggagtacatgatcctgtgaggtatccacggcgggcggaggcataaattgccacatggcaactcccggatagctg

SEQ ID NO: 5961 - DNA, 499 bp, Glycine max
  Clone ID: jC-gmfl02220076d05a1
gccgaagaatcctcccttcaaacctaacccatcacttccgctccttcgaatccgatgatgtctccgacaatctcctcgtgcggcgaggatcctcgccttcggtctcaaacttgtaccaacagcaacaacacacaccaaagctaacgcaacaaaacaagatatcttcactcatacgctcgttcttgaacatcttcacgttcccaacaatgatcccaacatgcaagtggctcacgattccgtcgcagctctccgtgactccttcccttggccgaaaagtcaccggaaccctcttcgggcaccgtcctggacacatctctttcgccgtgcagctccacccccgcgccgatcccgtcctcctactcgagctcgccatgtccacctactcgctcgtcaaggagatgtcctctggccttgtgcgcatcgcgcttgagagccagaaactgtctgcctccactattacgcgtacaatgcgtagcaatagtggcagacagcaacagtg

SEQ ID NO: 5962 - DNA, 536 bp, Glycine max
  Clone ID: jC-gmfl02220076d06a1
aagcattccatagcctcccataaaaattaagaatactatcttctctgctctctttctactttgtgccttcaccacctcatacctaccttcaaccaccgcggtggtcgataccgacggtgatattcttcagaatcctggcacatactttatcttgtccgtttttcgacccggcggtggagtagaattcgccgccactggaaacgaaacttgccctctcactgtcgtgcagactctcttcgggaggggctttccagcaatattatcgtcccgggtacgaatccctttcatcggcgaaggacaactcttcagcatcctgttccgtattgtgccatggtgcgccaccactccttctaagtggaccattgtggagggtttaccagaatcacccgcggttaaactcactgggtacgacaacacagtgcctggcgagtttaaaattgagaaagcttacccttttcatacgactatacccttttggtctgccagctggcgaataaagcaatgtgggcatattgggattatttcgatgatgatgg

SEQ ID NO: 5963 - DNA, 490 bp, Glycine max
  Clone ID: jC-gmfl02220076d07a1
gccggatttactcggagccattccgatttgggatccgatttttacgggaagagcggtggtggcgcagatgatggatacggagatggggtgtatgcttatgaagggggcaaggtggaaccctacggggcgcgtggcacggcgccaaaatcgtcgacttgggcggcgtttgatgattacgggaggtccatcagtttcccctcgcagaaggaatcttcttctgtggggggtaagattgtgaaagcggtgcccaaggctgatacacaacaagatgtcaaaggtggcggcgtgcaaaagtttcgtgtcaagctgttggccgaaagtgggggtcagagcactatggatgttctctgtcagattggtttggatggaattcgtatgctggatccaaataccagccggacattgagaatttattctcttgagaacataacaagatgtgatagaatcgattcatctaccttgcattttggtcaaagagtcctgttgacat

SEQ ID NO: 5964 - DNA, 322 bp, Glycine max
  Clone ID: jC-gmfl02220076d07d1
agggggaaatttttttttttttaaatgaaccccaacaaaaaaatcttttttttttttgcttttacaagggcaacaatggttgttttggaaaaaaaaaaaaattatcctaacggacaagaaatttttgggcatgcatgcatgggggcatgctttttaaccttttaaaaaaagggggggagaaaaaaaaaacccaccgcccccacaattaagggtaaccaatttgggtaaaaagggctaccaactttgcagtttagggccccggaatttcggggcaatctactagcggggggtccctttcttgggtttaagaagagaccctttt

SEQ ID NO: 5965 - DNA, 580 bp, Glycine max
  Clone ID: jC-gmfl02220076d08a1
aaagcgcttataaatggctttccacgaccatctaccgcacgaaatcacgttccagccgtttaccgaggagcagcagttaggtcagagcagggacatgcagcggctgctcccgctctccggcggggcgccgacgtggctgaacaacagcaccgcggcgacgctccgccagcagaatttcctccacctgcagccggaatccgccgcaacgacgcagcaaaacgacgacgttcgcggcggcggcggcagcggcatggatcggaaccggaccgagagcaactctgaaccggatgatttggcagaatacaaagcggacattttaggtcaccctctctacgaccagctcctatcggcgcatgtctcatgcctgagaatcgccacccccgttgaccagcttccaaggatcgacgcgcagcttcagcagtcgcagcgcgtcgtcgacaagtactccggcatcggaaacggaaacggcgtcgtcgacgacaaagagcttgatcaattcatgacgcattatgttatactgctctgtgctttcaaagacaattgcaacaacatgtacgtgttcatgcctatgaagctgtat

SEQ ID NO: 5966 - DNA, 61 bp, Glycine max
  Clone ID: jC-gmfl02220076d09a1
ttttgacctcaatgccttcaaagaaaatgtcttatcgagcctttacctcagagatggaacg

SEQ ID NO: 5967 - DNA, 345 bp, Glycine max
  unsure (1)..(345): unsure at all n locations
  Clone ID: jC-gmfl02220076d10a1
ctcttattcatccttctcttctgaataattctgatctctttctgcccttttctccgncacgcttttcgtgaccggatctgtatggatttgatccagatctacacgccgatggaggttttggccgggtctttcatagatctggagcgtagtggctcagatctacgggaccgaggtactacagagaatcgatgactagatcgcagatccgacggtagatcctgccgattccgcttgttcgatcgctacagacccctgtatcggatcattaagcagcgtgtctcgcgcgttctacacgtgttgccgatctcggatgttgaaaattagtttatgatgtgaagctatgga

SEQ ID NO: 5968 - DNA, 405 bp, Glycine max
  unsure (1)..(405): unsure at all n locations
  Clone ID: jC-gmfl02220076d12a1
agtaggaacctgctaggaaacatgtcctccactgaagctatgcgtctttttgtaaaaatattggaggaagaagatcctggttggtattcaagagcatctaactctgttagagaacctgtcatagatgtgcaaatgaataattccaaatgttgaaccagtaattgagaaagggaactcttatccagagacaaagactatttccacccaaaatggaagtgaagttggaacacaggataaagatattggagaggaaggctttggttcagntgaagtatatgatcaatggattgcacctccagtatctggaggaaatccaaaagcccgatatgagcatggagctgcagttgagcaagataaactgnacatatatggnggaaatcacaatggncgataccttaatgatct

SEQ ID NO: 5969 - DNA, 507 bp, Glycine max
  Clone ID: jC-gmfl02220076e01a1
tgcaaggttatgcgagacccgactggaatcagcagaggatcaggatttgttgcattttcaactcctgaggaagcaactcgagctcttggtgagatgaatggtaaaatgtttgctggaaaacctctgtatgttgcccttgcacagagaaaagaagagagaagagcaaggttacaggcacaattttcacagatgaggcctgttgcaataacgccttctgttgcgccccgtatgcctctctaccctcctggtgctcctggtcttggacaacaatttttgtatgggcaaggacccccagccatgatgcctccacaagctggatttggttaccagcagcaactagttccgggaatgagacctggtggtggtcccatgccaagcttctttgttcccatggttcagcagggccaacaagggcagcgcccagtgggccgtcgaggaacaggtcctgtgcaacaaccccagcagccaatgccaatgatgcagcagcagatgctttcaggggacgtg

SEQ ID NO: 5970 - DNA, 561 bp, Glycine max
  Clone ID: jC-gmfl02220076e01d1
aaagaagttcacacgaacaatataatagaacaatggaggaaaataatccaaaccacaaatgcatatctaataaatccaacaggttatgctaatcctacagcaatccagatacgaaaaaggtgaaaccaaaacaaccaagaacataaacttccttagtactctgactaaaacaaaacatctaagacacctgcaaataaactggtgggtagcgtacgggatagaaataactggtgtacagattcttgtcaaatgactaacggaatctaagacacaagattgtcattgagagagagtgaggctagttgatcagctgggttggtttgctgttgagcaacatttctcaacacatccatggcttcagcaacttttgccttcagagcatctggtgactcaatcagatgtaaaacttcaggctggtccatctccagaagcatgcctgtaacctttgcagcagaatcatgttccagctgatccacaagtgggtataaagcttcaccgagcatagtcctttgctgttctggtggagcatttgcgagggctgtagccaaagcttgaatgggc

SEQ ID NO: 5971 - DNA, 615 bp, Glycine max
  Clone ID: jC-gmfl02220076e02a1
gtaaaatacagagggataagattcaagatataataaacaacatacaaaaatcaacgtgtgcgcttttcttctctttccttagttttcagattctgaaatcttagtttctgcccgaaactgaaactgaatcgaaattcaatacaatgagttcctcaactacagtgaggaagttgcaggtggtgtcccctgttcctgcggacatagacattgcaaactccgttgaacccgttcatatctcccagattgccaaagacctcaaccttagtcccaatcactatgacctttacggtaaatacaaggctaaggttttgttgtcggttcttgatgagcttcaaggatcagaagatgggtattatgttgtggtcggaggcattactccgactcctctcggggaaggcaaatctactactacagtggggctctgtcaagctttatgtgcttttcttgataaaaaggtagtcacctgccttcgtcaaccatcgcaaggacctacttttggaattaaaggaggtgcaactggtggtggctatagccaattattcccatggatgaattcaatcttatctaacaggagatattcatgccatactgcagcaacaattttagctgctgaat

SEQ ID NO: 5972 - DNA, 480 bp, Glycine max
  Clone ID: jC-gmfl02220076e03a1
tagagaacatcgatcatggcttatatctcctttctatcatctttctccctctccaatttctctggacctcttaccatttccatctgttcctcatcttccgccttcctaacttcccaaataccatgcaaacccaccaaacgtagcataccaaaaggccattatgtttccaaagtgtcatgcaacagtcaccaaaacacctcaacatcaaacccataagaagacaaaccatcgtcatacaacattctaggaaaacatcggagggatgttctccttggcattggaggcctttactgtgcttctgctcttagcaacaccaaccctttagccatggctgcagcttctattctcgagcctgacctagaacattgttgtataactgatgatgtaccacctaaaggggtcatcgatgcacaagtctatcgctgcccaccacaatccttcgtcccctcctatagattccaagttgcctaaaggaacacc

SEQ ID NO: 5973 - DNA, 524 bp, Glycine max
  Clone ID: jC-gmfl02220076e03d1
caatcatattctatcaaatatttactcaatatatatcaccatataattacacatatgcgtctaatttttgcagcaatagcttgcaatcataattcccacgtgatacagaaataatgggattggtatatggtgccaattaattacttctcgtcccattagacactatgattgtattaaagcctcttcagtcacgtacaaaacctgtcgaatttgcaatggcttgtgctcattctcacggatgaatctctagagccatttgttctactttcacttcgctttgctttaaattagtgtttggtgacttattctcaaaatctgactcaattatacgcagttttgggagtttctttgttgatggaggaagtggtccttcaaagttgttcttctccaaatgcaatgtttctaactccttcagtccactcaaatctgggatagtgcctgagagtttgttttccccaagccacaaatgctctagtgcacttagacggccaagagttgaggaagtgaccctgacactcagcatt

SEQ ID NO: 5974 - DNA, 427 bp, Glycine max
  Clone ID: jC-gmfl02220076e04a1
ggaaatttttcgaactgatggcgaacagttcctcaagtatccaccacctaaagtgatgcaggtggataagtctgcatggatgactgatgaagaatttgctagagaaacgattgctggtgtaaatccaaacgtcattaagattcttgaggagttcccaccacgtagcaagctagatacacaagcctacggtgatcatacctgtataataacaaaacaacatttggaacctaacttgggtgggctcactgttgagcaggctatccagagcaagaagctgttcatcttagatcaccatgactatctcattccatatttgaggaaaataaatgcaactaccacaaagacttatgctaccagaaccatattttttcttgaaaagtgatggaactttgacgcctttggtcattgagttaagtaagccgcatcc

SEQ ID NO: 5975 - DNA, 417 bp, Glycine max
  Clone ID: jC-gmfl02220076e05a1
gttgttctcttccagttgccttcattttctcggaaaattcttcttttccgagaaattgcgcgtttttactgttgaatcgatcattcacaaatcgggggtgtctgaaattcaaagctgttgttgttgttggctgctggggttagtctctgtgcaggtttgggtgttttctgaggcagagccgattctcattttgctccaatggagatgcaggaccaaatagaaagcacaagatcaaccatatttggctcagctagtaacatccattccaatggtgaaaagcaatccgaaaatgttgctcatataccttctgttggcaacaaccagactaccaaggtgaggaaaccatatgccattactaaacttcgggagaagtggactgaggaagagccatcaaagttccttgccgccttgaaattg

SEQ ID NO: 5976 - DNA, 539 bp, Glycine max
  Clone ID: jC-gmfl02220076e06a1
gactggggggggtatcactatgcaatctacgccgggaagctcaggatacttggatttgtatccagagcggaagatgtcctttttcaaaaatccttacattctcggactggctgctgtcgccggcatcggtggtctcctcttcggctacgacactggtgtgatatcaggggctcttttatacattaaggatgattttgaggaggttagaaacagcaatcttctccaggaaacaatagtcagcatggctattgccggggcaatcgtgggagcagcattgggtggttggattaatgatgcctatggtcgaaagaaggccaccctctttgccgatgttatctttaccgccggagcaataatcatggcttctgctccagatccttatgttctcattttgggacgccttctggttggtttgggtgtgggcatagcttctgtcactgctcccgtttatattgcagaagcttcaccttccgaaataaggtgttcattagtcagcacaaatgtcctcatgataaccggtggacagtttctttcctatc

SEQ ID NO: 5977 - DNA, 140 bp, Glycine max
  unsure (1)..(140): unsure at all n locations
  Clone ID: jC-gmfl02220076e06d1
gcacatacaatcagtcactgcataaataaggctactttatatttaaactattaaatatttaaatataattattattaatgatcattataataatcatcttattaaaggggaggcgagtanattgaacacctcggaatacc

SEQ ID NO: 5978 - DNA, 521 bp, Glycine max
  Clone ID: jC-gmfl02220076e07a1
ctttctctatggcatctgcgacgcgtttggtgcactgcgagctgcgctcggcgaggcccgtggttcggccgagggaaccggccggtccggttcatgttacgatccccaaacccaaacccatagcggtggatgcggaaggcgcgaacatcgttttgcagccgcggttgtgcactctcagatcctacggttcggatcgagccggggtgcttatcaagactcgtaaggagggtgaccatgatgacgtgtcacccttcttcgccgcgctttccgactatattgagagctctaagaaaagtcaagattttgagatcatctctggtcgtctagctatgatggtgtttgcagcgacggtgactatggaagtggtgacagggaactctgtgttcagaaagatggatattgaaggaatcacataggctggtggggtgtgtttgggtgcagtaacttgcgcagtactctttgcatggttctgcagtgcccgaaacagagttggtagaatctttaccgtaagcttgaacgca

SEQ ID NO: 5979 - DNA, 517 bp, Glycine max
  Clone ID: jC-gmfl02220076e08a1
ggaaacaccaagaccgaacaactcttgattcatttttttcagcataccccacaacaggatccttttcaaggtcagctgtaaatcatgaaagtggtgcaaaatctggtgtatctgggattgtttcaggaattataatgacctgtgcacttttgtttctaacaccattatttgagtacatacctcagtgtacccttgctgccattgtgatctctgctgagataggtctggtagattatgatgaggccatttttttgtggcgtgtagataagaaagattttcttctttggaccattactagcactacaacattgttccttggtattgagattggggtccttgttggggttggggtttcacttgcgtttgtcattcatgagtcagcaaatccacatattgctgatttgggtcgtttgccagggacaactgtctataggaatgataaacagtatcctgaagcatatacatacaatggaattgtaattcgtcgtgttgatgctccaatttattttgcaaacac

SEQ ID NO: 5980 - DNA, 393 bp, Glycine max
  Clone ID: jC-gmfl02220076e09a1
ctagttctagatcgcgagcggccgcccttttttttttttttttttttttttttttttttttggtgttttttttttttttttttgcccttcccctccaaccttgttttttttttttaacaatatatcccggaaattgggggaccctggaaatgggacctttccccctttggggagcctttttttaacaaccccctgactttttgttagccttttggcgcctagtccaatatttttgaaggcggcccctggtttacacattttaaaattctgcccttaagagtccggttttagaaattccccaaaaaaaaaaaaaagggggcggccccccatttaaagccccgccgccccgaatttttattgcggaccgggcccttggagagttcccgctttccc

SEQ ID NO: 5981 - DNA, 553 bp, Glycine max
  Clone ID: jC-gmfl02220076e09d1
gtaggttatttccagacattaacacaactttatttcgggaagagattgtactagaaatacaagtagcgactaaaattacaaaaactgcatggcttttgtcacagatacgaatacttcctctttctatctatctatctatctctgagttcctgttcgaattgcagcaacttttcccgaacaggctgtaaaaatagcttcaagtcgttgcgcatctgtgtcttgtcttgatgcaagatatcccttgcttcactcagtctcacttccacctgcaagtcatctagttcaccaaatgagaactctgggacatctatatgacccccaataaacttcttctctccttgtatgatccattcccctttgacttttaaggtcaactcatatgtataaccaacacgtttcttgttccgaactatcaccatgaatgcaacattttcctaataatctgaacctgacgagtaccttgaaaaaatttagctgaaaaaaacctgattctatcgccaacgcattttgttacatcttttacttctgccctgccaaggagaactgaatggag

SEQ ID NO: 5982 - DNA, 479 bp, Glycine max
  Clone ID: jC-gmfl02220076e11d1
aggcagcgaaaggaacaattttattaattatatttacccactggattctccatttggttacacgtagttccaattcagaacaccaaaacactttcaagaatttgtcttaacagaaatttccactttcgttaatgatggagattcaacattgaaaccaaattattgcaggcaacttctcttctgttggtccgtgtattcaaacacaattgcaacattaccaaaacatgaattctggtagtcgtctaactcatgcatacaacccatcaatgttacattccccaagaaaaaccttgatgctgcgtggtgaaccacagctgccttcgacaatcaatgctctgtcattggcagccatgtgtgcgataatcttgtaaatcatttcgatatcttcaggagcatggcaacggtctgctacttcttcgagggtcaatggttctacaggttctttgcagcttgcctcatttagcactgccaacactcgc

SEQ ID NO: 5983 - DNA, 410 bp, Glycine max
  unsure (1)..(410): unsure at all n locations
  Clone ID: jC-gmfl02220076e12a1
gcggctgttcaagctgcaatcttaagaggagagggcaatgagaaggttcaagatcttctcctcctaggaagtcacccctctgtctctaggtttggagactgccggnggagagatgactgtcctgatccctaagaacactacaattccaacaaagaaggaacaagttttctcaacatactctgacaaccagcctggagagcttatccaggtctttgagggagaatgagcaaggaccagagataacaatttgttgggcaaatttgagctatctggcattcctcctgcacccaggggtgttcctcagattacagagagctttgacattgatgccaatggtatcttgaatgtctctgccgaagataaaaccactggccagaaaaataagatcactatcaccaatgacaagggta

SEQ ID NO: 5984 - DNA, 512 bp, Glycine max
  Clone ID: jC-gmfl02220076f01a1
gttgaatttcttgaaggattttgaaacaatagctcggcatcaagatcacatgttctcaggaaactgaaccattgggaacagcaggtcctctggctcttgccagggataagctgatagatgactctggagaacccttttttgttctcaacagtgatgttatcagtgagtatccactcaaagaaatgattgaattccataaaaaccatggaggagaggcttccataatggtaaccaaggttgacgagccatcaaagtacggcgtggttgagatggaagagagcacagggcaggttgataaatttgttgaaaaaccgaaattgtttgttggtaacaaaatcaatgctggaatttacctgctgaacccctctgttttggatcgaattgaactgaggcccacttctatcgagaaagaggtgtttccaaagattgcttccgagaaaaagctatatgccatggtcctgccaggattttggatggacattggacaatcgaggattttattgctggcctga

SEQ ID NO: 5985 - DNA, 514 bp, Glycine max
  Clone ID: jC-gmfl02220076f01d1
ggctagaaacaactaaacaataatggatttctatacgcactgaaaatacacaacgaccacactgaaaatacatcaatgcaatggcgtcactcattctaatccaaaaactgacttatagaaaggaaagaaatgccatgaagtaaaaaggaaaaccaaatgaaacggacaaacatattccagactcaataatttttctacctcctcaccacatggtaccaatttgaacatcattgacctcactcacatgacaatctccggcttcagaatatttgacttgatctccttgtgcggcaaaacaacaccaccattgctgtaaatttcatcacatacatggacatcttctccaaggatggtcatattatccactcgagcccattgcccaacagttgaatgccacccaacaatactgctggatacacaagcatgcttcttaactcggacttcacgcattattgtgcagcttttgagtctaacaccttgctcaataacgcagccaggaccaattgcaacatta

SEQ ID NO: 5986 - DNA, 73 bp, Glycine max
  Clone ID: jC-gmfl02220076f02a1
tagtggtggtgctggtcgaggcattggaggtcttgctggtggaggtgccgatggtggttttggaggtggtaaa

SEQ ID NO: 5987 - DNA, 543 bp, Glycine max
  Clone ID: jC-gmfl02220076f03a1
tctcattctggcgcgcgtcctcacatccccacagttaccactattcctcttttcttcatcatcatcttcttcttcttcttcttcttcttcttgcatttacatcaactcttctcccaacccataaaaaaaaaaaaaaagttcgtattttccctcccatgatcgaccctcatggtcacagactccaagcccatcattccccggcgcggcctcgtcgtcggcaactactgtcatgacgtcctccaccgcgacggcgagaccgtcgccgagaccctcggcggcgccgcctccttcatctccgttatcctcgatgccctctcccttcccttccacaccgtctccaaggtgggccccaacttcgcctacaccgccgacacatcgaatcaccccccgttaataatcccaaccttccaaaccacgctcttccacgctcacttcggttcgggccacccggaccgtctcctgaaccgcgtccgatcctgcgattcaatccaacccaccgacctcccggaccaacaaccccggttacggttccgactcgcggtc

SEQ ID NO: 5988 - DNA, 532 bp, Glycine max
  Clone ID: jC-gmfl02220076f03d1
aaatccaacccctctctttcttttttcgcatctaacccctcatttatgtttttttccaaactaaataaacctgaagcacaggatcatccaaagaggctcagaaacaagccaaagaaatttcaaatttgccatgaaatttcactttccatcattccattccaggctactactcttggcttctctcgtcccgttcccactgtacactaaccaatattattattccctaaaaataaaataaaaaaaggaaaacagcttccttttttttttttctcttcccttgatcatagttcttcataaacctcattttgtgaaaacactaattaggtcataataataataataataataataattacgaatccaccctgctaatcccaattctcttcaccgacacgttcctaaacccttccatcatttccataccctgaaaacacatcatcccattctgctgctccatgtaactcctcacctccttccttatcatctcatgcatcaccgccataaactccgcattcaaattcaacgcttctaa

SEQ ID NO: 5989 - DNA, 471 bp, Glycine max
  Clone ID: jC-gmfl02220076f04a1
ggatgatgctggattggaagccgcgccgccccgacatgctcattgacccctttgggattgggaagatcgtgcaggacgggctcgtgttcaggcagaacttccccataaggtcttacgaaattggcgcatacaaaactgcgtcaatagagaccttaatgaatcatttgcaggagactgcacttaatcatgttaagaccgctgggcttctaggtgatggatttggttccacgcctgaaatgtgtaagaagaacctgatatgggtggtgactaagatgcaggttgtggttgataaatatcctacatggggtgatgttgttcaagtagacacgtgggtttctgcatcagggaagaatggtatgcgtcgtgattggcttgtgcgtgacgccaaaactggtgaaaacttgacaagagcctccagtgtttgggtcatgatgaattaaggtgccagaagactgtcttaaatttcccgaa

SEQ ID NO: 5990 - DNA, 190 bp, Glycine max
  Clone ID: jC-gmfl02220076f05a1
gcgaggagatcccttccgtcatcattttctacaggaactttcagaaggagaagaagcggggggacttcgactgcactgaccccggcttctaatgcacgctctactgccgctataagggtaagaacctcttattccttgtcgatatgctctgcgacttatgcctaccttacgggtgctttgaatagtcttg

SEQ ID NO: 5991 - DNA, 498 bp, Glycine max
  Clone ID: jC-gmfl02220076f06a1
acttgatcggtggtgtatttggtgtgttgatgttttattaaacttttgtactcttgctttgaaactagttggttagatctgaaattctcctaagatggatacttcttataggactggtggagtcaagtacgagtgcttgctttttgatatggatgacactctttacccattgagcttaggtctcaatttgttttgtcgcatgaacatacaagagtatatgttagaactcttgcatatgaagagagtgaagtgccaaaaatgtgtttggatttgtatagggaatacgggacaactatggcaggattaaaggtccttggttatgagtttgacaatgacgagtttcatgcttacgtgcatggaaggttaccatacgagaaactgaagcctgatccagtattaaggaaccttttgctttacatgcctcagcgtaaaatagtatgttaaggaaatgtcaaaccttctacataaatttgcacagtgaggagcattccacaatat

SEQ ID NO: 5992 - DNA, 475 bp, Glycine max
  Clone ID: jC-gmfl02220076f07a1
aattctcatcacataatggcttgcaaaccttcttctttccttgcacttcttctcatcgccactatccttcttgccactacatggcaagcggtcgctagacgccacattattccaaaacactcaaacaaaggggacaagaaagagcctcaatttttgttccctccggaaggtaatttccattttcctggctttgggggagtagggctgccacctttctttgggtttacacctcaaagcccaaacactggtggtagtggactagggtcaggaccactaggtcgtggttatgttccaggtggtgatgacacctttgtcccaaaccctggttttgagtttccaaaccctggcagtggtggtggagtttcagttaatccgtgagtcctcccagttatgagctatcatgcattatgcatgattgcaccttttgacaaattgtagtaactagtctcctgtttttggtactcgtgaataagta

SEQ ID NO: 5993 - DNA, 501 bp, Glycine max
  unsure (1)..(501): unsure at all n locations
  Clone ID: jC-gmfl02220076f07d1
cgaaaataacaagtcgctgtgcttgaccttttattattattgtcattattttggttctgcctttgggttatatcaaaaacagtaacaaccatcaaagccgctgtgaagacagccagacatgcttattaacatttacatgcaaataccagccattacttcataatagtatcatatgccaaatacagtcaaagccaccactgaatccagttacttggaacacttagaagataataactaaaaagctataggaaaatgattacaacttttgagccaaaatggaagcccaaataattgtacaatgccaacttaggcaaccggtggacggagtacatgatcctgtgaggtatccacggcggccggaggcataaattgccacatggcaactcccggatagctgatgaaaggcaccaacttgttgccaggggcttggccttgtggagcaaatgcagcagggattgcaggagggggtggcaagaaagcangttgagcattcattgattt

SEQ ID NO: 5994 - DNA, 254 bp, Glycine max
  Clone ID: jC-gmfl02220076f08a1
gttctagatcgcgagcggccgccctttttttttttttttttttttatttttttccttttggttatttttttaatcttttcttttttatcactatctatacgaaacaataaaacgacccattaatattattaaaaaacattacaaaacaacccacccttacaaaccatacttaaaatacagataaaaacaatatacctttcccacaaaacccctaaacatactaaaaaataaaaattcactctctttataccacc

SEQ ID NO: 5995 - DNA, 388 bp, Glycine max
  unsure (1)..(388): unsure at all n locations
  Clone ID: jC-gmfl02220076f09a1
caaattccaatccttcaattcaataatttctttttaatgttgncttctctgctgaacccttgggtgaccttttcccttccaatcccctcaattttaatccctaataaccggcgagcctccaccgtagtatcatgcacctcctcacacctcaccaccaacaaccactcccaagtttcttcgccgccgaacatcaagagacgaggcccgccgccgccccgcggcggataacgacttcacggcgaagtacgtccccttcaacgccggcttcgactcgccggaaacctactcgctcgacgaaatcgngtaccgcagccgatccggcggactccttgacgtgcagcatgacatggtggctttatggcgcttcgacggcgcgttctggcgcgcg

SEQ ID NO: 5996 - DNA, 461 bp, Glycine max
  Clone ID: jC-gmfl02220076f10a1
gttagaatagatcccaacactagatagtttttttttaaacattgtgagtgagagagaggaatcaaaggaagaggaaggcattaggttagtgttggcgagtgccacagaacttggtttgaaaatcagcaactgcatccaaagagccacctttaatggcccctcgccgcacgccgatgacgacgacgatgaagccaccgaacgccttctcaacatttgcgatgcccttgaagccttggagacccagctctcttgcttgcaggttctgcaacaacaactgcaagatgaaagagaaattgccttggctgaaattgaaagcagtcgccatatgttaattgaccagctctgggagtactaaggtaaggaattagaagtgataaattgaagcttcctcttttgctagtgaaacagaggagcccaacaatgatctattacttccaccagatcctagccaccctccatac

SEQ ID NO: 5997 - DNA, 452 bp, Glycine max
  Clone ID: jC-gmfl02220076f10d1
aatatataaaaatatttatatagcattgctcagaaattaaattatttgcaatggaaggaatgagctttctctggatacatcagctagaaaaggaaagcaacaaacagcaaagaaaacaaacagaacagaagaagaaaaagaaactaagaactctatgtaagagatgcaacccatacataatctggcataaaaaggaataagggttgtttgttctatttagtctggcaattaaaaatttatttattacaaccaaaccattcatttagtcttacacttgtctctcactcactcactgacagagagcacatgatgttttttaagggccagtgatgcctcatccggtgctgatgatccaaatttctgaaactgaacccttaatatattctcctcagacaccaccaaacgcctgtttccatcatcatcgaaatgaatcccaatatgcccacatttgc

SEQ ID NO: 5998 - DNA, 360 bp, Glycine max
  unsure (1)..(360): unsure at all n locations
  Clone ID: jC-gmfl02220076f11a1
tgatatagcactttagcgtagcaacactgaatgagtaatgaatactcttttagaacttaaaaaacatccaagggtagtgagtgtttctggggctctacagttcctactggccggttcggttaggttcattaggctcatggcgcaaacctctctcgaaggcattcagttcaacgaggaaatccaaggcctgatggctgctccggagccggaaaccgactattccttgaaggcgctgctcgagcttccgacgacgcaagccgncgagctcctacactcgcctgatcgcgccagaaaaccgntgcgccacaggccgaaacctacaacgccaccggcaccgaatccgtcatcctnagcttgctt

SEQ ID NO: 5999 - DNA, 562 bp, Glycine max
  Clone ID: jC-gmfl02220076g01a1
tgctcaaagaagtgacatatttgcccatattcttatctggcatttgcagggtgagactgtacctgagacaggaaaagacccaaacagtgggaagaatggttcatttctagaactgctgccagcggtaaggcagcgtataattgatggttttaatccaaaggcacttgacatatttaaaagagagtttgatttctttgacaaagttacatccatctctggtgtactatttccactccctaaagaagaacgccgagctggtatccggagggagttggagaaaattgaaatggatggtgaggacctttatttaccgacagcttctaacaagcttgttaggggtattcgagtagatagtggtattcccttacaatcaggtgctaaagtcccaatcatgataacttttaatgtaattgatcgatatggggatgagaatgatgttaagtcacatgcttgcattttcaaggttggagatgactgtagacaagatgttcttgtccttaagttatagcactacttagagatttatttgagccgttgcttaaaactttatctatttcttatg

SEQ ID NO: 6000 - DNA, 570 bp, Glycine max
  Clone ID: jC-gmfl02220076g02a1
ttttcatgtgaagtatatccctagggaaaaataatttcttcacatttacaatgaagcaatccactctattcctgttcctattcctattccccctcgttcatgctctttcttacgaagctgcttatattagagatggcctcaaatcctattcccagcttgatctccctcactccgtttttggttctgaaagtgtagccttcgattgccatgggaaaggaccatatgttggagtgtctgatggtagaattctcaagtggcaagagacaaagagagagtggattgactttgcagttacctcgccacacaggaacaagaaattatgcgacgggttacaaaatgacaagatggaatcaatgtgtggaagacccttaggcctcaaattcaacactgtaacttgtgaactgtacattgccgatgcatactctgggcttctggtggtaggaccaagtggtggtgtggcaaagcaattagccacttctgctgaaggggtcccatttaggttcacaaatgccttggacatcgacaccaaaactggtgaagtatttttacagatagcagcatcttgttcca

SEQ ID NO: 6001 - DNA, 380 bp, Glycine max
  Clone ID: jC-gmfl02220076g02d1
gggaaaaattaaaatcccctttttaattatttttaaaatccaaaaaaaaatttttaaacccccttttcagaaatccaacatcaatcacttattctcctcaaattcccacttttaatgaatcttaattctaaaattttacccgaaaataaattccaccacccccaaaaattttttaggtattttaaaatctttcttaactatagccttaactaaatttcacttgacacatactaaaatctgtgctaaattaaaaattttttaccccctctatataagtatcatctttgaccccctaataattctttcccaaaccccttaataaaagccctatccttcattacacccaccaatggttcctccatcaatccttccccaaaatt

SEQ ID NO: 6002 - DNA, 488 bp, Glycine max
  Clone ID: jC-gmfl02220076g03a1
tcataatccaaaagacaagcatgtttggactagctccttctaggcttcaagttctatacagcttgcgtgactatagaactgaaggggcatcagaaccagagtggaaagaagtaaccgtcagatcaagtactgagatagtctttcagcctgaaaatgcttcaaaagttcgaaagtttaagctctcttcagcgagctctatgcttcttagcgcttgaagttgcccaaactaaggaaagttattttagggcgctgatttttgcagatggcatccatcgctcgtctatccatatgcctcttcaagcatatgtatattcttcgttaagctacatgaaatggatacattactagccttagaagatatcaatacagtcagatgtctattaccgcgagcttgtattatgtatattttaatataattaacagtcttatttaagaaataaccaagaattgcaaatgaaaaaaaaatagggcggtcgtcgactagtgag

SEQ ID NO: 6003 - DNA, 554 bp, Glycine max
  Clone ID: jC-gmfl02220076g03d1
aaaataataaataaataaatgattgataatatatagctagtgtgacaaataaattaaaatttgccttcatataaataccttctatctctctatattatctagggaaagaatgaaaccctaacaataacaaaaattatttgaacaccgggcagacccaatctaacttctgttgagcaagcaccaggtcaattaaaaggaaaagttggtccttagggcttcctcagggcagatgctgcacccattacaattgccaggacaaggccaagaccagcaccaacggatgctcccacagcagcagaattcaatgaatttgccttaacttgagcatctctacttgcctcaatcgacattgcttgttctcgtgccaactccatcagaagcctatctcttgcaaattccctgaaaaattccccacctgaaaggaagactcctcacgactgcggagtatacagtggatttgctgacaaagagaatttacgcctttcactggaaaaacaatctcctttttaggaaaggcttcctaataaagtaataggagcaaatatagcttttca

SEQ ID NO: 6004 - DNA, 567 bp, Glycine max
  Clone ID: jC-gmfl02220076g04a1
ctcttgttgattttgctaacaagcggtttgggaacactgagtgtcaatggcctcaaccttgttccaaagcctcttgttgattttgctaacaagcccatgattcttcatcagatagaggctctcaaggccattggcgtcaatgaagtggtgctagctatcaattaccaaccagaggtcatgttgaatttcttgaaagagtttgagacaaagcttggtatcaaaatcacttgttctcaagaaactgaaccgctaggtactgcaggccccttggctcttgcgagggataagctaataagtgactctggagagccattttttgttctcaacagtgatgttatcagtgagtacccacttaaagaaatgattcaattccacaaaacacacggaggagaggctaccataatggtgacaaaggtcgatgagccatcaaaatatggtgtggttgtgatggacgagactaccgggcatgttgagagatttgtagagaaaccaaagttgtttggttgcaacacaatcaatgcttgaatctacctattgaacccctcagttttggatccgattgaactg

SEQ ID NO: 6005 - DNA, 509 bp, Glycine max
  Clone ID: jC-gmfl02220076g05a1
gtgccagcaaagctgttgaggatattgactgggatgctctaactgtgaagggtacttgccaggaaattgaaaagcgttacctgcgcctaacttctgcacctgatcctgccactgtaagacctgaagaggttcttgaaaaagcactattgatgattcaaaattcccagaagaattacctctataaatgcgaccagttaaagtctattcgtcaagacctaactgttcaacgaatacgcaatcaattaacagtcaaggtgtatgaaacacatgcccgattggcactggaatttggggacctgtttgagtataatcagtgtcaatctcagttacaaactctttatgccgaaggcattgaggggtccgatatggaatttgctgcttacaacttgctttgtgtcataatgcattcaaataataacagagatcttgtatcatcaatggccagtgtatcttacgaagcaagaaggatgaagctgtaaacatgcccttgccgttcgtgctgctgtaac

SEQ ID NO: 6006 - DNA, 494 bp, Glycine max
  Clone ID: jC-gmfl02220076g05d1
acattgcaaccaaggaatgtatatataaaaataacaaaatcgcccataacgtacatatataccagatacaaatttttcacgacatatgatattacaaatgactaaaacttctagataacaacgaacaaaagctatataatgaattcccacactaccacgcagttcaaaattattgcataccaataatttcaagaacccttattaactttcactttcaaagggattggtacaacaatatcatatgctaataaatataatcttaagatgaagaagcaggtttggaagatgggttgaaaggaacctgctcagcgcatgtaaggatttcatggggcccagcctgttctcgaccaacacctagaaggtcaagataatactggtaatgggaaacgatattgttcatcgagtccacatcaccttgtccacaaacaccatccccatagagaatgttcattgtagtgccaaatccaggaagacgattctccatagtatcattc

SEQ ID NO: 6007 - DNA, 553 bp, Glycine max
  Clone ID: jC-gmfl02220076g06a1
ggcttccaaggagttctctggtctttgctccttggctccttcactatctgagagcattttgtgcactactgggttgaaaatgtatatgctggagagcaaaggaggtgccatagcatgcatgttcttgtctcttttcttcttggggacatggcctgctcttttgactatgttagagaggcgtggtcgtcttcctcagcatacctaccttgattactcaatcaccaatttcttggctgctttactcattgcttttacacttggtgggataggcaagggcacacatgatcagccaaatttcttagttcaacttgctcaggataactggccctccgttcttttcgcaatggggggtggtttgttccttagccttgggaatctgtcctgccaatatgcatttgcttttgttgggctatcggttactgaagtgatcacggcaagcataactgttgtcataagcacaaccttgaattactttttggatgacacaatcaacaaagctgagatccttttcccaggagttggttgctttctgattgcaagttttctaggttct

SEQ ID NO: 6008 - DNA, 581 bp, Glycine max
  Clone ID: jC-gmfl02220076g07a1
ctttgatgctatcaatgagtaaagaggttccttggtatctggatgatgggactgatcgtgtgcatgtggttggagctcgaggtgcttctggttttgcattacctgttggaattgaggcatttgaagagtcgggtcggtcacttgtacgtggaactttggattatctgcaaggtctcaagatgcttggagtcaagagaattgaacgggtacttccagttggaacttccttgactgttgttggtgaggctgctaaagatgatgttggcgctattcgaattcagcgaccccacaaagggccattttatgtctctcccaaaacaattgatcaactaattgcaaatctggggaaatgggcaaggtggtataagtatgcttctgtgggcttgacggtgtttggtgcttatctgatagccaagcatgctattcggtacatattggaaagacggcgccgtagcgaacttcaaagaagggttcttgctgcagctgctaagaagtcgggacaaaataatgatgttgaataggccgacagcttatcagatggtgctaaaatgatcgctaatgccagattgtgtgtatatgcc

SEQ ID NO: 6009 - DNA, 255 bp, Glycine max
  Clone ID: jC-gmfl02220076g08a1
tgaaaatttataagataataacacacacaaacttttcaacatatggatgagagctaaaggagcaaaccatagcttccaaatccaaagatgctgccatcccagccatagtttgttatgaggcagagacagagcaaccaggcatcacaaccggacaaagggagaaccttgaggtgccaatcattagattttagcgacccaaatgaaaggaaagcggagcatgagattttggaggcctgtcgggactggggcatgttc

SEQ ID NO: 6010 - DNA, 162 bp, Glycine max
  Clone ID: jC-gmfl02220076g09a1
atctctctctctccaatggccaaagacctcttaacggagattcaaagagggttgcctcacatggactaccacgacccaccccccgccccattctacgaccccgccgagctccgaatgtggtccttcttccgagccctcatcgccgagtttggcgcctccctc

SEQ ID NO: 6011 - DNA, 499 bp, Glycine max
  Clone ID: jC-gmfl02220076g10d1
ttttttttttttttttttttttttttttttttttttttttttttttttttagtatggttattttaatttaatttttaaaagtaaaaaattctcaataattgtgtaaaaaaaaattgcgatatttgtgactttccggggggagaaaaaaagagggtgcccaaaaaaaggaaaaaaaaaaaaaaacaaagggttacaaaaaaaaaaaaaagaaaaaaaccaaaaaaaaaaaaaaaaaaaaggggggggaaaaaaaagggcgaaaaaaaaaaaaaaaaaaaggtgttaaaaaaaaaaaaaaaaaaccccaaaaaaaaagggggggggagcgggaaaggccaaaaaaaaaaaaaaaccctgacccgggtaaagaaagaaaaaggggggggggggaaaaaaaaaaaaaaccccccaaaaggggggggggggcaagggccaaaaacggggggggaaacgaaaaaaaaggagaaccccggccaaagaaaaaacaatgtatcgggag

SEQ ID NO: 6012 - DNA, 222 bp, Glycine max
  unsure (1)..(222): unsure at all n locations
  Clone ID: jC-gmfl02220076g11a1
gggggccagtctctaggtttccttatgtgatacccgcctaagttgcaacgacatgctttcatccataacaggtaagaattgtagcttcaacgagtcacgtgaggagttttatcttgagcaagaacctcacccatcatcctccaaaaacttgaaacaccttttccagatgatccagaaaggtacctactccaagnatgattatggaaagctaaaaaatctgat

SEQ ID NO: 6013 - DNA, 137 bp, Glycine max
  Clone ID: jC-gmfl02220076g12a1
tgatgatatataagatggtaccgggacatttttcccccctggcaaaaaaagatccctgaagaccccgtcccccttttcgagagagagccgcctgcctgtggggggggggggggtccctaagggggagctcacccccc

SEQ ID NO: 6014 - DNA, 615 bp, Glycine max
  Clone ID: jC-gmfl02220076h01a1
caaaattttccctggaagctcagttttgtagatgcaagacttgggttgcttttgcaaactccgtttgccaacttaagtttgcatacttttatccaaacatgcactaagtctatatttgcatttctgtttgggactttgggttactccaaactcagtttggagagtaaactcagtttgacatgtttggttatcctcaaaagtatgtttgcacattaaaattttgcctggaaactcagttctgtagaagcaaaacttgggttgcttttacaaactaagtttgcaaacgttaatccaaacatgcactaacttgtttcttggttgtccaatattgtgatgttacgctgcacttagaagacctttgctcacaatcttaataacatctctgatcagtgtggctacagaatataggtatttctgaaaaaataagcataacttaaatttccgtgctggcaaaattgattctcagatccatttctacttaaagtaggtagcattgaaaacatcttatatatcgattaatacctttgatagtgtagggtgtctacttattaaattataaatgttagagaatttagacgaagatatttattcttgtgagaccattggtttgcaaat

SEQ ID NO: 6015 - DNA, 486 bp, Glycine max
  Clone ID: jC-gmfl02220076h02a1
gttgttgtgtaatgatactcattgtcaccaccaacacgctttcactttactgaacaacgacttcatcttcactcttccttcaaatttccaacaagaaagtttgttcaactgtccctttattggcgttagctatgctacctactggagcaaaagagacccaattacgtgagaacaacagccagaaggtccatcctcaaccaatggaagaggccatgaatcataatccagaagcaatggaaaccctaatatctaaagtttttacaaatatctcttccttgaagtcagcttatatccagcttcaagctgctcatactccctacgaccctgataaaatccacactgctgataaacttgatattagtgagctgaaaaatctgtctgaactcaagcatttctacagggagaacaaccccgaaccagtgtgtgtttcttcccaagactcacgtttagcttgcagaattcaagatcaacagagccctcttaaaa

SEQ ID NO: 6016 - DNA, 540 bp, Glycine max
  Clone ID: jC-gmfl02220076h02d1
aagtgaaaatgcatcacttgttgattagtttagtgccctcaactgtggaaaactcatacaccagaacattgcttctccccaaagcattgaaactcctaaattaaggaacatttgttatataccttcctattcccctctcccacaaacactagaattcaagtgcaggatattttcacaatacaagaggggccttgaatgtaaacaagcttaaagggctcatttactcttacaaccactaaaaaggatattaaaaattacagacaacagcattatcttacaagataaagaaacaacaattcaaacaaaccacatacaatcaactatgcattttctgaagtcttgagtgtgttcaggaatcattcagccaccttcataccagagagatagactttactctgaatcacacttcccccaatccaaaatccaggcataaccatcaaaccaactttaggtttttcatcattgtcatccattatcaaattcttgaccacactttccatataaacatcagagaactcactcccttcttaacctgaaata

SEQ ID NO: 6017 - DNA, 616 bp, Glycine max
  Clone ID: jC-gmfl02220076h03a1
ggtcggtagagtggcgtggcgttttacttacaacatcatcaaaattatcaaattcacctggttcggcaacctcaatttctgctccctaaatcatgcttgcgtttcgatcgaagccttgttgcagttacaaggaaacagcgtccctcgcacttgcacacttcacgcacttggtgctcaactacgcacgcgccgggagctcttggtgccctacacgcgccggcttcggggttcggagaggctacatcgtcgttgcctcgttgggggacccacccgaagtctggtccggcggcgggattgtcgttcgccccgggaattccaatttcgaagtcgccggcggcggtggcgccccgaactccggcgattcaaaagaggggtgctggggtggctccaatttggggaacagtttcccaacgccaaacgaaatttgcaaggcgctcgacaaattcgttattggacaagagagggccaagaatgtgctatctgtagcgggttattaacacttatagacgatatttaatgaaaacctttttgaccaagtggcctgcatgagaatcagtatatagtgggatagttgatgctgctgatgatgattgaagtgaacttgacataagcacat

SEQ ID NO: 6018 - DNA, 549 bp, Glycine max
  Clone ID: jC-gmfl02220076h03d1
gattccattgacctatatttttcaagctcaatcttcagcttaccaatctcctcttctgataccctcaacttctcattcacaatccttagctcttgttcatatgcattaatcttgacacgaaaatcttcggcgttgttctcaattttcaattcatcattcttcacacgttcctcctcatgcttttctttcccctcatgtggtatctcaatatccaattccatcacccttctgtggatactattatgatcatttccattcccaaagaagcctgaaaaactgttcatggatgaagcatcatcataatcctcatcagtctctgtcaatgtagaagaaccatctccatccttttgacatgcatcaaaagtattcacattcccaccagaaccaagaaaaacatcaaaccccgcggcgcgatttgttgatatacgacaccccatcttcctaggagaaggagaaggcacgtaagagtttggctcagaaccataatctgaaacacctgaagcctgtgattgaagatcacacggtgtgttgatgtgatcaaaacgttca

SEQ ID NO: 6019 - DNA, 530 bp, Glycine max
  Clone ID: jC-gmfl02220076h04a1
tgaattagctatgaacaatgatgagcttcatgtggttatgttcccattccttgcattgggccacattagtccatttgttcagctctccaacatgttgttctctcatggtgttcatgtcactttcttgtcagctgcattcaacattcccagaatcagatcaactcttaatctcaatccagccatcaatgttatctcactaaagttcccaaatggtataaccaacactgctgaattgccacctcacttagctggaaatctcatacacgcccttgacctcactcaagatcaggtgaagtcccttttgttggaactcaaaccccactatgttttctttgactttgcacaacattggctcccaaaattagcttctgaagttggcatcaagtctgatcatttctcagtctactctgccctttctgatgcttacattaccgtgccttctagatttgctgatgttgaaggaagaaacatcacttttgaagatcttaaaaagccttcacctgcgtatcctcaaaactctaatatttccc

SEQ ID NO: 6020 - DNA, 484 bp, Glycine max
  Clone ID: jC-gmfl02220076h05a1
caattattcaattttaaagggatatcaagtgtgctaatatactggttgatgtaagtgggcaagtcaagcttgcagattttgggttggcaaaggcaacgaaatttaatgatgttaaatcaagcaaaggttctccatactggatggcccctgaggtttctccctgctcttgtatcatttgcttggagtaattcctgcaaaggaatgaaatcatatggctgtctaatttagttttagtctgtagtacatattccaaatgttgctgtaagaacataaagtataaccatccataaattagtttactgcagtatatgcttccattgatttcttgtgatggagtgcagattcagaatcttgaaactttagtttttccacccacttgtgatttatgagagttgttttagtaaactggcaaatgaatttttatacttgtgagctttttattgcgactgcgttaactttgaattgctggttataggttgttaac

SEQ ID NO: 6021 - DNA, 451 bp, Glycine max
  Clone ID: jC-gmfl02220076h05d1
aaaaatgaaatcaatggtttattctaaattctaagattcttgatagtacattttttggagtaaaccaatgaaacttactgatgacattctgtaagtaggaatttgaattccaagggcctggacacttttccttttttagtacatataaatacctacctacttttgaaatctacaattggggatgaatagtaaaatgagcccatgttaagggcaaaaatacattaaatgtcaaattcaatgcattattacatagttaaatcccgaggaagcttgaatttaggattctgctccatgaaggctggaggtcgttggtacacaactgatgcagcccttatcaagatcccagcagtcaaaccccatataaggaattttttatgttcgatttcataggcaaacaaatgtttcagataattctctcccatgcactggattttcttttgactcctttttt

SEQ ID NO: 6022 - DNA, 559 bp, Glycine max
  unsure (1)..(559): unsure at all n locations
  Clone ID: jC-gmfl02220076h06a1
gagccagttccagtgctgctagaatagtttcttacttgaaaagcatgggaagtgccatgagttcaggaaggagagagagaataacaacaggactttggaatgttgaagaggagccactcacagcagagaagcttctggcgtttgccatgcagaaggttgagtccatgacagtcgaagcattgaaaattcaagctgacatggctgaggaattagaagccccatttgatatttctgcaaagaaaggagagggtgggaaggatcttttggcttcagttattccacttgaggaatggatcagagaccacagctatgctaaaactgttgcaggttctgatggggaaccagaaaaagtgacactcgtgttggttggccaattgagagatccattgagacgctatgaagcagttggaggacctgtgatggtgctgattcatgcaacaagtgctgacacanaagggaaggaagaagagaaaagggtcaaggtaacaagcatgcatgtggggggcttcaagttgacaagtgccatacagaagaatgcatgggacagtgggaagcatat

SEQ ID NO: 6023 - DNA, 540 bp, Glycine max
  Clone ID: jC-gmfl02220076h07a1
agcaaatcaaactgtggaagacaacctacgccaacaacaacatcatcatcggcaaccatgtttgccaagaggttgttgcacaaggctgtgcagcaccattccaaccacaagttgcagcatggtggtttgcaagggagtgagttggatcccagaattgtgattcactatggcattccatccactgcttcagttctcgcttttgaccccattcagcgacttttggctattgggactttgttaaaacacgaaaatgggattcaagatttcagaaaaatttaatctggggttattctaattagccgtgggatggaagacttaaggtgattgggggtgataatatagaaggactattggtttctcctaagcaattgccttacaaatacttggagttccttcaaaaccaagggcatttagttggtgtcttaaatgacaatgatatccacgtttggaatcttgagagccggagccttgtttgttctttacaatgggagttcgatattactgctttatcggtatcagcggttaaaatttcattattgt

SEQ ID NO: 6024 - DNA, 142 bp, Glycine max
  Clone ID: jC-gmfl02220076h08a1
gagataccaataccgagcattattcgccctttcatagagaagctcctgcttttgtagagcatgaaaccggacagcagatacttgctacaggaatcaaagcagtagacctgcttgcaccatatcacagaggaggaaagattgg

SEQ ID NO: 6025 - DNA, 257 bp, Glycine max
  Clone ID: jC-gmfl02220076h08d1
tttttctttttaatccaattttatttcatcaaaaatctacccaatatatggggcgggataatttcccatatgcgtctaatttttgcaccaatagctagcaatcataattcccacgtgatacaaaaataatgggattggtatatggtgccaattaattacttttagctccattagacactatgattggattaatagccttattcagatacgtacaaaacctgtcgaatttgcaatggcttgcgctcattcttacggat

SEQ ID NO: 6026 - DNA, 162 bp, Glycine max
  Clone ID: jC-gmfl02220076h09a1
ctctcagtagaaaaagtagaaaggagaagatattcttgagcaattcgaagcttctagttcttgtgagccggaggcttctataactcaagaaacagaaagagaaaatgaggatgctggggaatgtaagggaagtgaaaatgatgagataatcaaagaactgaa

SEQ ID NO: 6027 - DNA, 310 bp, Glycine max
  unsure (1)..(310): unsure at all n locations
  Clone ID: jC-gmfl02220076h10a1
atctctgtgtgctcaatggccatagaccctgtatcagcgattgaaggtgggttgcctcccagggaccaccacgacccacccgcggccccattctacgaccccggcgagcccggacagaggncctccatccgagcccttatagccgggatccggacgccgtacgatcagtacacgaatccatactcccggccttcggtttgtaccacctaacagacaccggcgccgagccctgcacagttgctggcgttctcggactcggtggggccggaggaggcccgaaagcggtcgccgcctattgcaccgaccgcat

SEQ ID NO: 6028 - DNA, 456 bp, Glycine max
  Clone ID: jC-gmfl02220076h11a1
atcgcaacgaatcagaggcccctttcaacgaatcacatggcagaaccgtcgtccaccggcggcaccatcgctaccgctgatcctccggttccagcgaccaaaagctgggccgacgaagcggacgaagaaaccaacgcctccaccgccgaggcagaaacctcctccgttaacctggaagcgttaaccatcgacgacaaagaaaagaactcttcaaaactcttggacgaccccgacgattctaatattcaagcggttacttctggcgatacgccgtacacgtcggcagcgaggttcgaggacctaagcctctcgccagagcttttgaaggggctctatgtggagatgaagttagagaagccgagcaagatccaggctatcagtgagccgatgatccttagcccgcccaatcgggacctgattgcgcaggcacacaatggctctggcaagacgacttgc

SEQ ID NO: 6029 - DNA, 371 bp, Glycine max
  Clone ID: jC-gmfl02220076h12a1
gggggccagtctcttggtttccttatgagatacccgcctatgtagcaacgacatgctttcatccataacaggtaagaagagttgcttcaacgagtcacgagtggagttttatcttgagcaagaacctcacccatcatcctccaaaaactagaaacaccttttcctgatgatccgcagaggtacctactccatgtatgattatggaaagctataaaatctgatagagtacggcatgttcaatccaccaaagtgcgaccttaggcgcatacccaaatcattgcctctgaggatggcctatggtggaaatgatgcttaggcagatataactgatttccagcacacactcaaagaattgccatccacaccggaag

SEQ ID NO: 6030 - DNA, 400 bp, Glycine max
  Clone ID: jC-gmfl02220076h12d1
ggtaaacaactttaatttatcatttcaagatcaaatcaggaagaaattaaacataaaattagaagagaaaatttaaaaaaaaattaaacgatcagagtttgatcgatgaacacaagagaaattcagataaattcttcttcatcttcttttcagcaacaatctctctctctcgctctctctctcaatctaaaacctcacactctctctctctctctctcaaacctgttatctgctacttttttttttcttctctctatatataaatctgaaaagaaaaaaagcgaaacccgtgacctgaacccgatcgcgcgaaaggtcaaccgtcaacgacgtcgttttgagattccgttccgttcgggtttttttccttcttttttgttttttttcagactttgacgat

SEQ ID NO: 6031 - DNA, 412 bp, Glycine max
  Clone ID: jC-gmfl02220077a01a1
cttgcgatactacactacacatgctcttatcagaaggagaaaagaaaagaactggatgagtgatgtttcctacattcacctgggagctggagagcaccactcatgactaagctctgagacatggctgtccccgtgttgatatatcctagctctgcatactactcatatatagagtgtgctatgatgctctagaagcaccacaacagacccctattctgctttttgattaacgggagatgatgatgatgatgaatacggaagacggttaatactgcgtcattctaacactagctctaatggacgcactactgtccataaccgtgcgtggctgtctgctctgcgactgctcaacagtgtgcgtacagcaaccccagtttccgtacatgcaccacatgttcggatacctgagtga

SEQ ID NO: 6032 - DNA, 393 bp, Glycine max
  Clone ID: jC-gmfl02220077a01d1
aaattaagggtattggtattcaagaatgaaaatgacatgggacgtagggcctacagttgaagttggggatttgataaacaagccttttaatgaaaatgccagataaaaagagacctgagattttgaactagaatagctcatcctcctggggggtctgaataacaacatttggggggggataagcaacacaggggagaacaaatccgttaccgatttgggtatcatcaagggaactaccattagattgggcgactttgccagaaacaactttgccggcacaggaagagcaagccccagccttgcatgaatagggaagggcaatgccaaattcctcagccttttcaagaatgaaaaccttatttgggcattcaaattcttgggctcctttggggg

SEQ ID NO: 6033 - DNA, 571 bp, Glycine max
  Clone ID: jC-gmfl02220077a02a1
ctcccagaaacgaagccctcgaacgctatctcgaccccgatttcaagcgtttcctcctgagaccctcctgttgtcccacatcgtccccaaaagaatcaccaaacccgaattcaaaaccgggtcgacccgacacagaactttagcgtctcaccaccacctcactctccaagccctgaatttgactcactggaatgttgagtcttcccgggttattaacccgaattcggtaacccgacccgacggagtgatccacggcatcgacactctcctcatccctcgctcagtccaagacgaattcaaccgtcgccggaatctgatctccatcgccgcggtaaaacccgtaccatccccggaggtcgacccgcgaacccaccggttaaagaaaccggcgccggcatcgccggcgggggccccgccggcgctcccgatctacgacgcgatggcgccggggccatcgcttgcaccggcgccagcgccgggtccgggtgggtctcacaagcacttcaatggggaaaagcaagtaaaagatttcatcgagacgttactccactacggtggctacaacgagatg

SEQ ID NO: 6034 - DNA, 374 bp, Glycine max
  Clone ID: jC-gmfl02220077a02d1
ccattagaacaaatgggcattatttatgaaattattgataatgcccgttttaagaatatgtgctaaaaaaacctaaataacatagcattgaaaactatatctgttaatttcatactaggaatattccataaaatttataaagcaaaccttaaagccccctctgttgaaattaatcaagaaaaaataacatggatatatatattcatccattttcctataataaactttttatgagttctcataaaacaccattaacttggttgaacaacacaaaagggttttgtttctgaagatctcatgactatcttgcctttgatcttgaaagctatgttcgttacaaacaaaccaaaccctttgcttatgatcctgtgaaa

SEQ ID NO: 6035 - DNA, 493 bp, Glycine max
  Clone ID: jC-gmfl02220077a03a1
attagtttctttgtatctgtctcagttacttccattctccaagcctgcttcatccttgggggggatcatgggtttcaaatcccttcttaacatgaagaagaagaaacttctgaagacgatgcctctttcgttctcattgccccacgcgcctccggaatggctgcattcatcacgcgcctacgggatggaggactctgagtctgccttctaaaagatcgactcatacggccacagactgatactcggtgccgaactcgtctgcatgatgcatagcctgggccagcccccgaccgatgaagagctagagaccctgcttcccgaggtcgcttgcgtctgtgacgcgcccatggacttggaggagttcaccgagatgaataccagggacgtggaccccgacgaggatttggagaatcgtgaggacgctttgtgcatcgttgatcttgacggcaacggttgcatcaccgcggaggagcttaaaatggtgatgggaagc

SEQ ID NO: 6036 - DNA, 361 bp, Glycine max
  Clone ID: jC-gmfl02220077a03d1
agtggttattttttttgttttgttactgaaacatcatgtgaccacaacaacaacacaaaaaaaggaaagaactcgagcaaccaaaaatcgacaacacgaacaaaaccgagagtaagagaaataaaaaacaaatagaaagaaccagaaacaaaaccaaaacaacaaacaacaaaaacataaaccagcactacagaaaactgaagaacagggaccagaaatacagaaaacacaaagggaaacaagagaaggaaaagccaaacatagcagcagggaacacgccaccgaagacatacactggggaggcaggacaccaagacgacacccgcgaacgaaaattcgaaagagggaatggaaaacaccg

SEQ ID NO: 6037 - DNA, 624 bp, Glycine max
  unsure (1)..(624): unsure at all n locations
  Clone ID: jC-gmfl02220077a04a1
ggtgcttctcgaacacgcaagtccagcaatgggctacatgttactggtgttgcagtaggtccgaagtagcacagctctgcaaaaaattcagctaggaattcaccttctgaaaaagtttctccaactcgagtcccccatgaaaaatcagctgaccagccccttactgatcaagggaataatcagcgattgattctccggttgccaaacactggtcacagtccttcaaggggagctagcggtggctcttatgaagaaccaggtatcacgtgcagcaaagcttcttctcctgctgacaggaatgagaatcaggacagaagaatgaaaactagacctgagtgtttgctgacccatgtgtcaaatatgatgaatgaggcatgtgatgctagtgaagctttgcttggtgttgacgaaggtaagggccctcaaacggttgatgagcgatgcagggctaatgaagatggtgataaggtagcagaatcatcaaaaccggctaagttgtcatctggatttgtttccagatcatggcagacttatganttaagccccatgaatgcattaattgaaagctgtgtgaaaattcctgaagcaagtgcatccgtgtaccatggagatgatgggatgaac

SEQ ID NO: 6038 - DNA, 364 bp, Glycine max
  Clone ID: jC-gmfl02220077a04d1
agagagaagtgacacattggccaacctgggcatataccaataaccagaatgtgataagtgacaaaattccagagtcaagactacagcaataactatatatgtaacaaaagttgaaaaaaaaatgatttaaagaaagacaaactggccttaagcctagccagttcagacattcaatcctttccttccaaatgctcgagaatggattgggctcggtgctgttgcagagcagtcacagtcaaacacttgatgcccatttctctgattctaggcgggattatcacaccaactgtttcagttagatatctacacaggaaaaactttatctgcaagcgacaataagggagcagattcattcaaaacaact

SEQ ID NO: 6039 - DNA, 596 bp, Glycine max
  Clone ID: jC-gmfl02220077a05a1
atcggaagaaggattagggtttgtggagatgcaagggcaaggcgttgatgaagtgagcatagaagagttggcgtcgaatctttccctctacaaagatcaactgaaccaggttagagaactcttaaacgatgaccctgcaaattctgaatatgttgacatggagagggaactttccgaggtcattgccttgaccgaggaactccttgcaactgcaaagcagaatgaaatctctgctcctcctaataatgctgctgcatctccaaccttgtccatacataacgagaatcaattgctagatagtagttctgatcatcaagagaaacttgctgttggcaccaaagttcaggcagtttggagtgaagatggggagtggtatgatgcgacaattgaggcttatactccaaatggttattatgtaagctatgacaattggggtaataaagaagaggttgatcctgccaatgtaaggtcaattcaagaaggttctgttgatgctttattagaagctgagcgagttgctgaagcaacaaaacaggccatcaaacgaaaaattgcacaagctgcatctatcgatttacagtctcggagtctaccta

SEQ ID NO: 6040 - DNA, 489 bp, Glycine max
  unsure (1)..(489): unsure at all n locations
  Clone ID: jC-gmfl02220077a05d1
agtgaaagaaaaaaaaatatatatatgtggggcgaaagctacaatctagaacagttctgaagtctcgacacatttcagtagataacattgtttggtttgccatcagtgaacctctacagagaatggttgtttgagcatgttacatacaattgaaagggcatctagccgagtcggtgcataacctaatcatcattttcaacagtaccatctttgaggtgaaaatgtttttctctcttctggaactctgtcaaacctttcccacttcccgtcacaccaacctttccctgaggatcatcaggagatttaaaaatactctcccgttttcttccagagaagaaaccaatcttctttgcctttcttttggttgactgaaactgctgccaagcattttgccgcttttnntgtgtgacttcaagttgctccatccgcatctntgacttaaagcatgtatttcttggcgtttgaagctttacatctcaggatcatcag

SEQ ID NO: 6041 - DNA, 352 bp, Glycine max
  Clone ID: jC-gmfl02220077a06a1
aaaagcaattactactaagaaaggataaaggaaggaaggaacacttttctgatattctatttggtattgggttgctgacctttgctagtgttatagattttttgggtcctgttgtgtactaataaatgcaggatagaaaaagtctataggtgcctagaagaaaagacaatatatggtgtggagcaattacatttgatcacaagggaaaaggtgcaacggtttgcaagatagcatagaagattttgaagaatcttaattgcaacatagtagcgcagttgcaatgggggctcctttatcagcatggccttgggataactttggaacatacaagtatctattatatggaccgttt

SEQ ID NO: 6042 - DNA, 362 bp, Glycine max
  Clone ID: jC-gmfl02220077a06d1
ggggttatggttactttttttttcagtttttgaagtttctgacacaataaagcagaaaacaaagaaaggtaagccatcaatgaaccctcaccagagaatggatgtaagagcaagaaacatacaaaagaaagggcatcaaggcgagaaagtgcaaaaccgaaacaagagatgcaacagaaccaaatttgaggcgaaaatgaaccccgaacctctggaactctgaaaaacctaagccacggaccgacaaagcgaccttgccatgaggatcatcaggagatcgaaaaatactctcccgtacacctccagagaagaaaccaatagtctaagccaatcctttggatgacagaaactgctgacaagca

SEQ ID NO: 6043 - DNA, 511 bp, Glycine max
  unsure (1)..(511): unsure at all n locations
  Clone ID: jC-gmfl02220077a07a1
cacaagtgttcttcctctgtaaacacacaaactctgttcctatttcagagtactgtccctttacctcgtacacatcaaacaatggaaggagatgggtattgcgggagtttctttcagaggtgcaagccttacatagccatgatttctctgcaattcgggtttgcgggtatgaacataatcaccaaggtttccctcaaccgtgggatgagccactatgtgcttgtggtttatagacacgcctttgctactgcagctattgctccttttgctattgttctagagaggaaagtgaggcccaagattacatttctcatgttcatgcaaatattcgtgttgggtctccttgggcctgtgattgatcagaacttatattatgcggggttgaaatttacttcccctacctactcatgtgcgataagcaacatgctccctgctatgacatttgtgatggctgctattttcaggatggagaaagtnaacgtgagatacagtagatgccaagcaaaggtga

SEQ ID NO: 6044 - DNA, 518 bp, Glycine max
  Clone ID: jC-gmfl02220077a07d1
ctgcaaatgtcaattttcctttcaccaaagggtgcaaaatttaagttacattatggacagtaaggtccacacataaggtcctaatcaaaatacaaaaaagaaagaaaaaaaataagccttagttaattttccgaagaaagatggtgagtacacaaaacaaaacccctttcaatttctctgctctcaattaaagaccccttttttcattgcagcctctattattattcatccctttcctttctaatcttaaccactttaaacttttggaactccaatggctacccttaactctcttgaggcttcacccttttgcatctcaatgtcgttgtttgtttcagcatcttctaccacagtctccaacctcatcccattttctgaacaacacttcaatacctcaatggttatctctgcctctttctctttggtctccttgtgcttgccccacagaaccgagtaaagtcccattactatgagaatagctccaatgaccccttcaagaatattttttctgcaaggat

SEQ ID NO: 6045 - DNA, 582 bp, Glycine max
  Clone ID: jC-gmfl02220077a08a1
cgcacattctcctcaaagacaacaatggcaccaacagccaagactctgacttacctggcccaggagaaaaccctagaatcgagcttcgttcgggacgaggaggagcgtcccaaggttgcctacaacgaattcagcgacgagatcccagtgatttctcttgccggaatcgacgaggtggatggacgcagaagagagatttgtgagaagatcgtggaggcttgcgagaattggggtatattccaggttgttgatcacggtgtggatcaacaactcgtggccgagatgacccgtctcgccaaagagttctttgctttgccaccggacgagaagcttcgttttgatatgtccggcgccaaaaagggtggattcattgtctccagccatctccaaggggaatcggcgcaggactggagagaaatagtgacatacttttcgtacccaaaaagagagagggactattcaaggcggccagacacgccagaagggtggagatccgtgactgacgaatacagcgaccaagtaatggggtctagcttgcatgctcatggaggtgttgtccgaagcaatggcgtagagaaagag

SEQ ID NO: 6046 - DNA, 515 bp, Glycine max
  unsure (1)..(515): unsure at all n locations
  Clone ID: jC-gmfl02220077a08d1
gcagccaataataaagacagtgccacttattttcatttataatagaggcaaatataaggtatacatagatgagccagctagctaataagacataggcaactgaacacaacacatgatatccccacaaaggataaatcataagacgtacaaaagcacaaaggtaaggactattattaattcatggcccttaaaaaatactaaaaacaccaagggggcatgcaaatgatacatatgtaattattattaattaagcaagaatctccttcaaaggcttggcctcaagttttgccttctgatcaagttcttgcaaatgcttttcattctcaaggtcctgcaaatgcttttccttagccagcttcttcatccttgcaatctcaatgtccttgctcatcttcctcctgtacatttcagcaaaagtgattggttcctccatcacaggcttctctccttctcttatcttcagagggtaaacagttgcatttggtgctgggttntgaaaagtggctatggacaaa

SEQ ID NO: 6047 - DNA, 532 bp, Glycine max
  Clone ID: jC-gmfl02220077a09a1
tgaagacagtgttaatgcttgcggatcaattgattaacagagttgaatatatgcattcaagaggtttccttcaccgtgacataaagccggacaattttctaatgggtctaggacgaaaggcaaatcaagtgtatgccattgactatggccttgcaaaaaaatatagggatcttcagactcataggcacataccatacagggaaaacaagaaccttacaggcacagcacgctacgcaagtgtcaacactcatcttggaattgaacaaagcagaagggatgatctggaatctcttggttatgtgctcatgtatttcttaaaaggaagtcttccctggcaaggactgaaagctggcaccaaaaaacaaaaatatgataaaatcagtgagacaaaggtgtcaactcccatagaggtgctctgcaaatcatattcgtctgagtttgcatcatacttgcgctattgccgatcactgcagtgtgaggacaagccagattattcgtatttaacgagacttttccgagacctatttattcg

SEQ ID NO: 6048 - DNA, 538 bp, Glycine max
  Clone ID: jC-gmfl02220077a09d1
agcttgtaaataaattccattcttaagggcagttttaatatgtaacatgcaggcagcgttggacctcattgttaagaaacaagaacatggtgttgtatcatggagcgtactacaacttaggtctcatctagtacagtaattaaatattaaaagaatttcagttgaattctcttcggcacgtcttaagaacacgctacagtggctgagaaacctggtgaaacaacaattctgggggcagaaaaaagtccacctttgtccaaaactgatatcaggagatcatgccattatgacctcaactcttgggtttctttccataatgcttgagactattcttgaataaaaggtgatcttgcatctcaggagtgtcataattcagaatataacaacaaaaagacacaacctttacttaattacttcctgatattgaggagctcaaagttccgcagaggatcatcacggcctcttatagagccaccatgcgtataagttgcttggttggtgtcatacactggttgaactctgtgagcaccagatggac

SEQ ID NO: 6049 - DNA, 542 bp, Glycine max
  Clone ID: jC-gmfl02220077a10a1
gaagaaacataccgaatgagagcatcaaactcttcttcttcgatttccattgcgaagcgttactttttcttcttctttctcttcattttcttcgctcttcgatcttcgtccggggactgctccgaataccaccaccaccactcgccgatggccacgatcggaggcttacacgactcccaaggctctcaaaacagcgtcgaaaccgaagccctcgctcgattcgccgtagacgaacacaacaagaagcagaattcgcttctggagtttgctagggtggttagggcacaggaacaggttgttgctggtaccctgcatcaccttactcttgaggctattgaagctggtgagaagaagctctatgaagcccaggtgtgggtgaaaccatggcttgattttaaagaacttccagagttcaagcctgctggtgatgcaccatcgtttacctctgctgatcttggtgtcaaaaaggatggtcaccaaccaggatggcaatctgtgccaacacatgaccctcaagttcaagatgcagcatatcatgcgat

SEQ ID NO: 6050 - DNA, 573 bp, Glycine max
  unsure (1)..(573): unsure at all n locations
  Clone ID: jC-gmfl02220077a10d1
aaatacaaatggtcaacatccgcattttttatgatactaaagtaatatttacgttacaaagttactaatgtaacatcaccggtagcttcccagttaataaagggatacacacattgtaaaactacttatttgccaaggcacagagaaaggggtaagcactagacatagataagaacaatattgctagggtgaccaaacttcagatcagaattaggaatgatcttgttccatctgatttagatggaaccccccttggttattcttgtgtacctctaccttaaacttctcttccttctgtcccctcttgactttgagaagcagattaaacttagcaaaatcatcaatgacctcagcctttgcatcagcaacctcatgaagctcatagggtactagtgaattagacctttgctggatggtcttgatcgcatgatttgctgcatcctgaacttgagggtcatgtgttggcacagattgccatcctggttggtgaccatcctttntgacaccaagatcagcagaggtaaacgatggtgcatcaccagcaggcttgaactcttggagttcttgaaattc

SEQ ID NO: 6051 - DNA, 501 bp, Glycine max
  Clone ID: jC-gmfl02220077a11a1
ccaaatggtacatccaatttgtcttcccagagtcatactagtggtgttgtgtcaaagtctgcacccccacctaactcggcagaagggaagggtttgacatcattattagaggtctcatcaactcatgttaagcataaccagccaaaacatacaaacaaggcaccagtttcggtcctccattcacctgttgcaaagcttcccgcatacaatcaaggaaagagcggattcctctatccaaacaacttgcttaatgtgaaagctaacacaaagggctgggttagtactgaaaagttgaaacagagaaacaaggtcaacgattcactcaatgagcataatcaaggtcctagaacagctaatgcaaaaggtgcattaatgtctggaggtaattctgtgagaggctcagccccaggtgggagtggaaatgctaccaacaaaatcaggacagatcagtacaaccttcctgattctccacccaatatgatcatgcacttttctttgtca

SEQ ID NO: 6052 - DNA, 501 bp, Glycine max
  Clone ID: jC-gmfl02220077a11d1
ggaagaaccaaactgagcttattatgtgcaaagaaagattaaagaaaaaagtaaatgacacgtgcttttcatagcaccctgtaacagctatctcaccgggtccattccacttccaaagaacttctttcctttgtagttttgtacaattaggaatgcagtcaccatttgcccggataaaaattattattattttttctttttctttttcttttctccctttctaaagcatcagcagcagcaagaatttttggtttagaacttaaaatttgaattcattagcttttttttttcttactttgtggtccacgtggcacatcgccacaccatcgtgatcggcatgctggcatggcgggtccccaggaatagcatcagccccacatgctattcagtcattcactctctcaaccaccttaggatcctccatgttcttacagatgataggtctactgacccaagtgtaatggttaattcctctatttgctgtacactggtatggggcat

SEQ ID NO: 6053 - DNA, 398 bp, Glycine max
  Clone ID: jC-gmfl02220077a12a1
gaaacagtgtttcatcatttgggtttcgcagaagagagagaaacccatttctagagagagaaactcgcagtcgcagacatgtcttccttcgatgccttcgccgacgacttgaacgtcaactcttcttccactcgccagcacgacgatgacgaggacaacttctctggctacggcggctactcctccttcaccggaggattctccgccgacggagatgtcgccgtcgatcactccgccgccgcgtcgtcggagatctacggcttcactgattcgaatcccgcttactctcagtctcccttcgaatcggccaccgtagagaacgaaaacggaaacggataccgcgacggcgaccgtgtttttgtctccgacggttcggtgctttctccgacgacggagat

SEQ ID NO: 6054 - DNA, 526 bp, Glycine max
  Clone ID: jC-gmfl02220077a12d1
aaacaactgaaaaatattaaacattgtatttgtctatttgacaccaccagacagcaattattccaacatatactctgtctaaaaggatgtactatttaaacccatgatcattgaatctccacgtcataattgttaataatggatttaattcatacaaaaccttaaagttaataataataaaatgcaaccgataagcattagaaactaatagcagggcaaaaagattcattaaagactgcagggtggagaaaggggtggcagaagaaagattgagggggaaccaaagtatcatagacaaaatcatgcagcaggctgctcctcagtggcaggagcttctttctggggttcttctgtgaagccattagaggtggcatcctttggctgtgaatcaagtgcaccttctgctgcagatccagttgcttttgatgctgctttctcttttgcatccttattatctttggcgtctttagcaagagccggtggtggaggaatcatgtgaggtggggtgtatgcttcagctttaaca

SEQ ID NO: 6055 - DNA, 481 bp, Glycine max
  Clone ID: jC-gmfl02220077b01a1
ctcccacaaacgaagccctagaacgccatctcgaccccgatcccaagcgttttctcctcaaggcctcctggtgacccacatcgcccacaaaagaatcaccaaacccgaattcaataccgggtcgacccgacacagaactatagcgtctgaccaccacctcactctccaagccctgaattcgactcactgcaatgtagagtcttccaggggtattaaccctaattcggaaacccgacacgacggagtgatccacggcatctacactctgctcatccctcgctcagaccaagacgaattcgaccgtcgtcggaatctgatctccatcgccggggaaaaacccgaaccatccccggaggtcgaccgcgaaacccaccgtataaagaaaccggctcctgtatcggcggcgggggccccgccggctctcccgatctacgacgcgatggcgcctgtgccatcagttgcaccggcgccagcgcctggt

SEQ ID NO: 6056 - DNA, 463 bp, Glycine max
  Clone ID: jC-gmfl02220077b01d1
gaacttaatagactgtttactttttatcaataaatcaacaattttcatgtaataaagaaattatacaagtgccatcattttacagaaaatgaaaaataaatacaaatggtaattccttgaaaaagaaaaaaaaaagtattacaattatatcctggttaattgtgctaaggggaataaaaaaaaatccaaaacttgtacttgctttgttgctctgatagcacattgcttgcacccgcgcccctttcctgagtatttacctgttgggcgggtcacagctgagaccaggtatcagcagcctgctgataggatcgacagaacatgagcatgagctcctgatttacaattttttaagcaagaacatgagctcttgataggatcaaatgagtacaagcaacgtggcccgacaactttgtgccagatgactgacaactgttcaccatggcaattcctggtggatgcttct

SEQ ID NO: 6057 - DNA, 280 bp, Glycine max
  Clone ID: jC-gmfl02220077b02d1
atataacaagatttacttaacaaaaccaaccacgatggatacaattaattctctcctatttctgccccccaccaaaatcgttgagccattcaccatatgatatcaagcatagcctctcctcggttatatacactcatctctgtacacactcgtcaacgccaaaagggctttaaaaatgtaaatctattacacctattggaaaaaacagatgtattgagatattataagctatgctctagcggactgtacatcattcatccctttacccacccaaaagaaa

SEQ ID NO: 6058 - DNA, 499 bp, Glycine max
  Clone ID: jC-gmfl02220077b03a1
catgggtggagctgagatcattaaatctgaccctgatgtacattcagggagactgtgctggagagatcatgccgctctgtgatgagcaaatcacaccaacaatgcacatatcgtgtgtacatggaagcaagaccattggaggaaggtctcgccgaggccattgtcgatggcaagattggaccaagggatgacccaaagagtcgctccaatatcttcggagaagagtttggctggtacaaggatctcgccacgaaaatcttgttctttggccctgagacccttggacccaacatgttgagggatatgttgtcagaagtccagtccttgaatgaaatcaatgattctgaggttgctctagttcagtgggcatcaaaagaatgagctctggccgaatataacatgtgagccatttgctttgaagcatgtgatgtagttatgcacgctgatgctatccacataggaggaggtcgaatcatccctactgccaggagagtattct

SEQ ID NO: 6059 - DNA, 450 bp, Glycine max
  unsure (1)..(450): unsure at all n locations
  Clone ID: jC-gmfl02220077b03d1
aatcagaattcagtaatcacttaagctcaatatcaatagccattgttggggggtaaagttcaaactcccattgagaaactttactacatctaattaaagatgaaattgattaaaacataacttaatttcaactcacagcctacaaaattacaaattaaaccatgaaattcaaaacagaaaatcctatgacataatgaaaatgcaaatccacaaaatctggtgctgaacaatgaaagcaaagcaagctgctccttttgtagtttgtgcactatccatgactcaaagcatgcaatcagttcttgcaggcagcctcctgaagaaattcagaggcaccgaaggaangcttgtggcggaacctggggtgtctcaacacatagattccagtgaaaagtgcgacaatttggaaaggagtgacatagagtacaatggcagcaaccagacagaaaatca

SEQ ID NO: 6060 - DNA, 624 bp, Glycine max
  Clone ID: jC-gmfl02220077b05a1
gtaatccaggaaatttttgtaagtgagcttattctcttgggttatttagcagtaatatataaggattagatacttcaattaggaaacattgtttatgtcctcaggtggtgaagaaaaatcagattcaaatcagatgaagagtgaatattttagaattaaaactagcattatattcctgtactgaaataatacgataaagtcatgattacatctagctacttctctgtatccatattaatgtcatttttttgaaattttcatcatttattacattctatatcattttctctcattttaaagataaatggttcatgtcagtaagtctctatgactttatgaatgccacatgatagataaaatgattgtttttgaaagatgggaaatttgagcatattatttagaattttattttatttgttataatctcattaaatgaagtggtggcacatcattcgatgacaatgtaaaaaaccattttatattgacaatgcgtcaaaattaatccattataaatcctgttgactggctttcttactggttttctattttcttagagctataatgggtttgcaattatcatactgctctactgaagagccttatattatatttgcatcattcgca

SEQ ID NO: 6061 - DNA, 410 bp, Glycine max
  Clone ID: jC-gmfl02220077b05d1
ggaaccctaagcctatggttggctataaattaaatcgggataaaacaaatttttctaaaaatcagatacccagatttttcccgggttgggccggtttttccaagggttctgggaaaaattatgggagtttaaaagggttttaaagggcagggggtaaagggttaattccaaatccggggaataaccattggcccaaaaattagtaatacccccccatacgggcaacacaacaataaaaaatttgaaagcacaggttgggtatccaacttattttgggaatcaggtttaaagcccgcccatttaaaatttttgaaaggcgcgttattttcccaaaaatccacgtccctaaaaaaaataaaaactttttctataccctttactttaaccacattcggcccataaggaatttt

SEQ ID NO: 6062 - DNA, 516 bp, Glycine max
  Clone ID: jC-gmfl02220077b06a1
ctctatcgcttctagctgtagagaatacagattattccaaacctctctctttctctcatcccctttttgctccttcttcttcttcttcttcttcttcttcttcattactcttccttgctccactcctcatattatctttttctgaagaaacacataatcatggaggggtctcacatggggttgttgctcttcttttgttcttccatgctttttgctgccttcgctgctgcctcctccagaaacttgcccataataccctttgatgaaggctacgcgcccttgtttggggacagcaacttggtcatccatagggatggcaaatcggttcatctttcactcgatgagagaacaggttcaggatttgtgtcgcatgatctttaccttcacggatatttcagcgcttctattaagttgccttctgactacactgcaggagttgtggatgccttctatatgtcacatggtgacatgttccagaataaccatgatgaaatcgactttgagtttttggggaac

SEQ ID NO: 6063 - DNA, 420 bp, Glycine max
  Clone ID: jC-gmfl02220077b06d1
ttccaaatgtgacgggatcgaacctcctcagcctctcagcttcttgggaactgatgacacactccgaaggagggactttgtatctgactttgtcatagcagtaggagtatgtcatgtgcttcttcctgaaattctccattttgattctttgtgctggtgtaacaccagaagaaggaattgttgtagttgcctcagaactttgaggagcattgtcacacttggccacgtgctgctcaattggatccactgcacaaccgtgcagaacaaggtcagagaattcagcaacatagggtgcatacttgtagttaaccctgtatttgcccccattggtagcccaatcagatgcatcccatattgttgcatacaaagtcattggcttagaagggaaatcccctccatagattctgttcgagtcacttc

SEQ ID NO: 6064 - DNA, 513 bp, Glycine max
  unsure (1)..(513): unsure at all n locations
  Clone ID: jC-gmfl02220077b07a1
gaatcctggtctctgtctactcttcaattattcccaacctctcacctcttcatcttggtcttccttacctttgaccagagacagagcagcactcacattcacaacgaaggtttcctattcatcagacatggtgaaggcaatcagagttcacgaactcggtggccctcaagctctgaagtgggaggatgtggaaattggagatccaaaagaaggcgaggtccgtgtgaggaacaaagccattggggttaatttcattgatgtctactttcgcaaaggagttaacaaagccccttcttttcccttcactccaggtatggaagctgctggggttgtgacagctgtgggtgctggactcactggtaggcaggttggagatcttgtagcttatgcaggtcaaccaatgggttcatatgctgaagagcagatacttcctgcanataaagtagtccctgttccttcgtcaattgacccagctgttgcagcatgcatcattctcaagggcatgacaactca

SEQ ID NO: 6065 - DNA, 434 bp, Glycine max
  Clone ID: jC-gmfl02220077b07d1
gagggaagtcctttttaaccaaagtcaacagaaaaatcattatttaagtccaatgattcatgggaaacaacatacatttgccctttcaattcttaataaagagttcttttcaagaggaagcaaaccgggacttgggggttaacacatacccaactgagaggcttaggggttcaacacaaccgaacctgacgtatttcaattctccaagtcttcgggggcttttgcacccttaaacaatgggaaagtttgattaacacggacctttaacccaccgtaagcaacgttagcaaacaccttttcagcagccttcaacagcttatcccgaggggcaacattttggattagactaggcctagtcaagaaaagggattttgcaaccagggaagattatggaaccggattaggtgaaccaaatgactgcccaaaacttacca

SEQ ID NO: 6066 - DNA, 530 bp, Glycine max
  Clone ID: jC-gmfl02220077b08a1
gaagaaaccgcatacgatcgtgaagagtgcccgatttgctttctgtattatccaagtctaaaccgatcaagatgttgcacaaagagcatttgtacagagtgctttttgcagatgaaagttccaaattcaacccggcctacacaatgtcccttctgcaaaacggcaaattatgctgtggagtatcgtggtgtgaaatctaaagaagagaagggattggaacagattgaagagcaacgtgttatagaggcaaaaattaggatgcggcagcaggaacttcaggatgaagaggaaagaatgcacaaaagactggaaatgagctcctcgaatgtgaatgtggcagttgcagatgttgaatacagttcaaatgcagtgtcttcatcttcagtttctgttgctgaaaatgatgaaattggttcttctcaagactcatgtgccacatcagtggttagagcaaatgcaaccactatgaccaatagagatgatgaatttgacgttgaccttgaggacatcatggtcatggaagcatttgg

SEQ ID NO: 6067 - DNA, 518 bp, Glycine max
  unsure (1)..(518): unsure at all n locations
  Clone ID: jC-gmfl02220077b08d1
cttcttcagtacgtgtctaaaatgtgccatatattactgtaagaatgagagtacatctatcaaagacaaactatttacagaaaaccaatgagggggcaggagaggacatcgagcacaagtaaaaaaaatggcattaagcagcaacctttcaccaactagaatcattagttttcttttgatacttatatatataaatttgtgagaagagatcactacctgatccttgaacaaattgcatacgagtgaacttccctcaaattctcaaccttggacttggcttgtcaaatagccaaggcaagcatcaccaatttaagaaagattaaaccagcacctcaaccaaaaactactgccaagaagcactctgtccacttgacatggctcgagcttcagccaaagagacagccatggcgagcatcatctgctcctcaaaactctcgggaacaatgggttctgtggcactttgaaggcttccatcattgtcatcagaccgtggcanagatgatagttcaccacgatct

SEQ ID NO: 6068 - DNA, 534 bp, Glycine max
  Clone ID: jC-gmfl02220077b09a1
atcacttggtgtttacattcacaaatcacaatcccacacttccttcctcattgtcctcttctctcctcacatttcaacgcgccgccactctgcgatccgcgatgaattctcgtgaacagcctcagccacaacagccaccgcaaccacaaccgccaaacatgacggtgggacccaccatgtacccttcgatgttgtcccccgtcaccgccagattcccattcagcagcagcagcaacaacaatcctcctccttcggagcctctcaacaacgacaccaacgacaatgataacagcgcgttcgaggcgttgaagccttgcgcgctggccgcctcggaatcgtcgaagaagaagcggggccgcccaagaaaatactcgcccgatggcaacattgcgttgggcctcggcccaacccatgctcccgcttcctccgccgatccttccgccaaaaaacatcgcggtcgcccccctggttccggcaagaagcagatggacgctcttggaattcctggaactggctttactccccatgttatca

SEQ ID NO: 6069 - DNA, 523 bp, Glycine max
  Clone ID: jC-gmfl02220077b09d1
gtaacaagcatgggaatgtaatattctcaagtgcacattactgagaatcttccttcataacttacgacaaacggcttgtaacaaatattttatatcccacgtcaaggaatatgctgctgctcggttaagggactcatatctaatgaacgcaaccaaacgctataaccgctatcactgtttcaattatagtttgaaaatcctaatccacgggaaaataaaggtatgtaaataaatttagaccttaagatagattctcctaaaatcagtcccaaccaaaaccaatgatgcatgttatattttggaatttgacctctagctactgctttgaagaatcatcatgccaataccctgcttctgcagagttggacttaaaaacgcatcatcactgctgagtatggccagcccataattgatgttggtacatcggcatggtatgaatcggctggctagcattattatcgtatagtccagggcctcctggcccctgactaaaatgactattctcattatcttcagatgactc

SEQ ID NO: 6070 - DNA, 566 bp, Glycine max
  unsure (1)..(566): unsure at all n locations
  Clone ID: jC-gmfl02220077b10a1
gaagcacggcaaaactgagaggttgaattgaaccgacacgacagacaaacagtgccatgaagaggcactggcgcaactggagccacgacgacgaaggcgaaggcctcccagattcggattccgacacgcgctccagccggagattctctctcacgcgcctcatggcaatctttctcttctctctcttcctcttctccctcatcttccttctcccacatcctcccatccaatcagcttcaacagcaaagactctgcaccaattcaagcaaactcaacaaggtaacgttgctgattctgttgagttgcacaaagataaactacttggtggccttatagcagatggatttgatgaacaatcatgtctcagcaggtaccattcggtcacatacagcaaaggactatcgggaaatccttcatcatacctcatttctagattgagaaaatatgaagctctccacaaagaatgtggaccttatactngaacctataatnaaacggtgaaagatctgaggtctggtcatgntagtgagtccccagcattgtaatatgtggtatggatttcatat

SEQ ID NO: 6071 - DNA, 546 bp, Glycine max
  Clone ID: jC-gmfl02220077b10d1
ctataggaaacaatgtaaatttaaaatcaataattaattctatcgtacaacaaagtttgcaaaacttgtaagctagttttgacagtcatgatagcattcatgaccatatagctacttattgccaactattactgtctacaagcttaagaccccagctcatatcctcacagtgccttacatgtggaacaagtgcaccagtatcagttcctctcttagccttacaatcatagaagggaggagcatggaagcatggctccatcgacatggcacgttgacaaggaggatcaggagctgttccattctcgggcttgtacagtatccacggtttcaacccttcaagcccctgcgccacgtagccgaaagtagaccacgagctcgtgaccaacatatccatcaagctcaagaggtaaatttctgcccaagctttttggttgtgcatcttcttctctgtttgttgatacccttcatggcttggctggtaaatgccaacaacttctcctgtcacagttgggtgttcccaaaacatgtctctcaccttttcaaaat

SEQ ID NO: 6072 - DNA, 534 bp, Glycine max
  unsure (1)..(534): unsure at all n locations
  Clone ID: jC-gmfl02220077b11a1
acaagaactctccaaggatcctccttcccacgagattctttggtgggaaaaatccaagaggtttgaaatttgaaggcagggaagatggattatttcaatgcaccatgaagaaaccatctctttggtccagggccggttaacattccggaccagatcatccggtccatgaacagaaacaatgaggactaccgttctccagcaattccagctatgacaaaaactttgcttgaggatgtcaagaagattttcaagaccactactggaaccccatttctcatccctacaactggtactggtgcttgggagagtgctctcacaaacacactgtctcctggggatcgaattgtatcgttcctgattggccaattcagcttgctttggattgatcagcagcaacgcctgaagttcaatgctgatgttgctgaaagtgaatggagccatggtgcttagcttgatgatctggaatcanagatagcttcagatacttcacacactataaaggcaatttgcattgttcacaatgagactgcaact

SEQ ID NO: 6073 - DNA, 512 bp, Glycine max
  Clone ID: jC-gmfl02220077b11d1
acaggacaataaaagaagcaatgcattaaagctgaaagtagaaagtacgttcatcttcaaaggagtgtaaaagagggtaatatatattttacagaatttctgaaagagcagaaaaaaggaagtaaagacaagaatgatttgtgactcaaatcctggaagggatcataggaatagtgttctgtaagtatgcactggcagcagcaactccacttccaagctttacaggataacccacatctttgagtatcatctctacaccagctagacatcccaacagttgcaactcattcaagtggccaagatgtccaattctgaaaaccttcccagcaactttgttcagtccaagacctaagctcaaattgtatctcttccatgccctcctaactatttcagtactatcaatgtaagcaggaacaagaacagcagtcacagtgtcactgtaccactcttccttttgggtgcaattcttcaaaccccatgcctttacagcaagtctggttgctttgcctaaa

SEQ ID NO: 6074 - DNA, 527 bp, Glycine max
  Clone ID: jC-gmfl02220077b12a1
aacaaagacaaaaaccgctctcttctccaacgctgtctgtcaccttaaaaaacaaagttccacttcatcagattcaactaaaccacaccattcgcatcaacacagcacttgtttgttcccaactccgaaaaatatcatgctcctaacgtaaaatcctcggtttcaacgttcaaccgcgatctcaaaaaacaaaactatggcatcactctcaggcatttgctcctcttccccgactctcaaaaaattcccaaaccaatccccatcgttgaccgaccctctccgcaaagaccacgtgtccttccccgcacgcctcgccgatcggaccctcagcctcgcgccgctccgtgcggtggctcgggaggtttccgacggaacgttggcggcggcggtgaagaaggggttggagaaggatccgcgcgcgctgtggcggagatacgtgggttggctataccagcacaaggaacttgggatttacttggatgtgagtcgggtcggttcaatgatgagttcgcttaggagatggaccc

SEQ ID NO: 6075 - DNA, 497 bp, Glycine max
  Clone ID: jC-gmfl02220077b12d1
aggcagcgaaaggaacaattttattaattatatttacccactggattctccatttggttacacgtagttccaattcagaacaccaaaacactttcaagaatttgtcttaacagaaatttccactttcgttaatgatggagattcaacattgaaaccaaattattgcaggcaacttctcttctgttggtccgtgtattcaaacacaattgcaacattaccaaaacatgaattctggtagtcgtctaactcatgcatacaacccatcaatgttacattccccaagaaaaaccttgatgctgcgtggtgaaccacagctgccttcgacaatcaatgctctgtcattggcagccatgtgtgcgataatcttgtaaatcatttcgatatcttcaggagcatggcaacggtctgctacttcttcgagggtcaatggttctacaggttctttgcagcttgcctcatttagcactgccaacactcgcttctgaagtgctagtact

SEQ ID NO: 6076 - DNA, 521 bp, Glycine max
  unsure (1)..(521): unsure at all n locations
  Clone ID: jC-gmfl02220077c01a1
gtagaatagtaatagtggtaacaaaaggcaacagagaacagaagagaaaggaaaagagagggtttggtgagttacccaagagaaaggatgaagagagagcgccagcagcttggttccaacgcaagaacctcaagctgcggttattcaagcggaaaatcgaatctttgggaggaagaaggaggcatggacgagcttcttgcagtggtgggttacaaggtgaggtcatcggacatggcggaagtggcgcagaagctggagcgtcttgaggaagccatgggaaatgtccaagatgacctcacggacctttcaaacgacgccgttcattacaacccttccgacatctccaactggctccaaaccatgctttccaattttgaccctctcccctccgaggagcccgagaaggactccgtctcgtcggactacgatctcaaggctattccggngaaagcaatctatggaggtggtagtgacgcgctaccaaaccctatgcgcgtgagaaccgactagtcaacgcgcgc

SEQ ID NO: 6077 - DNA, 458 bp, Glycine max
  Clone ID: jC-gmfl02220077c01d1
atacaacgtggagtaatttaatcttacatgtttcaagagacaatgtccaacttctgaaacagacatattgacggtataataacaaaactgaaagttggtaacggggaaaaggtataagaaatctcaacaaggggattgaaatttattcatgcaaatttatggttcattctacctccataggccaatttgctctcatcagatcttcgacctgctttggttgccacgcttattctgcttgagttatggcaacagtcggaacttttggaaaacttgcgatcatgagagctaaacttcatcccaggatagactttagcatcatcctcatcagataagctttcatcatgcatagagccagagcccctaccctcaaattacgttgatcttgatttaacagcgcatggggttaagcatggatttagatcattcagtaataggtcgtcagattggtcatcagagct

SEQ ID NO: 6078 - DNA, 528 bp, Glycine max
  Clone ID: jC-gmfl02220077c02a1
aaagattttccttgaccatggggcaaaagcatttagtgacggtgttctgtttatgggctttaacatgttcccttcttccatctttctcctttggaattctgagaattggtttgaagaagagacctctagatcttgatagtattaatgctgctagaaaggcaagagaaggtctaagatctgtaagaccaatgatgggtgcacatgatcagtttattggtaagtcaaaaggtgaagatatagtacctttgaagaattatttggacgctcaatattttggtgagattggaattggcacacccccacagcccttcactgtagtgtttgacactgggagttccaacctttgggttccatcatcaaagtgctactttactcttgcttgctatacccataattggtacacggctaagaaatcaaagacacatgtcaaaaatggaacttcatgtaaaataaactatggaactggatcaatatctggtttcttcagtcaagataatgttaaaggtggcagtgctgttgtcaagcatc

SEQ ID NO: 6079 - DNA, 392 bp, Glycine max
  Clone ID: jC-gmfl02220077c02d1
atggtaaataaaattcatttcttggtgaaaaaatgacaaataacatgaattagaagcgcatttttatccaccacattattgggctcagactaagcaaacctaaaataaaaggactcacgaaatatataactataaaatctcacaaaacaatctatgcaaacaaaatcacactgtctacttaatttctaaggctctaatttaaccactttttttgggtacttcttcatagctgcacttaagcctgtataatgcaattctagtaataacagcactttgtctgtgatgatttgtatcttcttgatgatggatggcaatgaaatcttggaaaggacttttttctttccgaattgaaaatgatttgagctaaactagctgtagatgattttggtact

SEQ ID NO: 6080 - DNA, 462 bp, Glycine max
  Clone ID: jC-gmfl02220077c03a1
ggctcgaggttttgtttatttgaaattaacatagttgcaaagatgtttggaatcatcggaggaaacaagggtcacaagataaaggggaacttggtgattatgcgaaagaatgtgttggatatcaacagcattaccagtgttaagggtgtcatcggaaccggcattaacatcattggaggagtcgtcgacaccgttactgctttggcgtcccacatctccatccagctcattagtgccaccaaggctgatggacatgggaaaggaaaagttggaaaggctacaaatttaagaggacaagtgtcgttaccaaccttgggagctggcgaagatgcatacgatgttcattttgaatgggacagtgactttggaattcccggtgcattttacattaagaacttcatgcaagttgagttctatctcaagtctttaactctcgaagacattccaaaccacggaaccatt

SEQ ID NO: 6081 - DNA, 455 bp, Glycine max
  Clone ID: jC-gmfl02220077c03d1
agaacacttaacagcaatttatacaaacagaatttcttcattaacacttaacagcaaacacgagaacattcaatcaccccaaatacataacttaaccatacataggtagatgaaggaatcatattccttctattcacttttattgaaaaccagggaaagtactgcaacaaccatagagcccctagatggagatactgttgggaattcctctgaaagtcaatccctcctcactagaaggatagagcaaagtgtaaggcattttagccggcccactgcggtttctcaacgtctcgtccttgatcttctgtataagcttttgttcaatctcttgaagcttctttccaaacctcttgaaggcctctagtggaccagcatcagaagtccaatagtcaccaccatctctctccccaaggtagaactcatcagatgtgtgccttgacaagatttttataatt

SEQ ID NO: 6082 - DNA, 556 bp, Glycine max
  Clone ID: jC-gmfl02220077c04a1
ctcaaccaaggttgttccttccaccttcgccatgagtttcatctttggaaagcgaaaaacccccgcagagcttctgcgggaaaataagaggatgctggacaaatcaatcagagaaattgagcgtgagcggcaaggattgcaaacacaagaaaagaaattgattgcggagataaagaaaagtgccaaacagggccagatgggagctgttagagttatggcaaaagatcttgttagaacaaggcatcaggttgagaagttttataagctaaaatctcagctccaaggtgtatcactcagaattcagactttgaaatctacacaagcaatgggtgaggctatgaaaggcgtgacaaaggccatggggcaaatgaataggcaaatgaacttgccatctttgcagaaaatcatgcaagaatttgagagacagaatgagaagatggaattgacatctgagatgatgggagatgcaatagatgatgctttggaaggagaagaagatgaagaggaaactgaagatctagttaaccaagtccttgatgagattggaattgacatc

SEQ ID NO: 6083 - DNA, 507 bp, Glycine max
  Clone ID: jC-gmfl02220077c04d1
gttacacagcactatttatttattttttttaaaaaaacatcatttttatataattatgagttcatctaatcctggcacaacttcccaattatgctatatatggtacatatgagcatcaatttccccagtaaaactggagtccctgatatcatatagaggatagattacatttttcttaaattgtctaaccttgcctgtaaatcactatctatcccgccatcatcattcccagtcgtttcaacttgaggtacctttgtctttgcagccggggcagcaacagctgatgatggtgcatttacaagctcttggttgatgtcaattccaatctcataaggacttggttactagatctttagtttcctcttcatcttcttctccttccaaagcatcatctattgcatctcccatcatctcagatgtcaattccatcttctcattctgtctctcaaattcttgcatgattttctgcaaagatgggcagttcatttgcctattcatttgccccat

SEQ ID NO: 6084 - DNA, 310 bp, Glycine max
  Clone ID: jC-gmfl02220077c05a1
gtgagtgtgctccgtgatctctcccttcagtagcaatgcatgatgattgcctattgtaacccctaaataagaaattttgacgacatggtcattgacaagtgtgggataaataggaatctggtgtgattaattttaggtttaccaattatgtgtgttgtggagtctgattagctaggttaatcttagtcgatttcagatggctttctcatatctagtttacaatgctatattatttaggttttttaagcacatactcctaagacgcgcattatcaattattaaataatacatggaaagaatttgcgatggg

SEQ ID NO: 6085 - DNA, 310 bp, Glycine max
  Clone ID: jC-gmfl02220077c05d1
cccatcgcaaattctttccatgtattatttaataattgataatgcgcgtcttaggagtatgtgcttaaaaaacctaaataatatagcattgtaaactagatatgagaaagccatctgaaatcgactaagattaacctagctaatcagactccacaacacacataattggtaaacctaaaattaatcacaccagattcctatttatcccacacttgtcaatgaccatgtcgtcaaaatttcttatttaggggttacaatgggcaatcatcatgcattgctactgaagggagagatcacggagcacactcac

SEQ ID NO: 6086 - DNA, 147 bp, Glycine max
  Clone ID: jC-gmfl02220077c06a1
cttatcttgcaacagaccaatctgcactttgattctatgattcattatcagtttgggggtctcgctaaatctgaaattttttctaaaaaaaaacttttggggattcgatttattctggctgggcttgactgaaattgtgcctatcac

SEQ ID NO: 6087 - DNA, 505 bp, Glycine max
  Clone ID: jC-gmfl02220077c06d1
gacatctaataatctcgtgacaattttattgctaataagctataacaacgtccaaaacttcaacaacgatctgctgcatgttctaaaacaagtacccaactacaacattgtctaaaagagaagctgacataaatgtataacatggtaaattttctaaattctgaatctaagccagttttctactttggttgggttacaaatgtgtctaaacttttaataaaaatctaatcaccaaaagccatccatcccttcttttctttcggtagagactgggaggagagtcctgcatcctgtttgtccccattgatttcatcctcaacatgggtgtcttggatggacaaacttaaccaaagttggtaatcacctgtaagtgtacatgcaagagcctgggcacaaacaaactatggacctacattctatctttttaaagtgcaataatgccatgaaaatggacagatagtgtaccccagtgacatgccctgccatgcccgggtctagaacgaat

SEQ ID NO: 6088 - DNA, 385 bp, Glycine max
  Clone ID: jC-gmfl02220077c07a1
cgctctccgagatggccgccatcgtctccctcatcgcctccgtcgtctacctcatggccttcttcggcattaccttcatcctccacccattccttaattcccgttcttctcctgacgatgacatcgacctcgacattcccaaattacctgtccccactccctgctccgctgcccttcctccaaaactccctcctcccccactccctcaccacgacgaggacatcgtcctcgccgtcgtgtccggctccatcccctgctactcgctggaatcgcggctcggcgattcccaccgagccgcgtcaattcggcgcgaggcggtggagcgtatcaccgggaggtctatccaaggccttcccgcggaaagctttgaatatgactccattct

SEQ ID NO: 6089 - DNA, 527 bp, Glycine max
  Clone ID: jC-gmfl02220077c07d1
acaaagaaaacagacaagagactaaaatatcacatccttgatacatgtgctttagatgatgagaccgacacacatcacatacatgtgatgaaaacaagtttttcaacaaaagaccaaaaaaaaaaataaaagagtaacaaaactaagtcttattcatgttctgtacacatcagaaacagacattattaatgaagtactgtaaatgcaggtttatctcccaccaacacgaattaattgtccttctgaagctaataattatacaattgcattgcatcctttgcttttactattgacgatacaaatttgaagttcttgtccagctaggaggcaattttggtgatatccttgctagatctgttgtatttcatgtggctattaacaagttggcctgctgcaattgcagacatgagtgagagttcccctgctaggactgaacctgctactatggttgctagtaacctagaatttgcacctggggactctttgctcgcaccctttactcctaataaattaaggcatgctgactg

SEQ ID NO: 6090 - DNA, 271 bp, Glycine max
  Clone ID: jC-gmfl02220077c08a1
ctctatcgaaggtggcctacattgtctacctaatcgcctctggcatttggctcatgtcctccgtcggcaacaccttctttctccacccattcactcacacccggattattcctgaccatgacttgaacctcgagatcttcaaatcgcctgttctcacatcctgctggcgtgcgctgtcttcgaaactgcctctttcgctactacctcaccgcgacgcggacatagcactcatcgtcgtgaccagattcatcccctgatactcgttagaatc

SEQ ID NO: 6091 - DNA, 481 bp, Glycine max
  Clone ID: jC-gmfl02220077c08d1
acatataaaacattcacgagactataatctcacatccttgatacaggggctttatatgatgagaccgacacacattacatacatgtgatgagcacaagttctacagcaaaagacctaagggtccatttacagattaacctaactagagcctaattcatgtacggtacacattatggtcatacattattaatgaagcactgtaaatgcaggttaatttcctaccaacacgaattaatgggccttttgaagctaatgattttacaaatgcattgcattctttgctattactattgacgatacagatttgcagtatattgtgcagctacgaggcaatactggtgatattcttgctaggatctgatgcattttatgcggctattaacaggttggcctgctgctatggcacacatgagtgagagttcccctgctaggactgaacctgctactacggttgctaggaacctagaatttgtacctgggg

SEQ ID NO: 6092 - DNA, 555 bp, Glycine max
  Clone ID: jC-gmfl02220077c09a1
gtggaatttccgccgccattcgaagctacagcgatggccataaccgccaccatttccgttcccttcacatcccccagtcgccgcactctcgcctccgtcaatagcctctctccgcgttctacccgatccactttgcccacaccgcaacgcactttcaaataccctaattcgcgcctcgtcgtgtcttccatgagcaccgaaacagccgtcaaaacttcatccggctccttcctcaaccgcaaggagtccggcttcctccatttcgccaagtaccacggcctcggaaacgacttcgttttgattgacaacagagactcctccgagcccaagatcagtgctgagaaagcggtgcaactgtgtgatcggaacttcggcgttggagctgacggagttatctttgtcttgcctggcatcagtggcaccgattataccatgaggatctttaactctgatggtagtgagcctgagatgtgtggcaatggagtgcgatgctttgccaaatttgtttctcagcttgagaatttacatgggaagcatagctttaccattcatact

SEQ ID NO: 6093 - DNA, 533 bp, Glycine max
  Clone ID: jC-gmfl02220077c09d1
aaaaacaagcagaaagtccacctttcatacaaatattattcagcaattcctaattccatattgggtttaacaatgggggcaacatattaaaggggcaaagatccgtaataaactacatcggctgagcctgtcatataaacatgattatcttcctccctccattcaatctgaagaggtcctccaggtagatcaaccgtgcaattcctcccagcacgacccttaagaactgctgcaacaacagtagcacaagctccagttccacaggctagggttgctcctgctccccgctcccagacacacattttcaagtgagaattagacaacacttgtacaaactctgtgttagttcgtgcagggaacacctcatgatgttcaaattttgggccaatttctgctagcttcaattcatcaacaagcaaattctggcttccttctctactgaaagttacacagtgtggatttcccatgctgacacaggtcacatgccagataactccatctacaactagttctgatttaacaacagcattatc

SEQ ID NO: 6094 - DNA, 574 bp, Glycine max
  unsure (1)..(574): unsure at all n locations
  Clone ID: jC-gmfl02220077c10a1
ggtgagtaatgtgatcagtaacaagtacaatggtaatattcttcataacaaagagatcaacaacaacaccaacaatgaaagcaacaacacaaatgcaaccgacaaaaggtttaagaccttgcctgctgcggagacactcccgcgcaatgaggtgcttggaggatacatctttgtctgtaacaatgacacaatgcaggaagacttgaaacgtcagctatttggtttgcctccaaggtatcgagattctgttagggctataacacctgggttaccattatttctttataactatactactcatcagctgcatggtatttttgaggcagcaagttttggtggctctaacatagatccaactgcctgggaggataaaaaatgcaaaggcgaatcaaggtttccagctcaggtaagaatccgtgtcaggaagctctgcaaggcattggaagaagattctntcaggccagtattgcatcattatgatgggccaaagtttcgtcttgagctgtcagttccagagactctgggatctgtggacctatgtgaacaagctggttcagcagcataagcaagaatc

SEQ ID NO: 6095 - DNA, 614 bp, Glycine max
  unsure (1)..(614): unsure at all n locations
  Clone ID: jC-gmfl02220077c10d1
agtaatacatgaagcttttgacttcaatttttttcttggttcaacagattcatgttttagcagtacaaacagtagtctctttgattgcataccaagtctgtacttttacttaatcatacaaaggtattaaatgttcatgcaaatgctacaaagcacctttaaggggatagataccacaaccatttttattcaccaacaaagggtctctcactctcaacacgctccctttacttccccaagaagatgatgatccactttccaagcttacgcttcacggaaaatctgccaaaaccacacagctggcacaccaaaacctactacctattttgcacattcattccttgtgcgattcttgcttatgctgctgaaccagcttgttcacataggtccaacagatccagagtctctggaactgacagctcaagacgaaactttggcccatcataatgatgcaatactggcctgaaagaatcttcttccaatgccttgcagagcttcctgacacggattcttacctgagctggaaaccttgattcgcctttgcattntttatcctcccaggcagttggatctatgttagagccaccaaaacttgctgcctcaaaaataccatg

SEQ ID NO: 6096 - DNA, 341 bp, Glycine max
  Clone ID: jC-gmfl02220077c11a1
aaacaattcatgactgaatcacaaagtaaccagtaccacgagcaagtggtggtgatctcacagaaaaagctaaagaggagaagagtgtgtgtgatggtcacaggagcagtgctgctactgctcattgtgctagtcatagtggcaattatcttggcctttaccttgatcaagaccaaagaaccaagaactcagcttgtgtctgccactttagaaggtatagcacctcgtctcacacttgctgccattgacctacaaatcaatgtcacacttgacctcaaggttcgggttgaaaacagaaatcgtgctagtttgaagcatgaatggggaaagagtgtgttgct

SEQ ID NO: 6097 - DNA, 390 bp, Glycine max
  Clone ID: jC-gmfl02220077c11d1
aattcaggttaagcttatgtggaaaatttgttatacagcaacaaactacatatatgattgtataaacaccaacaatggaggggcccacacaacaaggggctacgaaccaccaaaccagcgagaaacgaaaggagaagcatgcaccaccaaatatggcatttgccggaagcaacaaaggggccccacgacttggaatgccggggtaggcccctcaagccagaaacgccttaggccctaggggaaacggactcgcgccaaaaatgaggccactggaaacccaagaggggactctactgggaaattggcataaacgggacccgccaggatcagacccccctaacaggcccatgctggccgggaaacgggcaaggctacacctaccgcacaagg

SEQ ID NO: 6098 - DNA, 445 bp, Glycine max
  Clone ID: jC-gmfl02220077c12a1
aaacaattcatgactgaatcacaaagtttccaggaccacgagcaagtggtggtgatctcacagaaaaagctaaagaggagaagagtgtgtgtgatggtcacaggagcagtgctgttactgctcattgtgctagtcatagtggcaattatcttggcctttaccttgttcaagaccaaagaaccaagaactcagcttgtgtctgccactttagaaggtatagcacctcgtcttacacttactgccattgacctacaaatcaatgtcacacttgacctcaaggttcgggttgaaaacagaaatcgtgctagtttgaagcatgaagggggaaagagtgtgttgctgtataaaggaatagaggttggagatgcttatataaaccctggtcttattccttcaaggggttctactattcttccatgcagactcacccttcaggtggaaaagc

SEQ ID NO: 6099 - DNA, 369 bp, Glycine max
  Clone ID: jC-gmfl02220077c12d1
agggcctaaatattcttatacaccaacaaaataaataatattatttaaaaaaacctacaactgaatcacccctatttcaaagagctaacaaaatcccaaaccaagcaaaaaaataaatctcccaatttcacgcacaaaataaacgattacccagacctaaaaaagaggcccctcccttggaattccaggttaagccactcaatccaaaaacccctttagcgcttgggcaaactgacctgccaaaaaaattgggccactgaaaccccaagaagggaccctacccggaaatttgcataaacgctacccactaaaaccttacccccctaaaaggcccaccctgaccgggtaacgctgaaccctacacttacc

SEQ ID NO: 6100 - DNA, 356 bp, Glycine max
  Clone ID: jC-gmfl02220077d01a1
accagctcttgagaattgaggaggttttttggtgctgaagcagtgtacgccggagctgggttgcgtacccccgttgaaccctactaaagctttcaagtggaaaaaacctggagatccacacgagtttgagcattgagatttgggtgcgcggctttaggagtgatatataagttgatagttggaacattagtgttggtatgataaagacactcgccaataattagtgttctgattcacagagctaggacagatatcggtcaagactatgaaaggtgcataatgagatggacacttaatgcttgacgccttcttacagtgtaaactacacacaaacatgggcgggctgcggctagtga

SEQ ID NO: 6101 - DNA, 515 bp, Glycine max
  Clone ID: jC-gmfl02220077d01d1
aggaataaaatagtcataaactatagaagttaatataatacatatcacctggacctgaattagaacacaatttaatgtactactatatcaataaaagaaaatatttattgcgtcctttcactttatttgcattagtacaatatttctggtctatcatgaatcatggattttatggatacagttacacttacaaaatttacttagccacgggctgaatagtaggtttgcataatggtaagagcaagcagagcagcagctaccacaatccctatcaatttccacacatttgggatatgatctctaatcaagattttatagctgtgtttgcgagagtatctgatgcattctacacaaaggttgcaacaatgcaacatcagtatagggaacttcctcaggggttcactgctgagtaagcattcaaggccttacaaagtttgctggaactattggccatttggtccactccctttgtgattgtgccaaacaaagtgagcaaatctctggtgctgatctta

SEQ ID NO: 6102 - DNA, 404 bp, Glycine max
  Clone ID: jC-gmfl02220077d02a1
aaagtggtggagtttgggaacatgcaaaccagggcagtgtctatcttggtccacacagtcatcttctttggtctcattaccatctttcttgttgctattggctaaatgcttggaaactggcgagccagtggccattaagagagttttactggacaaaagatataagaatcgtgcgctacagttaatgcacttgatggatcatccaaatgtgatctctctgaagcatcgtttcttttccactacaagtgcagatgaactttttcttaatttggtgatggaatatgctccacagtctatgtctcgcgtctcaaagttctatagtaatactaatcagagcatgccacttatttatgtaaaactttacatgcaccagatttttaaggggctggcttatatccacactg

SEQ ID NO: 6103 - DNA, 325 bp, Glycine max
  Clone ID: jC-gmfl02220077d02d1
gcggcattatattcaaattaatatgggattaatacacaatcttagtccatataaaataagaagatcacatatttcagtatgaaaattcgtcggtagaagtgtttgaatagaataggattgcttggtacagtatgaaaaattgtgttataaaaaatatatgggaacaaattctcatacttcttcttcagagagatgggtattaaaatactctttgtaaattatgtaagagagcaccattatgtccttacccattttccatttcaagtatattcatacaatgtccagtccacagagttccttgaccacaggcatgggtgcagggacc

SEQ ID NO: 6104 - DNA, 604 bp, Glycine max
  Clone ID: jC-gmfl02220077d03a1
attggttcattctcaagttttgttaaggacttgtatggattgggaggcaggagacttggagtgacttcactcccaccattgggttgcctacctgctgcaaggactatatttggtttccatgagaatggttgtgtctcaagaatcaacactgatgctcaaggatttaacaagaagctcaactcagctgcaacgagtcttcaaaagcaacttcctggtcttaagattgcggctttcgacatttacaagcctctctatgaccttgttcaatccccttcaaaatctggttttgtggaggcaaacagaggatgctgtggtaccgggactgtagagacaacatccttgttgtgtaatccaaaatcaccaggaacttgttctaatgccacacagtatgtgttttgggacagtgtccatccttcacaagctgctaaccaagttctagctgatgcattaattctacaaggcatatctcttgtcacataaagactcgtcattatttatggtgttagacattattattgtgtacaagtacaactacacatcgtgaaagtgattcaaaagtttgctggttttctttagtttggaaaaaaaaaactgtgctctatga

SEQ ID NO: 6105 - DNA, 535 bp, Glycine max
  Clone ID: jC-gmfl02220077d03d1
gatgataataagcaaacatttctctattattataaaatggtttacaaacgagtttatctgaaatttctcaagatctaaaatacatagagcacagttttttttttccaaactaaagaaaaacagcaaacttttgaatcactttcacgatgtgtagttgtacttgtacacaataataatttctaacaacataaataatgacgagtctttatgtgacaagagatatgccttgtagaattaatgcatcagctagaacttggttagcagcttgtgaaggatggacactgtcccaaaacacatactgtgtggcattagaacaagttcctggtgattttggattacacaacaaggatgttgtctctacagtcccggtaccacagcatcctctgtttgccttcacaaaaccagattttgaaggggatttgaacaggtcatagagaggcttgtaaatgtcgaaaaccgcaatcttaagaccaggaagttgcttttgaagactcgttgcagctgagttgagcttcttgttaaatccttgagcatc

SEQ ID NO: 6106 - DNA, 128 bp, Glycine max
  Clone ID: jC-gmfl02220077d04a1
cttgactcatgctggttcttgggccgcgtctaggcctgataggttgggacaacacgaagatggctcaacaccatccgcagggtgattgcttggttctggacgacttccaaggtgctactccgcgtgcg

SEQ ID NO: 6107 - DNA, 232 bp, Glycine max
  Clone ID: jC-gmfl02220077d04d1
caggtgtattgattgagtatttttactggaacatcccaaacatacatacatgagctcgatttaaacaggtacaattgacaaattacgctatatcgggcccatattatcaccatgtactatagtgcatcaggacttggggaaccactatagaggatagaccacaatggttattacttgccacacctggcttgtcgaggattactgatacaggcgacctccattgtagtagtaa

SEQ ID NO: 6108 - DNA, 581 bp, Glycine max
  Clone ID: jC-gmfl02220077d05a1
aaccaagttgggaaagcaatgatgggtattctttacctgttggttttattgaaaggacatctaaccgaggaagagtttgtcagggatggataccacaactagaaatattggcacattcatctattggaggatctttgtttcactctggctggggttctgtcattgaaaaccttcagtttgggaatacacttgttttattaccctttaatatagagcaacctcttaatgcaaggtttttggtggaaaagagattcgccattgaagtgaaaagaaatgaagatggatcattcactagaaatgacattgccgcatcccttagacaagccatggtattggaggaaggaaagaagatcagaaatgatacaagagaagctgctgcatttgtaggaaacttgaagctgcaccaggatcactacgtagctgcatttgtacagtttcttaagaatggaatcaggacaccaatatgatgttgaagaggatcattactgtgtcttaattcatgtttatcatcagtttgttgaataaagtcctactctttaagtcgtggttcaataattgcatctgtcttctatcttgaaggg

SEQ ID NO: 6109 - DNA, 458 bp, Glycine max
  Clone ID: jC-gmfl02220077d05d1
aaaagagagtgtcttattgaattcaaaaacaggagttggttttagttacccttacaagatagaaaacagatgcaattattgaaccacgacttaaagagtaggactttattcaacaaactgatgataaacctaaaataagacacagtaatgatcctcttaaacatcatattggtttcctgattccattcttaagaaactgtacaaatgcagctacgtagtgatcctggtgcagcttcaagtttcctacaattgcagcagcttctcttgtattatttctgatcttgttgccttcctccaataccatggcttgtctaagggatgcggcattgtcatttctagtgaatgatccatcttcatttcttttcacttcaatggctaatctcttttgcaccaaaaaccttgcattaagaggttgctctattttaaaggggtataaaacaaggtgtattcccaaactg

SEQ ID NO: 6110 - DNA, 165 bp, Glycine max
  Clone ID: jC-gmfl02220077d06a1
atatcattgcttgagattatcactaatgaacatctagtgtaggattaagagagaatcactaaattagaagtgagatctacaagattactaatcagcgactttccatcaattaaatttctaaatcagaatatgcatcgtgtcttaaaaataacgtgtaactaatat

SEQ ID NO: 6111 - DNA, 567 bp, Glycine max
  unsure (1)..(567): unsure at all n locations
  Clone ID: jC-gmfl02220077d06d1
ctatcattacacaactaatatgttaatctttgttatcgggagtgtaaaaattaactttacaaattctaattacaaaagcaaaattgctgccaaaaaaccagctcatgaaaagaataatgaaattcaggcacaagaatgaggatctgaacctgatgcagtcaaattccagaatcaaaaccaacagtgcaccttagccatatctgcaagcaaccaagaaaacttaaccagggcctccccttggcttcttcacaagatattttggtccaaaataagctcttccagtatgtacagtggcctttcatggattcaaactagcacggctaatgaagtctgtgctataatcttgattaccaaatgccatcctccgaaataatcttatttcttcagattgactgcgcgtcaaacacctcgctttcaccaagtcgcattccattaggtagatcagaacctgctaagctatcaaaagctctaacaacctgttccatgctaggtctctttgcagctgaatgccgnacacaagcagcagcaacttcaatcatgcaatacaattcactctcaacataattc

SEQ ID NO: 6112 - DNA, 186 bp, Glycine max
  Clone ID: jC-gmfl02220077d07a1
gtgactgatcatcagaggcaatggcgagcaggtactgggcagtgtctcttcccgtccacaactcggcatcatctcagctctggaaccaattgcaggaacgaatctccaagcattccttcgacacacctctctacagattcaacattcccaacctccgcgttggaaccctagactttttcctctccc

SEQ ID NO: 6113 - DNA, 479 bp, Glycine max
  Clone ID: jC-gmfl02220077d07d1
tttttttttttttttttttttttttttttttttttttttttttttttttttttttttttttgggttaaaattgaatttattttaaaaaaaaaaaaaataaaaaaaaaaaaaaaatttataaacaaaaataactaaaaaagaaaaaaacacaaaaaaaaaaaacaataaaaaaaaaaaataaataaaaaaaaaaaaaaaaaaaagaaaaataaaaaaaaaaaaaaaaaaaaaaaaaaaaaaaaaaaaaaaaaaaaaaaaaaaaaaaaaaaaaaaaaaaaaaagaaaaaaaaaaaacaataaaataaaaaaaaaataaacaaaaaagaaaaaaaaacacgaaaaaaaaaaaaataaagaaaactagaagaaaaaaaaaaaaaaaataacaaaaaaaaaaacaaaaaaaaaataaaaaaaagaaaaaacaaaataaaaaaaaaaaaaaaacaaaaaaaaaaaaaaaaaaaaacacacagaag

SEQ ID NO: 6114 - DNA, 439 bp, Glycine max
  Clone ID: jC-gmfl02220077d08a1
gcggccactcaaatccagcaatggcctacacggaacagggcgttgcaggagaccaagctgacccgagctcagcgaaaaatgcagctgggactacaacatatgctagagaaaatggaacaagagtccggcaggacaaatgggatgaccagcccgatactgctcacagtattaagcagctagtgagttccggtgccgacactggcacagaacttaggtagctgcggagctctgatgggagccgcatttcacgtgcagcaaagcttgccagtgctgctgactggagtgagaatcaagacagaagaacggcaactagacctgtgtgctggctgacccctgtatctactatgatgaatgatgcatgtgatgctaacgaagctttgcttggtgttgactaatgtaagggcccacaaacggctgactagcgatgcaagactaatga

SEQ ID NO: 6115 - DNA, 540 bp, Glycine max
  Clone ID: jC-gmfl02220077d08d1
caagcaatcaccgcgattcttcatttttcacatcgaaaaaatccgcataaaagaattcatactaaataacaaaatctatatgaaatataaatggctaaaatacgctatgctttccttaatttgtttggggaatcgaaccttgccaatgctaaaaagtcagtttgatagtatttcactatttataaagtggcaaggggcaactctaacaatatctagaaatgttacaatgtacagctgaaccaaaaaatgaaatgatgttaaaagtaaaaggaatcacgtaatgattgctttatgcttaaaccctttgggattaattggataatatacatttcattggaattctagaaggatggttcagcaatatggagcagtaataatatatactatattgtaacctgtgaggcgttagcttaatatgcatgcatggctggttatccacttgaggaagcgatgcctattgcgtagcacgagacctagacctcttcaatcgcctgagtggtttcaagaagtaacgagccaatggtgttttgggaactggaa

SEQ ID NO: 6116 - DNA, 400 bp, Glycine max
  Clone ID: jC-gmfl02220077d09a1
cgaagctgcacaattcactgctgcccaattcctcagaggtggacctgctggagatgctgatggttggttgaaggctactggcgttccttatactattggcttcaccaaatagggcatcatactgcagcctaatacttgggaagattttttttgttattttgtgtgcaaattaatgtgtctatgtagaataaataaattagctttgttttcagcacagttgttgtgattcttcttgcaagctagggtggaatcatatcatatcttgtacaaattaaacatgagaaaactgtacagctaatacatgcgaaatttttatattgctgtttgaaaaatgacctcataagtgtattatggggaatcaatatatggatattcatgcatcttaaaaaaaaagcaaaaa

SEQ ID NO: 6117 - DNA, 383 bp, Glycine max
  Clone ID: jC-gmfl02220077d09d1
aagatgcatgaatatccatatattgattccccataatacacttatgaggtcatttttcaaaaaacaatataaaaatttcacatgtattagctgtacagttttctcatgtctaatttgtacaagatatgatatgattccaccctagcttggaagaagaatcacaacaactgtgctgaaaacaaagctaatttatttattctacatagacacattaatttgcacacaaaataacaaaaaaaatcttcccaagattaggctgcagtatgatgccctatttggtgaaaccaatagtataaggaacgccagtagccttcaaccaaccatcagcatctccagcaggtccacctctgaggaattgggcagcagtgaattgtgcagcttcg

SEQ ID NO: 6118 - DNA, 500 bp, Glycine max
  Clone ID: jC-gmfl02220077d10a1
acagaatcggcgaacgactcgcacagctaaagcacgccacaccacacaccaacaccatttctctctctctctctctctccgtcgcttccgccaccgttggttgtcgtgaatgccaccgtatacgggcaccgctctcgctctacagctgttgaaatgaatggagtgcagaacagaagggttcacaatgatgagaaaccttttccaggatgcctgggaagaatggtgaatctctttgatttgactggggatgtaaatggaaacaagctactcacggacaggcctcatcgtgatgcatcttcactctgaagaagtcaatcagaggttgcaaggatcatgagtcctaccttgggtgatcagatagaggataagctgattgctcctgactcaatgagagctacaaatatgaaattaaatggaacacccatcaagatgctcatagaccatgaaatgtccaaagaagttgcttccaagcacaacttaccaccaattggcagtgcaaa

SEQ ID NO: 6119 - DNA, 383 bp, Glycine max
  Clone ID: jC-gmfl02220077d10d1
gatgcttgatttttctttttttgttttctctttttacacttatgaggttattttggatttttcatttttgaaaacacacatgtattagctgtacagaaatctgatgagtaaggcccacagggatatgatatgattccaccctagcttggaagacgaatttcacaaactgagctgaagcaaagccaaaggaaaaatcctacatggggacattaaccttgcacaccccttcccggaaaaaaacccccggggattacgctagagtttgaagccctatcccggcgaaaccccttgcccaaagaacgccagtagccttcaaccaaccatcaccatctttagcaggaacaccttttgggaaaagcgctgtatcgaacagggcaggttcg

SEQ ID NO: 6120 - DNA, 365 bp, Glycine max
  Clone ID: jC-gmfl02220077d11a1
agaatggctcccaagggtttaacctttctggctgtgttaatatgcgtttcagcactgtcactgagtccttctgttgcgggggaagggcaaaataatggccttgttatgaacttctacaaggaatcatgccctcaggctgaagacatcatcacagaacaagtcaagcttctctacaagcgccacaagaacactgctttctcctggctcaggaacatcttccatgactgtgctgttcagagttgtgatgcttcactgttgctggactccacaagaaggagcttgtctgagaaggaaacagatagaagctttgggttgagaaatttcaggtacattgagaccatcaaagaagctttggaaggagaatg

SEQ ID NO: 6121 - DNA, 410 bp, Glycine max
  Clone ID: jC-gmfl02220077d11d1
agaaagaacaacctagctttatgagtatgaatatcataagcattggcactgccatcataacagcactcacacgcatacataacataatttaacaccttgaacatgcccttttacccaactctaagctacttgcataggactacatatataatatccttattgaaattaaaaaaaaaacaaccgtaacatcggaagattaaaaaacatagcctcttaatcctcccatccccatgaacctgcaggggtctcggttcattgaaccagcccatttaaaggaaaagaccttaattattttttgcataatatattacagattttcttcctcgatcatagacaaggggaggaaaattcaagggtcctgaacatggtgcttgttggcaacattgcactggtttctgacctcacccttt

SEQ ID NO: 6122 - DNA, 435 bp, Glycine max
  Clone ID: jC-gmfl02220077d12a1
gaaggcggtgaggacgtgggggggggctcatttgatttgggcatagcttttgcaataaaacgtttagatgcctaacatggcttttacacaaaaaattatgacatattgatgtctctttttttgtgtggcccatgttgtcatacgttctagttcatgtatgcacctgaaataatgctccaggtggactagtgtgaatgcttaaaaagaaagaggaaaacatctattttttagttgctgatttgtatactttactatctgatccatattggtatgcttacatcacctgagtgttgttaatagcagccatagatccgccacggcagaaaggcatgttggatttttgccaaccgccataggaaatatatgaaaggaggcccaccatggcgtgtttatatggcagaatttaaccttctgccattgctaaccctgcattac

SEQ ID NO: 6123 - DNA, 538 bp, Glycine max
  Clone ID: jC-gmfl02220077d12d1
aatccagaacgataaaaagtcactctttcataggaattctacaatatttcgtttaattataggtgcaaatagcaaactactcgaaaagtggcagaatgtttgagaacagaataacaaagcagttagttgtaccaccatgctttgccagcttcagtaaaatgacaaacatcagatctattctctatactaatctgctcaagacaaggaaaaaaaacacttctcaactggatccatcatccaataccagatccaaatctacataatttgatttagaaaatcctatgttagccacatttgcttctgcacaacagtgcatcgaaatgacctgagccaggggagcttacctgttcgatacatgaaatgaccacaagtcaccgtatttcaactatccacgttaactaaaaatattgctcgatatccaaaatcccaggaatcatcaaaatagcatatgttagcatttgattcttccttttttattgaacttcctaaatacaatacaagacactaacatctaagaaattcaggtccttcaagcctg

SEQ ID NO: 6124 - DNA, 252 bp, Glycine max
  Clone ID: jC-gmfl02220077e01a1
gttgggtgagggatgatagctaccttttgtatgatgcttctcactgcccttttggtgggggggtttcaattgccttgctaatgggagaaaagatagagattacacaaaatggaggtggaaacctaagaactgtgagattccaaggtttgatgcccgtggaatacttgaacatcttcgagggaaaagggtggtattcgttggcgatctcgctgagtaggacacattgggagctcacgatatgcttgctgatga

SEQ ID NO: 6125 - DNA, 356 bp, Glycine max
  Clone ID: jC-gmfl02220077e01d1
agagaatccaaaaccagattttattagattgaaaagcgtaactgtacattgatagaaacagtaaatcctttatctgatgaacagagttacccccctacaatccccattccagggatgactccccgggccaattcaattacattggccctcatgcataccttttacaggctccactaatcatcatatagcatttcaccagcagaaaggaaagtctactggctggctgggacaactggccctttcacctgatatatcatttcaccaatttgaaaatcagtaaaagtaattggaagtggagagctgaatacccaagattatgcctgccagaaatactggaaaccaagtgcttgagccca

SEQ ID NO: 6126 - DNA, 429 bp, Glycine max
  Clone ID: jC-gmfl02220077e02a1
gcgaatatgacattttttaataatagtaagatattttccttaacaaaaaatgtcatattcgcatacaaactactcatgatacgacattctttgttaaggaaaatatctttctattattaaggccccacccaacctacgactttgaagtcctcttgataaatactccacgtggcgtgatatatagatgcagatgatttgtatttgcatcacacataatctttactgggggcggcccccatacataaggtcgataccccggaaaataatttcggaaccggaccccgggggcaccccaccttgcgtcaatctgtttcgattataaccttacgcaaacattgcacaggttttgcccctggggaaacaatttacccgccaccattccgcccctacttacgatccgaaaatttaaggggtccccccccgggcccc

SEQ ID NO: 6127 - DNA, 503 bp, Glycine max
  unsure (1)..(503): unsure at all n locations
  Clone ID: jC-gmfl02220077e02d1
gaattggaaatttttctatagcactgctgatgctagatcatttttcacaatgagaacaaatggatcagagctgcaatatgttaaaaagcacacaacccagttacaataaacacaaatcaggctaacaaaaatctaatcgtatgtaggttgttgtaactttccaaaaggccatgttgcagcagatctcaactttgtgcagcatagtaagctaatgtatctatgaaccattcattgcagtgtcagcatgatgtgcatggctatcttccagaatctttccatttgcttgagttctctgcctccaatctgcagggtcaacaccattcccattcaacaacttgtggttctcttctttggtcctgccatctttgttgtccttggtgcttaatggtagcagcagtgctgcagcagcatttgtccggtctggcaattcttctaatttcttctcaacgaanaataccaccaaattaaccgtataccangcaacaactacatcaaccgtgtaa

SEQ ID NO: 6128 - DNA, 595 bp, Glycine max
  unsure (1)..(595): unsure at all n locations
  Clone ID: jC-gmfl02220077e03a1
ctttcttcttcttcttctcttcttcttcaagattgcgacgacgatccaagtgatagacactcgttgcgatggaacttgtagctgaatccgagcgaactctgtacccatacgtgactggatcctctgtagtcgctatcaaatacaaagatgggattctaatggccgctgacatgggaggttcgtatggatctaccctgcggtataagagtgttgagcgtatcaagcctattggaaagcattctcttcttggtgctagcggggagataagtgactttcaggaaattttgcgctaccttgacgagcttatcctttatgacaacatgtgggaggatgggaattctctagggccgaaggaggtgcataattatttaacccgtgtaatgtataatagacgtaacaagttcaatccattgtggaatgcacttgtacttggtggggtgaaaaatgggcagaagtaccttggcatggttaacatgattggcattaattttgaggacaaccatgtagcaaccgggcttggaaatcatcttgctaggccaattctncgtgacgagtggcatgaaaacttgacctttgaagagggcgtcaaattact

SEQ ID NO: 6129 - DNA, 435 bp, Glycine max
  Clone ID: jC-gmfl02220077e03d1
gaaaagatcaattcgaaccaccataggaatcttaaaaaaataaatatgaaaacatcaagtctcatttaatatccattaacaccttgaagagtcctgttggaacccatttcatatccatttaaaattctgtttcatttcacattgagtcagctaccatgaaccttcagcgcccactgttggattcttgaaggcagcgaactcccagtacgttttcaacgagaatggtgggaaaacagtggcaccttcatctgtaattttagatatctgaattttgttgacagcagacctatcacggtataaaagcacacgcatgcatttttccagtaatttgacgccctcttcaaaggtcaagttttcatgccactcgtcacggagaattggcctagcaagatgatttccaagccccgttgctacatggttgtcctcaaaattaat

SEQ ID NO: 6130 - DNA, 495 bp, Glycine max
  Clone ID: jC-gmfl02220077e04a1
gcggcttcgcccattctcatttctctctctccagaaaaaaatatacatttatattatattttttatcaataaaaaatcaaacgaataaaattttcattttcttttgtttttctcgctcttgtttctcgggaaaattgatttcaccgtagtaggagccaagaaaaattccgaacccgtgaactctttttcctactacaaatgcaatttctctctctgtgtctcccacactctctctgctaaagtcgcaaacacaaccacgaacactgtttctgaagtgaagcaatgaagtttcagcctcagatctcgtgctgaatcatcgatccgagagagagagatagagaggagttggattattgattcatggaaccgcggagatgaagttctacatatcgacgaggggcataaagagagtgacgatatctaacagtgagggaaagggatcggcgaagacgacggcggtggcggccggctccggtcgccggatatcggctcgga

SEQ ID NO: 6131 - DNA, 343 bp, Glycine max
  Clone ID: jC-gmfl02220077e04d1
tttttttttttttttttttttttttttttttttttttttttttttttttggtttttggtttttttttttttcccccacttaaaaaagaaattttgatgaaaaaattcccagttttggcaggcagttagatcaagggggcttaaatctttttaaaccataaaaccgggtttaaggggggtatgggggggcagcttcatttattccctattttatggggccagggcatagcggaccgggtatcaaacggggcaaagcgtttgagtcaaaaactgaagggaaaacctttttcccttggaaaccccatacgggttaactggtccaaccccaaaaaattttgcggggg

SEQ ID NO: 6132 - DNA, 615 bp, Glycine max
  unsure (1)..(615): unsure at all n locations
  Clone ID: jC-gmfl02220077e05a1
caagaatggcacttcgttgcttggtgatgtccctttctgttctcttcactcttggtcttgcgagagaaagccatgccagagacgaagatttttggcatgctgtttggccaaacactcccattccaagttcattgcgagatcttctaaagcctggccctgcaagtgttgaaatcgatgatcaccctatgcaaattgaagaaacacagtacccgaaaaccttcttctataaagaagaccttcatccaggcaaaacaatgaaagtacaattcagcaagcctccctttcaacaaccatggggtgttggtacatggttaaaggaaattaaagacactactaaagaaggatatagttttgaagagctatgcatcaagaaagaagccattgagggagaagagaagttttgtgcaaaatccttgggaacagtaattggttttgccatttcaaagctgggaaagaacattcaagtactttcaagttcctttgtcaataagcaagaccaatacactgtggaaggagtgcagaatcttggagaccaagcagtgatgtgtcatatgctaaatntcagaactgcagatttntactgccatgaagtccgttgaacaacagctttcatgg

SEQ ID NO: 6133 - DNA, 430 bp, Glycine max
  Clone ID: jC-gmfl02220077e05d1
accatatatatatagagagagagaatacgaagcacactgatcacaggatgatgctctctttaagtagggaagcagatcttatcagtacacataggtaggttgaaattctagctctagcaatctagctagagaaggtagtacttgcacaacacacagcacatgataatttattttatacacaatctcattctcatggtgctcaagatgcatggactaattaagcaacaatgttggtctgataggcagtgtccacagataaattgggtacccataaaatggccttgcttccaaggaaatggcaaacagggttagttccaggatcaactcccataagttgatgaagcatttgatgattcattccagaagtatttgagtggcaaatagcaagtgcctgagttttgggtccatcaccagccaccaatggaaccat

SEQ ID NO: 6134 - DNA, 219 bp, Glycine max
  Clone ID: jC-gmfl02220077e06a1
cacatggtttcttcttccttagcagaattttgattttgatttatattttctcttttggatcatcttgcgaaataccttagcttacctaagcctgaaacttctgcttcctgagttgtatatataacctgtgcttctgatagtgcgtaataacttcaaaggtctaggcctagcatggaaaacaaccttaaccgggaaacagaagggcatggcttgcctaaa

SEQ ID NO: 6135 - DNA, 409 bp, Glycine max
  Clone ID: jC-gmfl02220077e06d1
gtaaatacatggactaaagtgaagatttcataaaattaggaactaaaataatcagcatttacaatgtcagggactagaatggggtttactcaagaaaaatctaaaacttttcactcatgcccctcccatgtctgaccactgaaggttttcagtaaagatgttggttgcctcattattttcttcctcatttgagacgtctatgtattaacatacatgatgtattccttgaactattggagtgtgtgattctcgaataagctcctaaactaaatcatttttatccgagttcacaaactttcaagttatttattttcagtcttttcggcgtgatcatggctcccaagtcttaaatgggagccatttcctgcgtgggttttgctttctctcacttgtggcaatggcaaggtca

SEQ ID NO: 6136 - DNA, 281 bp, Glycine max
  Clone ID: jC-gmfl02220077e07a1
gtcaaataaaataaaataatcaaatatggcattcagcgggacccaacagaaatgcaaggcttgcgacaaaactgttcactttgtcgaaggtttatctgccgatggagctgcttatcacaagaactgcttcagatgcagccattgcaatggccttcttgcgataagcaattactcatccaccgaaggagttttgtactgcaaggtgcactttgagcagcttttcaaggaaactggaacctaccccaagaaatcccagtcgtctggaaagcctccactcgagc

SEQ ID NO: 6137 - DNA, 443 bp, Glycine max
  Clone ID: jC-gmfl02220077e07d1
caggttattatttgtacatattttccatgggttcaacccatgttcttgaaactatgtaaacactatattcgttggaaattaaaggtgcatgagctcaagccaaattcgcccaatatgtaacgagctcctgggggaactaattcaaaaacgaaatgaacaggattaaaccaaacccaaaaccagtttacccatcatgttttcaccgtgctacctgcttttgaagcatgtgaaaacaaaatccccgttaaaaagagaaaggccctttaaaacctacaaattatctcccccccgagggggaaaaatgaggggggtggcccttggggcctacccggaaattccaaagggtttaccccccagaaaaccttgtatacaagcatttaccccttctgtggcccccaaactaaaatcgggcacctcacccactcagtttgggggaccaatta

SEQ ID NO: 6138 - DNA, 567 bp, Glycine max
  Clone ID: jC-gmfl02220077e08a1
gcttcgcgcctactatttgttgtcttaacagtttgtgttagtcatgaggtccaattcaatggaagcaagaaaccaagaggtgaaaataattatttagtggaggaaattattgaggatttacaagcagtatctgaaagccagaaagaaacaaaaaataggaaaatgaagaagcaaggtcctgtagcggcatttgattcctatgttctggctgccgtttgtgctcttgcctgtgagcttcagctgttccctatgatctcacgaggagacaatcactcagtccccaacaatgtacaaaatatagccaagcctgtcaaaatagatggatcttcccatgcattgcagaatggcatagattcagcaatacgccatactcacagaattttagcaattttagaggcgctgttttcattgaagccatcttctgttggtacctcatggagttacagctcacatgaaatagttgcagctgctatggttgctgcacatatttctgaactatttagacggtcaaaagcttgatgcgtgctctgcctgtttgatgcgtacaaatggatgatgaaattactc

SEQ ID NO: 6139 - DNA, 475 bp, Glycine max
  Clone ID: jC-gmfl02220077e08d1
agcagaatgagaaggtttacttatttgcaaaccatttaagttcctaaacatagattacatcaaggttttatacaaatcttgagataatatctgtcatgaaaagcttaatttaagttcctaaacataaattactaagatgattacatatggtctcatttcatttcagatagaaatagcaaagcctaagtcatccgcagctgtgttaagatattcaatagacaatccatttgaaagccggctgtgagcttcccatgtcaagcagttttctacgtcagctcgccagtcaatgacatcaaaatttaagtactgatcatggatgccattcttttgcagtggcttaggactcgatccaattgaactagtatgcaaaatgtcacgaataaccgaactgctcagagcacggacatgtgcacttggatgaaaaaggcatctgattgtagctggtaggcgacactttaacaggtttgaaagccca

SEQ ID NO: 6140 - DNA, 138 bp, Glycine max
  Clone ID: jC-gmfl02220077e09a1
tggtcactggccattaaatctatttatacgcttagaagaccttataacctttataataaatttttcttcattatgatgtttcttaattgcatttgaagtttatgctttggttcagggaaaagtaaaatttgatccctg

SEQ ID NO: 6141 - DNA, 138 bp, Glycine max
  Clone ID: jC-gmfl02220077e09d1
cagggatcaaatttgacttttccctgaaccaaagcttaaacttaaaatgcaattaaaaaacatcataatgaaaaaaaatttattataaaggttataagggcttctaagcgtataaatagatttaatggccagtgacca

SEQ ID NO: 6142 - DNA, 444 bp, Glycine max
  Clone ID: jC-gmfl02220077e10a1
ggcgaggagaaagatggaggggaaggagcaggatgtgtcgttgggagcgaacaagttccccgagagacagccgattgggactgcggcgcatagccaagacgacggcaaggactaccaggagccggcgccggcgccgctggttgacccgacggagtttacgtcatggtcgctttacagagcagggatagcacagtttgtggccacttttctgacattgtacatcaccgtcttaaccgttatgggagttgccggggctaagtataagtgttgtaccgttgggattcaaggaatcgcttgggccttcggtggcatgatcttcgacctcgatgactgtaccgctggcatctcaggggggcacataaacccggtggagacatttgggctgttattggcgaagaaattgtcgctgccccatgccgatttctacatcgtgatgcaatgctt

SEQ ID NO: 6143 - DNA, 537 bp, Glycine max
  Clone ID: jC-gmfl02220077e10d1
ttttttttttttttttttttttttttttttttttttttttttttttttttttttttttttttggttttttttggttttttttttttttttttttttttttttttttaaaaaaaaccggggggaaattataaattaaaaaaaaaaaatcccaaaaaaaagcgctaaaaaaaaaaaaaaaggggccccttaaaaaaaaaaaaaaagggaaaaaaagggcccaaaaacaaaaaaaaaccccccaaaaaaaaaaaaaaataaacaatttaaaaaaaaaaaaaaaaaaccttaaaattaaaaaaaaaaaaaaaaaaaaaaccaaaattttaaaaaaaaaaaaaacaaaaccccaaaaaaaggggggtaatattaggggggggggggcccccaaaagttaaaaaacaaaaccccattaaaaaaaaaacgggcaccaaaaggaaagggcccaaaaaaaaaccggggggaaaaagcccaaaaaaacccccccataaaagggcccccccaaaaaaacccaggtgtaacccaccaaaaggctcttgt

SEQ ID NO: 6144 - DNA, 434 bp, Glycine max
  Clone ID: jC-gmfl02220077e11a1
ctttacagctatcattatcattttgatgacccatttcaccactttcttcgtcctccgatttctccagaacagcaagggagaatccattcctcatcgctgcaattctcatctttcactctctagattctcatctatctatcttccaccctcttctcttctatacccttcagacgcagataaatattgacaccatagctcctgcttattgtcgcccttcatgttgcctccttgatcaatatgatgctgtaaaactctgaaactcgcagctccagctcagccacgtgttggtctaaagatccgtgccttgacccttggcagtttcagctttcaaaagggctggagtccctcttacgcataagccactgaataactcaaattcacctgacttcccgctcttcccctctgtctctctctgtctaaagtgcaaagatttt

SEQ ID NO: 6145 - DNA, 429 bp, Glycine max
  Clone ID: jC-gmfl02220077e11d1
atgataatcactatcatagcaaccccatttattctgaagtaaatgacagattataagggggttgctaaacaaatctaaatacagaaaagaatgtaaaacatataacactccaagttgaagacaaaccctaatcacattcacacaagtaaaaacacgtggtatggtacttagtcgaagaattcccaattgaacttgggaggacctgaattattggtcactgaagagggtgggggtggagatgtggcttgcacagggattaatggtgggacagaatcaaacaacttccaatttgtggtaactacaactcctgaggtggaattccttgagggttgaacttgttgctcttgatatatggctaaagaaatctcacttgagttccttggttgatcttggtgctgctcctgaattggtgctaaggctaatctatga

SEQ ID NO: 6146 - DNA, 569 bp, Glycine max
  Clone ID: jC-gmfl02220077e12a1
gggaagatgagaagtgtgagcctgagaccagagcttcacattccaatttgttcttcaaaccctccatcatgtgtcaaacccatcaaattagtggtagcatcatcgtatgggaaaaatttgaaaaatccaccttccaaatttgcaatcactcttagagagcacagaacaactttggagcatgcggcgaggttgccattactgaaacatgattccggtattgtggtaatgggagcggtgtgtgtggtggggatattggcggtggttctgagcgaggaaaaggccttggctttgggcccagaaggcccacttgtggaagagttttgggacaacgtgaggagatatggactctacgctctcaccgtcagcacaggtgccctttacaccatcttccgccctatagcagaacttttcaagaatcccatttccgcaattctcatccttgctcttttcggggttcaatcttcattggttctcaagtcctctttgacatggttggtgtttctgaatttcttacaactttggaactagactacctccatcatatatatgcaaaataacctcttatttat

SEQ ID NO: 6147 - DNA, 351 bp, Glycine max
  Clone ID: jC-gmfl02220077e12d1
aaaccccaaccaaaaggggttgccaaaatgaaaaaatcaacccaaatccaagggcctaaaaaggaattttccccccttaaattaccaaaatttgaaagaaaatccccacaatcctacccccccaaattcgaaataaatcccaaccctaaaaaaaaaattcccgagggggaaactaagctttgagcgggaaacgggaaaaaaatgggaaaacgggggtgaccatgttcattgggggggggaaaagtcccaaaagggttttgtttttggcccggggggggcaaaaaagttggcccgggaggggcaaaagggttttggcttgagggcttggggagtgaaaaccggaaaacgggg

SEQ ID NO: 6148 - DNA, 346 bp, Glycine max
  Clone ID: jC-gmfl02220077f01a1
cgcagagggtgctgcttcaacgactgatattatagatggcaccattgactgctctaagtagcttagcctgtagaaactctcatgctcatcatggaccaacaactgctacatatgagtctaacgcactacctacgggacttatgcctctgaagcagacttgtgctcaccgtggacttataatttgccacccgccggatgatctactaaacagacccccagtttggaccaatgcgttgcgcgctataaagaatggacctctgggctataatgcctgacctaaaagactaatcacgtggactctgactttcatgattataagcacggacgtggctccatggtgcaaaac

SEQ ID NO: 6149 - DNA, 485 bp, Glycine max
  unsure (1)..(485): unsure at all n locations
  Clone ID: jC-gmfl02220077f01d1
gagtacaaggtcaaggacctttcccaggccgacttcggccgcctcgagatcgagctggccgaggttgagatgccgggcctcatggcctgccggaccgagttcggcccatctcagcccttcaagggggcccgcatcaccggctcccttcacatgaccatccagaccgctgtcctcatcgagaccctcaccgctctcggcgccgaggttcgctggtgctcctgcaacatcttctccactcaggaccacgccgccgccgccatcgcccgtgacagcgccgccgtcttcgcctggaagggtgagaccctccaggagtactgggtggtgcaccgagcgcgccctcgactggggccccggcggcggccccgacctcatcgtcgacgacggaggcgacgccacccttctcatccacganggcgtcaaggccgaggagctctatgagaagaccggnggactncccgaccctaacttcactgacaacgccgagt

SEQ ID NO: 6150 - DNA, 532 bp, Glycine max
  Clone ID: jC-gmfl02220077f02a1
tgaatcattcatcgctttccaccatttactcagagacgctccttccttgaccacaggggaagtttgtttcttttgatcccccccgtatcacccagccggcccaaaccctacgcatcccatccatgactcttgaacaggcgagtccattgctctgtgggcgacggatctcaacctctgccgagagcgctagagactgatgaagcaggccgacgactatgcccagttcgcagacatactcgtgcctctgttgcgatccctactaaactaccgacagaacaacttgctggaagcctataccgctttcgaaaaaaccgccaatgcgtttatccaggagtttcgtaattgggaatccgcttgggctctggaagctttgtacgtcattgcttacgatattagggttcttgccgagaaggctgataaagaattggcttccaatgggaaatcccctgagaagttggaaggcgctggctccgtccttatgaaattctttggcacccttgcgggaaaaggctctaagcgtgttggagcatta

SEQ ID NO: 6151 - DNA, 495 bp, Glycine max
  Clone ID: jC-gmfl02220077f02d1
gcaaaaacacaagatacatcacaattttgcatgtccaacatagtcatagatccatccgcagccaaaaattcaggttattgcaatgaggtcagtaactttaacagtttatttccactggcggcatctttgcagcatacaacacaagtggaacctaaactacaatccaatttgcaagagttagcatcatccaaacaagataatgtagcttgctttaaaaccggagcagcgctgtgatattttgatggccatatgtttgggaggattctcaaacattcagtacaataactaacggctgaaaaaactgtctcaaagtcaccctgtcattaccatgctttcttgcccctctgatttcagtgtcataaatgacgttgtccctaagaatgacagggtttccatttaatttaggaaagggtcttgcttgctcaatacaactaccttgttttggggcaaagtaacctttataagattcttattatcagtatggccactatacac

SEQ ID NO: 6152 - DNA, 531 bp, Glycine max
  unsure (1)..(531): unsure at all n locations
  Clone ID: jC-gmfl02220077f03a1
ctttcccacacccaacttcaccaacacaaatggaatatggaaaattgggaccctctgacccgggtggctcctcacgccgctccactgttcctctcaccaatccaacctcttcttcttcgtccgccagcagcaaaaagaaactcatcatgctctctctcctcgccgccgtcttaatcgttgccgccgccatctccgccgccctagttaccgttgtccgctctcgcgccaccagcaaccaaaacgggccccacctcgcccacaatcccacacaggcaatttccagaacctgcagcaagacacgtttccctactttatgcatcaattccctccttgacttccctggctccaccactgcctcggagcaagacctcatccacatctccttcaacatgaccctacgccacgtaagccgggcgttctacgcctncagcggcctctcgtttgccgccacaaacccaaaggttagcgcggcttacaacgattgcctcgagctattggaggagtcgatggaggcgctatcacggtccctcg

SEQ ID NO: 6153 - DNA, 502 bp, Glycine max
  Clone ID: jC-gmfl02220077f03d1
ttttttttttttttttttttttttttttttttttttttttttttttttttttttttttttttttttttttttttttttttttttttttttttttttttttttttttgggggccaaaaaaaaaagggggaaaaaaatgtccaaaaaattaggggggaaaaaaaaaaaattgggggttggggggggaaaaaaaaaaaaaaaagggggctaaaaaaaaaagcggggaaaaaaaattatttttaacccccccccctggaaaaaaaaaaagggcccaaaaaaaaattttgggggaaaaaaaaaaagggggcctaaaaagggaaaccccttccctttttccccccagggggggggtttggggggacttttggaaggggaaaaccctttaaaaaacctgggggggaaaaaatgggaaaaaacccggggtaaaaggcccccccgggggggggaaaaccgggggcccccaaaaaaaaggggggcccccggaaaaaaacccccccccggggg

SEQ ID NO: 6154 - DNA, 576 bp, Glycine max
  unsure (1)..(576): unsure at all n locations
  Clone ID: jC-gmfl02220077f04a1
ctttctttatcgccagaaaattttcaaaccctaaaatccgaatttcgctgatgatctttcctaatcgtcatcataccaaacaatttttcttcatatctgtctccgggagagtcgctttgacgggaaacaagggttttcgctgcaattctaatcggtcaaattggaatcgtcggatcaatttgtcatgaagttcctggagtgttctgctttagatcggcttaatgatttcttgggtaatttgaatctgggagaacgtactatcaaaggatgccttgaagcttatagttgcaaacatgctggatcggataaaaaactctccatcagtttggagacagagattcttgattatcttgggaaatcatccgacactgattcctcctcaccagatcaaaccttcttaaccagaaccagccgaaagacattggtttacctggttctaaccctgtatcacatgtatcccgattatgacttcagtgcagttaaggctcaccagtttttcacagaggaatcacgggacagctntaagcagatttttgatacctacatgcatgaagcttccaagaatgnggctgaact

SEQ ID NO: 6155 - DNA, 412 bp, Glycine max
  Clone ID: jC-gmfl02220077f04d1
caaatatgttttttgataatattacaccagaggtgtgtcctaacagtcgagtatgatacagaatccaaacctacgatgtgcataggaggaagatacagatgttaaatctactatattgatacggatcggatacatatgctatatctacgactcaggccacactgaaacggtctttgatatacagaactacgcatctgaaaccatcttatattacagaactacacatgggaggatcagaagtcttcatatgctaactaatcgaggtagaagcgactcatatatccatgtcagcaaatatctcttcatcgtactcattggggtatatcatcaataagcaggtccgtcagcaatcaagttactaaaacaactgaatcgaaaagatacaatccgcttaagctttctattgtaaaac

SEQ ID NO: 6156 - DNA, 578 bp, Glycine max
  Clone ID: jC-gmfl02220077f05a1
cacatggtttcttcttccttagcagaattttgattttgttttatattatttcttttggatcatcttgtgaaatttcttagcttacctaagcctgaaacttctgcttcctgagttgtatatataacctgtgcttgtgatagtgtgtaataacttcaaaggtctaggcctagcatggaaaacaaccttaaccgtgaaacagaagggcatggcttgcctaaaattccatcactagttcaacatatatcatcaaatgatgaaggaaactttgacaatggtgacttgaaaaatctaagctcatctttcaaagagaatgaaacaatcttagcaggaagccaaggtgatgaacatgcagccattaatcatcggaataagcattcggtatctatcaacataccattctcttgtgaagaggttcagctgcataacaccgtaagagttctctatagtggcgaagatgatttctcttctcaatcaactactacagactccaagccaccattaccatgacaatcaatgccaaatggcagtctgcactcagagccagcatgcggtgtccattttaacaatcaagacagcgt

SEQ ID NO: 6157 - DNA, 398 bp, Glycine max
  Clone ID: jC-gmfl02220077f05d1
gtaaatacatggactaaagtgaagatttcataaaattaggaactaaaataatcagcatttacaatgtcagggactagaatggggtttactcaagaaaaatctaaaactttcactcatgcccctcccatgtctgaccactgaaggttttcagtaaagatgttggttgcctcattattttcttcctcatttgagacgtctatgtattaacatacatgatgtattccttgaactattggagtgtgtgattctcgaataagctcctaaactaaatcatttttatccgagttcacaaactttcaagttatttattttcagtcttttcggcgtgatcatggctcccaagtcttaaatgggagccatttctgcgtggattttgctttctctcacttgtggcaatg

SEQ ID NO: 6158 - DNA, 619 bp, Glycine max
  Clone ID: jC-gmfl02220077f06a1
gttgatgttaaggaaaggcgcgaatcccatgattttgttcaaaccttcatcagctatgcgattgtctccttgtgcgaacaccacttcaatgagttccggatcgggttcacttttgtggttccggaagggtcttcggatccatgacaaccccgctctcgaagtcgcttcgcgtggagcctctcatctctaccctgtctttgtcatcgacccgcatttcatggaacccgacccgaattcttccgcacccggatcctctcgcgcgggtctgaaccgcatcaagttcttgctggagtgcctcgttgaccttgacctcaacctcaagaaccttggctcaagacttttgattctcaagggtgaccctgctgaagttgtcattcgatgcttgaaggagttgcatgttaaaaagctatgctttgagtacgacactgaaccgtattatcaggctctggatgttaaagttaagaactttgcacttgctgctggaattgaggttttctctcctgtaagtcatacactcttcaatcccacggatatcatagagaagaatggagggaagccgccgcttagttatcaatcgtttgtcaagcttgctggggaaccaccatcttctctctctact

SEQ ID NO: 6159 - DNA, 513 bp, Glycine max
  unsure (1)..(513): unsure at all n locations
  Clone ID: jC-gmfl02220077f06d1
acatgaactaaattattaagtatatatgcaaaatataatgtgccatgctgcttccaatttggcgtctatgtctacgaaatatgttacatacatacatgtgtcatacaaatgtcttgataaatgcataaaataaaatatccctaacacgtataaactgcaactcaaagcacggcagttgaaaaaacgagtaaaattttgggtcagccaatcagctgttgcttatatcttttagctccagcctcttgcccttcactctcatctaatttcctcctcaaatttttcagatcatcttcactaaccaaaccatttaattctttattcaatgcatatgcctcgcccattttccttctgcactctttactcgcagaatcatgagaaaccactggcattgggtagtctttgccaattatgccaattgctttggtctgaatgcttntaggagcccgccagggttcataaatgtactccctgagcatatcttttaagactgggagaaaatgcctaatatagtcg

SEQ ID NO: 6160 - DNA, 378 bp, Glycine max
  Clone ID: jC-gmfl02220077f07a1
cttcaacatggaacttccgctgggatcatcgagggcgtgtagctggaggagatactgctggaactcggttttctaacaggattagcgggaatgatggatttgggaactatagtggatcctcgtgtggattctaagatggaagcccattgcagaattatgaaattgaagggactaatagatggcaaagattccgaatctttgaaggaactgctcgaaacgggataagattatattctgatcaaactatttaagggcatatctcctgacatgtgagcatagaacaggtgagggagttggcagaatcatcaaccgtatcatgcccatattccgcataacttgcacattcattaccttctacttctatgtcagaatctccta

SEQ ID NO: 6161 - DNA, 372 bp, Glycine max
  Clone ID: jC-gmfl02220077f07d1
atcttgaatttttattgtttacttattttctttaccatttatggttttctaatggtatatttacatctcaggattttatacaaatttttgagataatatactgtcatgaaaatgcttaatttaagttccctaaacattaatttcttacatgattacatatggtctcatttgatttcagatagaaatagcacagcctaagtcatccgcagatgtgctaagatattcaatagacaatccatttgaaagcccgctgtgagcttcccatgtcaagcatttttctacgacagctcgtcagtcaatgacatcaaaatttaagtactgatcatggatgccattcttttgcagtggcttaagactcgatcccattgaact

SEQ ID NO: 6162 - DNA, 436 bp, Glycine max
  Clone ID: jC-gmfl02220077f08a1
ttcaaacaggacagttcctttacgcttgtattaggacatgtggtaggccttcatttgactcagattcaaaatgctaactcactagatgtttatgtacttgcatgtacttaaaaactgtagtggatctccattgactatctgcaatcatatttgcttgctcaagtgtcaaggcaaccacaggtagatgatttcagtaaaacctgtctatgacaaaatcatattatgtatgctacagcaacagcagcttgcttatgtttgtaatgagcaagcctgcaccagattcagtttggaccccagagacctctacctgtactgctgcacagattttctgcacctgtcctgtaactgataattacactatgatttgcttgtattatgtgctatatcgataacatatcttaatcagttatggtagacaattgaagaagaacttaac

SEQ ID NO: 6163 - DNA, 414 bp, Glycine max
  Clone ID: jC-gmfl02220077f08d1
caccataactgattaagaaatgttatcgatgaagaacaagagacaagcaaatcaaagtgtaataattagttacaggagaggtgcagaaaatctgtgcaacagtacaggtagaggtcactgtggaccaaactgaatctggtgcaggcttgctcattacaaagataagcaagctgctgttgctgtaacatacattatatgattttgtcagagccaggttttactgaaatcatctacctgtggttgccttgacacttgagcaaggaaatatgattgcatatagtcaatggagatccactacagtttttaaaaacatgcaagtacctaaacatctagtgagttagcattttgaatctgagtcaaatgaaggcctaccacatgtactaatacaagcgtaaaggaactgtcctgtttgaa

SEQ ID NO: 6164 - DNA, 454 bp, Glycine max
  Clone ID: jC-gmfl02220077f09a1
ggctaggagaatgatggaagcgcaggagcactatgtgtagttcggagctaaccaacgcttctatagacagctaatgtgaacgtgagtgcagagagcttacgactgacaggactactcagagagccgacgccggtgccaatggttgacccgactgagtctacgtcatggccgatctacaaagcagggcatactgtagattgaggtcactttcttgagtctctacataaccggcttaaccacactgggagtgatcatggctaagtattaaggagctttccgttgagatgcaaggagagtcgcttgtgccaacagtggcatgatcattgtcctagtatactgcaacgctggcatgtcagggggacacatgaagccatcgatgacattatggctgtttctggcgaggaagctgaacttgcccatagccattcgctgcactagatgcagtgcttgggtg

SEQ ID NO: 6165 - DNA, 481 bp, Glycine max
  Clone ID: jC-gmfl02220077f09d1
cttcttcttatgcaatgggttgtgtctgtctttttctaacttgagataatacttcaacttcctcattttttccctctcctgtctcctggactgtaaaatcctagagattcgctcttcccgttctcttctcaatctggtaaactctgcttggcggtgactaaccacccttgcttgatatatctccttattgcccatcatgcgaacaagcctctccttctccttgagatctccctcgtgcctctgtttgctcagttcaacctcttgctgctgctcacgatcatgaagaagtctctcttccactagacgctgttgatatgcagcttcaatcaggggagcagcctcttctctttttgctctttccaaatgatccatggtttttgctaacttctgcagtttcttttccatttcctgtctttcccggagttgttcagtcaaagtcaactccatcaatgtctgcttggtgattttgtccccctctatg

SEQ ID NO: 6166 - DNA, 163 bp, Glycine max
  Clone ID: jC-gmfl02220077f10a1
ttttacttcccctatggctcgtcactccttgctcttagccctcctcctgttcgccgccgtggccaccgacgcgatggcggtggccgcgtccgacgccgacgacatcctgatccgtcaggtggtgccagatgttggcgaagccgaagaggaggacaacctgctg

SEQ ID NO: 6167 - DNA, 446 bp, Glycine max
  Clone ID: jC-gmfl02220077f10d1
aggaccacacatttccttggatttcccacttggatatgtcaagcatacatacagaaattacatactacataaacaacatgggcttaacagtttcctgatcctatacggagataattttaccagtaccaaatgataaagttcacaacataaatatttatacaaactccccttagtccagtatcacattacaaccacaatcaggcatatctttggatttaaaggctggatggatatatagcagctacagttgagaccatggaatttacttcacacacatttcgacctttgcaaaacttggaatatccattcttttcccagcttttgccccatgaattcttaatgatccagtaagggttggtcttaaaacgaatgggagcatatgcacctttaccataaccaacttgaagaaccccatgatccaaatgctttccacaaatgtatgggca

SEQ ID NO: 6168 - DNA, 303 bp, Glycine max
  Clone ID: jC-gmfl02220077f11a1
gcaatgcttatattttgggtggccaagacaaatcacagaactggcatgtctactctgcttctgcagattctgtaactccatgcgacaatgtttacactctagagatgtgcatgactggcctggatagagagaaagcacaggttttctacaaagaacaatctgcttcagctgccattatgactgttaattctggcattagaaaaattcttccagattctgagatttgtgactctgactttgagccatgtggttattcaatgaactctgttgaaggagctgctgtttctaccaattatggtaccc

SEQ ID NO: 6169 - DNA, 372 bp, Glycine max
  Clone ID: jC-gmfl02220077f11d1
aacggggacaaatttatttataaaaaaccattcgacgctaaaaaggaaaaaccaaaacaagaaaaggcccaaacaccctaaaaaggggtaccccaaaaaagggaaaaaacccccaaaaaaaaaaaccaccgtctggaaaaccggccctaattacccaaggacacaacacggaccctaaaaaaaaccccccgttcaaaacaacctcattccaacacccaaaaatcgaactcaggaaaacccactacccaactatggaaaaatctcggcaaaccaaaacaccacccatcaaaagccctccagggcccctgtctttgcaaccggaaccctcaacatacaaaaaccccgtcggataaaacaaactggttgcaccat

SEQ ID NO: 6170 - DNA, 457 bp, Glycine max
  Clone ID: jC-gmfl02220077f12a1
gcaatgcttatattttgggtggccaagacatatcacagaactggcatgtctactctgcttgtgcagattctgtaactccatgcgacaatgtttacactctagagatgtgcatgactggcctggatagagagaaagcacaggtgttctacaaagaacaatctgcttcaactgccattatgactgttaattctggcattagaaaaattcttccagattctgagattagtgactttgactttgagccatgtggttattcaatgaactctgttgaaggtgctgctgcttctaccattcatgttaccccctaagatggcttcagttatgcaagctttgagactgtcgggtatgacttcaaagcggtgaatctgaacgaaatggttcagaaggtattggcatgttctctaccaactgagttctctgctgcagatcatgtggatggtgcaagcaagtttggttg

SEQ ID NO: 6171 - DNA, 311 bp, Glycine max
  Clone ID: jC-gmfl02220077f12d1
ttttttttttttttttttttttttttttttttttttttttttttttttttggtttttttttggttttttttatttttttttaacccacatattattaaaaataaaaaaataaaaaaaaaaaaacaaacaataaaaaaaaaaatcgtacataaaaaaaaaaaaaaaacaaaaagataaaaaaaaacccaacaaaataacaccacaaaacaaaaaacaaaaacaacacccacacaaataaacaacaaggtaaaaaaaaacataaaacaaacccccaaaaaaaaaaattaaaacaaagaaaaaaaacacatttt

SEQ ID NO: 6172 - DNA, 548 bp, Glycine max
  Clone ID: jC-gmfl02220077g01a1
atcacttcttcttgtgctggcataacttcaacaacttattctttgttctcgatctcaggatggctcatttggccctgtctcagatggctgtaactgttcctgttggcagcgatttgtctctcagaagatctgcggttaaggcacctaactgtaacttttgggataaatcatgggcaccagtatttactttgtacttgaaggcaaacaactcaagtttaagaagtcgtcatgtggtattcatgtcagtgcaacaagcaagtgtacccaaagttaatgtatcacctttagagttggaagatgctaaagaacctccattgaacttacacaagcctaaagaaccctatacagcaacgattgtttctgttgataggctagcgggaccaaaggctcctggggaaacttgtcatattgtgattgatcatggtggaaatgttccctactgagaaggacagagttatggtgttattccaccgggtgaaaatccaaagaaaccctgggctcctcataatgttcgactatattcaattgcttctacaaggtatggagac

SEQ ID NO: 6173 - DNA, 289 bp, Glycine max
  Clone ID: jC-gmfl02220077g01d1
ccaaaaaagaaaacaatgtttggggccaaaaaaagcaattaaacccggtttttggggaaaagggggcacaaaaaaagacccgatttgaaaaaaagggaccaaaaaaaacccgaaaaggggtctaaaaagggacgggccccaaaaaaaccccccctttaaaaggggggagaagggggggaccccccgcaagaagggggggcccaccctaaaaacacccaaggaaacaacccccacaaaagggggaaaaaaccccccacatggcccgagaaaaacccaggggcccccaaaa

SEQ ID NO: 6174 - DNA, 570 bp, Glycine max
  Clone ID: jC-gmfl02220077g02a1
agcaagggcttcaagtgtcactactaatcctctaaatggatcttcttcatatgctaaattgggtagcaagaggttccgaaatagctgatatagagtatcaaattatcatgatgaggctgaacttgctacttcccaggttaatgcaaaagaagaaaaattgggaaaacctgagggtaatgatttgccagataccaaaagtaagaagagaaagaccaatagaatggaaaatgcagttaggcgtaagagaaaatcactctctggcctatcagatgtgaatgtaaacacttctaatggtgactctcaaaggcctgggagaaaactgaaacaaaagaggaaggtggaagaagtaactttagtacatcaactgcaaaatgttgagataaattttattggggtaagcagcaaatacagctcagctcctcaagctgcacaaaatttgtgttgccttgcgtctgaaggaaagtctgagcacaatcagagggaaaagatagaggcacaagaacatcaaactgctcaaattaattcagtgtatacagatgcaaaaaagcttaactgcagttcactggtaat

SEQ ID NO: 6175 - DNA, 439 bp, Glycine max
  Clone ID: jC-gmfl02220077g02d1
agtgcaaaataaaactataaattgtgataataactttataaacagtcacacatcctccaaccccaccaaactcattttcatatacagtctatacagccctaggttaccaatatatactataacaacttattaaatctaggtacaaaatgggcatccactgagagtcactgtccatggtagtaaatagtaagccaaccattacatatatattaatgcgtatcaaaatgtgggagtgactcccttatttattagtttagtatagttatgtggacacactattgggcacccctctgcatgtaacgccaggttcagagctaggagcaagcaactcatatggcaacacccctgcaccacaacggttccttagagtccgatcaaggttcctgctatcaatgaccttctctatctgtcgaaccttggcggaaaaatcgtagaacgc

SEQ ID NO: 6176 - DNA, 540 bp, Glycine max
  Clone ID: jC-gmfl02220077g03a1
gccaaggagaaaagaaaaaaaaaaagaactggactccttcaattagtgcattgtttcttttcttcaaatggtagcaagaagacattgttaatttgagagatggcgagttacgaggctattaagaactttgatgatgatgatgatgatgatgatgatgtggagatggcactcccccatagccagatctctgaatcaagatctgccactgtttcttcccccattggccaaactaccccgcttcacattcacaacattattgaggaacaacgcattatctccaggcaccaacctcaacccaaatctccgcgtctggtttctcttgatgtttttcgtggtctcaccgtcgcgctgatgatacttgttgatgatgctggcggactcattcctgcgctcaaccattccccatggaatggtttaacactagctgattatgtcatgccatctttcctatttaatgatggtgtttcgcttgcactctcatacaagaaactgacttgtggagttgatgcatctagaaaagccagtttacgggctctaaaa

SEQ ID NO: 6177 - DNA, 355 bp, Glycine max
  Clone ID: jC-gmfl02220077g03d1
ggcatgattaaacaaagttttactagatccaataataaaaaaccagttcatgcaaaaaaaattggcatttttaggctaaaagccacaataaataaaatataaaactaaattttacattaaaaatgcatcgggtccaatgaagcttactctcttgaaatctatcatttcaagggtttaaaggtaaaggccaaattatatcgcaggggggcttttataaacaaacgctggtccatatatagaaaaggtaatgccatcaagaaatttagggaactctaaactttatccattatccatgccggtgacgtcatcaagagattagaagaatttgctacacccggtcttggtcttgatcaaa

SEQ ID NO: 6178 - DNA, 509 bp, Glycine max
  Clone ID: jC-gmfl02220077g04a1
gatatttcccttctgagctttgattagtgtggcctagttgttgttttctcgatgagaaaggcttcttccactatgcattgcgcacttctgcgcttttgggttcccttgctgctgcttgctagcttcagctatgctccttctgtttcggccacaactgaaatttcagggaatgaagtgaacacagatgggaaggtgataaatgaagagttagcaaaaccaagtctaaaaggacatgatgaagaagcaaagttcaaaggattttttccaaaaccaattcctatagttaaaccaattccaaagccaattcctattattaaacctattccaattccagtttataagcctattccaaaaccaattcctattgctaagcctattccaaagtcaattccagttgctaagccaattcctaatgaagaagaaaaattcataggatttattccatagccaattcctataattgagcctattccaaagataattcctattgctaaacctattccaaagat

SEQ ID NO: 6179 - DNA, 454 bp, Glycine max
  Clone ID: jC-gmfl02220077g04d1
agaaaaggaataactggtaccatctattacattaatataatcgatctacaaacgatcacaccgagaacttcattgaacagagagcatgaactacttattttccattacagtacacgagaggagtacgaagtttattttgagatacgatgtagctgtacttataaaggcatttagaaatggaaccgataactttatagtttgagatagagtattatactcttatggagttggaattggcttgtgaattggcaatggtggtagaagtggtttcttgaatttggggtgaagtggtagcttaggaataataggctttttgaagaaaggctttggttttagaaattcctccgactcaacagtcgggatgggctttttcacttaaatggttttgggataggcttaataatgggaattgggtttggcacaagtttaataattggaattggtttaacaacgg

SEQ ID NO: 6180 - DNA, 479 bp, Glycine max
  Clone ID: jC-gmfl02220077g05a1
aaaataatagaatttctagggctttagaactctccattttctcttccgatcatccagaatcctcgagaattctttttgttgaactcacttctctcttgttcgccacgcactcttgtctctgcaagttgtctgggttgctcgtagaccaccaggatatgcatttattgagtttgatgatcggagggatgcactcgatgcaattcaggccttggatggaaaaaatggttggcgtgtagagctttctcataattccaagggtggtggccgaggagggcgtgggcgtggaggtgaaggcacacaatgctatgaatgtggtgaacctggacactttgctcggcagtgtcgattgcgcattggatcacgtggccttggaagtggaaggaggcgaagtccaagtccttatcggcgtcgtacaagtccaagttatgggtatgatcgcaggagttacagccctcgtgggagaagatctccaagacgac

SEQ ID NO: 6181 - DNA, 338 bp, Glycine max
  Clone ID: jC-gmfl02220077g05d1
gaacaaggaaatcccaaaaaaaaaaaatttaaggcaaccaaggggggcaaacaacccggggtaaaccccctggataggggcggccaaaatttaacaaaaaaaaacttcaaagggggaaaaaagggccccgggttcccaaagcggaaaaagccccccaattccaaacaaaagcctgccaaaggtaaacagccccatggggaaacggggggcccaaaccaaaaagccccagggggggaaagaaaaacatttgggggggccccaaatgggaaaaggggaaccccttttttaggcccaaacctcaaaaatcatatatcaaccaggggattttgcccaagggg

SEQ ID NO: 6182 - DNA, 453 bp, Glycine max
  Clone ID: jC-gmfl02220077g06a1
aaaataatagaatttctagggctttataactctccattttctcttccgatcatccaggatcctcgagaattctttttggtgaactcacttctgtcttgttcgccacgcactcttgtctctgcaagccgtctgggttgctcgtagaccaccaggatatgcatttattgagtccgatgatcggagggatgcacttgatgcaattcaggccttggatggaaaaaatggttggcgtgtagagctttctcataattccaagggtggcggtcgaggaaggcgtgggcgttgaggtgaaggcacacaatgctatgaatgtggagaacctggacactctgctcgggagtgtcgattgcgcattggatcacgtggccttggaagtggcaggatgcgaagtccaagtccttatcggcagcgtacaagtcccagttatgggtatgatcgcaggagctacagtcc

SEQ ID NO: 6183 - DNA, 342 bp, Glycine max
  Clone ID: jC-gmfl02220077g06d1
cattggggattttcttgatcatttaattcttgaccaactactcacaaaattaaaaaaattaaagaaaccaatgggagaaaatataccggatgggaccccactatattggaggggctaccatttagtccaataaatgcttaacgtcgatacccacgcacccaattccactttgataaaatggccccctgtccctaacaataagctcgtctagtttaatgacccagttgagaaaaatgggccccctaccaaaaatacagtctgtggaaaccaaaacattcggggaggccccaaatgggataataggaacgacttttttatgccccagggtccaaaacaacattc

SEQ ID NO: 6184 - DNA, 496 bp, Glycine max
  Clone ID: jC-gmfl02220077g07a1
cgattccaaaggtgcgtttctgctgtgctagggtttctgcatcttccacctccgtcgcgatgaaaccaggcttcatctgattccgatttcccttcgctccttctcctccttaacattcatcttcttcgattcctctacaaattatgattattattatgatgaactccatcttcgcctcgcataaccttcgcgtcttcggtcccggcttgaatcccttcgcaccttattgcatcgccaatcactcccttttcctttccctttcctctcgctaaattacaattccctttctttttcctctccaacttctccttctccgtttctccgcacatgtcaattcggaggacaccgtctttgattcggcctattcttttgggggttactttacttcggttacgcgtcgtcgttttgcttatctttgtcgccggttctgcgttgcgctgattgctgacaaagaaagaaagaaagacagatgctggaggaacagcctgttgttttg

SEQ ID NO: 6185 - DNA, 541 bp, Glycine max
  unsure (1)..(541): unsure at all n locations
  Clone ID: jC-gmfl02220077g07d1
gaaaacatcaacaatcacagcatatcacattaataatcgtacataattgtttccataaacaagggcatccaagatgctaaaatagtaaaacatccccatacactacatagtagttttatttcaattgtacatttattcatacaatacagatacagtgcatgtctggatacgctttctgaatgtacgtatcagcatattttcatgtcaaatttgtaaaggtgacgcaaaagctagttatattaactttgatctcctctgaatggcatccaaacacactatcaaacaccaaccaaatccctgaaaagcaaattaactttcagagctgtaacatgtctctccagcagacaagtcttcctgacgaagtcgcttcatctcctcataggcccattccagtccggggcagtaatgaagccgtgggttaaatctgctattcactgatatcaggtggcatgaaggctccattctctatcaagaatntcacagcattcctcctncttttcttggctgcaatgtggaacggcgtccagccacaagcaccctt

SEQ ID NO: 6186 - DNA, 480 bp, Glycine max
  Clone ID: jC-gmfl02220077g08a1
aatctctccaaatttcacttcaaatgcgagtagtgttggtcttctctgttttcattgctgattaagtagttgtgaatcttttgccctttaccatatgaaggtgttaactcgatctctatgctggattgtatggaactggagggataggtaaaacaacgaccgctgtataagtaattgttatagctagtcgttgttttacctattccacccattccatgtatccctttcctgagggcgcggataatttcttacttttcactgccgattccgatgaagctttgtgttttaatcagacgaatgaaagtatattaagcttttgctctggatttatgtgccagtagaatgatcttaagattctaactttattatttgtttatgggattatttgttctattttggccaatagttcacagatctgagagtttcaaggcgtccctcttgctgtctatgccagtaaatcgattgtaagattattaactg

SEQ ID NO: 6187 - DNA, 559 bp, Glycine max
  Clone ID: jC-gmfl02220077g08d1
gtgacgctcttttattgcagaagtctaacttgaatacattgtttttgtgaagatcttttattgcagaagagacttgaaaaacattttacaaatttgaaaaactaaaaataatagactcgtaaatgttaaaactatatttgaatgaaatcatgtgaaagctggaaaatacatgcgacatgcaagcgtagttatcttgaacacggacagctacttaaccatattgatgccatcgaattctaatcccatttcacattgatcaatgacttcaatgctagagaagtaaacaatgatgcttggtgcgttttgtcccgtatgcaattattgttctcactgcatatattttttccttacacttgctcaccaattcatcagatccataatttagtttgccccttttacaaggttaggctaaatgatacttccctgcaagcttttgttacaaaacatggacctcaatctgtggctaacattcccatttggtccatgttattgacaccggttgaaaacagcacacaattcattaattttctgacactaagtccacatgttcaattttgaa

SEQ ID NO: 6188 - DNA, 529 bp, Glycine max
  Clone ID: jC-gmfl02220077g09a1
ctaactcacatagagattatcacttatcatttactaagaaaggattaagggaggatcactttctatacattgatacgtccattcctaccttgctgctacttttcatcttttctatttcgaattcggggttgctgctgtgtttcaactctatcgtgttactaatatatacagatagaaacagactagagtaaagtttatcggtgcctagaagaatagacattatagagactagcaacgacgtatgatcacaccggaaactagaggtgcaactgattggcaagatctgatatgagattttgaagaatgttagttgcactatagttgtgcagctgatgaaatgggggctccttgatcagcatggcctttggagaactttggatcatacaagcatctacagaatgggccgtgagtaggaaaagtactgtatgaatggttctatggtgaagaacactactactacaacctcatgtggagccttcatttgcttatacttagtggtcttagaagcctaattcatgtgctttggggt

SEQ ID NO: 6189 - DNA, 567 bp, Glycine max
  unsure (1)..(567): unsure at all n locations
  Clone ID: jC-gmfl02220077g09d1
ctgtgataatatatgcattaaatgaatatataaggaaatattgaaaataacaaagcaatcagaataggaattgaacatacaagaggaagcaaagctatcttgctttggcttaatttataccatgaatgaatcactgtcaatgtgatcatatgaacatacaagaggaaacattagaaatgtaatacacagacttgaaagaatataatcacacttataaggtcactgtgatgtgcatgcaatacaccaaaacaaataagaaacaacttgagaaaaatactttgactgaagctgattttaattttctttctgtgtgaaacttgacactggtcttaggccatgtttgagtgctgctttccacacaagatcgattctgttaacatctatggccccaacttcgtgatgagaccaaccttaaggctatgtaccactcctnctgcatggcacgcgtgaaccactcccctatcatcgtgtactcacaacacccaagtccttccacgtcttctggaatctcatggcttgcaggtcaccataagtgcaatcttttctaaatgantaaaatggtgggac

SEQ ID NO: 6190 - DNA, 160 bp, Glycine max
  Clone ID: jC-gmfl02220077g10a1
ctcgcgatctagaactagaatttaccttcatctttctctcagcttcaccttcaccttcaccttccgaattgtatcaaacctcaaaaaatggatcatcaaaacaaacacgtagcagtctttgctttcccctttggcagccaccttatgcctgtcttaaacc

SEQ ID NO: 6191 - DNA, 379 bp, Glycine max
  Clone ID: jC-gmfl02220077g10d1
ggttaattacggggttattattaatggtaattgaacatttcatttaggaatcttagctaacttgctttggctaatttataccaagattgaatcactgtcaatgggatcatatgaacgtacaagaggaaacatcacaaatggatacacagaactgaaagactataatcacacttataaggtcactgtgatgtgcatgcaatacaccaaaacaaatgtgatacaacttgacaaaaatactttgactgaagctgattaaaattggctttctgtgtgaaactcgacactggtcttaggccacgcctgagtgctgctttccacacaagatcgattctgttaacataaatggccaccacttcgcgatgagaccaaccttcaaggc

SEQ ID NO: 6192 - DNA, 122 bp, Glycine max
  Clone ID: jC-gmfl02220077g11a1
gaaaactcaagccctgatggaagtggagatggaaacggcattggtggagcacaggctattagcgcggtggctgaatttctgctgcttggctacatcgacgttcttatatggcgcatgaagcg

SEQ ID NO: 6193 - DNA, 450 bp, Glycine max
  Clone ID: jC-gmfl02220077g11d1
gacaaaacattcactaaaataatttgctttcatcatatcatatataaaatacagtgtccaccgcaattcatataagataagctctaattgcccaatttccttaaacaaccaactcacctacacaaaggaaccaagattaacactaaacattggcaacaaaaaaatgaagcatgcttccatcaaagttaaagtatgaaagcagataaaccgttgaactcaggccattgagattttttcacaacaacaaactgcaaaggtcacctttagaaggaaaattcccaaataaactgtggcttgaggcaaccattcttgtccatgcaatcaatatatacatccattccatgcttgtaaaaccaaattggggctattttgtaccccacattttttggccttgaaattttatcatgtggccaatggaaccaacaaaaagcaacacattatcaccatccc

SEQ ID NO: 6194 - DNA, 471 bp, Glycine max
  Clone ID: jC-gmfl02220077h01a1
caaatgttgaagctatgggacttgtttatatatactgccaggttcaagaaacacacagacaaatgaaagtggagtgattgatagcgacgatgatgagatggatgttgctgggaacaagacaaagaatgggcatgctgtaagcggctctaacaacttctttgcagatatataggattgttcacaagtgtgatgaccctattagtacatttgcgtgatttccttcctaatcaatatattcagacagacgctggagccacatgatgaactacctgaagtctcgctaaagcaggagatgatggactcgggccaatgatgcaacaatatacagcttgtgttttttacgaaatttatatgacacttatccagttcaggtcaaacatatgcttgatattcaattttgctgttaccctttcgaaaaagttatttactataacaattcttgatcttgatcccaaattgataccttggtgc

SEQ ID NO: 6195 - DNA, 378 bp, Glycine max
  Clone ID: jC-gmfl02220077h01d1
agccactaaacaaaaagttatccaagagaggaattgtgttacattgattttaattgcttgagataaaaaaaatgtagttaacactagagttaatttatgaaatgaaaataattaaagaattaagaagcacaatcattactttttaattaatttatattgcttgattttgcaactcattacttttattgccaattaagtattggctttttgggcctatggtgtttgggcacgccaggaaagcaaggaattccagtaacctcaatccaatcagttccatgaaaaaacttagatggtgagaaccaacgtgcagcttttgaattgaggttccaaatcccagcccatttcacacgcttggatttgtctgaaccggggccaatg

SEQ ID NO: 6196 - DNA, 552 bp, Glycine max
  Clone ID: jC-gmfl02220077h02a1
gttacactcagagtagtgaacaacatcagcaacaacaacaacaacgttgcagtgtgttgtattgtttcttagtgcacttttttttggcatcaaagaggttaaatccatggattctgattatggtattcccagggaactctcagatcttcaaaagattcggtcgttgtaccagccagagcttcctccttgtctccagggaaccactgtgagggttgaatttggtgatgcaaccaccactgctgaccccactgatgcactcaccattagcagggcgtttcctaacacctatggacaccctttggctcactttctcagggcaactgccaaagtccctgatgctcagatcataactgagttccctcctattagggtggggattgtcttttgtgggagacaatctcctggagggcataatgtcatttggggtctccacaatgctctcaaaattcacaatcccaacagtgttttgcttggaatcttggtggatcagaaggtctgtttgcccaaaaaactctggagataactgatgatattctttcgacatacaaaaat

SEQ ID NO: 6197 - DNA, 524 bp, Glycine max
  Clone ID: jC-gmfl02220077h02d1
caaatgcatgggtgtctcacttggcatcattgatattatagccttaattaggcataccaatcaataagagacaagtcaagggttatgaaatcataacagacacgactcgtatttgtgggtctcacaaagcatagcctaatatgtatcatctatgtgacatggtctacatgatattattattacaggttgataaaaaaagaccacataaatatctaatcacaatttacataaaacacaatccatacactatatagttttgaaggatccaaagctaatgcagatcccttcctgatctgctatctggctacatcaactgactgatgggcgaggcaatcttttggcaatttcctttgttagaaaagatgcaatcttggaatttttgttcctattccaagatcatctttagcccctccataggtctatatgagtttgctacaactatcttcaggcagcaagaacatcatggggaaaagttgctagtagcatagtcaacaatgtcctcaaacagttcatttatattatct

SEQ ID NO: 6198 - DNA, 377 bp, Glycine max
  Clone ID: jC-gmfl02220077h03a1
gatatgctccttctgagctctgatcaacgagaactaacggccggaatataaatgaggagggacagtgccactatgcattgggcgcccttgggctttgggattcccaaggtgcagctcgctagcttcagctatgctccttctggcacggccaacactgctataccagggaatgaaccgaacacaaacggtaacgcgataaacgccgatttagccgccccaagtcgaaaaggacacgacgaataatcactgttgaaaggatgttttccgaaaccaattgctaataggaaaccgatatcacagccaattgctagcatataacctattgcacttccagtgaataaggctatagcaatgccaattcctgttggcaaggctat

SEQ ID NO: 6199 - DNA, 529 bp, Glycine max
  Clone ID: jC-gmfl02220077h03d1
ataaaaggattaactggtaccatctattacattaatataatctgatctacaaacgatcacaccgagaacttcattgaacagagagcatgaactacttattttccattacagtacacgagaggagtacgaagtttattttgagatacgatgtagctgtacttataaaggcatttagaaatggaaccgataactttatagtttgagatagagtattatactcttatggagttggaattggcttgtgaattggcaatggtggtagaagtggtttcttgaatttggggtgaagtggtagcttaggaataataggctttttgaagaaaggctttggttttagaaattcctccgactcaacagtcgggatgggctttttcactataaatggttttgggataggcttaataatgggaattggttttggcacaggtttaataattggaattggtttaacaacgggaattatctttggacaggcttaatacaggaattggcttaacacaggaattagtatggttaggcttataactgg

SEQ ID NO: 6200 - DNA, 127 bp, Glycine max
  Clone ID: jC-gmfl02220077h04a1
atgtatgggtttccttaataaaaacgggagcttttatttgggggattagagtttattgctggaaaagttgcagctggtatccgagttaaactaatggatgtttgtagatcacaaaactgaaataaaa

SEQ ID NO: 6201 - DNA, 143 bp, Glycine max
  Clone ID: jC-gmfl02220077h04d1
tttttttttttttttttgatctaaaaacatccattaatttaactcggataccagctacaacttttccagcactaaactctaatccgccaaataaaagctcccgtttttattaaggaaaaccatacatacaaaagaggagaacg

SEQ ID NO: 6202 - DNA, 405 bp, Glycine max
  Clone ID: jC-gmfl02220077h05a1
ataataacggacacaatagggctacattacttttgatagcctcttgcgagcatgcggactcctcggaactgagctccgactgacagacatttgtctggctcatcactcactgatgcctttgccagcagtatgtgtagctcgaataccaccaagatttgcatacattgcgttagatgatcgcgggatactacttgatgcaatagacgccttggtaggaaaagatggttgccttgtagagcactatcataacttctagggaggcggacgataacggcgtgacctcaggggcaaaggcgctacctgctagaaatgtggttaacctagacactgcgatagggtacgaccactgagcataggatcacagggcctgggagcttaatggaggcgcggcccaacaacttattg

SEQ ID NO: 6203 - DNA, 141 bp, Glycine max
  Clone ID: jC-gmfl02220077h05d1
ggttgtgggatactaaacatgaacggcaaaaaaatcaatgccagctgagtgcaaaactctgaacagaactacacctcacacgagaaggtttaccaaattagaggccccattatgagaccgggagaaactcaagccaaataa

SEQ ID NO: 6204 - DNA, 389 bp, Glycine max
  Clone ID: jC-gmfl02220077h06a1
gtatttacaaagatcatcgggcgttatgatcttaactgcactctgccgagcatctgtgttcatcttcactagcccaagattgacgctcttaggcctagatgagaacatactacaggcggcaggaaccatctgtgttgggcgaattcctatcttatttgcttatattgagtcattcaatcggcagacattacttagatctcaaagcaggaatgtctggatagcattcttggcagctttagcactaatcattcatgtgctgctttggtggctattgactatacagttcaagtgtgggattcctggggcaatgatgtcaacaatctaggcattctggatgcctaatattggtgcacttaggattaatacgtgcgggtggtgccatgaaacct

SEQ ID NO: 6205 - DNA, 470 bp, Glycine max
  Clone ID: jC-gmfl02220077h06d1
attgctattaaaatatataaattcaaggggtaaatacaggaacatttaatactttagcaactacttatataattttattaatttaagaaatatttgagagagaatttactgataggatggtactatagtataataactatcaagcaatcccctgaatgtataacgtacaatagccaatcaaacaatgatgatattgataaataggagtctgaaactaattatctgatgtacttgtttcatgatcaagttgcaccttataccacttactaatacgattacgggctatagttacctgctcatcccaattagttttgtaggtgattatagctaggactatagttggaactagtgtcccaaacaacattccaatccaaatacccttgacttgcaagtgaataatgttaccaagtactattccaactggaatacctatgaggtaataacaccctatgttcacatacgctacagtg

SEQ ID NO: 6206 - DNA, 458 bp, Glycine max
  Clone ID: jC-gmfl02220077h07a1
cgattccaaaggtgcgtttctgctgtgctagggtttctgcatcttccacctccgtcgcgatgaaaccaggcttcatctgattccgatttcccttcgctccttctcctccttaacattcatcttcttcgattcctctacaaattatgattattattatgatgaactccatcttcgcctcgcataaccttcgcgtgttcggtcccggcttgaatcccttcgcaccttattgcatcgccaatcactcccttttcctttccctttcctctcgctaaattacaattccctttctttttcctctccaacttctccttctccggttctccgaacatgtaaattcggaggacaccgtctttgattcggactatatttttgggggttactttacttcggctacgcgtcgtcgttttgctattctttggcgccgttttttgcgtagcgttgatcgctgataccgaaag

SEQ ID NO: 6207 - DNA, 561 bp, Glycine max
  Clone ID: jC-gmfl02220077h07d1
gaaaacatcaacaatcacagcatatcacattaataatcgtacataattgtttccataaacaagggcatccaagatgctaaaatagtaaaacatccccatacactacatagtagttttatttcaattgtacatttattcatacaatacagatacagtgcatgtctggatacgctttctgaatgtacgtatcagcatattttcatgtcaaatttgtaaaggtgacgcaaaagctagttatattaactttgatctcctctgaatggcatccaaacacactatcaaacaccaaccaaatccctgaaaagcaaattaactttcagagctgtaacatgtctctccagcagacaagtcttcctgacgaagtcgcttcatctcctcataggcccattccagtccggggcagtaatgaagcggtgggttaaatctgctatcactgatatcaggtggcatgaaggctccattctctatcaagaattttacagcatccctccttcttttcttggctgcaatgtggaacggcgtccagccacaagcacccttagttctggcatcaatgtcagc

SEQ ID NO: 6208 - DNA, 604 bp, Glycine max
  Clone ID: jC-gmfl02220077h09a1
cgctctttcagctttgacttttgttggaaactaaggcctaatcaaaatggtgaagttcacagctgaagagctacgtcgtattatggactataagcataatatccgtaatatgtctgtcattgctcatgttgatcacggaaaatcaaccctcactgattctcttgtggctgctgctggtattattgctcaagaagttgccggtgatgtccgtatgactgatacccgtgcagatgaagctgagcgtggtattaccatcaagtctacaggtatctcactctactatgaaatgactgatgaagctctcaagagttttaagggagagcgcaatgggaatgagtatcttatcaatctcattgactcccctgggcacgttgacttctcatctgaggttactgctgcactccgtattactgatggagctctagttgtggtcgattgtgtggaaggagtttgtgtccaaactgaaactgtgctaagacaagcccttggagaaaggattaggcctgtcctgactgtcaataagatggacaggtgcttcctttgactccaggttgatggagaagagggttaccaaacattccagagggctatcgagaatgctaat

SEQ ID NO: 6209 - DNA, 528 bp, Glycine max
  Clone ID: jC-gmfl02220077h09d1
attgaaaatactatctttcaagcaaaattcgcaaaataataatttgaaccaacaccgatgcaaaatcctattagagcaaaaatacatcgatgcaaggaccaaataacagcattacaacattcacgggcaaaaccacaaacaaaactaacagaaattaaatctaaagtagcattgttcacaagagaaaataaattcgactaagttcaaagtaaaataattcatgaaacaaatttaaagcttgtcttcaaactcggagagaggagtcatctgttccttcaagcccttcctcttgcgaatgtcagtgacaagctgtgcagcttgtgatccagcctccaatgggtcagaagacatcatgtcccagtgatcaaacacacattgtgggaaggcctggcctgatgttgcagccctcaatgtgctcgagaaaccaaaggactcgatgacagggaggtatgccttgatgttgtatagtggggtacctggcctctgcatttcctcgaacacgtgtccacgcttctggttaagaacact

SEQ ID NO: 6210 - DNA, 283 bp, Glycine max
  Clone ID: jC-gmfl02220077h10a1
cgagacgagacgaaaacccacgtgacatttttgcccctcacactttcccctatttactccacgcccctcacttccttgttccttcataaaaacaacacttcctcctcttgcattcggcaaccaaaccatgcagcgcacggcgttggcgacagatgaaccacggcggcgctccggcgacgcggagggggagaaggtgttcaaggggagcgaggtgttccgtgacacgtcagcaaattacttgaagaccattttggacctggcgaaccggctcggcaccatgcat

SEQ ID NO: 6211 - DNA, 462 bp, Glycine max
  Clone ID: jC-gmfl02220077h10d1
aaattaatctcagatttataaatatatgtgatataaattgttcacggactcataattggaagtttacaatttacatgattaattaccaatgtgacttctaagacaacaaaagataactcctttctcaatcaatcaacagtatttatttaccttaccccattcaaatccaattaatcatgaaccaatcactccactccatcttcaaaactcccaaataaagcctaacctaagagaagaaaagtgtaattacccccatgaaactatgggtcgaagttacgaccatatcaaacaattctcaactcaaggtttggatatccagctcgagctttgtgtcgttcaaatagatcttgaagtgcttcaacaaattggctatgtattctggcaacctcctcaagagttggctcgtgatttttctcgagctcaattggtctacccaccaccacatgcatcggatgttaaagg

SEQ ID NO: 6212 - DNA, 211 bp, Glycine max
  Clone ID: jC-gmfl02220077h11a1
cacatggtttcttcttccttagcagaattttgattttgttttatattttttcttttggatcatcttgcgaaatttcttagcttacctaagcctgaaacttctgcttcctgagttgtatatataacctgtgcttctgatagtgcgtaataacttcaaaggtctaggcctaacatggaaaacaacccttaccggaaacaaaagggcctgggtt

SEQ ID NO: 6213 - DNA, 382 bp, Glycine max
  Clone ID: jC-gmfl02220077h11d1
aaaaaaaaattttttttgaccaccccattcaattccacacaaaagaaatttttttttccactcgctaatgattttataaaccccaccaaaaaaatcttttcaaaaaaaggggcgcttaaccccctatttgtcaaaaaaattaatttttcccccccaaaaaaaaaagggggttccccctcgaaatgttccaaattttggggcccaaaaattttggaaccccccttttggggaaataaaaaaggccccccaacattataggtgggaaatttaaaggttcccaaaaaaaagggggttctcttgttaccaaaaataaaaattttcttccaaaaccccctttgaaaccccccccttgaaaaaatatggctccccccaaaaattaaag

SEQ ID NO: 6214 - DNA, 440 bp, Glycine max
  Clone ID: jC-gmfl02220077h12d1
aacaaaaatctgttaaaatttattcaaagggaatcaacaaggtacaaaatcgatacacagtaagagtttttttgcaactttacattgcataattcaaacaaaagaaggcgtagttcatatatacagcagcaaaagcatacataagaaaacatagtagtaagcattcatattcatatatgatatatatgataatcatcaacacgacggaacgacgccgtatccagccagagggtccgcatcagtgcgtttcgcgaaccttcctttgattcttggcctcgtttcggtatacgcttttctcgatgcgtaacgaatggtcttctcgaactttcggatcttcctcttctgcctgtacctcaacactgtagccttcctatccgccgccgagaactgcgccgtcaccgtcaccggtgccactttgctgtaactgcaagtcgatatct

SEQ ID NO: 6215 - DNA, 606 bp, Glycine max
  Clone ID: jC-gmfl02220078a04a1
tgttaagttcactagctttgagtccataagatacctatttatgttcgcggaagagacgcggggagaaaaaaccaccagagcacccttttataatcttttcttttttttcttcattggggctattttaatttggggctctttttctacatgggtttacatatagttctacttgtgggacaacagagacgggtacaaagcatgggctctgaaagaaggcatgaaacgcagctacgtgaagcaatgtgactatgttgccatctttgacgccgattttcaaccggagcctgatttcctctggcgaactgtcccattccttgtcaacaaccctgaacttggtctcgttcaggcacgctggaagtttgtgaatgccaatgaatgtttgatgaccaggatgcaagagatgtcactggattaccatttcactgtggaacaagaagtggggtcttgcacttacgccttctttggcttcaacggaactgctggtgtatggagaatttccgcgttgtatgagtctggatggtggaatcataggaccacagtggaagatatggacctggctgtccgagccagactcataggatggaaatttttgacctacccaatttg

SEQ ID NO: 6216 - DNA, 601 bp, Glycine max
  unsure (1)..(601): unsure at all n locations
  Clone ID: jC-gmfl02220078a05a1
gcttctcttcctaatgtagctaccatangacgctagcagtgctgnatancgtatatctatgtttganntttgttgnnttnttccttgtttgtttgtgtgttttgttgttttttttttttttttttttttttttttgttgttgtttgggagtttttactcctggggttaaatttaagtttaagaatccgtaatggaaaagacgaacaagtgagagtgtgagattctgttctgagtcatctttgtgttgtaatcgcgaaaccttttccgatgaaaattcagccaatcgactctcaggttctggccgaggggactcagcttgagctcgccaagccggttgtgaagtcgcggctgaagcggctcctcgagcgccagttctccggtgttcttagaaattcggcgccggaaaagatcgccggaaacgatgaaacgcttaacggctccaatgattttgagccgagctcggcgtgtttagcgaaaatggtgcagagtttcatcgaggagagccacgagaagcactccgcttcacaccaccgcaaccgatgtaactgcttcaacaggaactacgacgacagctctgacgaagattcgaactcgttcggcg

SEQ ID NO: 6217 - DNA, 513 bp, Glycine max
  Clone ID: jC-gmfl02220078a06a1
aggcaatgatctactagactactgacacaatagaagacagttcgacgttgctgcacactttcctgggctgggacatcctcttgtgggaattttttctctaaacttctacatttctactccctctggggagatctttcacacccggggacccaactttcaataatggcaacaatgcttcaaaatatgctatctttaaaattggagattagaacatagcctgcgatagaccataaaatttctgacctttcagcaccatttcatgcaatgctaaaggcgtgttccagggaatcactctctgagactatagatttgtctgaaaacaatctcctctacttcaagcatgatggcaaatccgtatcattagctcgacatggaatttacccgatgtccattccaatctttaggcggaaacattagcaattgctaataaagtattgtagccaaagactaaatcaggctcgaaatagaagacttgcatccttagtatcctccagaaaagacgctctggaactc

SEQ ID NO: 6218 - DNA, 427 bp, Glycine max
  Clone ID: jC-gmfl02220078a07a1
cttgtgggtaccagattggtttcttcattttctattggttccactgcctctgtttcaggggtcttctgcaatagctaatgaagaaaccaatcttgtgggtaccagatttggaggaatggcataagacggagagggttatacaaagacagttgcagaaaattggaacaactttcaaccttgaacgtgtatatctaatatttcttgaagcaatttttacatgttagaagtaatgattgtcgagacattatatagtttcctttagaggcctttatcaataacggaagcatttagatgtttcctgctagaacctagaaatagtttggaagaatggatgcttccgagtgagtttctctgtttatctatttcccttttcctttcctgttttatatacttgaaaaatattttcaacgtgatatacctatttcat

SEQ ID NO: 6219 - DNA, 427 bp, Glycine max
  Clone ID: jC-gmfl02220078a08a1
cttgtgggtaccagattggtttcttcattttctattggttccactgcctctgtttcagggagcttctgcaatagctaatgaagaaaccaatcttgtgggtaccagatttggaggaatggcataagacggagagggttatacaaagacagttgcagaaaattggaacaactttcaaccttgaacgtgtatatctaatatttcttgaagcaatttttacatgttagaagtaatgattgtcgagacattatatagtttcctttagaggcctttatcaataacggaagcatttagatgtttcctgctagaacctagaaatagtttggaagaatggatgcttccgagtgagtttctctgtttatctatttcccttttcctttcctgttttatatacttgaaaaatattttcaacgtgatatacctatttcat

SEQ ID NO: 6220 - DNA, 567 bp, Glycine max
  Clone ID: jC-gmfl02220078a09a1
cacacccttcatttcttaagagttcagagtcatggaccaaactcaaaatgaggggggttggatgcattctatcaaagtgacactaggatctctagatcacagagaggttaagtccttcataagcagcatcccttgtgtttcaagcaagcttagaaaatcaaatgaggaagcttattcaccaaagtttgtcagcattggacccttatacagaggaacaagtagccaccttctggccatggaagagcacaaatggcgttacatgctggctctccttcatagaactcaaaatccagtgtcaaccttggatgaatgtggcactgtcattctaggcttggacgatgcagttcgtgcaagctatggaggtaacatcaaatatgaagctcatgagctagccaaaataatgttacttgatggctccttcttgctagaacttcttcttagatgcgcaccaccaaacatggttcctcaaattccaaaagaagataaccataataatggttcttcttcagatccaatactaggacacatagaggtgttcttatctattctcaccgatttcactctact

SEQ ID NO: 6221 - DNA, 552 bp, Glycine max
  Clone ID: jC-gmfl02220078a10a1
ctctacctaaacagtttaatgttcaaatcctcaacagcgggcatcaccagaaacgggttctctcttcaaaagcttctggagagccaccattacttatagcagcctgcattcactgtgccacaagagcagctgttaaagaggcaaggaaacagcttctttcatggagcaaccaagatgaagaagattcaacatttcagttgggggtccctgcaaccatgcctgtggtcaaggaactctgtggactggacattggagaaagatacttgaaatggaaaatggggaaggacatactggtgctcacttaaataattgaaaagaggattttaatacacatctctatgaagaagaaacattataattgtttcacaaatattttttataagacagttcttgatactgtaccgagcaatgttattctatacaaacactatcgccgacgaatatgcatactgtattacgtgatttccttatttcatatggactatgattgtgtattagacccatattaatatgcatatcatgcccgcaaagaggtgtttttatctattctca

SEQ ID NO: 6222 - DNA, 518 bp, Glycine max
  Clone ID: jC-gmfl02220078a11a1
ctctcatcagattcgggtcgggttagcgttatcggataacttcgcccataaattctctgtttacggggcgaaaatgacagtattcttagccacgaggctcgtgttgcggagatccccgccgcttctctggcggcgcagcttttctcgggcggcggtagaggccgaaaaggacactgttgccgtgccgtcgcttccgttgttcgattactctccgcctccgtatgcggggcccaccgctgacgagattctggcaaagcgcagggagtatctgagtccttccatcttgcacttctacaagaatcccgtgaacatagtggagggtaagaagcagtacctgtttgacgagaaggggagaaggtacgtggatgcgtttggagggattgctacggtgtgctgcgggcactgtcaccctgatgtggtcgaagccatagtcaaccaaaccaaaaagttgcagcactgcacagttctctaccttaacaacgccatcggcgatttcgctcaagctttgacttccaagc

SEQ ID NO: 6223 - DNA, 214 bp, Glycine max
  Clone ID: jC-gmfl02220078a12a1
attcgaattggaaacaaccatctagtttgtaccattccaaagaccattggaaatgtggggggcctaaggtactttgaagcctatgataatgatctttctggcgaggttatgtatgaatttgctgagagttcttatctgacactcctgaagttggcgtcacatcacatgacggacacgattacccaccactttgtacaccttatgaacctggggg

SEQ ID NO: 6224 - DNA, 339 bp, Glycine max
  Clone ID: jC-gmfl02220078b04a1
ctaagaatgtcccggaagaagatgactttgatagtgatgctggggacttggcagaagcgggggaacatgagactgacttggacctggcatggaaaatgctcgatattgccagagccattgctgaaaagcaatctgtcaatacaatagaacaggtggacatattatcaacattggcagatgttgcattggaaagagaggattttgaaacttccctctcggattaccagaaggcactaaccatattggaacaactggtggaaccagatgatcgaaatcatgctgacttaaatactatgcatactgcttatgtttggaggatagatctcaagctgctgaagc

SEQ ID NO: 6225 - DNA, 528 bp, Glycine max
  Clone ID: jC-gmfl02220078b05a1
tgtcatatttcaaaatttagcttgcattattcaccagaatgggtaattcatatgaaaacggcttcccccctcagaagcaagacactcagcctggcaaagagtacctcatgaatccaccaccccaatacaacagctcccaatacaaagccatcaaataaacttcagggaaagatagctgtagtaaccgggggtgattctggaattggacgagccgtgtgcaacttgttttcattagaaggtgctactgtgatcttcacctacgtgaaggggcaagaggacagggacgcgagtgacacgcttgagattataaaaaaagctaagactgaagatgctaaagatccattggctatacctgttgacgtgggttatgaagagaattgcaagaaagtggtggaccaggttatcaacgcttattgccgcattgacattctggtcaacaatgcagctgagcagtacgagagtgattccctggaagatattgatgatgcaagactcgagagggtcttcagaactaatatattgtcccat

SEQ ID NO: 6226 - DNA, 653 bp, Glycine max
  Clone ID: jC-gmfl02220078b06a1
tatcatgcgaagctgcacctggaccttagttcgaatctgtaacatatcaaaattctagtaatatccagatttgtataatttatgtatttatttttttattttttttttttttttaattcaatttgggtttatttattatttatgggggtatctatttaatattattatttcccttaacgttcactaccttttggtagcttatatatctgctccatccctggcattctgcaatgctttttaaatcaggtctcacagacatacacatggcatataattatgggaaagttgcactctttactctggcagctgctacatgaaaagaaaatggcgtggtggctggacttgtgggttgtggtctcattaaatccgtgatctcagtgtcttgcattctgatgcaagatttcaaaactgcacattacacacgtacctctcccagagcaatgttcatatgccaagtaattggcattgcaatgggttgtgtgacagctcctcttaacttcttcctatactacaaggcatttgatgtgggaaacccgcatggggaaatcaaagctccatattcgttaatttacagaaacatggcaatcataagggtcccaggtttctcaacattgcctctgcattgtttaaagctatgctttgggttctttgct

SEQ ID NO: 6227 - DNA, 566 bp, Glycine max
  Clone ID: jC-gmfl02220078b07a1
gtggggtggtgagcgtgccaaaatctatgttaatggaaaccttctcacactctcccttgacagagcctctggctctggctttcgttccaaaaaagagtacttgttcggaaaaattgacatgcagctcaagcttgtgcctggtaactctgctggaacagtaactgcctattatttatcttctctggggcctactcatgacgaaatagactttgagtttttgggtaacttgagtggtgatccttacactctccacacgaacgtattcagccaagggaaagggaacagagaacaacagttccatctatggttcgaccccaccaaggacttccacacatactccgtccaatggaatcctgcaagcatcatattctctgtggacgggaccccaataagggagttcaagaatttggagacaaaaggggttccattcccaaagagccaacccatgagaatatactctagtctttggaacgctgaggattgggccacaaggggtgggcttgtgaaaacggattggagcaaggccccattcacagcctcatacagaaacttcaatttccaaactt

SEQ ID NO: 6228 - DNA, 227 bp, Glycine max
  Clone ID: jC-gmfl02220078b08a1
gaggagagaagaaaagtcaaaaacattgtttaggatcatccacatactctcgacaccgtgagtgtgttaggccacatcaaggaggaggaacacaagggctagcaccaccatggtggcaaacacatagggcagcatcctggtgaacacagtactgcatacactggatagcattatgttggtgagcacacccctgatcaccatggaggatatgagctcatagaggggtt

SEQ ID NO: 6229 - DNA, 403 bp, Glycine max
  unsure (1)..(403): unsure at all n locations
  Clone ID: jC-gmfl02220078b09a1
cacttggtttccagtatttctttcatgcataatcttgtgtattcagctctccagttgcaattacttttactgattctcaaattggtgagatgatatatcaggtggaagggccagttgtcgcagccagacagtagactttcctttctgctggtgagatgctatatgatgattagtggagactgtaaaaggtatgcatgaggggcaatgtaattgaattggcacggggagtcatcactggaatggggattgtaggggggtaactctgttcatcagataaaggatttactgtttctatcaatgtacagttacgcttttcaatctaataaaatctggttttggattctctganccaaaaaaaaaaaagcgaagaagaagaggaaaatgaaaataacaaaaacaatgg

SEQ ID NO: 6230 - DNA, 585 bp, Glycine max
  Clone ID: jC-gmfl02220078b10a1
gtgcagggttctagctttcttagttgcttcccaagctcttcgcatagtgacatgttatgctacgcagcttcctggtccaaactaccattgccgagaggggtctaaacttgctacactgcctcatccagatagtgtctttgaagtcctcttgattaattctccacgtggcgtgatatatggatgtggtgatttgatattttcatcacacatgatctttactctagtctttgttaatacatatcatagatacggcacaagaagatgtataaagcagctaggatggacacttgctgtgtgtcagtctcttttgataatagcttcacgcaaacattacacggttgatgtagttgttgcctggtatacggttaatttggtggtatttttcgttgagaagaaattagaagaattgccagaccggacaaatgctgctgcagcactgctgctaccattaagcaccaatgacaacaaagatggcaggaccaaagaagagaaccacaagttgttgaatgggaatggcgttgaccctgcagattggaggcagagaactcaaagcaatggaaagattctggaagatagccatgcaca

SEQ ID NO: 6231 - DNA, 476 bp, Glycine max
  Clone ID: jC-gmfl02220078b11a1
tgagaacaaagctagtgacatgtagtggaaacattgcaaatgtgatcagtaccagttcaggccaacaaaataacggaggatgggtcccaggcagcccaaggcttggtagttcggtgaggacgattgagtgaagcaattatctgagtatctagattctatccaggtggaatttttttatcttaaacagaggataagagtgtaattcgctttgttgcaatttatttttccatttattttaggtggctggtgactctaatttgtactaaactttggcagagccattttgattgaagtttttccatttttaattgagaccatcctcatttctcgaaatatactgtaaatggaaattcgattccactatttaacggggaagttcagttcgccggtagattgcgttgttgacttcacgcgactaggtcatactaagctcgtacgatgggtgcatcgctcttctataaaggattaaccccaaa

SEQ ID NO: 6232 - DNA, 429 bp, Glycine max
  Clone ID: jC-gmfl02220078b12a1
ttggatggctcactggagaccgatcctgttctttaccatctctggatttcccgcttgcgggcgttacacttcccccttcattgcctgattttgttgcgcccggaaaaactattattactacactcccaaatggactcaaagtggcctctgaaacatcaccgactcccactgcgtcggttggcttatatgtagattgtggttcaatatacgagactccgataagttttggggctacacatctgctagaacgaatggctttcaagaccactagaaaccggagtcactttcgggttgttcgcgaggtagaggcaattggtggcaatgtgcaggcctccgcttatagagagcagatgggttacacttttgatgccttgaaaacctatgctcctgaaatggtcgagctacttgctgattgtggcaagaaccctg

SEQ ID NO: 6233 - DNA, 116 bp, Glycine max
  Clone ID: jC-gmfl02220078c01a1
ggcgttgtatccgttcacagtctagcctctgctctagaagatggctcctcccagaggtggggggttcaggggtggtaggggtgacagaggtagaggaaggggcggtggtggatgaa

SEQ ID NO: 6234 - DNA, 596 bp, Glycine max
  unsure (1)..(596): unsure at all n locations
  Clone ID: jC-gmfl02220078c02a1
tactttggctcctggtgcagatcngacacttgatgcgnataagtataccaggtcgangttnanngccanggcctggggtgggngttgtggtgtgggttggactttttagtaagcacttagtttatgggaacgactcaggggttcctaatttacggggtgcataacaagtcttatggtgaaagactccatgctacctctggaacaatggatgctgcagtttgcagaatttcatgctactgctcaagttcctgccaaacctaagaaaccttctctaaaagaaagacagcataagttgcttaccttcttgcaagataagtatgaacctgttcatgctaagtggactacagaacgctgtgctgcttgtagatgggttgaagactgggactacaacaaaattatcatttgcaacagatgtcaaatcgcagatcatcaagaatgctatggagcaagaaatgtacgagattttacatcttgggtttgtgaggcttgtgacacacctgacatcaagcggcagtgctgtctttgatctgtaaaaagtggtgctctaaagcctactgatgttgacacattgtgggttcatgtcacttgtgccttgg

SEQ ID NO: 6235 - DNA, 246 bp, Glycine max
  Clone ID: jC-gmfl02220078c03a1
tctctttcctccaaaccattctcagcctactctctcttctccggggattctctcaatttcgatctcctatccctctccctcgcctacctacaactcttacttcgtgctcgtcttcccaagagacttcatatacatagcggctctaaccacctatagacatcactttcacgttacaacatatgtctaatcacatataagatgttaccattcaatcaacacctgatggacctcaaatcttacagtatc

SEQ ID NO: 6236 - DNA, 525 bp, Glycine max
  Clone ID: jC-gmfl02220078c04a1
cttcgcttgatgaattgccattctctaatccttagttctcttttttcaacgcttccagggtacacagaacccaagggtctctcaagccctaatttcccctcatttccatggccacagaagagcccactgtcgcggtggaacccgctcccgaacctgtctccgtcgatcctcccccggaggagaaggaggagaccaaacctgaagccaaggctaagaaaaccaaggagcccaaacctaaaaaggtttccagacctcgcaaccctcccactcatccttcctacgaagagatggttaaagatgcaattacctcgctgaaggagaaaaccggctcgagccaatacgcgattgcgaagttcatcgaggagaagcacaagcagcttccaccgaacttcaagaagcttcttctctaccatttgaagaagctcgtcgccgccggaaaactcgtcaaagtcaaaagctcgttcaagctcccacctaccagacctgctgcatcttcttcttcttcttcttcggcggcaaaagaat

SEQ ID NO: 6237 - DNA, 529 bp, Glycine max
  Clone ID: jC-gmfl02220078c05a1
aataacttgtatctatgccactgtccttctccttgttaaaagctgtgccacacgtctgggaccaaactccctaagcagaagaagcacatgttcagagggagttttgtttcatcagtctctagctagcatatatttctagcttctattccacacgttgcaaaaaacagactttgccttaaccaaaagaaaatctgtctttaccttaactcagacaactcgtttggtgaaccatgaacaacagtattcctggatgggattttgagagtgatacatgtctcaccaaccaaagaaagctcatagggccggaccaagaacttgttgagctcctatggaaaaatgggcaagttgttatgcacaaccaaacacataggaagacacttgggaattcatctaacttgagacaggtgcagaaaagtgatcaatcagtattaaagtctaacggtccctatggaaactcaagcaacttggatcaagaagatgccgtcccatgggtccaattcccactcgaggacccattggaacaagattt

SEQ ID NO: 6238 - DNA, 326 bp, Glycine max
  Clone ID: jC-gmfl02220078c06a1
tagcttgaaagttctccgaaagattcccacttgttagtgtttgtgaggccacatcaatatatggaaggaatatgcaaaaggcttgttgggaaaattagggaagatgctgaagctatttcccttgtaaagggatggaggtccaaatggaaggcccatgcttgatctctagtctcatttctcagcaactgtgaatcaactgttctgtttaatgggcgccaacatagcaaatgagatagctgtggagaagtttagtgaaacaactgttggatacaggctcaatagaagagttgcttggagatgggtcccagatgtttattcacacttat

SEQ ID NO: 6239 - DNA, 406 bp, Glycine max
  Clone ID: jC-gmfl02220078c07a1
tctcacccttctttgactgttctccttcactcacacccatgacactcctcctgctccggggggtcctctttcacgcggcggaagccaagggacagtggcagctcctccacaaaaacatcggcattgtcgccatgcacatgcagcttctccacaacgaccgcgtcatcatcttcgaccgcaccgacttcggactctccaacctaaccctccccgacggaagatgccgcaacaacccaaacgagttggtcgtcaaacgcgactgcaccgcgcactccatcgaatacgacgtcgcagccaacacattccgcgctctctttgtccaaaccaatgtctggtgctcctccggttcggtctctcccgactgaacattagtccaaaccggtggcttcaacgacggctaccgtgc

SEQ ID NO: 6240 - DNA, 574 bp, Glycine max
  Clone ID: jC-gmfl02220078c08a1
ctctctcataaccaaaattttccaatctcctcaactctcatcagatatcaaccatctgtctgtctccaaactcaaatacctttctgttctgctcttcaatttattcatctctgacaccctcttaattctgcttccagttcctctgagtgatgggtatgatctctcctcactcccacaattcccacattatagtaatcctcatcacctgcttctttggtcataaattctagatcaaactccactccctgatcctcccttttacttcttatgtagcatgtatgaactcaaatcatcaaatgaatatgaccctttaatctaagaagaagaaaaaaacacacacatacacacacacactttaaagtgcaaagtctaaaccaacccaccataagtcttgttcccatgtcgagtggcaagctttatgcgggttcaaacatgtcacttctcctccaaaacgaaaggctcccttgctcctctgaagtccttgagtctctctgggctcagacctctaaccctgcttccttccaaggttcaaaacccgtggttgattctgagaatgtcagtgggagcaggatga

SEQ ID NO: 6241 - DNA, 499 bp, Glycine max
  Clone ID: jC-gmfl02220078c09a1
gcggccgtcctttttttttttttttttttttttttttttttttttgggaggaatggtggcattttctcttattttcttttgatatattgaaaagggggacagaaacacataatttagtatttaataaagcaaaagcaaaatgcacacacattccccaaacaaaacatgcttattcaacccaaattggtttcatatcacaaaaaccaacaggatgttttcctccttacccgtcccacccactcgaacagaaattctacggaaattaaaaataaaaaaagctaaacttcttctacctcaaatctgaaaagtctaacaacaaaaattcaaaaaaaggaaaattaaacaatcaatccgattcataaaaccgattttgtctttccctcactttccgttgataatctcaattacttagtacctgtaatgagcaggcttgtatggaccctcaacaggcacactgatgtaatcagcctgggccgggctaagcttggtgagctcaact

SEQ ID NO: 6242 - DNA, 553 bp, Glycine max
  Clone ID: jC-gmfl02220078c10a1
cgattacgaagcaattacatgttcatgggggaagctcatagaaggatcacggggtatctgaatcgcttttccgacgcgatttcttcgcaagacggagctacgttcaagtctctcttcgctctctcttccaactccccattccttctctctctgggcgacgctctcaacctcttccaagaccccaacagactcatcaagcaatccgacaactattcccagttcgcagacatcctcgtccctctcttccgatccctcctaaactaccgccagaacaacttgctcgaagcctataacgctttcgaaaaaaccgccaatgcgtttatccaggagtttcgtaattgggaatccgcttgggctctggaggctttgtacgtcattgtttacgatattagggttcttgccgagaaggctgataaagaattggcttccaatgggaaatcccctgagaagttgaaaggcgctggctccgtccctatgaaattttttggcacccttgcgggaaaaggctctaagcgtgttggagcattatatgtaactggtcagttattcaaga

SEQ ID NO: 6243 - DNA, 458 bp, Glycine max
  Clone ID: jC-gmfl02220078c11a1
cccgttgtacccacatcttcttcttttttttctatccaaaaccaaagcctttgacccggggaggcctcatctatttgtaattgaccaaaccaatcttgcatctaccagatttgaggaatgaccaccaacggggaggtacatgcagctaccggtgcatatgactgaaacatgtttcaggcgtgagcgactatatgtaaggctggtgacatcactcacccaggtaatatagttcgaataaggccagactgtgacaacaactttgtactgcttaaagaccctactgggaatgatggtgtggaaagctgtaactctgatagcgttggtgcaagatttggccctacattagaatcaaaagaaaaacatgctaaccatactagagctgcgatatatacccgtaaaatatgttgaacgtgatctacctattttataaaaaaaaagaaaaagggcgggcaccgact

SEQ ID NO: 6244 - DNA, 433 bp, Glycine max
  Clone ID: jC-gmfl02220078c12a1
gaatattagtggttaaggttgttggaggagctctaacaagagatatggagacgcaaaattggttcgagagattgaagcctttcgcagctgtggtatcaatacagtttggatatgcagctatggatgttctatccaaggctgcaatgaacaaagggatgagcaattatgtgtgggttgtttatcgccatgcttgtgcattctttgttatggcccctttggcatggctttttgacaagaaagtaaggccaaagatgacattctcaattttcatgaagatagcggtgctcatctggatagagccaattattgaccagaatttgtattatttggggatgaagtacacaacaaggacctttgccgttaccatacccaatatgcttcctgccattacctttatcttcgcatgcattcttaggcttgagaagattaaaat

SEQ ID NO: 6245 - DNA, 632 bp, Glycine max
  unsure (1)..(632): unsure at all n locations
  Clone ID: jC-gmfl02220078d01a1
gactcgccaggctgcagatagacatagaagcacataggagaacccagtacgaagctgggagaaaggntcgagcggtcctctctcgcttgtgctcaaaaagttgcaagagataaagcaaaaaccaaagtgagagagaaaatgatgaagccatcgatgctcagatctcttcactctgccgccacccgcggcgcctgccacctctcccgccgtggctacgcctgcgagccggtgccggagcgcaaggtggccgttctaggtgccgccggcgggatcgggcaacccctctcccttctcatgaagctcaaccccctcgtttccagcctctccctctacgatatcgccggaactcccggtgtcgacgccgatgtcagccacatcaacaccggatctgaggtagtggggtaccaaggtgacgaagagctcggaaaagctttggagggtgcagatgttgttataattcctgctggtgtgcccagaaagcctggaatgactcgtgatgatctttgtaacatcaatgctggcattgttaagacactgtgtactgctattgctaagtactgccctcatgcccttgataacatgataagcaatcctgtgaactccactgctcctattgctgctgaagttttcaa

SEQ ID NO: 6246 - DNA, 436 bp, Glycine max
  unsure (1)..(436): unsure at all n locations
  Clone ID: jC-gmfl02220078d02a1
tgatacctggccnaaaggtggcaggctcgngacgctangatgtcgaataacgnaggaccagatatgacgtttcntgctctacttcctagggtgggaattcggatcgtgataacatcctatcaaccctcttcttctttctagtgttacaacagtgcacaaacaactctgggttttcaataacataatattcttctgagtctgctttttttttctctcacaagaccattataccagatccagtttgacgagatcgagttatatgagcaggcatacctctaatccgaacgaggatagactgcacattgatgtcaatgttgtggaaaggccaatgagtgaaaagccctacgatctgttgctgatgattcttggcctttcactcactctcgtagcaatcattattgcctgtgtcgacaatgagaccaatagtatatcctat

SEQ ID NO: 6247 - DNA, 320 bp, Glycine max
  Clone ID: jC-gmfl02220078d03a1
gctagaagctttaagatgaaaatgaatttgcttgctttgtttggtgctacagtatctggggcatattaatgccatggctcatcactaccataagttccctctccaaatgaaaactgggtatggtgggcaattcatcattgatgttgcatgtcccagttggatgcttggcctggaagcaaacaatgtattccagcggtacactgttcctgcaacttgcatgatagtacatacctgactacgtcttaagagacccctatatatcagattccaaaacagttcactcacactcttatttctatgctaaatatcttacactcacc

SEQ ID NO: 6248 - DNA, 517 bp, Glycine max
  Clone ID: jC-gmfl02220078d04a1
ctctcttctttttgctattccttcctcgtcatggagtcgcgagggctgtcacgcgccggggccttgttctccctccctcacctccgcaagctgccgcgggaggtcggcgccggcccctccctcgtcgccgtgaaggccgtgggctccgtggcggactgcgggaacctgatctgggggaggcaactgcgcccagagctctgctcgccggcgctgaagaaggaggccgttctcctgcggccatgcctcgccggcgtctcctcgccggccgagggcagtgattccgccggagaagcaaaggttgctccggcggggtttttcgagaagtatccggctctggtgaccggattctctttcttcacgtggtacttcttgaacgtgattttcaacatccttaacaagaagatctacaattacttcccctatccatacttcgtatcggttatccatttattcgtgggtgtggcgtacctgttggtgagctgggccctgggactttcctaaaccggctccctataac

SEQ ID NO: 6249 - DNA, 552 bp, Glycine max
  Clone ID: jC-gmfl02220078d07a1
gtagctgtcaacatcattgcagcaatgtttcggttttcttgtttccatgctaatgcccaaggcatcaaggcaaagaaaacggttcaaccttctactgaagcaatggagaagggtttgcaagatggtacccaaaatcatggctgtaaagagtcatctaatcctccgagaacatattcatccccttcgaaagaacaagcacacaagcaaataaatatcacggagaatcatattagcaattgggattcagttgagtgcagttgtatgtcagaggatctgaatagcaagttttcctttgaaaatgaaagcaacgttcaccaaactaggcgtattaggaagagccagtctcttcaaagtgggcttgaccaaggcataaggcaaggcgatgaagatcttgggttgtcttgtgatggtgccaaaagccagaatgagtcaacaatttctattagaaggtatcataagtcaaatgttgagtttcaagtctgttcaggtcttctaatgatgtctcaatgttttcaattggagaccctataccttcagatgaagatgcccatg

SEQ ID NO: 6250 - DNA, 573 bp, Glycine max
  Clone ID: jC-gmfl02220078d08a1
attcttcactcctcctcctccctctctcttccaaacacacatcctcaaccatggcagcaccatcttcagagacaaagtcaccatcatcctcgaacacgcagcttccgctgaaaccaatcccaggcagctacggaatgccgttttttggagcaataagcgacagacacaactacttctaccaccaaggacgcgacaagttcttcgcgacgaggattgaaaaacacaactccaccgtgatccgaaccaacatgcctgcggggcccttcatctcctcggaccctcgtgtcgtcgcgttgttggacggtgcctccttcccgatcctcttcgacaacgacaaggtcgagaagctcaacgttctcgacggcaccttcatgccttgcaccaagttcaccggcgggttccgcgtgtgcgcctacctcgacaccaccgaacccaaccacgcactcatcaaacagttcttccttaacgtcctcgccaagcgaaaagactctgttgtccctctgttccgaaactgcctccaggagtcgttcgcggagatggaggaccagttgagtaaaaacaccatagcggact

SEQ ID NO: 6251 - DNA, 557 bp, Glycine max
  Clone ID: jC-gmfl02220078d09a1
gcatcttcaaactcccttttggcttttctaagtgctgtgattctttctttcatgtgtgtcttcagatttgattcataaagcaattggcaatgttgtagtaccttaaaatgttgctattaggtaaataggttggtgacatggatgaaggtaggtagttaaaatgattgaaactacatctaccactgtgagttgtacgatgaggtggtatgaagagtcaggtcctaaagcatacttgtgatttcctccattatttcctttgagatttggacagtagttggtcatacacccaattctaaattagagttgggatgtctggaggagtagtttgatacagtgatgcatctccacagatacttgagtaaagctatatgctgtggtgtagatttttactatggagttaaatgcaagttatgacgtcgagcattcacattctacacaaagaatacagcatgagctgtggcctctagatccaattgatccaaagaaggcaaagtttccatgttgtttggtttggaatccacttcctgtggtctcatggctggctcccttcatggtca

SEQ ID NO: 6252 - DNA, 544 bp, Glycine max
  Clone ID: jC-gmfl02220078d10a1
gctactactaattggatgtggcagcttgccaaggcccatgtttgctccaatgatgctggggtgcaccaacttgttaaccattggttacgtacacatgccaacttggaaccatttatattggcggctcataggcaattaagtgctatgcatccaattttcaagttgttggacccccacatgaggtacaccttggagatcaatgccttggctagacagagtttgatcaatgctgatggaatcattgaaaattgctttactcctggtcgctatgccatggagattagttctgctgcctacaagaacttttggcgctttgacatggatagcctccctgcagatctcatccgcaggggaatggccgtacctgacccaacacagccacatggtctaaagctcatattggaagactacccttatgcagctgatggaatactaatctggtctgcaatagaagactgggttcgaacctatgtgaaccattactaccctcactcaagccttatatgcaatgacaaagagttacaatcttggtactctgagtcaa

SEQ ID NO: 6253 - DNA, 447 bp, Glycine max
  Clone ID: jC-gmfl02220078d11a1
gccgccttaaagtgtctacagcagtggctcctgccaagaatttgtctagcttggatagcattgatcaccttcttaaacgggttgcctcccccaagaaaagggctactcccaggagttctgtgagaagcaggcagtcaaagaaagtagattcaatcagggagtcaaacaatagcttagctaggttatcaaggtatcctgtgagagttgttctttgtgcttatatgatattgggtcatccagatgctgttttcagtggaatgggtgaatgtgagattactctagccaaatctgcacaagagtttgtccaaatgtttgagctgttggtaaagattatactagaggggccaatacgaagttttgatgaagagtctgtctcagcatccatgaagtgttgtactttcagatctcagcttgctgcttttgataaagcttggtgctcatacttga

SEQ ID NO: 6254 - DNA, 423 bp, Glycine max
  Clone ID: jC-gmfl02220078d12a1
gccgcctcaaagtgtctacatcattttctcctgccaacaatttgtctagcttggggggcatttatcacctttttaaacccatcccctcccgcaagaaccagactattaggaataggttaagacagacagggttatacaaagacagtttcataaaattgaaacaaccttcaaccttgaacgggtatatctaatatttcttgaaacaatttttacatgctaaaagtaatgattgtcgagacattatatagtttcctttagaggcctttatcaataacggaagcatttagatgtttcctgctaaaacctaaaaatagtttggaagaatggatgcttccgagtgagtttctctgtttatctatttcccttttcctttcctgttttatatacttgaaaaatattttcaacgtgatatacctatttcat

SEQ ID NO: 6255 - DNA, 634 bp, Glycine max
  unsure (1)..(634): unsure at all n locations
  Clone ID: jC-gmfl02220078e02a1
cgctccatggtgcaggatcngacgctagatgtcaggtcaagnaaaccatgtcnnnaatttatgtaacatacttggttgttaattttatttgggtttactgtttttaattgtatcgtgttttaatttgttctaggggtgagttcccctctgggtgttgtgatcttcttgttcgttttggcatatgggagatcttggggtccccttgggtggttggttcccagtgagctctttccattagagataagatcatctgcacagagtattgtggtctgtgtcaacatgatcttcactgcacttgttgctcaattgttcctcatgtcactttgccacctcaaatttgggatcttcttgctctttgcttccttaattatcttcatgagcttctttgtcttcttccttttgcccgaaaccaagaaagttccaattgaggagatttatcttctttctgagaatcattggttctggaggagatttgtcactgaccaagacccagagacatcaaacgggactgctttaaattctcaaccaatagattgaacaagtgttggttttatggttctctttctttattctgagtcaattattcttacttgcagctttgcaaaaagaataatctgtacgacatttttttaaa

SEQ ID NO: 6256 - DNA, 638 bp, Glycine max
  unsure (1)..(638): unsure at all n locations
  Clone ID: jC-gmfl02220078e03a1
cggctccactgctagctgnatcnngacaaattgcatggctgnattaagnnanatccattatccnanngtttgtgtatgttatnntcctntggntggttgtattattatttttaggtttttatttttttatntataatttattttattttttataagatatttaggggggttattttactaattgtggtgtgcctatttccatatttaccaaccaattaacaaaggtatatatatcatcatatcatcaccaaatgaaatattgggttgttttttcttgtggtggtggctacttttgtggtggcagccacagctggtagcttttaccaagactttgaaataacgtggggtggtgagcgtgccaaaatctatgagaatggaaaccttctcacactctcccttgacagagcctctggctctggctttcgttccaaaaaagagtacttgttcggaaaaattgacatgcagctcaagcttgtgcctggtaactctgctggaacagtaactgcctattatttatcttctctggggcctactcatgacgaaatagactgtgagtttttgggtcacttgagtggtgatccttacactctccacacgaacgtattcagccaanggaaaaggaacagagaacaacagtt

SEQ ID NO: 6257 - DNA, 508 bp, Glycine max
  Clone ID: jC-gmfl02220078e04a1
cattaggtcagacagctgactggtttatgagagcattggctgtggagcctgtcaaggggaacctgcggttgagtggatattctgcgtgtggacaagatggaggtgtgcagcttcctcgtggatatattgaggagggtgtatctgatgccgacttggttcttttggtgactacaagacctacaactggaaatacacttgcctgggcagtggcatgtgaacgagatcaatggggtcgtgctatagctggacatgttaatgttgcgcctcgccatttgactgccgaggcagagactttgcttttagctactctgatacatgaggttatgcatgttcttggttttgatccacatgcctttgctcattttagagatgaaaggaaaagacggcgtaatcaggttactgaacaagttatggatgaaaaacttggaccaatggcaacacgtgtggtgcttcctcgtgttggcatgcattcttgatatcattatgcggctttctcaggaaatttttc

SEQ ID NO: 6258 - DNA, 449 bp, Glycine max
  Clone ID: jC-gmfl02220078e06a1
gcacaacgaaccactctgaatctgctcacgttatccacaacactctaaaccctggttgaaccctaactaatccaaccatgggttcttgttccaccttgactggaatgtgcgcctgcaagctctactcctgcgccgacatgttctacttgccctcccgtcgcctgtccaacgccgatgatctgtccaggcgcaaacgctcgcgacagggtctccgccatggccagtgagttgcactgcaacaaagacggcaccggagttgataagctccagagcggtgtgaacaagctcgcggatctggttggggtcacgcttggtcccaagggaagatatgttgttctcgagagcaagtatggctcgccgaaaatcgttaacgacggtgtcactgtcgctaagaggttgagttggaggatccccctgagaatattggtgccaagttggtgagacaagcg

SEQ ID NO: 6259 - DNA, 548 bp, Glycine max
  unsure (1)..(548): unsure at all n locations
  Clone ID: jC-gmfl02220078e07a1
atctttttcttcttcttctcttcaaaccctaaatcgtggcctcgtaaattaaccaccgaagtgatcgaactcaataccctaaaagccatggcccaatcccatggatccatcctcactcgatcagtgtggtcctccaatctcgaatcggagttcgacttaatccgatccgtcatcgattcgttccctctcatctcgatggacaccgagttccccggtgtcgtcgtgcgtgccgacgccggcgacccctcctttcgacaccgacaacccgtcgcgcactacgccgtactcaaagccaacgtcgaccgcctccacctgattgagatcggacttaccctttccgacaacgccggaaaccttcccaccctcggtacctccaacgccttcatgtgggaattcaacttcaaagatttcgacgtcgcgcgtgacgcccacgctcactactatgtggagttgctgcgccgccagggcatcgatttcgagaagaatcgcgacttcgggattgactcgttccggttcgcggagctcatgatgtcgtnccgtctggtctg

SEQ ID NO: 6260 - DNA, 526 bp, Glycine max
  Clone ID: jC-gmfl02220078e07d1
gatagaaaattttcactctgttgataacttaaaagcattatcctctaattctatatattaacacgctctaagtcaacaaatgcattgcctcctcatacattactatctttcgcaggtgcaaatagaacccaaagaattaatacttcctaatggatattgataagccagagaaaatgtgtaagctttacaatttaaagctgagaaaagaaacctaggccaaattgattactattatttcatatataagaaagctcagaaaacctccaaaccatacaagacaccagcgtactgaacaagtccgtcagccttgtcaaagtaattctctctgatattctgaaacgcgtgcagagtgagcaaactatcagaaccagcctgatgactttttccaataacacgttccaccttcagcgactgacaaacacggtccaatccaccgtgcaggtttgagcagaacctcatcaaatgcttcacatcaaagactctgtctccgaaaaacaccctcaccagacgcagaaactctcttaat

SEQ ID NO: 6261 - DNA, 573 bp, Glycine max
  Clone ID: jC-gmfl02220078e08a1
ctttctctcgtttccccttcgcaattttcccctcggaagagacatcgaagaaaatcacgtgacggcaatggaggaaaagcacgcagcagccaatgaatctgcacacgccgaatccaacggcgtctgtcacggcgccgaccacggttggcagaaggtgacctacgctaagaagcagaagaagaagaccgttaacgccgacaacagcgccgattcccgcgcgaattccaacaagctcgttccgaacggcacgctgtgcggcaacgatggcgttttccggtcgctcgagctgcagtcggaggaccggcgccggataattgtggaggcgaagaagctggccgatgccgcgtacgacgacgaagacgcgccgttcagatcgaagcagcggcaccacgacgacgactaatacgactacgatgacgagaatgtggaccgttctgcagagaacgggaaggccgaggaggcgaagaatgtgaagcagaagaagccgcagaagcctaatgtgacggtggcggaggcggcggctaacatcgacgccgctgatctgggcgccttcctcgtggagatatcgggatc

SEQ ID NO: 6262 - DNA, 434 bp, Glycine max
  Clone ID: jC-gmfl02220078e08d1
aaccaccaaaattcctttgggtaaaagctaactttaggatacagctgttacctcattggcattttgccagcataagttaatgtaaaggcatagtaactaaaattaaaactcaacagaaacaagaacaacaaattgattattaaatggtcaaactaaagtaaacctcaaagcattgttgacctcaactactttctgtcatccgaacaggatttgaactacgtgtccaatctccgcattaagcactttattatgaggctattggtttactgtacccattgtcatttgtgaatgagatgggctgaaaataaaattgccttttgtaaacaaccaactgcggtaatgctgaatattctccagagttctcaatgcttaacgttgaaaagttcacagagcttttttaaatccaaagattccaaattgggggacaaggaaac

SEQ ID NO: 6263 - DNA, 515 bp, Glycine max
  Clone ID: jC-gmfl02220078e09a1
attggggaattaacaaggtcacttgatggaataaatgagtttaacctcataaatgttgacaaaatcctcatgaatttaaaagtttggcttaatggtgcggttacataccaagatacttgcttggatgggtttgagaacaccactagtgatgctggcaaaaagatgaaggatttgttgactataggcatgcatatgagcagcaatgcccttgccattgtaacagatttggctgacactgttaatgattggaatatcacaaaatcatttgggcgtcgcctccttcaagattatgagcttccgtcatgggttgatcaacatagactccttaatgaaaatgcaagtccattcaaacgcaagcctaatgttactgtagccatagatggtagtggagatttcaaaagcatcaatgaggcattgaagcaagtgcctgagaaaaaccgaaagccatttgtgatctacatcaaggaaggcgtttaccaagagtatgttgaagttacaaagaacatgacccatgt

SEQ ID NO: 6264 - DNA, 574 bp, Glycine max
  Clone ID: jC-gmfl02220078e10a1
attaacacccgattctgcttaaattggcacaccaccaattttcgtgggaacccgaaccaataaaacaaaaaaagagtccaattttgtgaaaattattaccattcattcttattcatcaacgtccccccttctgtgcccacttccaaatcttctcctctcgctatgggttgtggctcctcccttccagatagggattcaaggcagttgggtcgacccaattccgagaatggtggagggcaggacgccaagaatctaagggtcaagcttgttctcttaggtgattctggtgttggcaaaagctgtattgttctacgatttgttcgtggtcagtttgatccaacatctaaggtaactgttggagcttcttttttgtcacaaacaatagctctgcaagactctacaacagtcaagtttgaaatatgggatactgctggtcaagagaggtacgctgcgttagcaccactctattaccgtggtgcagcagttgcagttattgtttatgatataacaagcccagaatctttcagcatagcacagtactgggtttaggagctacataaacatggaagccctg

SEQ ID NO: 6265 - DNA, 501 bp, Glycine max
  Clone ID: jC-gmfl02220078e11a1
cgactctttctcttatctctaagtcaacatggctcaccttgaagattcaagtgcgtggaattcgagtatacctcaccctaagctcaatgaaagaattctgtcttctctgtcacggagaactgttgctgctcacccctggcacgatttagagattgggccaggagctccagctgttttcaactgtgtggttgaaattggcaaaggcagtaaggttaagtatgagctggacaagacaagtggacttataaaggttgatcgtattctttactcatcagttgcctacccacacaactatggttttatcccaagaaccatttgtgaagacagtgatcctatggacgtgctggttctaatgcacgaacccgtgcttcctggttccttccttcgtgctcgtgctattggactaatgcctatgattgaccatggcgagagggatgacccgatcatagcagtttgtgctgatgaccctgagttccggcattacactgacatgaatgagct

SEQ ID NO: 6266 - DNA, 450 bp, Glycine max
  Clone ID: jC-gmfl02220078e12a1
gtggggtggtgagcgtgccaaaatttttgtgaatggaaacctcctcacactctacagggggggagtctctggctctggctttcattccaaacacgaggacttgctcggaaatattgacatgcacctcaggcttgtgcctggtgactacgctggaacagacactggctatcatttatcttgtgtggggcctactcatgaccaaatagactttgagctcttggatgacttgattggcgatacttacgctctgcacaccaacgtatatagccaagggaaagggaacagagaacaacagattcatctatgggtcaaccccaccaatgactatcacacatactccgtccaatggaatgctgcagagcatcatattctctgaggacgggacccctatatgggagatcaagagtttggagacataaggggttccattgccaaagagcctacccatga

SEQ ID NO: 6267 - DNA, 675 bp, Glycine max
  Clone ID: jC-gmfl02220078f01a1
gctacctgccaatgattcacatatgagactagagtgcggctagcgagaaccccagtaccgtaagcttgggagattccggcttcgagaggcatcgaaatgtatggctattatcagcatcgatatggcatgttatgatcaccacttatagtcacagcacttcggagcgctttaatctccaagcgtgagattttatgcactgtccattcacagatgcacagggttgcctaaaaggcgtattctatctagtctaaatggttctgttcaagcgattaagaaattataaccttgaattatgttgcttgaacttagagagagctcaatttagtccgagttatggaatgcctttgttgtactttattcattttagttagctaaaatcaataatccccgagcttttcccctcttccctttttttgcatggatgtaaatatcaacttcaccaactcaaattagcatgtgtttgattttccattaagacgtaactagttagtacttttccgtttgggaatttgtggttgagaaaaaacattatgttatcaagaagataaggaagaagaatcaaaggctcctggagttcagaaagctctaatgtcattggttttcaagtcagtatcagcattttatgaaattaggaagtgacttcaagatataataattagcagccatgtttataat

SEQ ID NO: 6268 - DNA, 664 bp, Glycine max
  unsure (1)..(664): unsure at all n locations
  Clone ID: jC-gmfl02220078f02a1
tggtcaagatgcagcatggacgattgcatgcagataacgaagaccagctatgacgttggatgctcgcgttctntgtggtgggtgtttgggttgtgctcacacttttcctactctagtgtctgattcataggccccagagcacagaaactaacaagattttgagcacaatggcatccacacaatgcttcttgcaccaccatgccctcaccactccaaccagagcttcatcacagcgcttagttgtgagcaccaaaccaaaccacattgtttgcaaggcacaaaagcaggttgtccaagagggtgaggacactactaacattgtctctcgcaggttggccctcactgttctcattggtgctgctgctgttggctctaaggttgcacctgctgatgctgcctatggagaagctgccaatgtgtttggaaagccaaagacaaacactgacttccttccatacaatggggatggattcaaactctcaattgcctcaaagtggaacccaagcaaagaggttgagtacccaggtcaggttcttagatatgaggacaattttgactcaaccagcaatgttgctgtcatggtcactgcaactgacaagaagtccatcactgactatggttcacctgaggagttcctatctcaagtggattacttgcttggaaa

SEQ ID NO: 6269 - DNA, 436 bp, Glycine max
  Clone ID: jC-gmfl02220078f04a1
cttcctttttctttctttgaccttttaccggttgttgcgttggcgcaaatggcattctgggaagcgtttctgcactttctcgacttcgctctcgcgtgggccaacaatctaatctggcgaattcagttagatggctccaaactccgagctccagtaacactgatctttattctgagttgaaggaactggttccagagtatcaggaacgtgttaagaagctgaagaaagatcatggaagtgttgaattaggaaaaatcactgttgatatggtacttggtggaatgagaggaatgacagctttagtatggctaggctcagctgctgacccggatgaaggaattcgctttaagggcatgtcaattcctgaatgccagaaaaagctttcaggtgcttttcctggtggggagcccttgcctgaagctgtactgtggcttct

SEQ ID NO: 6270 - DNA, 537 bp, Glycine max
  Clone ID: jC-gmfl02220078f05a1
cttctctccctcgattcaattcaattctcatcatattcctcagggttagattaagaagaggcagaagggtagagaagttcgagataataacatttttgaaccaagaggatttggagattttgggggctttggatttcatagaagtatgatgccaagtctttttggagacagggacccatttgatgatccctttttcactgatccatttgatagcttgtttggtccaagttctgcatcaagagcaatgcagaagacaaatagagaaaaaggaatagttatagaagaattagactctgatgatgaggggggtgataacggccctgaaattggagacaaagattttgataagaaaaaatctaaatcgaccatggaaccatcggttgagcattcagatgatgatgttgatgagaggaagaacagtgatataacttacaagaatgaccattacatggtggaacccttgaaagctcgcaagttttcttttcagaccagcagagtaacatatggcggaatagatggtgcatactatacatctac

SEQ ID NO: 6271 - DNA, 530 bp, Glycine max
  Clone ID: jC-gmfl02220078f06a1
aaaccaccaatcaaaaaccatgaatgctaatagagaaaagggagagtgctttgaaaatgggaaagttcagttcaagttacagtacttctgattttgttcactttggagttctacttccctttcttctgttatcacagttgttctttcaacttgcatggtgtggctccatagtaaagtcccttcctggattagagggaccccttgcttttgttcttgaaaccgggtatgtgggagcgggcgaatcagaggatgtgcaagcattctactactttattgagtcagagatcaatccataggaggatcctctcatgctctggctcactggtggccctggttgctcagctgtctctggccttgtcattgacataggcactaccaactctgtttgcaaattttacttgtgctccatacttatgtatgtaccaagtgaccagagccgagacttagaaattgtactctatctgcatgttgcatgtccatttgcatttaataatgaagtatacaatgggagcctgccccaatttgtcttg

SEQ ID NO: 6272 - DNA, 490 bp, Glycine max
  Clone ID: jC-gmfl02220078f07a1
ctctttttgctcagctcttgttgatttttctctattacgacacattattctgcatattgtgagcgggttttgggattctgacacatgggaggttgcatggacacacatcatgatgaatgtgacatatgactgttctcaccacttgctcatgaggttgccgttgcatcacatggaggacatgagtacccacctggggcttaccaaccaccacctgggggctactctccacaagatggatatgctccggctggttatcctccacaacaggggtatcctgcagctggataccctgcacatggagggtatcctgctgattgttaccgcccagatggttatcctggctcatcacaagcaccaagatctcatggtcacagcggtataggagcactgctcgctggaggtgctcctgcagctggtgctgattatggagctcaccatgtatatcatggatgccatggatgctatggacgtatgcacatggtgctcacat

SEQ ID NO: 6273 - DNA, 186 bp, Glycine max
  Clone ID: jC-gmfl02220078f08a1
ccgcgagcggccgccctttttttttttttttggttatcatcatgaacctaaaacaatgggatgcatttgtgttttttacatgtggttggctaatgctgttactatcttatatcttttgccatgtgattgctattatgaccactatgaattgaatgccatctgcttgggtttgcagaacaagaaaac

SEQ ID NO: 6274 - DNA, 364 bp, Glycine max
  Clone ID: jC-gmfl02220078f09a1
atttatattcacatatttctcttcttttcagaaatcagaattgagcacgcgtgggggggtgtaatttgaaggttatcatcatcacccatagatattattattattataagaagttcatcagaaatattcaatggggagccttgaaactgaactgatgaatcttaaggccacagagttgaggttgggactgcccggctgtgatgaaactaatgagaaaagttcatccagcagtggatctgttgttagaagcaacaagagatcttcaccagaacccagtgtggacgagtccaggtgcaactctaatggttcttcacattctaccaccacaagtgatcatgatcaagacagtgcccaacctgaaaag

SEQ ID NO: 6275 - DNA, 487 bp, Glycine max
  Clone ID: jC-gmfl02220078f10a1
ctctctctctctctctctcacttattgtcatatctttgctaggtccatcaaagaagcagtgagcttccaaataaaatgaacccataatcataatcatcatcatcaccacgcctcttccttctttctctttcattttctccccacctttcacaatgtcatcgataaaccactattcaccggatacaacactataagccatcaagctgaaataacaggtgatgatgccacaaactgctactctgggcctggattgtctgaaagatgcatcaagaggaaaaattactctgaaatggtggataagaagccagacaaaccagataagcgggcatctataagcccacaaaggttagaatgtgtttctcctgaaagttgtactgggaaatcaggcggtacagctcaaatgagtattgagtgtattaaaggggttaggttagctggttcaacaaccaaggatgctaacagcaattgtaaattaagtcatctgatg

SEQ ID NO: 6276 - DNA, 319 bp, Glycine max
  Clone ID: jC-gmfl02220078f11a1
gttgtattgttgtcttcaactgaatctgccacaccggggggcaccacacagttccctcacttctctccttttgaccattcaaccttcgcctttgcctcctttccgtgactgagatggctggaggtgttattcagcagatattgaggaggaaactacaccctcgggttactaactctcccttgctgtcacccatggtagccaagaaagatgatgctggctcttctggcagccagcccttaagagcacttgcattaactggagctggtttatcaggccttttcaggtcttctacactggcatcagctgatgaagctgagca

SEQ ID NO: 6277 - DNA, 537 bp, Glycine max
  unsure (1)..(537): unsure at all n locations
  Clone ID: jC-gmfl02220078f12a1
naacgtcaagctanngatgactnattacgttgangcatgcgagcgtcagttaggtagtaatttggatcgggataataccaaaaaaaaaaaaatttcctctaacccacaaaaacataacaacatggggggggggtctatctcaaatgccagcctgttcaactctacaatttattaactattgcaccctcttagactgcttccaattcctatgtatgatggatatcatctatactaactcccacaattccaacattatagtaatccccatcacctgcttctttccagataaattctatatcaaactgcactgcctgatcctcccttttacttcttatgtagcatgtatgaactcaaatcatcaaatgaatatgaccctttaatctaagaagaagaaaaaaacacacacatacacacacacactttaaagtccaaagtctaaaccaacccaccaaaagtcttgttcccatggcgagtggcaagctttatgcgggtacaaacatgtcacttctcctacaaaacgaaaggctcccttgctcc

SEQ ID NO: 6278 - DNA, 594 bp, Glycine max
  unsure (1)..(594): unsure at all n locations
  Clone ID: jC-gmfl02220078g01a1
gtaaatcccaatctacactacgacacagcagctgcatangaaaccaatccnagtgtgttgttatnttctggttgggttttttttttgttttttttttttttttttttggtttattattgttttttagggtgctttaacccttggggggacatgactatcctcattgagcaatctgatcactttggggctgaagtacaggcaaagactgaaccagtaaatgacagggaactggtgtcggatggtggatttctgataccacagaccaactcatttgggcacatgtttagggcttataatgatgctgcaagtgagaggcgtgaaggagtggagaacttctacagaaaaaatcacacttaccaatcagttgatttcgtgaagaaaatgagagaggagtatgcaaaattgaacagggtagagatgagcatatgggaatgttgtgaactccttaatgaagtggtggatgagagtgaccctgacttggatgaacctcaaattgagcacttgctccagacagctgaagctataaagagggactacccagatgaagattggctgcacttaactggccttatccatgatctcggcaaggtgctg

SEQ ID NO: 6279 - DNA, 581 bp, Glycine max
  unsure (1)..(581): unsure at all n locations
  Clone ID: jC-gmfl02220078g02a1
gctcagccaatgtaccctcgacctagagtcagatangtagaccatgtcctatgtttgnttgtctctttcctttgggtggttgtttttgttggggtttgttttttttttattttttcttttttnttctccgtctggggtcccttttctccctagggtgtctctctactgaatccctatagagagaaaatcataaaccctaattcccctgtcaagctcgtagcacagtcacagccatgtatggcggtgatgaagtatcagctatagtaattgacttgggttcacacacttgtaaagctggttatgccggtgaagatgctcccaaggctgtgtttccctctgttgttggagcaattgatcaaatggatgttgatgaagcagataatggtgaaaagaaccctggctctgctccggaatcaaataataataatgttagaaatgctgattctgacaaggccaagggaaagaggaaattgtatgtaagatcccagtccttggggtaccgcagagaccatatggaggtgctgtcttcatttaaggatggagttgctgctgactgggatattgttgacagcatatgggat

SEQ ID NO: 6280 - DNA, 600 bp, Glycine max
  unsure (1)..(600): unsure at all n locations
  Clone ID: jC-gmfl02220078g03a1
tggttctgtttcggttggtcgctcgcatgcagnttacgaaagacaagttattaagtttgctgctcacgtgcattgggttagtatttagcttttgggtattatgtctttcttctttctccatccatttcctccttctgggtcaatatcccttttgggagctgttgcttagcagcatctcaagctcccaccaccaaatcacacccctatatccttcccattaagaaagaccccgcaacaaatttgtactacacttcagttggcattggaactcctaggcacaactttgatttagtcattgatctttctggtgaaaacttatggtacgattgtgacactcattacaactcatcatcctacagacctatagcttgtggctcaaagcaatgccccgaaattggatgtgttggttgcaatggccccttcaaaccaggttgcacaaacaatacatgccctgctaatgtaatcaaccaattagccaaattcatttacagtggtggcttacgtgaggatttcatattcattcgtcaaaacaaagtgtctggtttgctttctagttggattgacaccgatgcatttccatcattcttcgacgatgagtta

SEQ ID NO: 6281 - DNA, 427 bp, Glycine max
  Clone ID: jC-gmfl02220078g04a1
caaagagacaattcaacttatgatatctttatggccaccaccggtacccatcctccctggggtatctgttttttccttctgttgttgcttctagcacactttcatttgggcataagccaacttgagctgaattactactctaaaagctgcccaaaagctgaagagatcatcaaggaacaagtcacacaactatataacaagcatggaaacactgccgtttcgtgggtcagaaatctcttccacgattgcgtggttaagtcatgcgatgcatcattactgttagcgacggtgagcgatgtagtgtcggagcagacatcggatagaagttttgggatgagaaacttcaagtacgtaaacactatcaaagcaacggttgagaaagaatgccccttcacagtgtcatgcgctgacattgttgctctttctg

SEQ ID NO: 6282 - DNA, 541 bp, Glycine max
  Clone ID: jC-gmfl02220078g05a1
actgctcgtttgcctctaattctgcattcttctgcgcctccggcgccatttttgatactgggtttgtgttcgcatagtgagatatggggaagaaggcgaagaaagctatgaagaagaatttgaaaagggcttcctttaataagaatccatctgaggatgctgatttcttgcccttggaaggtggccctgctcgtaagctcgccggccagcagaagccgccgccgccgccggagaacaccgccacggttttgtacgtcggtcggatcccacatgggttctatgagaaggagatggaaggttattttgggcaatttggaaccattaagaggttgagaatcgcaagaaatacaaagtctggaaaatcaagacattttgggttcatagaatttgaatctcctgaggtagcaaaaattgtggctgatactatgcataattatctcctttttgaacaccttctccaagtttatgtgatacctccagagcatgttcattcaagaatatggagaggattcaattaccattacaagccattggattctgt

SEQ ID NO: 6283 - DNA, 537 bp, Glycine max
  Clone ID: jC-gmfl02220078g06a1
attgttcggtttcttctcgtcggagttcgtcagggcaaaataaaagcaggcgaaacgtagtgtcgctttccgtagcggcacgctgtgttcataacccctcattttcattgcgcaaagaagtaaaaccccaactatcctctcgtctctgccctcacctgcagaacagaacgcagtgtctcatttgtctccgcatcggcgtggcaacaacaccgccgagaagataacctcttcaatcggaaaatgaacgctgataacgggtccagagacaccaaactcgacaaccaacacgtttgtctctttccacttttttctctgttctctctcttaggaaacgaaatatactgtaaattgaaattcgattccactatttaacggggaagttcagttcgccgctagattgcgttgttgacttcacgcgactaggtcatactaggctcgtaggatagtgaaattgttcttctataaaggattaaccctaactatgttatttaatatgatgagattattctatgctcattctttggttttgttcgattt

SEQ ID NO: 6284 - DNA, 529 bp, Glycine max
  Clone ID: jC-gmfl02220078g07a1
cttgtgcctcaagaaataggttagttccgagctgaaacaagatggctggtgataaacaaaaactctttaacagactgaagccattcataggtgtagtgttcttacagtttggatatgctggcatggatattctatgcaaagctgcactgaacaagggaatgagtaactatgtatgtgtcgtgtaccgtcatgtttttgcctttgttgtcatggccccttttgcactgatcttggagaacaatgtagggccgaagatgacattttcaatcttcatgaagacaatgattctcagcttgctagagcctggtattgaccaaaatttgtattgtgcgggcatgaagtacaccacagcaacctttgctgtcttcatgtacaatgtactccctgccattacctttgtcatggcttggattcttaggcttgagaaggctaaactaaaaagtatacgcagtcaagcaaaggtggtagggactttaggcactgatgtaggtgccatggtcatgaccctgataaagggcccaatacttga

SEQ ID NO: 6285 - DNA, 545 bp, Glycine max
  unsure (1)..(545): unsure at all n locations
  Clone ID: jC-gmfl02220078g08a1
aaacgatcgtccaactgcagctcagctatttggtcatccatttctaagaagaacattgctatctcccttaagttttgcttctccacacaggaatatctatcggctataacttgacaagtttaatgggtttgcagatatctgctggagttggaccttatttcaatgacttcatcttgtcctgccatcccaccacgttgatcccatgcggaaggttggttcattgaaaggggagaatgcattatcaagtgtttcacaaagataaactttcacctttatgctaaatgagagagcagtgccttttttggatcccagtgtggatctaagtatgactggattgagggaatggaaaattaggaaggagatggaccttttcatttccaactggttgctctttaaggcagaagcatccaccaggagattgccatggtgaacagttgtcagtcatctggcacaaagttgtcgggccacgttgcttgtactcatttgatcctatcaagagctcatgttcttgcttacannaatgtaatcaggagctcatgctcatg

SEQ ID NO: 6286 - DNA, 325 bp, Glycine max
  Clone ID: jC-gmfl02220078g09a1
gggtgggtaaagggattaatgatgtacagtccgctagagcatagctgataatatctcaatacatctgttttttacaataggtgtaatagatttacatttttaaagcccttttggcgttgacgagtgtgtacagagatgagtgtctataaacgaggagaggctatgcttgatatcatatggtggatggctcaacgattttggtggggggcagaaataggagagaattaattgcatccatcgtggtttgctttgttaagtaaatcttgttatataaaaaaataagtgctatgtgataaggagtccagaccctaaataaatccaatgt

SEQ ID NO: 6287 - DNA, 581 bp, Glycine max
  unsure (1)..(581): unsure at all n locations
  Clone ID: jC-gmfl02220078g10a1
caacaaagaaagaaaaggaaaatgaaataccaaaacacaaaaagcaccctctccttcctctcctccccctttctttttctctcttcactctcacccttatctcctccattgcagcttctgctttttcttcaaatcaacaaacaaacaaaaccatccccatttcatttcagaagaaacccttttctttcccaagcacaactgtttcttcctacggtggaacattgaccatttgaaatagttgtgcaacagcttccattatttggaaaaaaaaaaaagggtcttttgattctttgaagcgagaagatgcagaggcctccaccagaagattttctgttgaaggagaccaaaccccaccttggagggggaaaagtctctggcgacaagctcactagcacttatgacctagtcgagcaaatgcagtatctctatgtgagggttgtgaaagctaaggacttacctgcaaaggatgtcactggcagttgtgacccttatactgaagtcaagctggggaactacaaaggcaccactncgcacttcgacaagaagtctaatcccgaatggaaccaggtttttgctttctc

SEQ ID NO: 6288 - DNA, 499 bp, Glycine max
  unsure (1)..(499): unsure at all n locations
  Clone ID: jC-gmfl02220078g11a1
ggaagagggcttgtgtgactttctgcataacctacattttgagttgcatcaccgagcgttctcctcattacaaagtcctgatgttgggccgtattttgggaggtattgccacttcacttctgttttcagcatttgaatcgtggcttgttgccgagcacttcaagaggggctctgatcaacaatggctatcattaacattctcaaaggctatatttcttggaaatggtcttgttgctattttgtctgggctgtttggaaatgtacttgttgatacattggctcttggacctgtggccccctttgatgctgcttcatgttttcttgctattggtatggccatcatactatcttcatggtcagagaatttcggggatccttcagagaacaaggacttgcttacccaatttangggtgctgctgtggccattgcttctgatgaaaagatagccttgctgggtgccatacagtctctctttgaaggttcaatgtacacctttgt

SEQ ID NO: 6289 - DNA, 527 bp, Glycine max
  Clone ID: jC-gmfl02220078g12a1
gttttcgttctgattctgcaaaatcatggagatggagcgcatcgttgaattccctcacacctacatggatcgacccccaagaaagagagcgcgtttgggctgggacatcgctgaggcccccaaggctcaggtaggattgttttgtggacaagaggttgagaatatctcaagctatgctccttgagaacatccccctagttctatgtttaagggagttgcccgatatggttctcccccatggcgagatgatgacaaagatggccattacatgttcgagcttggagataatttaacttctcgctataagatccatagtaaaatgggcgaaggaacttttgggcaggtcttggagtgctgggacagagaaaggaaggaaatggttgccataaaaattgtccgtgggataaagaagtatcgagaggcagccatgatagaaattgaggtattgcaacagcttgggaaacacgataaaggtagcaatcgttgtgtgcaaatacggaactggcttgactatcgaaatcatatct

SEQ ID NO: 6290 - DNA, 567 bp, Glycine max
  unsure (1)..(567): unsure at all n locations
  Clone ID: jC-gmfl02220078h01a1
ggaggaaattcttgggaagaagatgaatgattggttaagatttagtgttgcattttggcgtacattccgtggaacaggtgctgacccatttggtgcacctaccaaatactggctatgggaagatggtaccaattcattaaacatggctaatagacgaatgagagctaactttgagttcataagcaaactcggtgttgacttttggtgtttccacgacagggatatagcccctgatggaaaaactcttgaggaatctaatgcaaacttggatgaagtggttgcccttgctcaagagctccagactaaggctaaaaaaagagtgttatggggaacagctcagttgttcatgcatcctcgttacatgcatggtgctgctactagctctgaattaaaggtctatgcatatgctgctgctcangtgaagaaagccatagaggtgacacattattctgggggagaaaattatgttttctggggtggtcgtgaaggttatcaatctcttttgaacacagatttggagcgagagctttatcatttggctaggtttttngaagctgctgttgcata

SEQ ID NO: 6291 - DNA, 591 bp, Glycine max
  unsure (1)..(591): unsure at all n locations
  Clone ID: jC-gmfl02220078h02a1
tgcttctgatgcagcattgacactagagtcgaataagcagaccatgtatgangntgcnggcnnacgngccggaggggggggggggggnnggggggaccggcttttgggtgggctggaggtttttcattggatttaggggccttttgaaaccggggggtcaagcttacaacctttttcttctcataattcgcctcaagattcaccgcaggtccctgcattttcgaattttatgccctttccgggtgggtattatcaaatgattcctggtatgtaccctgcgctagttccagggttgactctgccgcaacatgaggagaatgggaaccgcggagctggcatatatgctgttcctgttaacccgtatgacagacaaattactggacttacatacaacactctgattccgctgacttaccacacacccagtagcaggccaagttctgaagctgctgctgccagtgaaaatcaggggcaagcaggacagctacctcaacagcagcagcctgcaccttaaagacaagttgttgttaggagatttcaaattgcatttcaaattgatttgnttcttatgttgaagctggcagctgtgat

SEQ ID NO: 6292 - DNA, 593 bp, Glycine max
  unsure (1)..(593): unsure at all n locations
  Clone ID: jC-gmfl02220078h03a1
gctagcctagctccctagtaatcgatcgnttangagtcatgccggttggggggaggaacaggggagggggggaaaaagggaaaggttttgtaatgtaattattttttgtatcttggggattctttcttctgggtatttgttttttccttctgctgttgcttctagcacactttcatttgggcataagccaacttgagctgaattactactctaaaagctgcccaaaagctgaagagatcatcaaggaacaagtcacacaactatataacaagcatggaaacactgccgtttcgtgggtcagaaatctcttccacgattgcgtggttaagtcatgcgatgcatcattactgttagcgacggtgagcgatgtagtgtcggagcagacatcggatagaagttttgggatgagaaacttcaagtacgttaacactatcaaagcagcggttgagaaagaatgccccttcacagtgtcatgcgctgacattgttgctctttctgccagagatgccattgctttgttgggaggaccaagcattgaaatgaagacagggagaaaggaccagcaagaaagctatgcaatggaagtggaagac

SEQ ID NO: 6293 - DNA, 606 bp, Glycine max
  unsure (1)..(606): unsure at all n locations
  Clone ID: jC-gmfl02220078h04a1
atgctcaatgagtgctacgatttgacaactagatntcgnatcncgaatacccatatctgacgtttcatgcacacttacctgagctcataatatcgctcgagatctcagctttactcaaaacaatctcttttcctatctctcagggacccatatccaacatggcaatactcttacttctctttaccttttacttttcgaagcaaaaacaccataacaaaacacccagaatttgtgggttccattcccaaaacatagaacaagaaggagagagagagagagagaatgcaacgggagaaacaaaaaacagaagtatttctgtgattgattctctgcaaccgaatcatcatcagccacttcttctcccagtttcagctctcccctctctcttcttttcctcggctctggttcagtaaggcgtatggggttgctattattcttcataatggttgcaacagctgctacggcgtcgtttctccctgtgccttcgccggacgctggaaaagggaaacccaacggtggtggtggctgcagcgtttctgtgaacctcggaagactcaaagagcatcaaggtttgtgcggttgcttgcaggtcaaggcaaacgcaca

SEQ ID NO: 6294 - DNA, 463 bp, Glycine max
  Clone ID: jC-gmfl02220078h05a1
ctgatttttttctatgctatatagttttcaaaggcactcagggagttttgcaccgcgggatcattacgagattgcaaaatgaatttcaacattgcaaatcccaccactgggtgccagaagaagctggaaatcgatgacgacctgaagcttcaggcattttgggacaagaggatcttccaggaggtccttggtgacgccctgggtgaggagtttaaaggatatgttttcaaaatcactggtgggtgtgacaaacaaggattcccaatgaaacagggagtgttgacccctggtcgtgttcgactcttgctccatagatgaactccttgtttccgtggatattgaaggcgcaatgtagagcgtaaaatgaaatctgttcgtgggtgcattgccagcccagacctctttgttttgaacttggaaattgtgaaaaagggttagagtgacttgcccggtctcactgatg

SEQ ID NO: 6295 - DNA, 508 bp, Glycine max
  Clone ID: jC-gmfl02220078h06a1
cccattgtacgttcttcttcttcttttctttctttccaaaataaaatcttttacccttcacacccccacccctttgggtttctctcctcaattttgcatctggcggcttctcagttctcaccaccatcatggtttcacttggagctacctgtgctctgtgctgttctatgttcatggtgtttgtcactttgagtttggctggggacatagcacaccctgatagtattgctcccagaaggcctggctgtgacaacaactttgtcctggttaaagtccctacttggattgatggtgtggaaagctgtgagtatgttggcgttggtgcaagatttggccctacattagaatcaaaagaaaaacatgctaaccatactagagttgcgatagcggaccctcctgattgttgtagcaagcctaagaataagctcactggcgagatcattttggtgcaccgaggacaatgtagtttcacaaccaaggcaaatatagctgaagaagctggtgcttc

SEQ ID NO: 6296 - DNA, 470 bp, Glycine max
  Clone ID: jC-gmfl02220078h07a1
taaggaactataaaatctctcatttctgttctcttcacgcacaccaacaaaacctctgtctgtcatcggaatctaccaaaagaatggacgacaaaacgcagcagtccgagagtaagcaaaacgacaacgactaggaagttgcgccaaaacgacaagaccctaacccgtcgtgtggcgggtggggcttttcgccgctctcgtttctctgcgatcttcacaaggccgtcgctgttgccgccgaagagatctctcgcaatgctgctgtaattgcagagactgcatcaaagagcattgcggagttgcaaaacgaagatgaagattcagaaaaagagtgtgaaggagatgaaggatctgcagctgagaaggaaagtgacgatgagggttccaaactgcgtacatctgctctggaaagattggagaaagctagagaagagtcacttcttagccacggtttcaaggtttttgagtac

SEQ ID NO: 6297 - DNA, 555 bp, Glycine max
  Clone ID: jC-gmfl02220078h08a1
gcctcaagttagtaacccttcctctcttcttcttcttattctgtttcaaaaaccatggtttattattttccggatggcgtccggtactgtgaaaccttcttctcggtaccgttcctacgattcacgctcctacactttctctcatttctacgacccttcctgctgccatgaattcaacaatctcaaaaccaaaacctcttcttcttcttctcgcgctctcgtcaaggccaaaccctcaaacaccgtcaaggtggaccccaccttcaccaccatggtcaagaagttcatggacaggaaacccaaatcctcctcctcggccgtcgccaccgccaccaggttgattattccctccgattttctcgcgaaggatttgaagaaggacgcgaagaaagtggcggggttctccgcgctgcagaagaagctcttcggaaagggcgcttcctagaagaaggagaaggtgaaggccttgaccgaggtgaagaacaacaccaggacattggccatggtgctcatgagcgagagggagcttctcagcatcaccaagagcaggagcag

SEQ ID NO: 6298 - DNA, 563 bp, Glycine max
  unsure (1)..(563): unsure at all n locations
  Clone ID: jC-gmfl02220078h09a1
ctttctttaactctcttactctctctgtctagaatgcctctattctcctctgtcggtcacacagcgatagaaagataatagagaatagaaagcattcataggcgccaatagcgtgtgtgtgtgtgtgtgagagagagagagagagagagtacacaaagcagagagacaagtttgtgtttttctacttttccattttttgggggagagagatctgattcttcaccataagtgtcattgctttgccttgcttctcactcagcaaagttaaaacaagaagggcattgcatttttattgccatttcaatcccatacaaaaagcaaccccaattcacttattcaccccattgtcctaaaacttcactcttttctctgctaagagaaaagaaaataaaaaaccaaaatggttgaatctcagcccaagttcttcatccccgactcgatcaatggagtgaatttcgacgtggcggcgcagattaagatggtgtgngaagtgatcaaggcgccattgatcgtgccactgctgaacctcgcagtgtacattttcctagcgatggcactcatgc

SEQ ID NO: 6299 - DNA, 315 bp, Glycine max
  Clone ID: jC-gmfl02220078h10a1
gcacaacaaaccactctgaattttctcacgttatccacaacactctaaacccgggttggggcctatctaatccatccatgacttcttgttgcaccttcactgcaatgtgcgaatgctagctctgattcttcctacacatgtactactggcgctgccgtcgcctgatcaaactgccgatgattacccaggcgcagccgccccaccagggtctggcgcatggcctaagagttgcacttcaacaaaaacggtaccggaataaataagctgcatagcggagttaacaagctcgcggatctaggtgctcccactcttggt

SEQ ID NO: 6300 - DNA, 438 bp, Glycine max
  Clone ID: jC-gmfl02220078h11a1
ctcgagccgaatcggctcgagcttatctcaaacctcacctcaataatctttcgtgctagctagcttaatcatattccaattccaacagaaccaaattctgctagctagctagtacgtcaaaggaaataaaataatatggcattcagcgggacccaacagaaatgcaaggcttgcgacaaaactgttcacttggtcgaaggtttatctgtcgatggggctgcttatcacaagaattgcttcagatgcagccattgcaatggccttcttgcgataagcaactactcatccaccgaaggggttttgtactgcaaggtgcactctgagcagctcttcaaggaaactggcgcctaccccaagaaatcccagtcgtctggaaagcctccactcgagctgaatagagcaccaagcaaactttctgccttcttctctgggactcaa

SEQ ID NO: 6301 - DNA, 455 bp, Glycine max
  Clone ID: jC-gmfl02220078h12a1
gtcggctgcaagaggatgaagcccgtcatttttttcagcagataatttctggtgtggagtactgtcacaggaatatggtggttcatagagacctgaagcctgagaatttactcttggactcaaaatttaacatcaagattgctgattttgggttgagcaacatcatgcgtgatggtcactttcttaagacaagttgtggaagccctaattatgcggctccagaggttatctctggaaaattgtatgctggaccacaagtatatgtctggagctgtggtgtaattttatatgctgttctctgtggcactcttccttttgatgatgaaaacattcccaatctcttcaaaaaaataaagggtgggatatacactcttgctagtcatctatcacctggtgctagagatttgataccaaggatgcttgtcgcggatcccatgaagaggatgaccatacct

SEQ ID NO: 6302 - DNA, 184 bp, Glycine max
  Clone ID: jC-gmfl02220079a01a1
gaaaagtacagtccagttttagtgatctctttaatttatttgttcatagattaatatgatggtgtatgattgcttttctatttattgtggcatttttgtgttgcaccctgttgttgtgtttgcaataagtattagttataacagcagcaatattcaaatttcaaaactaaataccgtggtgagt

SEQ ID NO: 6303 - DNA, 159 bp, Glycine max
  Clone ID: jC-gmfl02220079a01d1
gaaattgaatttgctgctttattactaatacttattgcaaacacaacaacagggtacaacacaaaaatgccacaataaatagaaaagcaatcatacaccatcatattaatctatgaacaaataaattaaagagatcactaaaactggactgtacttttc

SEQ ID NO: 6304 - DNA, 535 bp, Glycine max
  Clone ID: jC-gmfl02220079a02a1
tttagttatctactcttttctgcatgtttgttctctcaacgactcctccgcgaaagagtattattcaatattttggttgggttgaatcccggggttgaagcgttgcagacatcacggctattctaagagtgtctcgctccctcattcatgtccgatctgttcgacggaggacgggtcgttgcgtaactgccgttaacccttcggcgcacggcgggcgtggtgctttgccttctgaaggcggtagcccttcagacttgctcttcctcgctggtggtggtttcttctagtatcttcactcttttcattacttttagcctgcatagttttaaataagaaaaaaaaaactgcgactttgtgactagttaagatcaccgtttattcttcttcttcttcttcgtcttcttgtactactactactactacttttcctccacaaaatgatgctcagaatcaagagggttcccactgtcgtttccaactaccaaaaagacgacgctgcagactctcctcgtgccgtcggaggctgtggtcggaa

SEQ ID NO: 6305 - DNA, 541 bp, Glycine max
  Clone ID: jC-gmfl02220079a02d1
aacagataactgaatttattatttctcagagtcaagtcaagcattatgatacatcataccccaaaacaccaacaacagtactcaggtgagcagttattacatcgtactttcacatgaacgcgtcataaaggcagataaaagcaaatacatacaacacaggaccttaaggctcaagcacagcacaatactatgtgacttaaacggtgacacaattcagcaattattcttaaagcactacggatttgctgaatttgttcataattttagagccttgttagtgtagaatcacacattcttgtgaaccagctaccaccacagtagggtgttcgcttgtgctgactgcatcaacttctttgacactttcaacgttgacatcctccaattcaccacagccaatggcttcaaaataagatcattgacttcttgaaacctctcttgagagagggacacctctgcaagaagcctccaagcattgccttcagatgcctcatcataatccttcttcctctttaagaccatgtgcccactaatttcccacaca

SEQ ID NO: 6306 - DNA, 533 bp, Glycine max
  Clone ID: jC-gmfl02220079a03a1
gccaagagtcttgtgcagcaatggaattttaccacaacctactgaagatcaggttggtgaatgagaaagacatctgtgtttatcagcgcgccgattggttggttgacaagttgggtacaaaagtccattcttatttctggcttgatgagtactcagaaaaagatgattttgcgcgatactggaaaaatgaatggatgagtggtttgacgtcatggcgcaaagcactgaagattccagatactgatgtcataatggaagatggatgtgctaaggtcactgatcaagataaagcttttgttgtctggaatactggttcaatgttgagcatttgtaattgtagttgggcacaagatggcaacctttgtgagcatattctgaaagttcttagtatctgccgaaagagggggtccattttaccatctgtcactttatttcaggatcaccaggcactaaataacatgctgcattgccctccttttgattcctttattcgtgatcacgctgtgtcattggcagtttcagctcagaagcag

SEQ ID NO: 6307 - DNA, 527 bp, Glycine max
  unsure (1)..(527): unsure at all n locations
  Clone ID: jC-gmfl02220079a03d1
aattgaaaattattgacttttgtaataattaatgattttcaaatgaattaacaatgaaaaatctttacaaagagtttatcaaaattaaactctatctttaatggcattggtctctaattgtcctgtgtactgattcacgatttaatttcaggtatttgatcccaaatagacatcctccttgatggtacctgaattttcacccgtatcaactgcaagtggctcggcaggtgtaactgttgacggggggctcaagtggctatcagcatctttagtgcaagaaatgactctgggaacctcattgacaccattttgatgtatttcacaatgcttcacatcctctgttgttgatgaaggggtatccacatccatagcacaatctctgccacctttatctgaaatattttcttcaatcttatcattaggcaaagcaccattttcagaagcggagatctcngtttctatagtagccaagcccctctctttngtttcttggaatgcatcacctgaaacggtatcatcaacagggt

SEQ ID NO: 6308 - DNA, 183 bp, Glycine max
  Clone ID: jC-gmfl02220079a04d1
agaaagaatattcaatcagatcaaagaacgaatcccatcaacagactaacatcatcataaacaagcgttttcgcaataattaacatctcctcatccgtgataattaacagcattgtttatcttaattaattttctcgtcatttagagagcgagcatcacgagggaagcgatggcggaagcagc

SEQ ID NO: 6309 - DNA, 490 bp, Glycine max
  Clone ID: jC-gmfl02220079a05a1
caacctcacaattcgaagttcaaaccccaaatcttcaaaaacctcacaccaaacccaaaataaaaaaacaacgtaaaaaccttaataatagcaaaaccaaaaccacacttgcagtcaaatgttcttcctctcttcccccttctcttcatgcttcagagcttcacaacgtaccaaccacgatcccacaaacctcaccacctacatctaccacaccgaatacggcaccgtttcactgacatggtcgcgctccctgctaggccgctccctccacgtgaacctccacaaccgttcctccttccaccttctcctcaagccatggaagaaaaacgggtccaagaagctttctcacaatacggtcttcctctggaacctctccatccgtaggttcgagtctggactcgaacctcgctctagattctacctcgccatcgaggtagaacatggcctcagcctactcattggggacttatccccaggagtagtaaggcca

SEQ ID NO: 6310 - DNA, 449 bp, Glycine max
  Clone ID: jC-gmfl02220079a05d1
gttaataaggagtttcaattgacttctcttaacagatgtgttattccatgtacatcgtgatcttttgacttctctcgacaaacaggcttccatacatgcaaatattcaagcattacaagaacttgaattcaattggttttgggtaaattaaactatcttttgccctaattaaagactaaactcttagagtattaagaacatatacttttctatacacatggaaatctaaattcattctttctccccctaaacttttactctaaaggaaaacaaataaacaaaaaatttaaccacccaaattatgtgttcaccttctccaagcataaaccaccaaagaaaacccaagaggaaccaccaactcattctcctccacactggaccattccataaccgaagaacttcccccaaagatccaccagaagtagaagacaccgacaaagacgaagaag

SEQ ID NO: 6311 - DNA, 541 bp, Glycine max
  Clone ID: jC-gmfl02220079a06a1
ttcttcgattgttgctgaaaatgagttctatatctctcccgttattgtagttgtatttttgtatttgatgcttacaattcacttatcttggttgcatgttaacagatttttcagaattatgaggatattctagtgaggaaccagcactatttataggacaaaggaaaactaaaggatgctcttgctgggctggttcgctgcttgtcactcctggcatggaataaagaagaaactgatttgcacaataaggtattttattttcatttggctgtgaaaattagtaaagactcttttacatgaatcatcaatacaattgtaaatgctctgtcagtctttttaatctaagctctgctatatctatgcatgacatatacctctttgcattttcattttagcaatctctctcttttgtcatttcatttccacttagctttatgatcaaattggctgatttatgcgcatctgaaactagcaacttgttctcaagatacatgtagtactttattaatctgcacaactcatagtttcacaatactatttc

SEQ ID NO: 6312 - DNA, 441 bp, Glycine max
  Clone ID: jC-gmfl02220079a06d1
gatcaacataagttggtaattgggacaattgcttcaatcatacgtattaacttggaggaggcaaaaccatcatggaagaagttatctataggtcaaagggattcatggtttaatatatttgaagaaatcaaattacaatgtttgattaaaaatattcaattttttatattatttttaaaaatgtgtgtaatgtaataatttttttcccattttggtcaaaaccaacgtagtcaaagtttacatggccacctcagtataaggacatggtgcggcacaactttgagaaaaggggttcagctaaaatgactcaattaatgcaagatgttcgaaaaaatttaaatgaaaaaccaacttggatggaagatgatgtgtgggcacaattgaaggcacattgggaaatctcaagtttcaaaaataaatctgaaataaataaaagaaatc

SEQ ID NO: 6313 - DNA, 412 bp, Glycine max
  Clone ID: jC-gmfl02220079a07a1
gacaagaaaagaaaaaaagggagagaagcagaaagagagagagagagaactgaaaaaagaaaagaaaagataagactaattaacgtttttttggtttggttttcttcaacacgcaggagacacgaagtaaagagacaagttacatcagatggttaaaacttgttaaaagagtttgtgtatgtgtgtgaaagtagtttaaggctgtgggggtggttgaagaagttttttagctttggagatagagatgtcaggtggtggaggcagcatagtgaggttcagaagagatctgaggatagaagacaatccaacactgacagcaagagtgagagctgttgctgaggtcgcagttctcgtattggcacctgaagaaaaaggccaatactaccctggcagggtctctagatggtggctc

SEQ ID NO: 6314 - DNA, 453 bp, Glycine max
  unsure (1)..(453): unsure at all n locations
  Clone ID: jC-gmfl02220079a07d1
gaatataaataaaattatataaatatactttgataaaaataaatagtattttttagatgtaacattttaaatctgagtttattagtagaccaaagatcctatggtggctctntctccctcactacacaaactatactatacagcaagttgcaaatattgtacaagaaagcagaagggactgcagatgaactgccgtatgaattgaaatttccatacacattggaggtcaggtggtggtaaaggagaaggaaattaacacatgtatgttcaatgcggctttaacacctcactttctctcaacagaaaagtggtagtgtaatttccacctccttgcttctagtctaattgctttagatatgaattacccagtctgaggtagctgcctccaattcagcatttggtgagactgaggatgcctttgcaagaaagatgaactgtttgttataccatttt

SEQ ID NO: 6315 - DNA, 525 bp, Glycine max
  Clone ID: jC-gmfl02220079a08a1
cttccttctcatcattctcatattattgtcgccacttcgacctcaatcaccctcgcgccctcgctcttcccttcctggtggcgacaatgtcgactcctgctaggaagaggctgatgagagacttcaagaggctgcaacaagacccgcctgcagggatcagcggtgccccccaggataacaacataatgctgcggaatgctgtcatatttggtcctgatgatactccatgggatggaggcacgttcaagttgactctccagtttactgaggattatccaaataaaccaccaactgtgcgatttgtgtctcgcatgtttcatccaaatatttatgctgatggaagtatttgcttggatatactacaaaatcagcggagtcctatatatgatgcggctgctatactcacatctatccagtcattgctttgtgatcccaacccaaattctcctgcgaactctgaagcagctcgaatgtttaacgagaacaagcgtgaatacaatcgaagagtgagggaaatcgtggagc

SEQ ID NO: 6316 - DNA, 482 bp, Glycine max
  Clone ID: jC-gmfl02220079a08d1
cagcaaactacaacttctttgttgaatgtttgacaacaatccaaagtaaattgacacgcataattctattttacattaactgacatatgcaatgcaaaagctacaataaattaaagataagatgatgctatcattcatatcagaagagaatatatatttgatgagtttgcacaatcattcttatatataggtgccaccactgcaacctaattcatgccctcaaagcttcctgcatataaggatgaacttagtcggctgtccaactctgctccacgatttccctcactcttcgattgtattcacgcttgttctcgctaaacattcgagctgcttcagagtttgcaggagaatttgggttgggatcacaaagcaatgactggatagatgtgagtatagcagccacatcatatataggactccactgattttgtagtatatccaaacaaatacttccatcagcataaatatttggatgaaacatg

SEQ ID NO: 6317 - DNA, 223 bp, Glycine max
  Clone ID: jC-gmfl02220079a09d1
ccattagcgtcccttctatggtcatggtcttattcattggaaatcagccgccattcattcatttttcacagtggcagtgccaatgtgaaacatcctgcgtgaacaaacagaatgcataagctgcacaacttgctaaatctaatggttgacgtgtatagaacctaacaagtatacataaagaactagctttggataagattcatttagacaagataagaccatt

SEQ ID NO: 6318 - DNA, 611 bp, Glycine max
  unsure (1)..(611): unsure at all n locations
  Clone ID: jC-gmfl02220079a10a1
gaaccggccatgatgcgctttgacatagcagtcgcatagtagacctataanggntgggtgggattgctggtgtggtgtttttgtttggggtgtttgtttttgttgttattttatttttgagntgattctggtcttgtcaagttggtgggaattaggagctgcttaattcaaagaatggggggagatgcacagaagagaaacgtcatcattggcgtctctactttcttgttggtggccatggtggtagcagtcacagtcaatgtcaacttcaataacaagggatcaagcagtgattcaaaggaagaaagcaaatcccatgtagcttcctcgatgaaggccgtgaaaaccctttgtgcacccaccgattacaagaaggaatgcgaggacaatcttattgaacatgccagtaacatcaccgacccacgggaactcatcaaaatcgcattccacgtgaccatctccaaaatcggcgaaggacttgagaagacacaactcatgcatgaggtcgagaatgaccctataaccaaggaggcactcgacacgtgcaagcaactcatgaacctcttcattcgngagttcacgaggtcactcgacaagttcgccaagtttga

SEQ ID NO: 6319 - DNA, 369 bp, Glycine max
  Clone ID: jC-gmfl02220079a10d1
gcaagaaaatgacagttcagacacacttgcatttcagtgcaatgaaattatggaagacaaaagacaaaggtggtacagcacaatcattaataattagttgtttaatttggcaacacgcaggcacatgcgttctctcctaaaaaataatgaatcaacttcagttagtgtgggagacctggccagagtagtaaggaatcctagtgaccctaatccagtcatctccatggaaaaacatggatggcaagaagtttgttattccatctgaatcaagggtcttaactccttcccacttcacacgcttggttttgtctgaaccagggccacggttgttgaactcagcgtagaaacaagtatccattccactaaaac

SEQ ID NO: 6320 - DNA, 634 bp, Glycine max
  unsure (1)..(634): unsure at all n locations
  Clone ID: jC-gmfl02220079a11a1
gtctcgccaatgtactgattgagctagagtcgnatangnagaccatgncnnngtttgggnnnngggccgggggnggggggngtaacagggtagngaggtttcgncgnaaacatgtttagcatcgtcaaggagatcctggcgagcccgggcaaatggcggaccaggtttcgaagcttgcggaagaggcccagaatttccgacaggaatgtctggagctgaaatccaaaactgagaagctggcgggcctcctccgccaggccgccaggaatagcaacgacctctacgagcgtcccacgcgccgcatcatcgacgacaccgaacaagtcctcgacaaggccctcgttctcgtcaccaaatgtcgcgccaacagcctcatcaagaagctcttcaccatcatccccgccacagccttccgcaagacctccatgcagctcgagaattccgtcggtgacgtccaatggctcctccgcgtctctgcctccgccgacgagcgcgacgacgagtacctcggcctacctcccatcgccgncaacgagcccatcctctgcctcatctgggaacaggtcgccattcttctctccggcgctttcctcgtctccctcgctcgcgacaacgaccgttacgggaaactcat

SEQ ID NO: 6321 - DNA, 374 bp, Glycine max
  Clone ID: jC-gmfl02220079a11d1
aaaaaaaaaaataatagataagcatatatttctactagtaattgatagtgcaaaagaagacgagcctaaattaatttgacaagggcgacaacccaagattgctaattttgatggtatatacagtagtgatgcagggcgaaagaataaaagaaagaaaaggaagtggaaggttacgttgtggaggtaggtatgtaagtatgtatgtatgtaaataaattcagcggaatcctcttcctcttgattgatagagttcgagcctgctcttggcctctggtaagagtggttggatggaggggttcctcgatgagatgtgcctgcttggtgcaccattcgagaacaatgagcacctcttcttgcgccagagtctcgctttt

SEQ ID NO: 6322 - DNA, 599 bp, Glycine max
  Clone ID: jC-gmfl02220079a12a1
caacgttcacataccacgtagaaacagttcaatcattcttagccctaagcagacttcacatgctcatccacttagtggcagtgttgtctctctgttactaccgcatcacccacttcttcctccaacctccaacagcgccatggcttctcatgactgctgcggagcttcttctctcgctgctctggttcttcaaccaagccttccggtggcgaccggtgtcgcggagcgtcatgactgagaagcttccgagtgaggagaagctgccggggcttgacatcttcgtgtgcacgctcgatcccgagaaggagcccaccgtggaggtcattgacaccatcatctccgccgtgtccatggattacccctccgacaagctttccgtctatctctccgacgacggcgggtgcgacgtgactctctatgggatccgagaggctgctgagttcgccaaggagtgggttccgttctgtaaaaagtatggcgtgaagtcaaggtgtcccaaagtcttcttctctccctctggggatgaggatcacgagactcttcgggacgatcaattcagaacacagagagacctcgtcaaggctaaatacgagaaaatg

SEQ ID NO: 6323 - DNA, 412 bp, Glycine max
  Clone ID: jC-gmfl02220079a12d1
aaactgaacgaacaagattgcattaagcaatttcatctcaagatacataatcaatttagactcttgaatgagcctaattatttgtgaccaaatttcactatccactcttgcttttcattgttaccatggcctcaagaagtggataactaagaaccattacataggtaactaggaaaagttgaccaaacatttcttcaaaatccttcacattgaaattaaatagtctccatataccaactaagaagctaacaatgttggctgtgagtaatagaaccaatggagccatgaacacagctgcaccttggaaatcgaatctaccttgctcatatttcttgagcttctctttgtaatggctttgtttgacaagttgaatttcaccttgctcaaccccaaccacttcttgattccatct

SEQ ID NO: 6324 - DNA, 582 bp, Glycine max
  Clone ID: jC-gmfl02220079b01a1
ctttgatcttccacttcaaaataattgtcttatctcgtaatctccatttgaacattcctcttcttattctctcgtgcactcacacacccctttccaatttcgtgaaattagggctttctcactccctttcttccttcactgattctcgacgtgagagaatccggtttccttaatgatttcgccctgtcggttggactcgctatcggaccggcaaatgattcttgggatttgagtataccccaacatctctgctgcctctcgctgttcgtgatgaggttctttgtgtgggatgcccaaataccaaagatgaaaggtgtcagagactgggtcttctctcaaatactatccaaatcgctggtctcgccttcaccattatctggcagcaatagtctctatgctggagagcatcggaatgaaaattaccacgagcaaggttcagatcactcagctaattcagtgtcatcacccataccttccaactcatcgaactcttcatatggtgatcagagtaatcagcatagttgctccttgcagctagcttcagatacagaaatctatcagtatcaacataacactaatgga

SEQ ID NO: 6325 - DNA, 478 bp, Glycine max
  Clone ID: jC-gmfl02220079b01d1
aaagaagaaaaaggaaaatatttttagtagtcatacggataatttgtgaagtacatgcccaaggaagaagagaaaaaaaattgttttttcttaattaagacagtgaagagtgagaggtttactctctaaattatacattttaatttatactatatataattaaatgttatagatttttgcaatgtgcaaaataataataaaaaaaacgatttcctcttatacaacgattaacaaacatactatagaacgtgcaacatgttccttgctgaaaagataagtttgggcagaaaatacaacctattcttcttcaccaaccgacatgttgcccatagtcgtgtcacctgaaccaaaaaaaccattgaaattcccatttgatgataggcaccgcacaatataaatgcaaagccagagtttgaacatcaatgcaagccttaaacttaaacaagatgatttgtggctacttgcattatcactaaca

SEQ ID NO: 6326 - DNA, 532 bp, Glycine max
  Clone ID: jC-gmfl02220079b02a1
gccaccgtagccgccgccgaacggatcgacgatgaagacgaccttctgatccgtcaagtggtgccggatgcggaggaccaccacctgctcaacgcggagcaccacttatccgccttcaagacaaagttcggcaagacctacgccacgcaggatgagcacgaccaccggttccgtatcttcaagaacaacttgctccgcgccaagtcacaccagatattggatccctccgacgtgcacggcgtcaccaggttctccgatctcactccggcggagtttcgccgccagttgctcggcctgaagccgctccgacttaactctgacgctcagaaggctccgatcctaccgaccaacgacctccctaccgatttcgatcggcgcgaacatggagccggtactggagtaaaaaatccgggttcgtgcggatcgagttggaccttcaacggcggtggaaccgctgcaggtgctgattggacttatacaggtgagcttctgagccttaacgagcaacaacttgtggattgcgatcatgagt

SEQ ID NO: 6327 - DNA, 399 bp, Glycine max
  Clone ID: jC-gmfl02220079b02d1
aaaagcataaacatgtgcttagcagtttcctccttcataacattacatcgggcaaattatttacatacatactatactggggcccctaccacgtttaggcatccatccttatatttaatgggtagaaacatgtttagcagcgacagttgagaccatcgagtccaccccacatacattgggacctttgcagatcttggaatatcccttttttccccagctttccccccatgaattctttatgatccagtaagggttttccttaaaacgaattggagcataagcaccagaaccataccccaccaaaagaaccccgtgatccaaatgcttgccgcagatatatgggcatgagacgccaccaatatatgtctgcataaaaactgcattgataccaactgcaag

SEQ ID NO: 6328 - DNA, 488 bp, Glycine max
  Clone ID: jC-gmfl02220079b03a1
gtggcggcggaggaagaggacatgagggtggttttttgtgatgttgcattggggtgcaaggctgggcctgcttctgaggatgttcactccttatgctgtgctcattgcctgcgcacacctttatggctcctctgactaactttgcagtctgctccactacacactccacatcatagctcgtctgcattccctttcccttctcttttcaccccaccttcctgatcctctcttcttctttattctttttctgccggcagcacctaattcgttttcgacttcataattctactacttcttcactcataaaagcagattgaacgacactgaacaaaacggctcttactgcacgacgaggacctccatctttagcagaataaccacagcctcattcaccactggctcaaattccatatctgtcctactggcctactagccctcctacatggcctgaggccataccttttgctttccacattttattgcgatgc

SEQ ID NO: 6329 - DNA, 525 bp, Glycine max
  unsure (1)..(525): unsure at all n locations
  Clone ID: jC-gmfl02220079b03d1
caatattattaccataacttatcacatgtatgggacattattcggtaataaccatataataaaatccacatttgaaatgggattttagcaagaaccggttccacagcttttaggggtgttactatcatacaaaacatataagaatgagataagatataaactatagattgaacgagtatgaaacaagggtgtacaaaaagattaagctgccattgtttcatctaagtaaacatcacttcatcaaatgcagcagatgatacaaattgcaacttgacaaagcgacccctatgcacaaatgtaaatgaaaataatgcagcggacttacaggatatggcacttgaaggaaccaaaaagggaaaaagtaagaaaacttttatagttaaaaaataagtcataaataaatccattcttttcttttctttntttcttcttaatttactactgtgccaaggtcaccttggaccagataactctactgcatgcagattttcggttgagtcgacgatccaatcagaattaggatga

SEQ ID NO: 6330 - DNA, 459 bp, Glycine max
  Clone ID: jC-gmfl02220079b04d1
aagggtgtattatggacaagttcaatattttagcaaagagcatagcacaagttcaaagacaacaagaagttcaatttcatccatttactcccaaagaaaatacctcactcgttttataaagcaaatgttgaacccaggagaccacatccccactccctcccctctttctctatcaaaatgtaaaactaaaacacaaataaaaaacttcaatgattgaagatttttattacaatcttttcaaacttttctttctggcatctatcttcttcttgtccgcctgagcttttgcttgtccaccttccttcttctggtggtgcagaagcagcagatatgactgtagcagcagaagaaccattaacagccgctgcctgttcctgattatttcctcttggttgtggtggttgcaagcactggcactggcaatgcagcactgccggtgtggttttgatgtcaccacta

(The sequence listing continues in the following parts.)

1-7. (canceled)

8. A substantially purified nucleic acid molecule comprising a nucleic acid sequence wherein said nucleic acid sequence:
(a) hybridizes under stringent conditions to a nucleic acid sequence selected from the group consisting of SEQ ID NO: 1 through SEQ ID NO: 48629, a complement thereof or a fragment of either, or
(b) exhibits an 90% or greater identity to a nucleic acid sequence selected from the group consisting of SEQ ID NO: 1 through SEQ ID NO: 48629, a complement thereof or a fragment of either.

9. The substantially purified nucleic acid molecule of claim 8, wherein said nucleic acid molecule encodes a soybean protein or fragment thereof.

10. A substantially purified nucleic acid molecule comprising a nucleic acid sequence that shares between 100% and 90% sequence identity with a nucleic acid sequence selected from the group consisting of SEQ ID NO: 1 through SEQ ID NO: 48629, a complement thereof or a fragment of either.

11. The substantially purified nucleic acid molecule of claim 10, wherein said nucleic acid sequence shares between 100% and 95% sequence identity with a nucleic acid sequence selected from the group consisting of SEQ ID NO: 1 through SEQ ID NO: 48629, a complement thereof or a fragment of either.

12. The substantially purified nucleic acid molecule of claim 11, wherein said nucleic acid sequence shares between 100% and 98% sequence identity with a nucleic acid sequence selected from the group consisting of SEQ ID NO: 1 through SEQ ID NO: 48629, a complement thereof or a fragment of either.

13. The substantially purified nucleic acid molecule of claim 12, wherein said nucleic acid sequence shares between 100% and 99% sequence identity with a nucleic acid sequence selected from the group consisting of SEQ ID NO: 1 through SEQ ID NO: 48629, a complement thereof or a fragment of either.

14. The substantially purified nucleic acid molecule of claim 13, wherein said nucleic acid sequence shares 100% sequence identity with a nucleic acid sequence selected from the group consisting of SEQ ID NO: 1 through SEQ ID NO: 48629, a complement thereof or a fragment of either.

15. A substantially purified polypeptide, wherein said polypeptide is encoded by a nucleic acid molecule comprising a nucleic acid sequence, wherein said nucleic acid sequence:
(a) hybridizes under stringent conditions to a nucleic acid sequence selected from the group consisting of SEQ ID NO: 1 through SEQ ID NO: 48629, a complement thereof or a fragment of either, or
(b) exhibits an 90% or greater identity to a nucleic acid sequence selected from the group consisting of SEQ ID NO: 1 through SEQ ID NO: 48629, a complement thereof or a fragment of either.

16. A transformed plant having a nucleic acid molecule which comprises:
(a) an exogenous promoter region which functions in a plant cell to cause the production of an mRNA molecule; which is linked to;
(b) a structural nucleic acid molecule, wherein said structural nucleic acid molecule comprises a nucleic acid sequence, wherein said nucleic acid sequence
(i) hybridizes under stringent conditions to a nucleic acid sequence selected from the group consisting of SEQ ID NO: 1 through SEQ ID NO:48629, a complement thereof or a fragment of either; or
(ii) exhibits an 90% or greater identity to a nucleic acid sequence selected from the group consisting of SEQ ID NO: 1 through SEQ ID NO:48629, a complement thereof or a fragment of either,
which is linked to
(c) a 3′ non-translated sequence that functions in said plant cell to cause the termination of transcription and the addition of polyadenylated ribonucleotides to said 3′ end of said mRNA molecule.

17. The transformed plant according to claim 16, wherein said nucleic acid sequence is a complement of a nucleic acid sequence selected from the group consisting of SEQ ID NO: 1 through SEQ ID NO: 48629 or a fragment thereof.

18. The transformed plant according to claim 16, wherein said plant is selected from the group consisting of soybean, maize, cotton and wheat.

19. A transformed seed comprising a transformed plant cell comprising a nucleic acid molecule which comprises:
(a) an exogenous promoter region which functions in said plant cell to cause the production of an mRNA molecule; which is linked to;
(b) a structural nucleic acid molecule, wherein said structural nucleic acid molecule comprises a nucleic acid sequence, wherein said nucleic acid sequence
(i) hybridizes under stringent conditions to a nucleic acid sequence selected from the group consisting of SEQ ID NO: 1 through SEQ ID NO:48629, a complement thereof or a fragment of either; or
(ii) exhibits an 90% or greater identity to a nucleic acid sequence selected from the group consisting of SEQ ID NO: 1 through SEQ ID NO:48629, a complement thereof or a fragment of either,
which is linked to
(c) a 3′ non-translated sequence that functions in said plant cell to cause the termination of transcription and the addition of polyadenylated ribonucleotides to said 3′ end of said mRNA molecule.

20. The transformed seed according to claim 19, wherein said nucleic acid sequence is a complement of a nucleic acid sequence selected from the group consisting of SEQ ID NO: 1 through SEQ ID NO: 48629 or a fragment thereof.

21. The transformed seed according to claim 19, wherein said seed is selected from the group consisting of soybean, maize, cotton and wheat seed.

22. The transformed seed according to claim 19, wherein said exogenous promoter region functions in a seed cell.

23. The transformed seed according to claim 19, wherein said exogenous promoter region functions in a leaf cell.

24. A method of producing a genetically transformed plant, comprising the steps of:
(a) inserting into the genome of a plant cell a recombinant, double-stranded DNA molecule comprising
(i) a promoter which functions in plant cells to cause the production of an RNA sequence,
(ii) a structural nucleic acid molecule, wherein said structural nucleic acid molecule comprises a nucleic acid sequence, wherein said nucleic acid sequence
(A) hybridizes under stringent conditions to a nucleic acid sequence selected from the group consisting of SEQ ID NO: 1 through SEQ ID NO:48629, a complement thereof or a fragment of either; or
(B) exhibits an 90% or greater identity to a nucleic acid sequence selected from the group consisting of SEQ ID NO: 1 through SEQ ID NO:48629, a complement thereof or a fragment of either,
which is linked to
(iii) a 3′ non-translated sequence which functions in plant cells to cause the addition of polyadenylated nucleotides to the 3′ end of RNA sequence,
(b) obtaining a transformed plant cell with said structural nucleic acid molecule that encodes one or more proteins, wherein said structural nucleic acid molecule is transcribed and results in expression of said protein(s); and
(c) regenerating from said transformed plant cell a genetically transformed plant.

25. A method for reducing expression of a protein in a plant cell comprising growing a transformed plant cell containing a nucleic acid molecule wherein the non-transcribed strand of said nucleic acid molecule encodes a protein or fragment thereof, and wherein the transcribed strand of said nucleic acid molecule is complementary to a nucleic acid molecule comprising a nucleic acid sequence selected from the group consisting of SEQ ID NO: 1 through SEQ ID NO:48629, a complement thereof or a fragment of either, and whereby said transcribed strand reduces or depresses expression of said protein.

26. A method for increasing expression of a protein in a plant cell comprising growing a transformed plant cell containing a nucleic acid molecule that encodes a protein or fragment thereof, wherein said nucleic acid molecule comprises a nucleic acid sequence selected from the group consisting of SEQ ID NO:1 through SEQ ID NO:48629, a complement thereof or a fragment of either, and whereby said nucleic acid molecule increases expression of said protein.

27. A method of producing a plant containing reduced levels of a protein comprising:
(a) transforming a plant cell with a nucleic acid molecule comprising a nucleic acid sequence selected from the group consisting of SEQ ID NO: 1 through SEQ ID NO:48629, a complement thereof or a fragment of either, wherein said nucleic acid molecule is transcribed and results in co-suppression of endogenous protein synthesis activity, and
(b) regenerating said plant comprising said plant cell and producing subsequent progeny from said plant.

28. A method of growing a transgenic plant comprising
(a) planting a transformed seed comprising a nucleic acid sequence selected from the group consisting of SEQ ID NO: 1 through SEQ ID NO:48629, a complement thereof or a fragment of either, and
(b) growing a plant from said seed.
